United States Patent Application Publication US 2004/0029129 A1 - sequence listing, part 13

SEQ ID NO: 33458 - DNA, 516 bp, Pseudomonas syringae
atgatcggcccctttgcgtacggctggaaggtactggcaatagtcgccgtgctgatcagttgctgggtgtggggattcaaccacggctccaacaaggtcgaggcggactggcagcagaagtgggacagggaattgaaaacccaatcgcaggccgtagccagcaccactaccgaataccgaaccgaagagcaacgccgccagaaagcggccaaccaggtggcaaatgatgcgagacaagaacaggccgttgcgattgctgatgctgttgtcgctgacgcttctggcgaccggctgcgcagtgaagcaggaaagctggcagcctcagccagttgcgtgcccagcgatcccggaattgccgatcgaggcaagaatgccgcccgtgccgcaatggtgctctccgacttgctcagccgggctgactcgcgagcgggagagctggcgcgccacgctgaccgactcacagtagcgctacaggcctgcaatgcttcttatataggtgtcactggctcagcccat

SEQ ID NO: 33459 - DNA, 1344 bp, Pseudomonas syringae
atgaacccgcgtctggctgccgccaaggcactggctgccgtgctcagcggcaaggcgtcgttgaacagttcgttgcccacgcaactggacaaggtcgagctacgtgatcgcggcctgacccaggacctggctttcgggacggcgcgctggcagccgcgcctgtcggcactggccgccaaactgttacaaaagcccttcaaggccgccgatgctgacgtcgaagcgttgctgctggtggggctttatcagctgttttacagccgcatccctgcgcatgcggccattggtgaaactgttggctgcgccgacaagctgaaaaagccgtgggccaaaggcctgctcaatgccgtgctgcgcaacgctcaacgcgatggcgaagcgctgctgatcgaactggaacacgacccggtggtgcgcaccgcccacccacgctggctgcaaaaagccctgaaagccgcatggccggagcagtgggaagccatttgcgcagccaacaacgcgcacccgccgatgattttgcgggtcaaccgccgtcaccagcgtcgcgatcagtaccttgagctgctcaagactgccgggctggaagcgagcgcgtgcacgttcagtcaggacggtatcgtgctggccgagccgtgcgatgtgcgctcgctgcccggttttgccgaaggctggatcagtgtgcaggacgaagccgcgcaactggccgccgacctgctggagctggcccccggccaacgcgtgctcgacgcctgctgtgcgccgggtggcaagacctgccatttgctggaggtgcagccgcaactgagcggcgtggtggcggtagacctggaagccaagcgcctggtgcgcgtgcgtgaaaaccttgagcgcctgggtctggacgctgaactgatcgccgccgatgcccgcgagacagcgcagtggtgggatggcaagccgttccagcgcattctgctcgacgccccgtgctcggccaccggcgtgatccgtcgccacccggacatcaaactgacccgccaactggacgacatcgccgcgctcgccaccttgcagggcgaactgctcgacgcgttgtggcccacgctgcaagtaggcggcatgctggtgtacgcgacctgctcgacactgccaactgaaaacaccgacgtcatcgaggcgtttctggcccgcacctctggggccagagaactggatatcgccgggcaggccgggcagccaccggccggcataaagcaaccgcacggtcgtcagttgttggcccaacaaggtggccacgatggtttctactacgccaaactgatcaagatcgcagctcaagatcgcggcggcgcaggagtaaccagt

SEQ ID NO: 33460 - DNA, 1371 bp, Pseudomonas syringae
ttgaagatcatcattctgggtgcgggtcaggtgggcggtacactggccgagcatctggcgggcgaagccaacgacatcaccgtggtcgacaccgacggcgaccgcttgcgcgatctgggtgatcgcctggacatccgcaccgtgcagggcaaaggctcgtatccggcggtgctgcgccaggcaggtgccgacgacgctgacatgctggtcgccgtgaccagcagcgacgaagccaacatgatcgcctgccaggtggcccacacgctgtttcacacaccgaccaagatcgcgcgcatccgtgaagcggcgtacctgacccgcgcaggcctgttcgacaagaacgcgattccggtcgacgtgctgatcagcccggaacaggtggtcaccaattacatcaagcgcctgatcgagtaccccggcgcgcttcaggtaatcgatttcgccgaaggcaaggcgcagctggtcgcggtcaaagcctattacggcggggcgcttgtcggtcagcaactgcgccagctgcgcgcgcacatgcctaacgtcgatacccgtatcgcagcgatctaccggcgcgaccgggcgatcctgcccaaaggcgatacggtcatcgaagccgacgacgaggtatttttcatcgccgccagggctgatattcgtgcggtgatgggcgagctgaggcgtctggacgagaactacaaacgcatcgtcatcgccggcggcggcaacatcggcgagcgtctggccgaagccatcgaaagccgttatcaggtcaagatcatcgaagtgaacccggcgcgctgccgctacctgtcggagaacctcgacagtaccgtggtgctgcagggtagctcatcggaccgcgacctgctgctggaagaaaacatcggtaacaccgacctgtttctggcgctgaccaacgacgacgaagccaacatcatgtcgtcactgctggccaaacggctgggcgcacgcaaggtgatgacgctgatcaacaacccggcctacgttgatctggtccagggcggcgagattgacgtcgcggtcagcccgcaactggcaaccatcggcacattgctggcccacgtacgccggggcgatatcgtcagcgttcactctctaaggcgtggcgctgccgaggccattgagatcgttgcccacggcgacccgaaatccagcaaggtggtcggtcgcgccatcaaggacatcaacctgccgaccggtacggcgattggcgcgatcatccgcgacgaacaggtcctcatcgcccacgacgtcaccctgatcgaatccggcgaccacgtgatcatgtttcttgtggataaaaagtgcattcgcgatgtggagcggctgtttcaggtaggcctgagctttttc

SEQ ID NO: 33461 - DNA, 1065 bp, Pseudomonas syringae
atgtacaaggggtcttcgttgcaccaaaagcagcgtgtcatagggctcccaggagtggacgtgcggccgaatcgggtatactcccgctctttgaatcgcagcccagcacaggtgaaatttgtgagccagcctacgccagccgtgcgtaccttccaagacttgatcctcgccctccagcaatactgggcagaacaaggttgcgtggtacttcagccctacgatatggaagtaggcgccggcacgttccacaccgccacgtttctgcgcgccgtaggcccggaaacctggaatgccgcttacgtacagccaagccgtcggccgactgacggccgttacggcgaaaacccgaaccgcctgcagcattactaccagtttcaggtgattctcaagcccaacccggacaacttccaggaactgtacctgggctcgctcaagcacatcggcctcgatccgctggtgcatgacgtgcgttttgtcgaagacaactgggaatcgccgacgctgggcgcctggggtctgggctgggaaatctggctcaacggcatggaagtctcgcagttcacctacttccagcaggtcggcggcatcgagtgctacccggtgactggcgaaatcacctacggcctcgagcgtctggcgatgtaccagcagggcgtggactcggtctacgacctggtgtgggctgacggcccgttcggcaaagtgacctacggcgacgtgttccaccagaacgaggtggagcagtccacctacaacttcgaacacgccaacgtcgacaaactgttcgaactgttcgacttctacgaaagcgaagctgcacgcctgatcgagctggagctgccgttgccaggctacgaaatggtcctcaaggcttcgcacaccttcaacctgctggatgcccgtcgcgcgatttccgtgaccgcgcgtcagcaatacatcctgcgcgtacgcacactggcccgctcggtggctcaggcctacctgcaagcccgggcccgtctcggcttcccgatggcgccgcccgatctacgcgatgaagtgttggccaagctggaggcagcgcaa

SEQ ID NO: 33462 - DNA, 768 bp, Pseudomonas syringae
atgtcgatcatgcaggcaatcaggaccttcatcttttacctgttgctgggcaccagctcgctgctgtggtgcaccttgagctttttcattgcgccgtttctgccgttcaaggcccgctatcgcttcatcaatgtctactggtgccgttgcgcactgtggctgacccgggtgttcctcaacatcaaggtcgaagtaagcggcgcagacaacgttccgaaaacgccgtgcgtgatcatctccaaccatcaaagcacgtgggaaaccttctttctgtcggcgtatttcgagccactgagccaggtcctcaagcgtgagttgctgtacgtgcccttcttcggctgggcgatggccatgctgcgccccatcgccatcgaccgtgataacccgaaggctgcactcagggaaatcgccaagaagggcgacgaactgctcaaggacggcgtctgggtgctgatcttcccggaaggcacgcgtgtgccttacggccaggttggcaagttctcgcgtggcggcacggcacttgcggtcaacgccgaccttccggttctgcctattgctcacaacgcaggcaaatactggcctcgcgatggctgggggaagaagccaggcactattcaggtagtcatcggcgaaccgatgtacgccgaaggcaccggcccccgcgccatcgcagcgttgaacgagcgcgttcagacctggaatgaggatactcaacgcgcattgggctcaccggttgcaccggcgacaagcaccgaaaaggtcccggcg

SEQ ID NO: 33463 - DNA, 693 bp, Pseudomonas syringae
atggctaagctgaccaagcgtcaaaaggcaatcgccgaaaagattgaagctggcaagtcctacaactttgtagacgccgctgctctgctgaccgagctgtcgactgtcaagttcagcgagtctatcgacgtcgctgtcaacctgggtgttgatcctcgtaaatctgatcaggttgttcgtagcgctaccgtactgccgcacggcaccggtaaaactgtacgcgttgcagttttcacccaggggcctgctgctgaagctgctctggctgctggtgctgatcgcgttggtatggacgatctggctgctgaaatgaaagccggcgatctgaactacgacgtcgtcatcgcttcccctgacgcaatgcgcgttgtgggtcagctgggtcaggttctcggtcctcgtggcctgatgcctaacccaaaagtcggcactgttactcctgacgtggctaccgctgtcaagaacgccaaggctggtcaggttcgttatcgcaccgacaaaaacggcattatccacacttccgttggcaaggtcggtttcgacgcagtcaagctgaaggaaaacgttgaagccctgatcgctgatctgaagcgtatcaagcctgcttcctcgaaaggcatttacgtcaagcgcatcaccctgagcaccactatgggtccgggcctggtcatcgaccaaggttcgctggaagcg

SEQ ID NO: 33464 - DNA, 1101 bp, Pseudomonas syringae
atgcatttcaccattcaacgcgaagccctgttgaaacccctgcaattggtcgccggcgtggtagaacgccgccagaccttgccggttctttccaatgtgcttctggtcgtgcaaggccagcagctgtcgctgaccggtactgacctggaagtcgagctggttggccgtgttcagctggaagagcctgccgaacctggggaaatcaccgttcccgcgcgcaagcttatggacatttgcaaaagcctgcccaatgatgcgctgatcgacatcaagcttgatgactcgaaactgatcgtgaaggcaggtcgcagccggttcacgttgtccacgctgcctgccaacgatttcccgacggtggaagaaggccccggctcgctgacgttcaatctggtgcaaagcaaactgcgtcgcctgatcgagcgcaccagctttgcgatggctcagcaggatgttcgctattaccttaacggcatgctgcttgaagtcagtgccggaatcttgcgtgcagtggctaccgatggccaccgtctggcaatgtgctcgatgtcagccgatatcgaacacgccgaccgtcatcaggtcatcgtgcctcgtaaaggtattctggagatggcgcgtttgctgaccgagcaggacggcatggtcagcatcgtgctgggtcagcatcacatccgcgccaccaccggtgaatttacctttacctcgaaactggtcgatggcaagttcccggattacgagcgtgtgttgcccaagggtggcgacaagctggtactgggcgatcgtcagtccctgcgtgaagcgttcagccgcaccgcgattctgtccaacgagaagtaccgtggcattcgtctgcaactggctaacggccaactgaaaattcaggccaacaatcctgagcaggaagaggcagaagaagaaatcggcgtcgagtacaacggtgaggcgttggagatcggtttcaacgtgagctacttgctcgacgtgctgagcgtcatgaccaccgaacaggttcgcctgattctctctgactccaacagcagcgctctggtgcaagagtcggataacgacgattccgcctacgttgtcatgccgatgcgtctg

SEQ ID NO: 33465 - DNA, 1533 bp, Pseudomonas syringae
gtgtcagtggaactttggcagcagtgcgtggagcttttgcgcgacgagctgccggcccagcaattcaacacttggatccgtccgctacaggtcgaagccgaaggcgacgagttgcgtgtgtacgcacccaaccgctttgttctcgattgggtcaatgaaaaatacctcggccgtttgcttgagcttctcggcgaacgtggtcaaggcatggcgcccgctctttccttattaataggaagcaagcgcagctcagcgccgcgtgccgcaccgaatgcgccattggctgctgcagcgtcccaggcgttgtctggcaattcggtcagcagcgtttcagcgtctgcaccggccatggccgttcctgcaccgatggttgcagcgcctgtgcctgtgcataacgtcgccactcacgacgagccgtcacgcgacagcttcgatccgatggcaggcgccagctcgcagcaggcgccggcccgtgccgagcaacgtacggtgcaggtcgaaggtgcgctcaagcacaccagttacctgaaccgcacattcaccttcgagaatttcgtcgagggtaaatccaaccagctggcacgcgctgccgcctggcaggttgccgacaaccccaagcacggctacaacccgctgttcctttatggtggcgtgggccttggtaaaactcacttgatgcacgctgtgggtaatcatctgctgaagaagaacccgaacgccaaggttgtctacctgcattcggagcgctttgtagcggacatggtcaaggccttgcagctcaacgcaatcaacgagttcaagcggttctaccgctcggttgatgcgttgctgatcgatgacattcagtttttcgctcgcaaggaacgttcacaggaagagtttttccacacgttcaacgcgctgctggaaggtggacagcaggtcattctgaccagcgaccgctatccaaaggaaatcgaaggcctggaagagcgactcaagtcccgcttcggctgggggctgaccgtcgcggtcgagccaccggagcttgagacacgcgtagcgatcctcatgaagaaagcagatcaggccaaggtcgatctgcctcacgatgcggcgtttttcatcgcccagcgtatccgttccaacgtccgtgaactcgagggcgcgctcaagcgtgtcattgcccactcgcacttcatgggtcgcgatatcaccatcgagctgattcgcgagtcgctgaaagatttgctggcgttgcaagacaagctggtgagtgtggataacattcagcgaaccgtggccgagtactacaagatcaagatctccgacctgctgtccaagcgtcgttcccgttccgtagcccgaccgcgtcaagtggccatggcactttccaaggaactcaccaaccacagcctgccggaaatcggcgatgtgtttggtggccgggaccatacgactgttctgcacgcgtgccggaagatcaacgaactcaaggaatccgacgcggatatccgtgaggactacaagaacctgctgcgcactctgactacg

SEQ ID NO: 33466 - DNA, 1686 bp, Pseudomonas syringae
atggatattaaacgcacgatcctgatcgttgccctggcaatcgtgacctacgtcggggtcctgaaatggaaccaagactatggtcaggctgccatgccaacccagaatgttgcagccagcaacaccgcaccgggtattccggatacggctgctggtaataatggttctgcaagtgccgacgttccgagcgctactggcaatactaccagtgcagcgcctcttgaaactccggccgtagccagcaaagacctcatccacgtcaagaccgacgtgcttgatctggcgatcgacccggtaggtggtgacgtcgttcagcttcgtttgcctctgtacccgcgtcgtcaggatcgtcctgacgtgcctttccagctgttcgataacggcggcgagcgtacttttctcgcacagagcggcctgaccgggaccaatggtcctgatgctcgcgcctccggtcgtccggtttattcctccgcgcaaaagagttatcaactggctgatggccaggactcgatggtcgtggagctgaaattctcggaaaacggcgtcaactacatcaagcgcttcacattcaagcgcggtctgtacgacctggtcatgacttacgttgtggataaccagagcgcgcaaccctgggccggtaatctgttcgcgcaattgaagcgtgatgccagctccgatccttcgtcgaccactgcaaccggcacagccacctacctgggtgctgcgctctggactgcggccgagccgtacaaaaaagtgtcgatgaaagatatcgacaagggccagatcaaggaaaacgttcagggcggctgggttgcatggctgcagcactacttcgtgacggcgtggattcctgatcataacgtgaccaacgccgttcagacccgcaaagacagccaaggcaactacatcattggtttcaccagcccgacactgtcggttgcgccaggcgcacaaggcgaaaccactgccacgttgtacgcaggtccgaaaagccaggcggtgctcaaagagttatccccaggtctggagctgacagtcgattacggtttcctgtggttcattgcccagcctatcttctggctgctgcaacacatccacgcgattctgggcaactggggctggtcgatcatcgtcctgaccatgttgatcaaaggcctgttcttcccgctgtccgcagccagctacaagtcgatggcacgcatgcgcgccgtggctccaaagcttgcagtgctgaaggaacaacatggcgatgatcgtcagaagatgtcccaagcaatgatggagctgtacaagaaagagaagatcaacccactgggtggatgcttgccgattcttgtacaaatgccggttttcctctcgctgtactgggtactcctggaaagcgtggaaatgcgtcaggcgccgtggatcctgtggataactgatctgtcgatcaaagacccgttctttatcctgccgatcatcatgggcgcgaccatgttcatccagcagcgtttgaaccctactccgccggacccgatgcaggccaaggtcatgaaaatgatgccgatcattttcacgttcttcttcctgtggttccctgccggtctggttctgtactgggttgtgaacaacaccctgtcgatcgcacagcaggcgtacatcactcgcaagatcggagcagctaccaagaaagcagctgcc

SEQ ID NO: 33467 - DNA, 594 bp, Pseudomonas syringae
atgatgaacctcacccaactcgtactggccagccacaacggcggcaaactcaaagaacttcaggccatgctcggcggcagcgtgacgctgcgctcggtcagcgagttcagcctggtggagccggaagagaccggcctgtcgttcgtcgagaacgcgatcctcaaggcgcgcaatgcctcacgcctgtccggcctgcccgcgctggccgatgactcggggctggcggtggactttctcggcggcgcgcctggcatctattcggcacgctacgccgatggccagggcgacgcggccaacaacgccaagctgctggaggcgctcaaagacgtgccggacgagcagcgtggcgcgcagttcgtttgcgtactggcgctggtgcgtcacgccgacgacccgttgccgatcctctgcgaaggcctgtggcatgggcgcatcctgcacgctgccagcggcgagtacggttttggctacgatccgctgttctgggtgccggagcgcaactgctccagcgccgaactcggcccgagcgagaaaaaccagctcagccatcgcgcccgagccatggtcctgttgcgccaacgcctgggtctgcaa

SEQ ID NO: 33468 - DNA, 1767 bp, Pseudomonas syringae
atgaaggacgaagatttcaagaaaccgatcatcgccatcgccaactccttcacccagttcgtaccgggccacgtgcacctcaaggacatgggccaactggtcgcccgtgaagtcgaacgcgccggtggcgtggccaaggaattcaacaccattgcggtcgatgacggcattgcgatgggccatgacggcatgctgtattcgctgccaagccgcgagatcatcgccgactcggtcgaatatatggtcaacgcgcattgcgccgacgccatcgtgtgcatttccaactgcgacaagatcacccccggcatgctgatggcggcactgcgcctcaatatcccggtggttttcgtgtctggcgggccgatggaagcgggcaagaccaaactggccagccacggcctggacctggtcgatgcaatggtgatcgctgccgactccaccgccagcgacgaaaaagttgccgaatacgagcgcagcgcctgcccaacgtgcggttcgtgctcgggcatgttcaccgccaactcgatgaactgcctgaccgaagcgctgggcctggcactgccgggcaacggctctgcactggccacccacagcgaccgcgagcaactgttcctgcaggctggccgcaccatcgttgacctgtgccgacagtactacaaggaaaacgactattcggtgttgccacgcaacatcgccaacttcaaggcgttcgaaaacgccatgacgctggacatcgccatgggcggttcgaccaacaccatcctgcacttgctggcggctgctcaggaagccgagatcgacttcgacctgcaccacatcgaccgtctgtcacgcaaggttccacagctgtgcaaggtcgcgcctaacatccagaagtaccacatggaagacgtacaccgcgcgggcgggatcttcagcatcctcggcgagctggcacgcggcggcttgctgcacaccgacctgccgaccgtgcacagcaaaaccatggccgaaggcatcgccaaatgggacatcacccagactgacgacgaagcggtgcacaccttcttcaaggcaggcccggccggcatcccgacgcagaccgcgttcagccagtcgacccgttgggaaagcctggacgacgaccgtgaaaacggctgcatccgcagcgtcgagcatgcctattctcaggaaggcggcctggccgtgctgtacggcaacatcgcgctggatggctgcgtggtgaaaaccgccggtgtcgatgagtcgatccacgtctttgaaggcaacgcgaagatcttcgaaagccaggacagcgccgtgcgcgggattcttgctgacgaagtgaaggcgggcgacatcgtcatcattcgttacgaaggcccgaaaggcggtccgggcatgcaggaaatgctctacccgacctcgtacctgaagtccaaagggctgggtaaagactgtgcgctgctcaccgatggccgtttctcgggcggtacctctggcctgtccatcggccacgcctcgccggaagcagcagcgggtggtgcgattggtctggtgcgcgatggtgacaaagtgctgatcgacatcccgaaccgctcgatcaacctgatgatcgacgacgccgagatggccgaacgtcgcgccgaacaggacaagaaaggctggaaaccggtcgagtcgcgtccacgtaaagtgaccaccgcactcaaggcctacgccctgctggcgaccagcgccgacaagggcgctgtgcgtgacaaggcgttgctggacaaattggtgcct

SEQ ID NO: 33469 - DNA, 1206 bp, Pseudomonas syringae
atggctgaccaaggttcgccgcgccgctttgcgcgcatagatcgactccccccttacgtgttcaacatcaccgccgagctgaagatggctgcgcgccgtcgtggtgaagacatcatcgacctgagcatgggcaaccccgacggggccacgccgccgcacatcgtcgaaaaactggtcaccgtcgcccagcgcgaagacacccacggttactccacctcacgcggcattccgcgcctgcgccgggccatttccaactggtacaagaaacgctacgaggtcgatatcgaccctgaaagcgaagccatcgtgaccatcggctcaaaggaaggcctggcgcacttgatgctcgccacgctggatcagggcgataccgtgctggtacccaaccccagctacccgattcacatctacggtgccgtgattgccggcgcccaggtgcggtcggtgccactggtgccgggcgtggacttcttcgccgagctggaaaaggccatccgcggctcgattcccaagccgaaaatgatgattctcggcttcccgtcgaacccgaccgcgcagtgcgtggagctggatttcttcgagcgcgtggtggcgctggccaagcaatacgacgtgctggtgattcacgacctggcgtacgccgacatcgtctacgacggctggaaagccccgtcgatcatgcaggtgccgggcgccaaggacattgccgtcgagtttttcaccctgtccaagagctacaacatggcgggctggcggatcggcttcatggttggtaaccccgagctggtgaacgcactggcgcggatcaagagttaccacgactacggcaccttcacgccgttgcaggtcgccgccattgccgcgctggaaggcgatcagcagtgcgtgctcgacatcgccgagcagtatcgccagcgccgcaacgtactggtcaaaggcctgcacgaactgggctggatggtcgaaaaccccaaggcgtcgatgtatgtctgggcgaagatccccgaagcctacgcgcacttgggttcgctggagttcgccaagaagctgttggccgaagccaaggtctgtgtttcgccgggcatcggttttggtgaatacggcgacgatcacgtgcgtttcgcgctgatcgagaatcaggaccgcatccgccaggccgtgcgcgggatccgcagcatgttcagggccgacgacaagctcaagtcc

SEQ ID NO: 33470 - DNA, 1734 bp, Pseudomonas syringae
atgaaagacaccattcgccagctgattcaacaagccctgacccgtctcgtcaccgagggcgtcttgccagaagggctgacgccggcgatccaggtggaaaacgcccgtgacaagacccacggcgacttcgccagcaatatcgcgatgatgctcgccaagcctgccggcatgaagccccgcgatctggctgaaaagctgatcgccgcgctgcctgccgacgagcaggtcagcaaggtcgaaattgccgggccgggctttctgaattttttccagaacacggccgcgctggcttcgcgcctcgacgccgccctgtccgacccgcaactgtcggtccgcaaggctggcgcagcccagcgtgtggtggtcgatctgtcggcacccaatctggccaaggaaatgcacgtagggcacctgcgctcgaccatcattggcgacggcgtggccaacgttctcgagtttctcggtgacacggtcattcgccagaaccatgtcggcgactggggcacccagttcggcatgctgctggcctatctgcaggaaaaaccggcgaccagcgacgagctgtcagacctggaaaacttctaccgcgccgccaaacaacgctttgacgagtcagaagagttcgccgagcgggctcgcgggctggtggtcaagctgcaagccggcgatgccgaatgcctgacgctgtggacgcgcttcaaggatatttcgctgtcgcactgccaacaaacctacgagcgtctcaacgtcaaactgaccccggccgatgtcatgggcgaaagtgcctataacgatgacctggccaatgtcgtcaacgacctgaaagccgctggcctgctggttgaaagcaatggcgcacagtgcgtgttcctcgaagaatttcgcaccgccgatgacacgcccctgccggtgatcgtgcaaaaggccggtggcggttatctgtacgccaccaccgacctggccgccattcgctaccgcagcaaagtgctcaaggccgaccgcgcactgtattttgtcgaccagcgtcaggcgctgcacttccagcaggtgtttgaagtggctcgccgcgccggtttcgtccacgaaggcatgcaactggaacacatgggttttggcactatgaacggggccgacggccgtccgttcaagacccgcgacggcggcacggtcaagctcatcgacctgctcgatgaagcccaagagcgcgcctacacgctggtcaaggaaaagaacccgcaagtcgccgaggccgagctgcgcagcattgccaaggccgtgggcatcagcgcggtgaaatacgccgacctgtccaagcaccgcgccagcgattacagcttcaacttcgatcagatgctgagctttgaaggcaatactgcgccttacctgttgtatgcctacacccgtgtagccggcgtattccgcaagctgggcacgcctttcgacgccagcaaagggcacatcgtccttgaggcgccgcaggagcaggaactggctgcacgcttggcgcagttcaacgaaacactgaataacgtcgcagaaaaaggcacaccgcacgtactttgtgcttacctgtatgaccttgcgggcctgttttcgagcttttacgaaaactgcccgatccttggtgcggaaaatcccgatcagcagcagagccgtctgcgtctggctgccctgaccggccgcaccctcaagcaaggcctggatctgttgggtctggaaactctggagcgtatg

SEQ ID NO: 33471 - DNA, 576 bp, Pseudomonas syringae
atgagtttgcatcagggcattttcgccccgcagtgtggagactctcccttgaccaccatcgtttcagtgcgccgccacggtaaagtcgtcatggccggcgacggccaggtttccctgggcaacaccgtcatgaaaggcaacgccaagaaggtgcgccgcctgtatcacggtgaagtgatcgccggatttgctggcgcgaccgccgatgccttcacgctgttcgagcgttttgaagcccaactggaaaaacaccaggggcatctggttcgcgcagccgtcgagctggccaaggactggcgtaccgaccgctcgctgagccggcttgaggccatgctggcagttgccaacaaggacgcctccttgatcatcaccggcaacggcgacgtggtagagcccgaagatggcctgatcgcgatgggttccggcggcgcattcgctcaggccgctgcccgcgccctgttgctcaagactgatctttcagcacgcgaaatcgccgagacctctttgcacatcgctggcgatatctgcgtgttcaccaaccacaacatcaccattgaggagcaggacctcgccgat

SEQ ID NO: 33472 - DNA, 576 bp, Pseudomonas syringae
atgttgaagaagtctctcgccgctctggctctgggtaccgcactgttgtctgctggccaggccatggctgccgactacgttatcgacaaggaaggccaacacgcattcgttgacttcaagatcagccacttgggctacagcttcatccacggtacattcaaggactgggacggcacgttcagctttgacgctgccaagcctgaagccagcaaaatcaatgtcgagctgaaaaccgccagcctgtttaccaaccacgctgaacgcgacaagcacatctccagcaaagacttcctggacgttgccaaataccctgaagcgaagttcgtctctaccgctgtcaaatcgaccggcgagaaaactgctgatgtgaccggcgacctgaccctgcacggcgtgaccaagcccatcgtgatcaaggcaaccttcaacggcgaaggcaaggacccgtggggcggctaccgtgccggcttcaacggtacttcgacgctgaacctgaacgacttcggcatcaaaggccctggcccgacgtcgcagaccctggacctggacatcaccttcgaaggcgtacagaagaag

SEQ ID NO: 33473 - DNA, 1443 bp, Pseudomonas syringae
atgcgcttgtctgaactcaagaacgcgggacgcacccccgagttgccgatgagcctgacgctggccgatgcggccggcccggccaagttgcaattgctgagcttgctgcgcgtgttgccggggcagcgttatgtgggggccggtgtgtggcgaggcagaaccgtgctggcaaaactgctggttggcgacaaggccgcccggcactttcagcgtgaactggccggggtgcgtctgcttgccgagcaaggcttgaccacaccgctgttgctggccgacggcttgcaggaaggcgaaggtggctggctgttgttcgagtttctggagcaggcgtcaagtttgggcgatgcctggactgaggttgaggaactgccgcctctggccgacgagcagcaagcggtgctcggcgaggcgctgaccgccatcgctcagcagcacgccaaaggcttgtggcaggaagatctgcacctggacaatctgctgcgtcataaggggcagctgtacctgattgatggggcgggtattcgcgccgagcaggccggcaagccgttgtcgcggcaaaaggtgctggaaaacctcggggtattctttgctcagttgcccaaggctttcgagccgttcacggaagagctgctggtgcattatctgctgagcaacggcgaacatggtttgccgatggaggcgctgcaacggcagatcgacaaggttcgcagctggcggctcaaggattttctcggcaagaccgtgcgcgattgcagcctgttcagcgtcgaggacaccgcatcggtgtttcgcgccattcgccgcaacgaagaagcggctatgctgccggtgcttgagcaggctgacgccttgctcggcaaagggcacttgtacaagaccggtggcgcggcgagcgtggggcgggtcgaggccagcggtcgcacgctggtcatcaaacgttacaacatcaagaatttcagccactggctcaagcgcttctggcgcccgagtcgcgcctggcattcgtggcgcgaaggcaatcgcctgatgtttctcggcatcgccacgcccaaaccgctggcggttcaggagcggcgcttccttggtttgcgcagcaaagcctggctggtcaccgagtttatcgacgggccggacatcatcgagcgcttcgcgccctatgtcgaaagcggtgatgcacctgaggccgagttgctggccctggacacgctgttcgcacaacttatccaggcgcgcatcagccatggcgacttcaaagggcacaacctgttctggcacaaggaccgctgggcgatgatcgacctggatgccatgcaacagcacagttcgcaatcgtcctttgcagcagcctacgcgcgtgaccgggcgcgcttcatgcgtaactggccagtgcacagcgcgctgcaccagaagctggagcagcgcttgccgaagatcgagccggcc

SEQ ID NO: 33474 - DNA, 1062 bp, Pseudomonas syringae
ttgcgggtactgctgatcaagacgtcttcactgggtgatgtgatccatgccttgccggcgctgaccgatgcggcccgggccttgcccggcatccgctttgactgggtggtcgaggaaggtttcgccgaaattcccgcctggcatccggcggtcgatgcggtcatcccggtcgcgatccgccgctggcgcaaaaacctctggcaaaccttccgctcaggcgaatggcggcgcttcaaggcgcgtgtccgcgagcagcgttatgatctggtgatcgacgctcaaggcctgttcaagagtgcctggctgacgcgctacattgatgcgccggtggcgggtctggaccgcgattcggcacgcgagccggtggccagtcgcttttatgaccgtgccttgccggtggcacgcgggcagcatgccgtcgaacggctgcgtcagttgtttgcccaggcgctgggctatccgctgccgtccggtatgggcgattacgggctcaagccactggcggctctggacgacacgttgcaggcaccgtttgtgctgtttttgcacggtacaacgtgggacaccaagcattggcccgagctttactggcgtcaactggccgaattgatggtcgcacgtggcttgcatgtgcagttgccgtggggcaatccgaccgaaaaagcgcgtgccgaacgcatcgccgaaggtctggagagcgcccatgtgctgccgaaactgaacctggcgggcgtcgcgcgggtactggccagcgcgcaggcctgcgtagcggtcgataccggcatcgggcacctggccgcagcgctggatgtgccgactgtctctctcttcggcccgaccaatccgggcctgaccggggcctacggcaagtcgcaggtgcatctggccagcgactatccgggctgcacgccgtgcctgcaaaagaaatgcacctaccaaccgagcgccgacgatcagcgccggttcgaccttaagcgcgagtggccgttgtgcttcactcgcttgaatcccgagcgagtagcgagccaactgggcgcgctgttgctggcaaaggaacctggc

SEQ ID NO: 33475 - DNA, 768 bp, Pseudomonas syringae
atgaacgatcagcgcaaaggcagcgatgccgaacctacgactcacttcggttacaaaaatgtaccggaaagccagaaggcagaaaaagtcgctgaggttttccattcggtcgcggccaagtacgacctcatgaacgacttgctgtccggtggcatgcaccgcctgtggaagcgtttcgccattgagctgtccggcgtgcgcaccggcaaccgcgtgctcgacatcgctggcggcacaggtgatctgacccgcaaattctcgaacctggtcggcccgaccgggcaagtggttctggctgacatcaacgcctccatgctcaaggtcggtcgcgaccgcctgctggacctcggtgtgtcgggcaacgtcgagtttgtccaggccgacgccgaaaaactgccgtttccagacaaccatttcgactgcgtgaccatcgctttcggcctgcgcaacgtgacgcacaaggaagacgctctgcgctccatgctgcgcgtgctcaagccgggtggccgcttgctggtgctggagttctccaagccgaccaacaagctcatgtccaaggcttacgatgcttactcgttcgcgttcatgccgctgatgggcaaactggtcaccaatgattcggaaagctaccgctatctggccgaatctatccgcatgcaccccaatcaggaaaccctcaagtcgatgatggtcgacgccggtttcgaccgcgtgacctatcacaacatgacggcgggtgtcgtcgccctgcaccgcggtatcaaaccc

SEQ ID NO: 33476 - DNA, 1404 bp, Pseudomonas syringae
atgggcctcaatgaccagtggatgcagcgtgacctcaaggtcctgtggcacccctgcacccagatgaaagaccacgaaaatctgccgttgatacccatcaagcgtggcgaaggcgtgtggcttgaagacttcgaaggcaagcgttatctggacgctgtcagctcctggtgggtcaacgtattcggccatgccaacccgcgcatcaaccagcgcatcaaggaccaagtcgaccagctggagcacgtgattctcgccggtttcagccatcagccggtgatcgagctgtccgagcggctggtcaagctcacaccggaaggtctgacgcgttgcttctatgccgacaacggttcttcgtgcatcgaagtcgcgttgaagatgagctttcactattggctcaatcgcggccagccggccaagaagcgtttcgtcaccctgaccaacagttaccacggcgaaaccatggcggcgatgtcggtcggtgacgtgccgctgtttactgaaacctacaaggcgctgctgctcgacaccatcaaggtgccaagccccgactgctatcaccgccccgatggcatgggctgggaagagcattcgcgcaacatgtttgcggccatggagcagaccctggccgagcatcacgccagcgtcgcagccgtgatcgtcgagccgctgattcagggcgcgggcggcatgcgcatgtatcacccgatctacctcaagctgctgcgcgaagcctgtgaccgctacggcgtgcacctgatccacgatgagatcgccgtgggcttcggccgtaccgggaccatgtttgcctgcgagcaggcgggtatccgcccggattttctgtgcctgtccaaggcgctgaccggtggctacctgccgctggcggcctgcgtgaccacagacgacgtgtacgacgcgttctacgacgactaccccacgctgcgcgccttcctgcattcgcacagttacaccggcaacccgctggcctgtgctgcggcgctggcgacgctggatattttcgagcaggacaacgtcatcgagaacaacaaggcgctggcgcagcgcatggcaacggcgacggcgcacctggtggatcacccgcatgtggcggaagtacgccagaccggcatggccatcgctatcgagatggttcaggacaaggccaccaagactgcctacccgtggcaggaacgccggggcatgaaggtctttcagcatgcgctggagcgtggcgcattgctgcggccgctaggcagcgtggtgtatttcctgccgccgtatgtgattacgccggagcagatcgactttctcgcagaagtggccactgaaggtattgatatcgcgacgcgcagcagcatcagtgtggcggtgcgcgagaattttcatccggatttcagggatccgggc

SEQ ID NO: 33477 - DNA, 717 bp, Pseudomonas syringae
atgagactgtcccgctttttcactgaaacgccgctgagcctgggcgagcacgaactgcctgaagcccaggcgcattacatcagccgtgtgctgcgcatgaccgagggcgatgccctgcaactgttcgatggctcaggccaggagtttagcggcacgctgctggaggtcggcaagaaacgcgtgcgtgtgcaactgactgaacgctttgccgggcaggttgaatcaggtttgcgcattcatctgggtcagggcttgtcacgtggcgagcgcatggactgggcgattcagaaggcgaccgagctgggcgtcagcgagatcacgccaattgtcagcgagcgttgcgaagtgcgcctcaaggacgagcgcgccgagaagcgccaggcgcactggcagcagatcgcaatcagcgcgtgcgagcaatgcggtcgctcggtggtgccggtcattcacccaccgatgccgctggccgactggatcaagctcaccgaggccgacctgaaactggtgctgcacccggtggccgaaccgctgaccagccatgccaaacccgccagcctggcctttctgatcggcccggaaggtggcttgaatgacgcagaagtcgatcaggcacaaaacgctggcttccacgccgcccgcctcggcccgagagtcctgcgcaccgaaaccgccccggtagttgcgctcagcgtggcgcagcagttgtggggcgatttc

SEQ ID NO: 33478 - DNA, 489 bp, Pseudomonas syringae
atggccatttatggcgcgtgtctggtgacgctgtacagcgtctcgacggtgtaccacagcgtcaaaggccgctcgaaatcgatcatgcagaaggtcgatcacttttcgatctacctgatgatcgctggcagttacacgccgttctgcctcgtgacactgcgcggtgcgtggggctggacgttgttcggtatcgtctgggggctggcgctgatcggcattttacaggagataaaaccccgttccgaagcgcgcatcatgtccatcgtgatctacgcggtgatgggctggatcgtgctggtggccgtgaaaccgttgatcgctgcgctcggcctggcgggcttcatctggctggcaggcggcggcgtgctgtacaccgtcggcatcctgttcttcgcctacgaccagatccgccactttcacggcatctggcacctgttcgtgattggcggcagcttgatgcacttcgtggcgatttgtttttatgtgctg

SEQ ID NO: 33479 - DNA, 2148 bp, Pseudomonas syringae
accaacattctggtgcgtggctggcgccgcctgaccggcaagagcaacccgcccaagccggatcacagcgatctgcctcgggatctgccgaagtctcgctggcgtaccgtcggttcgatccgccgctacattctgctgatcctcatgctgggtcagacgattgtggctggctcgtacatgaaaggcatcttgccgtatcagggctggtcgctggtttcgctggatgaaatcacccgtcagaccttcgtgcagaccgctttgcaggtcctgccttatgccttgcagaccagtattctgttgctgttcggcattctgttctgctgggtgtcggccggtttctggaccgcactgatgggctttctggaattgctcaccgggcgtgacaagtaccgcatctccggtgccagtgctggcaacgagccgattgaagccggtgcacgcaccgcgctggtcatgccgatctgcaacgaagacgtgccgcgtgttttcgcgggtttgcgtgcaacgttcgagtcggtagcggccacgggtaatctggaccgcttcgactttttcgtgctcagtgataccaacgagaccgatattgccgtcgccgagcaacaggcctggctggatgtgtgccgcgagaccaaaggttttggcagcatcttctatcgtcgtcgccgccgtcgcgtaaaacgtaaaagcggcaacctcgatgacttctgccgtcgctggggcggtgaataccgctacatggtcgtactcgacgccgacagcgtcatgagcggtgagtgtctgaccagcctggttcgcctgatggaagccacgccggacgccggtatcatccagaccgcgccacgtgcttcgggtatggacacgctgtatgcacgcatgcagcagtttgctacccgcgtctatggtccactgttcacggccggtctgcacttctggcagctgggtgaatcccactactggggtcacaacgcgatcattcgcatgaagccgttcatcgagcactgtgcgcttgcgccgttgcccggcaagggcgcgtttgccggtgcaattctgtcccacgacttcgttgaagctgcgctgatgcgccgtgccggctggggcgtatggattgcctacgacctgccgggcagttacgaagagttgccgcccaacctgctcgacgaactcaagcgtgaccgtcgctggtgccacggcaacctgatgaacttcaggctgtttctggtcaagggcatgcacccggttcaccgtgcggtgtttctgaccggcgtgatgtcatacctgtcggcaccgttgtggttcttcttccttgtgttgtccacggccctgttggcggtgaacaccctgatggagccgacctacttccttgagccgcgccagttgtacccgttgtggccacaatggcatccggaacgcgctgtagcgttgttctcgaccaccatcgttctgctgttcctgcctaaactgctcagcgttattctgatttgggccaagggcgcgaaaggcttcggtggcaagttcaaggttaccgtttcgatgctgctggaaatgctcttctcggtgctgctcgcaccggtgcgcatgttgttccatacacgcttcgtactggctgccttcctgggctgggccgcaacctggaactcgccgcaacgcgacgatgactccacgccgtggcttgaagcggtgaagcgtcacggtccgcagaccttgctgggcgcatgctgggcactgctggtgttctggttgaaccccagcttcctgtggtggcttgcgcctatcgtggtttcgttgatgctgtcgattccggtgtcggtgatttccagccgtaccaacctgggcctcaaggcgcgcgacgagaaattcttcctgattcctgaagaattcgagccgccccaagagctggtctcgaccgatcagtacacccacgagaaccgttggcatgcgctgaaacaaggctttattcgcgcggttgtcgatcctcggcagaatgctctggcttgcgcgttggccacttcgcgtcaccgtcaggcacagccgattgaagtcgtgcgtatggagcgtgttgatcacgctctcaaggtcggtccggcgaagctcgacaaccagcaccgtctgatgctgctgagcgacccggtcgcactgggtcgcttgcac

SEQ ID NO: 33480 - DNA, 1677 bp, Pseudomonas syringae
gtgagtgaacaggttctcctaaggagagacatagtgagtgagttaattcgcgtacccgacatcggcaacggtgaaggcgaagtcattgaattgatggtcaaggtcggtgatcgcatcgaagccgaccagagcgttctgacgcttgaatcggacaaggcgagcatggaaatccctgctcccaaggctggcgtcatcaaggccatgaaggtcaagctgggcgaccgcctgaaagaaggcgacgagctgttcgagctggaagtggaaggcgaagcctctgccgcgccggcacctgctgccgaacctgcagccgccgcggcccctgccgctgctgaaaaacctgccgaagccgcacccgctgctgccgagccagctccggctgccgccgccaccgttcaagacattcatgttccggacatcggttcgtcaggcaaggccaagatcatcgaactgatggtcaaggtcggtgacagcatcacggctgatcaatcgttgatcacccttgagtccgacaaggccagcatggagatcccgtctcctgccgcaggcgttatcgaaagcatcgaagtcaagctggaccaggaagtcggcaccggcgacctgatcctgaaactgaaagtcgcaggcgcagcgcctgctgctgcaccggcgcctgccgccagcgcaccggccgccgcaccggccaaggctgaagccgctgctccggccgctgctcctgcacctaaagccgaagctgcacccgctccggccgcaccggccaaagacggcgccaaggttcacgcaggcccggctgttcgtcagctggcacgcgagttcggcgtcgagctgagcgcagtcagcgccaccggcccgcacggtcgcgtactgaaagaagacgttcaggtttacgtcaaggccatgatgcagaaggccaaggaagctccagcaggcggcgcaagcggcggctcgggcatcccgccgattccggaagtcgatttcagccgttttggcgaaatcgaagaagtgccaatgactcgcctgatgcaactgggtgcgtcgggtctgcatcgcagctggctgaacatcccgcacgtcacgcaattcgaccaggccgacatcaccgacctggaagctttccgtgttgcgcagaaaggcgctgccgagaaagctggcgtcaagctgaccgtgctgccgctgctgctcaaggcttgtgcgcatctgctcaaggaactgccggacttcaacgcttcgctggcacccagcggcaaggctgtgatccgcaagaagtacgtgcacatcggcttcgccgtggacaccccggacggcctgctggtcccggtcatccgcgacgtcgatcagaagagcctgctgcaactggcagccgaagcagccgtactggctgaaaaggcgcgcagcaagaaactgaccgcaaacgacatgcagggcgcgtgcttcaccatctccagcctcggccacattggcggcaccggcttcacgccgatcgtcaacgcgccggaagtggcgatcctcggtgtttccaaggcaaccatccagcctgtctgggacggcaaagccttccagcctaaactgatgctgccgctgtcgctgtcctacgatcaccgcgtgatcaacggcgcagctgctgcccgcttcaccaagcgcttgagcgaattgctgacggacatccgcacaatcctgctg

SEQ ID NO: 33481 - DNA, 1254 bp, Pseudomonas syringae
gtgacgcagagcgtcacgagaggcattcccatgcggagcgtgggaacgatcgcgacctacagatcgaggaaacacgctgtgcccgttactgacgttgtaatcattggcgctggcgccgcaggtttgatgtgcgcgttcaccgctgccgctcgcgggcgcaaggtgatgttgatcgatcacgccaacaaacccggcaagaagattctcatgtccggtggcgggcgctgcaacttcaccaacatgtacaccgagccggccaatttcctgtcgcagaattcgcacttctgcaaatcggccctggcccgctacacccagtgggatttcatcgcgctggtcgccaaacatggcgtgccgtatcacgagaagaaactcggccagctgttctgtgacaacaagtccagtgacattctggaaatgctgcttgaggaatgccgtcaggccggtgtcagtctgcacatggacacttccgtgcagcagatcgacaaaaccgaatccggctacagcctgcacaccacgctgggtacgctgagctgcgagtcgctggtcatcgccacaggcgggctgtcgatcccgacgctgggcgccaccggcttcggctatcaggtcggcaagcagttcggccacacgctgctgcccacccgcgcagggctggtgccgttcaccatcaccgatcagctcaaggagctgtgcaccgagctgtccggcacctcggtggattgtctggtcagctgccacgacaccagctttcgcgaaaacatcctgttcacgcaccgtggcctcagtggcccggcgattctgcagatatcctcgttctggcagcccggcgacaccgtcgaaatcaacctgctgcccgaccacgacgtgcccgcctggcttacgcaacaacaggccgaacgcccgaacagcgagctgaaaaccctactgggggaaatcttcaccaagaagatggccaacctgatcgccgaacactggttcgtttccaggcccatgaagcaatacacccacgctgaactggccgacatcgctgaaaaactggcgagctggaaggtggtcccggcaggcaccgaaggctatcgcaccgccgaagtaacgctgggtggcatcgatacccgtgaagtgtcgtccaagaccatggaatcactgaaatcacccggcctctattttgtgggcgaagtgctggacgtgagcggtcatctgggcggtttcaatttccagtgggcctgggcgtcggcctatgcagcagcgcaatacgcc

SEQ ID NO: 33482 - DNA, 753 bp, Pseudomonas syringae
atgtcgcagtggcttcgagcggttgggttgctggtctttctgctgatggcaaacgccactgcagccgaaaagttgcgtcttgtcgctgacccctggcctccgttcaccgatgcgctgctgctcaatggcgggctggcgaccgatatcgtcaacacggcgttgaagcgcgccgggtacacgaccctctacgaacaggtgccttgggcacgagcgctgctggggttgagcgaggggcgtcacgatgtactcatcaatgcgtggttcagcgaagatcgcaaaaaaataggccagttttctgccgaatacttgctcaatcgtattcgcttcatcaagcgcaaagagtcgcccatcgacgctctgactcacgagcaactgcaccattacctgatcgccgttgtgcgcggctatgcctattcgcccgcattcgacagcgacgttctgctcaaaaaggtcccggttcagaacttctccacggcagtgcgcatgctcgctgctgaacgcgtggacctgaccctggaggatgaatacgtggcgcgctacaaccttgcgctggaggccaacgaggttcgtgctcgtgtcgagtttctaccgggctcgttgagcgaaaacagcctgcatattctggtcagcctgaaaaacccccatcacgcaaagatcgtcgccgacttcgaccgggaaattgccgccatgaaagccgacggcacctatgaagaactgctcagactgcacggtctgcaagggcctccggagctt

SEQ ID NO: 33483 - DNA, 741 bp, Pseudomonas syringae
atgatagtcgttgaaaaactcaccaaggaattcaagggcaatcaagtgctcaagggcattgatctgcgtatcgaagccggagaagtcgtcgcgatcatcggcccgagcggctcgggcaagaccaccctgttgcgctgcctgaacctgcttgaaacacccactagcggcagaatcaaggtcggcgacatcgagatcgatggcacccgctccataggccagcaacaagggctgatccgccagttgcgccagcaggtggggttcgtctttcagaacttcaacctgttcccgcatcgcacagcgctggagaatgtcatcgaaggtcctgtggtggtcaagaagatcgcgcgcgaagctgccgaggcactagggcgacaattactcgccaaggttggcctgaccggcaaggaagacgcgtacccgcgccgtctttccggcgggcagcaacagcgtgtggcgatcgcccgggcgctggcgatggagccgcaagtgatcctgtttgacgagccaacctcggcactggacccggaactggtcggtgaagtgctgacaacgatccgtgccctggctgaagagaaccgtacgatggtgatcgtcactcacgaaatgagctttgcacgagaggtcgccaatcgggtgattttcatcgacaagggggtcatcgtcgagcaaggcgaagccaaggcgctttttgccaacccccaggaagaacgtacaaggcagtttctggaacgcacacgctcc

SEQ ID NO: 33484 - DNA, 3387 bp, Pseudomonas syringae
atgttttccctgcgttccatttgtgctgccgcactgtttgcgctttgcctgtctatcttcccggcgctggccgccgagccgcccacccgcgatgccgtgcagcaaagcctcgacaagattgccgaccgcaagctgccggatgccgatcagaaggccttgcagcaggtgcttgagcagacgctggcgtttctcaacagcaaagacgacagcgagcaaaagctgaccgcgctcaagcagcagctggctcaagcgccaaaacagacctcggacaaccagcgcgagctggcccggttgaaagaaagcaaagtcgttgccgttgcacagcgctacggtggcctcgatgtgccgcaactggagcaactgctcagccagcgcagcacccagcaaagtgatctgcaaagcgagcttaacgacgccaacagcctggccatcaccgcgcaaacccggccggagcgggcgcagactgaaatcagcgccaatcagacacgcatccagcagatcaatgccatcctcaagaatggcaaagacaacggcaagaccctgagtgccgatcagcgcaatctgctcaatgcggaactggcctcgatcaacgcgctgaacctgctgcgccgtcaggaactggccggcaacagccagttacaggacctgggcaacagccagcacgacttgctgaccgaaaaagtcgcccgccaggagcaggaaattcaggacctgcaaaccctgatcaacgacaagcgccgagcccagtcgcagaaaaccgtggcggacctgtctctggaagcgcagaaatccggtggcagcagcctcctggcgaccgagagcgccgccaacctcaagctgtccgattacctgctgcgcggcaccgaccgtctcaacgagctgacccagcaaaacctcaagaccaagcagcaactggacaacctgacgcagaccgatcaagccctcagcgagcagatcaacgtgctgagcggcagcctgctgctgtccaagattctctacaagcaaaaacagtcgttgccgcacctggaactggacaaaggcctggctgacgaaatcgccaacatccgcctttatcagttcgacatcaatcagcaacgcgagcagatgagcacaccgaccgcttacgtcgaacgactgctcgccacccagcccccggaaaatatcaccccgcaactgcgcaggacgctgcttgatctggccatcacccgcagcgacctgctcgaacgcctgaaccgcgagctgagcgcgttgctcaacgagtccatcacgctgcaattgaaccagaagcagttgaccagtaccgccgtcggcctgcgctccacgctggacgagcagatgttctggatccccagcaacaagccgctggatctggagtggttccagaacatctggccgcgcctgcaaaaacaggtcgcgaccctgccctggacgtccagcctcagcgagctgtcggacggcttgacacaacgcccgctgctgtttctgccattgttactgctgatcggtgtactgacctggaggcgcaaggcgctttaccagaagctcaaccggctgcacgccgacatcggccacttcaaacgcgacagtcagtggaaaaccccgttggcgctgctgatcaacgtgctgctggccatgccggtcgcattggggctggcgctgtgcggctacgccttgcaaatcgatgcgcgcgggcaaaacgccaaccttggcgaggccttgctgcagatcgcgctggcctggctagtgttctacaccgcctaccgcgtgctggccccgtccggcgttgcgcaactgcactttcgctgggaaccggcgcaggtcgcgttcttgcgcggctgggttcgtcgcctggggttggtggtgctggcgctggtcgccgtggtggcggtcgccgagcatcaaccggccgcgctggccgacgacgtgctgggtatcggcgtggtgctgacctgttacgcgctgatgacctggctgctgggccgattgctgctctccagccctacgcaccacaacgcgtcgctgttccgcaagacgctgggtgtggcgttcacggcattgccggtcgcgctgtttctggcggtgtgcttcggctactactacaccgcactcaagctcagcgaccgtctgatcgacacgctgtacctgatgatgatctggctgatggtcgaggccaccttcgttcgtggtctgggcgttgccgcgcggcgactggcctaccagcgtgcgctggccaaacgtcaggctgcgcgagaaaacggtgacagcgacatccccgtcgaagaaccgaaactggacatcgaacaggtcaaccagcagtcgctgcgcctgattcgtctggccttgctggctggtttcgtcggcgcgttgtacctggtctgggccgagctgatcacggtgttcgcctacctggacaacatcatcctctacgaatacacaagcggcacaggcgccaacatgagcatggtgccgatcagcctgagcgacttcctcggtgccggggtcatcatcgtcattacctttgtgctggcgggcaacctgcccggcttgctcgaggtgctggttctgtcacgcatgaacctggcgcaaggcagcgcctatgcgaccaccacgctgctctcctacaccatcgccggcatcggctttgtgaccacgctgtccacattaggcgtgagctgggacaagctgcagtggctggtcgcagcgctgtcggtgggcctggggttcggcatgcaggagatcttcgccaacttcatttccggcatcatgatcctcttcgagcgcccggtacggatcggcgacaccatcaccatcggcgccctgtcgggtacggtcagcaagatccgcatccgcgccacgaccatcaccgacttcgaccgcaaggacattatcgtcccgaacaagaccttcatcaccggccagctcatcaactggtcactgactgacaccgtcacccgcgtaacgctcaagctgggtgtggattacggctcggacctggacctcgtgcgctccctgctgctgcaagccgcacgggaaaaccctcgggtgctcaaggagccagagcccattgtctacttcctgaacttcggcgaaagcaccctcgaccacgaactgcgcatgcacgttcgcgacctgggcgaccgcaacccggtactcgacgagatcaaccgcttcatcaaccgcgagttcaagaaacagcacatcaacatctcgttccgccagatggagatctacctcaaaaacacccagggcctggaatacaaactggtgcccgccgaaccaggcgaaaagcacggcgcaccggctgggcaaaccacgctgcaaccggtaaacaccaaagtagccccggcaaccaaagatgcgccagagccgccggagttgaggctggac

SEQ ID NO: 33485 - DNA, 681 bp, Pseudomonas syringae
gtgcccggcaactggcaccgcgtgtggaggtattgggttatgtgggttgatcgcttgctgcaaggcactctcgacacgtttctgatggtcggtgtgtcgtcattgatcgcgttgctgctgggcatcccgctggcagtgattctggtcaccagttccaaaggcggcatctacgaggcaccggcgatcaatcgggtgctgggcggctttgtgaacctgtttcgctcgattccctttttgatcctgatggtggcgctgatcccgttcacgcggatgatcgtcggcaccacctatggcgtgtgggcggcggtagtgccgctgaccatcgccgccacgccgttcttcgcgcgtatcgccgaagtgagcctgcgcgaggtcgatcacgggctgatagaagccgcgcaggcgatgggctgtcggcgctggcacatcatctggcatgtgctgctgcccgaagcgcgtcccggcattgtcggcggctttaccatcacattggtgaccatgatcaactcatcggccatggccggtgcgattggcgcaggcgggctgggcgacattgcctatcgctacggctatcagcgctttgacacacaggtgatgctgactgtgattgtattgctggtggccgtggtggcgctggtgcaactgggcggtgaccggctggcgcgcagcttcgacagacgc

SEQ ID NO: 33486 - DNA, 2040 bp, Pseudomonas syringae
atgagcagtacagacaggtcaagggaaggtgcacgaagccgtacgcagattattctgctgttcgtcgcgttgattgttttcatcatgttgctgttcgccaacttcgcgtacctcaatactcagtcgaactacgacaagcagtacatcgggcatgccggtgagctgcgcgtgctgtcccagcgcatcgccaagaacgccacggaagcggctgccggcaaaacccaggcgttcaaattgctggccgatgcgcgcaacgatttcgacgtgcgctggggctacctgagaaaaggcgacccggccaccgggctgcctgcggctcccgagctgatacgcgacgaattgcgcaccgtgcaacgagactgggaagggctgcgcaagagtaccgacgtgattctggccagcgagcagaccgtcctttcgctgcatcaggtggcggcgaccctggccgaaaccattccgcagttgcaggccgaatacgacaaggtcgtcgaaaaccttctgcaaagtcgtgcgcctgctgcgcaggtcgtggtcgcgcaacgtcaggcgctgctcgccgagcggattctcggttcggtcaacaccgtactggctggcgacgaaacagcggtgcaggccgccgatgcctttggccgtgacgccagccagtttggccgggtgcttaacggcatgctggaaggcaatgcgacgctgcgcatcacccaggtcgaagatcgcgatgcccgggcgcggctggcggaaatcgccgagctgttcgagttcgtgtccggctcggtggacgaaatcctcgaaacctcgcccgagctttatcaggtgcgcgaggcctcgggcaacatcttcaacacctcgcagaccctgctggacgaaacctcggtgctcgccaacagcttggaaaacctcgccaaacgccgcaccatgaacaccgtcggcggttatgtgctgggcttgctggcgctgatgtcgatcatcctcatcgggctggtcatggttcgcgaaaccaaccgccagttgcgcgaaaccgctcagaagagcgagcgcaatcagacggcgatcatgcgtctgctggacgagatcgaaaacctcgccgacggcgatctgaccgtgacggcttctgttaccgaggacttcaccggtgcgattgccgactccatcaactactccatcgatcaactgcgcgaactggtggtgaccatcaacctgacggccgaacaggtggcctcggccgtcaccgagacccaggccacggccatgcagttgtctgccgcgtccgagcatcaggccttgcagatcagcgcggcctccacggcggtcaacgacatggcggcatcgattgatcaggtgtcggccaatgcgtcggagtcctcggcggttgccgagcgttcggtggcaattgccaacaaaggcaacgaggtggtgcagaacaccatccacggcatggacaacattcgcgaacagattcaggacacgtccaagcgcatcaaacgcttgggtgagtcttcgcaggaaattggcgacattgtcagcctgatcgacgacattgctgatcaaaccaacattcttgcgctcaacgcggccattcaggcgtcgatggccggtgatgccgggcgaggctttgcggtggtggctgacgaagtgcagcggctggcggagcgttcctcgtcggcgaccaaacagatcgagacgctggtgcgcgccatccagaacgacaccaatgaagcagtgatctccatggagcagaccaccagcgaagtggtgcgcggcgcgcggctggcgcaggatgctggcgtagcactcggggaaatcgaaggcgtttccagggtgctggccgaactgatcgaaagtatcaccgatgcagcccatcagcaggccgagtctgccggtcagatctcgcagaccatgaccgtgattcagcagaccacttcgcagaccacgtccggcacgtcggccaccgccgaaagcattggcaatctggcgaagatggccagcgaaatgcgtcgctcggtatcgggtttcaccctgccgccctcgaagaagatcgga

SEQ ID NO: 33487 - DNA, 1254 bp, Pseudomonas syringae
ttgaatcctgccgtcgccccgcctaccaccgacctgaatacgtccgctaaaccgtctggcgacagctacatcgaaaagaacacgccgctgttcaaacgcaccgcgctggcgctgttcgcgggtgggttctcgacgttcacactgctgtattgcgtccagccgatgatgccgacgctttccaccgagttctccctctcggccgcccagagcagcctgattctgtcagttgccacggcgatgctcgccatcggcctgctaatcaccgggccgatatccgaccggctcgggcgcaagtcggtgatggtcatggcgctgttctgcgcgtcgctgttcaccatcgccagcgcgttgatgcccagttgggaaggcgtgctcatcacacgggcactggtgggcctgtcgctgagcgggctggcggcggtagcgatgacctacctgagcgaggaaatacaccccactcacctgggcctggcgatggggctgtatatcggtggcagcgcggtcggcggaatgagcgggcggctgattgtcggggtcatgatcgattatgtgagctggcacgcggcgatgctggtggtcggcgggctggcgctgatcgccgctgtggtgttctggaagatcctcccggagtcacgcaacttccgcccccgctcgctgcacccgcgcagcctgctggacggctttgtggtgcagttcaaagacgcagggttaccgctgttgtttctgattggctttctgctgatgggcgccttcgtcacactgttcaattacatcgcctaccgcttgttgagcgagccctacaacctcagccaggccgtggtcggcgtgttttccgtggtgtacctgtcgggcatctacagttcggcgaagatcggctcgctggccgaccggctgggtcgtcggaaagtgctctgggccgtgatcgtgatgatgctggcgggcttgatcatgacgctgttcacaccactggccctggttatccccggtgtattgatcttcaccttcggcttcttcggcgcgcattcagtggccagcagctgggtaggccgcagggccacaacggcaagaggtcaggctgcgtcgctgtacctgttctgctattacgctggctcaagcgtagccggaaccggcggtggcgtgttctggcattacgcgggctggaacggcatcgggctgtttatcggggcactgttactgatggcgctgggcgtggcgttgaggttggcgaggttgcagccgttgggggcgagggtt

SEQ ID NO: 33488 - DNA, 1269 bp, Pseudomonas syringae
gtgaagctcagcatcctcggcgctcgcgtcatcgacccggtcagcgggctggatcagaccaccgacctgcacatcgaggcaggcaaactcgtcgcaatcggcgccgcaccggccggttttgaacccactcaggtcatcgacgctaccgggctggttgccgcgcccggcctggtcgacctcaacgtgtccctgcgcgagccgggctatagccgtaaaggcagcatcgccagtgaaacccgcgctgcggtcgcaggcggcgtaaccagcctgtgctgcccgccacagaccaaaccggtgctcgacacctcggcggtggccgaactgattctggaccgtgcccgtgaagccggtttcagcaaagtgtttcctgttggtgcactgagcaagggcctggaaggcgagcaactggccgaactgatcgccctgcgcgacgcaggctgcgtggcgttcggcaacggcctgagcagcttcagcaatacccgtacgctgtgccgggcgctggaatacgccgccaccttcgacctgactgtgattttcaactcccaggatcgtgatctggccgaaggcggtctggcccatgatggcccgacggcggcgtttctgggtctggcgggcattcctgaaacagccgagaccgtggcgctggctcgcgatctgctgctggtcgagcaaagcggcgtgcgcgcgcacttcagccaactgaccagcgcacgcggcgcggccctgattgctcaagcacaggcgcgtgggctgccggtaacggcggatgtggcgttgtaccagttgattctgactgatgaggcgctgatcgatttctccagcctgtatcatgtccagccgccgctgcgcacccgcgcagaccgcgacggcctgcgtgaagccgtgaggtccggggtgattcaagccatctcgagccatcaccagccgcatgagcgtgacgccaagctggcaccgttcggcgccaccgagccgggcatcagcagtgttgagttgttgttgccgctggccatgacgctggtggacgacggcctccttgacctgccaaccctgctcgcccgcctgagcagcggcccggcagacgccttgcgtttgcctgccggcaagctcagcgccggcgcgcctgcggacatcgtgctgttcgacccgacagcctcgaccgtcgccggtgagacctggctgtcaaagggcgataactgccccttcatcggccactgcctgccgggctcggtacgctacacactggtggatggacggatcagctatagccgt

SEQ ID NO: 33489 - DNA, 1032 bp, Pseudomonas syringae
atggatattaccgagctgctggccttcagtgccaaacagggcgcgtcggacttgcacctctctgcaggtctgccaccgatgatccgcgtggacggcgatgtgcggcgtatcaacctgcccccgctggacgccaaggaggtcaaggcgctgatctacgacatcatgaccgaccggcagcgtcaggattttgaagagcgcctggaaaccgacttttcgtttgaagtgccgggtgtcgcgcggtttcgggtcaacgccttcaaccagaatcgcggtgcgggcgcggtatttcggaccatcccgtcgaaaatcctcagcatggaagacttggggatgggcagtgtgtttcgcaagattaccgatgtggcgcgcggcctgattctggttaccgggccgaccggttcaggcaagtcgacgaccctggcggcgatgatcgactacctcaactgcaacaagcatcaccacatcctgaccatcgaagaccctatcgaattcgttcacgagtccaaaaagtgcctggttaaccagcgcgaagtgcaccgcgacacgctggggttttccgaagcgttgcgctcggccctgcgtgaggacccggatgtgattctggtgggcgagatgcgtgacctggagaccattcgtctggctctgaccgctgctgaaaccggccacctggtattcggcacgttgcacaccacgtcggcggccaagaccatcgaccggatcgtcgatgtgttcccggcgcaggaaaagtcgatgattcgctcgatgctgtccgagtcgctgcacgcggttgtctcgcaggcgctgctcaagaaggttggcggcgggcgcgtggcggcgcatgaaatcatgatgggcaccccggcgattcgtaacctgattcgcgaggacaaggtggcgcagatgtattcgtccatccagaccggcggctcattgggcatgcagacgctggacatgtgcctggccgacctggtgaaacgcggcctgattacccgcgaaagcgctcgcgagcgggccaaggtgccggacaacttc

SEQ ID NO: 33490 - DNA, 684 bp, Pseudomonas syringae
atgtccacgatagcagcgaacatttcaacgctcgaacagcgaattcgcgacgcagccctcgcggccaaacgtgatccggcgtccgtaggcctgctggcggtgagtaaaaccaagcctgccggcgacctgcgtgaagcttacaccgcaggcttgcgtgactttggcgaaaattatttacaggaagcactgggcaaacagctcgaactggccgacctgcccttgtgctggcacttcatcggccccattcagtcgaacaagacgcgcgctatcgccgagaacttcgcctgggtacattccgtggatcgcctgaaaattgctcaacgcctgtccgagcagcgccccgaaggccttgagccgctaaacatctgcattcaagtgaacgtcagcggtgaagccagcaagtccggctgtgcgcctcaagacctgccagcactggccgccgccatcaacgccctgccacgattgaagctgcgtggcctgatggccattcccgagccgacggacgacccagcggctcaggcggcctctttcgccgccgtgcgtaccttgcaggagcagttgaacctgtcactcgacacactttccatgggcatgagccacgacctggaagccgccattgcacaaggcgcaacctgggtgcggatcggcacggctctttttggcgcccgcgactatgggcagcca

SEQ ID NO: 33491 - DNA, 1416 bp, Pseudomonas syringae
atggctgaacgtctcagtaacgacttccagttcatcgacgtcgggcgtaaagacccgaagaagaaactgctgcgtcaacgcaagaaagagttcgtggaaatctacgaacccttcaaaccccagcagtccgccgatcaggcgcaccgctgcctgggttgcggcaacccgtattgcgagtggaagtgcccggtgcacaacttcattcccaactggctcaagctggttgccgagggcaatattctcgcggcggcggagttgtcccaccagaccaacaccctgccggaagtctgcggccgcgtgtgcccccaggatcgcctgtgtgaaggtgcctgcacgctgaacgacggctttggtgcggtcaccatcggctcggtcgagaagtacatcaccgacaccgcgttcgccatgggctggcgtccggacatgtccagggtcataccgaccggcaagcgcgtcgccatcattggcgcagggcctgcgggccttggctgtgccgacgtgctggtgcgtggcggcgtgaccccggtggtgttcgacaagaaccctgaaatcggcggtctgctgaccttcggcatccccgaattcaagctggaaaaatccgtgctcagccatcggcgtgaagtgttcaccggcatggggatcgagttccggctcaacaccgaagtcggcaaggacgtgaccatcgaccagttgctcgaagagtacgatgcggtgttcatgggcatgggcacctacacctacatgaaaggcggttttgccggtgaagacctgccgggcgtgcacgatgcgctcgacttcctgattgccaacgtcaaccgtaacctgggcttcgaaaaggcgccggaagactttgtcgacatgaaaggcaagcgcgttgtcgtgctgggcggcggcgacacggcgatggactgcaaccgtacttcgatccgtcagggcgccaaatcggtcacctgcgcctaccgtcgcgacgaagaaaacatgccgggttcacgcaaggaagtgaagaacgccaaggaagagggcgtgcgcttcctctacaaccgccaacccatcgccattgtcggcgaaggcaaggtcgaaggcgtcaaggtggtcgaaacgcgtcttggcgaacccgacgcccgtggccgtcgcagccccgagccgattccgggttctgaagagatcatcccggcagacgccgtggtcatcgcctttggcttccgcccaagcccggcaccgtggttcgagcagttcacgatcagcaccgacagtcagggccgcgtcgtcgccccggagcaggcgcagtacaagcaccagaccagcaatccgaaaatctttgccggtggtgacatggttcgcggctccgacctggtggtcactgcgatcttcgaaggccgcaatgcggctgaagggatcatggattacctcggcgtc

SEQ ID NO: 33492 - DNA, 4443 bp, Pseudomonas syringae
atgaaagcaggtctgtaccaaccagatgaattcaaggataactgcggcttcggcctgatcgctcatatgcagggcgagcccagtcatcacctgttgcagacggccgtccaggccctgacctgcatgacccaccgtggcggtatcaacgccgacggcaagaccggcgacggttgtggtctgttgattcagaagcccgacggcttcctgcgtgcgatggccagcgagcacttcggtgtcgaactgccccgtcaatatgccgtgggcatggtgttcctcaatcaggacgacaccaaggccaaggccgcacgcgaaaacatgaaccgcgagatcctggccgagggcctggaacttgtaggctggcgccaggtgccgatcgataccagcgtgctgggtcaactggcgctggagcgactgccgaaaatcgagcaggtgtacatcggcggcgaaggcctgagtgatcaggagttcgccatcaagctgttcagtgcccgtcgccgttcatcggttgccaacgctgcagattcggatcactacatctgcagcttttcgcacaagaccatcatttataaaggcctgatgatgccggccgacctcacggcctttttcccggacctgagcgacgagcgtctgcagaccgcaatctgcgtgttccaccagcgcttttcgactaacaccctgccgaaatggccgctggctcagcctttccgctttcttgcccacaacggcgagatcaacaccatcaccggtaaccgtaactgggcacaggcgcgtcgtaccaagttcaccaacgacctgatggatctggacgaattgggcccgctggtcaaccgcgtgggctccgactcgtcgagcatggacaacatgcttgagctgatggtgaccggcggcatagacctgtttcgtggcgtgcgcatgatcattccgcctgcgtggcagaacgtcgagaccatggacccggatctacgcgccttctatgaatacaactccatgcacatggagccgtgggacggcccggccggcatcgtgatgaccgaaggtcgtcacgcggtctgcctgctcgaccgcaacggcctgcgcccggcgcgctgggtcacgaccaagaatggctacatcaccctcgcgtcggaaatcggcgtgtgggactacaagcccgaagacgtcatcgccaagggccgtgtcggtcctgggcagatttttgccgtggacactgaaaccggccagatcctcgacaccgacgctatcgacaaccgcctcaagtcgcgtcatccgtacaagcaatggctgcgcaagaatgccctgcgcattcaggccaccatggaagacaacgaccacggctcggctttctatgacagcgagcagctcaagcagtacatgaagatgtatcaggtcacgttcgaggagcgtgatcaggtgctgcgtccgctcggcgagcagggccaggaagccgtgggctcgatgggtgacgacacgccgatggcagtgctgtcgcgtcgcgtgcgttcgccttacgattacttccgccagcagttcgcgcaggttaccaacccgccgatcgacccgctgcgtgaagccatcgtcatgtcgctggagatctgcctcggtgccgagcgcaatatcttccaggaatcgccagagcatgcttcgcgcgtaatcctcagctcgccagtcatttcgccggccaaatggcgttcgctgatgaacctggagcgtccgggtttcgagcgccacattatcgacctgaactacgacgaaagcctgggccttgaagccgctgtgcgtaacgtcgccgatcaggccgaagaagcggtgcgttccgggcataccctgattgtgctgagcgaccgccacattgcaccgggcaaactgccggtgcacgcttcgctggccgtcggcgcggttcaccaccgtctgaccgagcagggcctgcgttgcgacagcaacattctggtcgaaaccgccacggcgcgtgacccgcatcatttcgctgtgctgatcggttttggcgcttcggcggtctatccgttcctggcctacgaagtgctgggtgacctgatccgtaccggcgaagtgctgggcgacctgtacgaagtcttcaagaactaccgtaaaggcatcaccaagggcctgctcaagattctgtcgaagatgggcatttcgaccgttgcgtcctaccgtggtgcacaactgttcgaagccatcggcctgtccgaagaagtctgcaacaccagcttccgcggtgtgccgagccgcttgaaaggcgcgcgtttcgtcgatatcgaagccgaacagaaggccctggccgccgaagcctggagcccgcgcaagccgatccagcagggcggtctgctcaagtttgtctacggtggcgaataccacgcctacaacccggacgtggtcagcaccctgcaagccgctgtacagcagggtgactacagcaagttcaaggaatacaccgcgctggtggaccaacgtccggtgtcgatgattcgtgacctgttgcaggtcaagaccctcgaccagccgctgaacatcgacgaaatcgagccgctgagcgagattctcaagcgcttcgattcggccggtatctcgctgggtgccttgtcgcccgaggctcacgaagcgctggccgaggcaatgaaccgtctgggcgcgcgctccaactccggtgaaggcggtgaagacccggcgcgctacggcaccattcgtagctcgaaaatcaagcagattgccaccggccgctttggtgtaacgcctgagtatctggtcaacgccgatgtgttgcagatcaaagtcgcgcagggcgccaaaccgggtgagggcgggcaactgccgggcggcaaggtcaacggcctgatcgccaaactgcgctatgccgtaccgggtgtgacgctgatttcgccgccgccgcaccatgacatctattccatcgaagacctgtcgcagctgattttcgacctcaaacaggtcaacccggcagcgctggtctcggtcaagctggtggcagaagcgggcgtgggcaccattgccgcaggcgtggccaaggcctatgccgacctgatcaccatttccggctacgacggcggcaccggcgcttcgccgctgacctctatcaaatacgctggcgcgccgtgggaactgggcctggccgaaacgcaccagaccctgcgcggcaatgacctgcgcggcaaggtccgggtgcagactgacggtggtctgaaaaccggcctcgacgtgatcaaggcagccattctcggtgctgaaagcttcggcttcggtactgcaccaatgatcgcgctgggctgcaaatacctgcgcatctgccacctgaacaactgcgctaccggcgtcgcgacgcagaacgaaaagctgcgcaaagaccactacatcggcaccgtcgatatggtgatcaacttcttcacctacgtggcagaagaaacccgtgagtggctggccaggctgggtgttcgcacgctggaagagctgatcggtcgtaccgacctgctggacattctgccgggcgaaaccgaaaagcaacggcatctggacctcacgcctttgctgggcagcgatcacatcccggctgacaagccacagttcagcctggtggaccgcaacccgccgttcgacaaaggcctgctggcagaaaaaatggtcgagctggccaagccggccatcgaagccctcagcggcggcgagtttgagctggacatctgtaactgcgaccgttccatcggcgcgcggatctccggcgaaatcgccagactgcacggcaatcagggcatgaacaaggcgccgatcactttccgtttcaaaggcactgccgggcagagcttcggggtatggaacgctggtggtctgaacatgtacctggaaggcgatgccaacgactacgtcggtaaaggcatgaccgctggcaagctggtgatcgtgccgcccaagggcagcccgttcaagaccaacgagagcgccatcatcggcaacacctgcctgtacggcgcaaccggcggcaagctgtttgcggcgggtaccgcgggcgagcgtttcgcggtgcgtaactcgggtgcccacacggttgtggaaggcacgggcgaccactgctgcgagtacatgaccggtggtttcgtctgcgttctgggcaagaccggttacaacttcggttccggcatgaccggcggtttcgcttacgtgctcgatcaggacaacaccttcgttgacctggtcaatcatgaactggtcgagatccagcgcatcagcggcgagtcgatggaagcttatcgcactcacctgcagagcgttctgaacgagtacgtggctgaaaccgacagtgaatggggtcgtaacctcgcggaaaacctggacgattacctgcgtcgtttctggctggtcaagcccaaggctgccaacctgaaatcgctgctctccagcactcgggcgaatccgcaa

SEQ ID NO: 33493 - DNA, 2442 bp, Pseudomonas syringae
ttgatacgcctgctgaagtttttctggtggtccctcgtagcggtattctgctcgctgttactcggcctgagcggcgcgtttctgtatctgagcccgaccctgccctctgtcgaagcgctgcgaagcattcaactgcaaattcccctgcgcgtgttcagcagcgacggcaagctgattgccgagttcggcgagatgcgccggaccccgattcgctttgccgaaatcccgcccaacttcatcaacgcgctgttatcggccgaagacgacaacttcgccaaccactatggcgttgaccccagcagcctgatgcgcgccgccacccaattggtgaagagcggtcatattcagtcaggcggcagtaccatcaccatgcaggtcgcgaaaaactttttcctgaccagcgaacgaagcttttcgcgcaaaaccacagagatccttctcgccttgcaaatcgagcgccaactcaccaaagacgagattctcgagctgtacgtgaacaagatttatctgggtaaccgcgcctacggcatcgaggcggcggcgcaagtctactatggcaaatcgattcgcgatgtaagccttgcgcaaatggccatgattgccggtttgcccaaggcgccgtcacgcttcaacccactcgccaatgcaacccgtgccaaagagcgtcgcgactggattctggggcgcatgttccgtctgggcaaaatcgaccaggctgcgtatcaggcagcgctcaacgagccgctcaacgccagttatcacgtaccgacaccggaagtgaacgcgccgtacatcgctgaaatggcccgcgccgaaatggtcggccgttatggcagcgaggcctatacagagggcttccgcgtcacgaccacggtgccgagcgacctgcaggagcacgccaacaagtccatccagcagggcttgatcgactacgatcaacgccacggctatcgcgggcctgaaagccgcttcccgggcatgacccgcgctggctggacgcaggagctgaccaaacaacgcacgatcaacggcctggagccggccatcgtcacccagatcgacaagaccggtctgcgcgttttgacgcgcaatggcgagaaggaagaaaccgtcgattgggccagcatgaagtgggcgcgtccttatctgaacaccaacagcctgggcgccaatcccaagcagcctggcgatgttgcgaaggtgggtgatctggttcgcctgctgcgtcaggacgatggctcgctgaaattcagtcaaattcccgtcgcgcaaagcgctctggtttccctcgacccgcaaaatggcgccatccgcgccctggtcggcggttttgctttcgagcagagcaactacaaccgggccatgcaggccaagcgtcagccgggctccagtttcaagccattcatttacagcgccgcgctggataacggctacaccgcctccagcctggtgaacgacgcgccgatcgtgttcgtcgacgagtatctggacaaggtatggcgtccgaaaaatgacaccaacaccttcctcggcccgatccgcctgcgcgaagcgctgtacaagtcgcgcaacctggtttctatccgcctgctgcaggcgctgggcgtcgatagcaccatcgactacatcactcgcttcggttttgccaagcaggatctgccacgcaacctgtcgctggcactcggtacggccacactgaccccgatggaaatcgctaccggctgggcgacctttgccaacggcggttacaaggtcagcccttacctgatccagaccatcgagaaccgtgacggccagacgctgtttgtcgccaatccgcctagcgttccggtcaatgacgtgaatacggcgcccaatacgtcgacctttgccgtgcatgacagcccgagcgtagtcgcaagccctccgggctcaccggcccaaccgcaagcgccagccgttgccgagcgcattgtggatgggcgcaccacgtacattctgaacagcatgctgcaggacgtgatcaagcgcggcaccgggcgtcgcgccttgtcgatgaaccggccggacattgcaggcaagaccggtacgaccaacgattccaaggatgcatggttctccggctacaacgcggattacgtcacgacggtgtggagcggtttcgatcagcctgagagccttggccgtcatgaatttggcggtacggtctcgttgccgatctggatggactacatgagcgccgcgctcaaggacaaaccaccccatcagcaggccgaaccgtctggcatcctcagcctgcgcgtcgacccgctgagcggccgcgcggccacaccgagcacgccaaacgcgttcttcgagctgttcaaaagcgaagacacaccgccaagcgtcaacgaactgggcggcggtagcgcacccggcagcccgctgccagcagacgagtccgcgccgatcgacttattc

SEQ ID NO: 33494 - DNA, 774 bp, Pseudomonas syringae
atgttcgagcgtctgcgagaagacattcaaagcgtatttcatcgcgaccctgcggcgcgcaatgcttttgaagtgctgacctgctacccgggcatgcacgccatctggctgcaccgtttcgctcatgttctgtggcgcaatggctggaaatggcttgcgcgagtggtgtccagcttcggccgctggatgaccggtgtcgagattcatccgggcgcacgcataggccgtcgcttcttcattgatcacggcatgggcatcgtgatcggcgaaaccgccgaaatcggcaatgacgtgacgctttatcagggggtgaccctgggcggtaccagttggaacgccggtaagcgccaccccacgctggaagacggcgtggtcgtgggtgccggtgccaaggtgctcgggccgtttaccgtgggtgcaggcgccaagatcggttccaatgccgtggtgaccaaggccgtgcctgcgggcgcgactgccgtgggtattccggggcgcatcatcgtcaagtccgacgacgaaaccgaagccaggcgcaaggtcatggcggaaaagcttggcttcgatgcctatggtgtcagtggcgacatgccagaccccatcgcccgtgccatcggtcagatgctggatcacctgcaggcggtcgatggccgtcttgaaggcatgtgcgacgccctcggcaggctgggcagcgattattgcgccaaagaccttccccagttacgcaacgaggtcttcgactgtgtcaaggatgctcgcgaagacaccgtcgac

SEQ ID NO: 33495 - DNA, 822 bp, Pseudomonas syringae
atgctacgttttatcgccccgctgttcgccctgctgctctgcctgcccgcccatgccgacagctttatcactcgcgcactcgataaaccggtgcccggtggcgttgcggtgattgatctgggcaccggcgcgcaggcaccgactgccacctatcagggcaaaccggtgctggtggtcaaggaacaaggcactcgctggctggccatcgtcggcatcccgctgaccgtcaaacccggcactcagcaagtgacctcgggcgggcgcacgatgagcttcacggtcggcagcaagaagtacccggaacagcacatcaccctaaagaacaagcgtcaggtcaaccccaaccctgaggacaacaaacggatcgagggcgaactggccgagcagatccgcgcctaccgcagcttcagcccaggcacgccgagcaatctgattctggacaagccggtcaacggcccgctgtcgagcaagttcggtgtgcgtcgcttcttcaacggcgaagagcgcaacccgcactcgggactggatttcgccgtgccggccggtacaccgatcaaatccccggcagcaggcaaagtcatcctgaccggcaattacttcttcaatggcaacaccgtattcgtcgaccacgggcaaggcttcatcagcatgttctgccacctgtcgaaaatcgacgtgaaagtcggcgatcaggtgcctcgtggcggcgtggtcggcaaagtcggcgctaccggtcgggcaaccggtccgcacatgcactggaacgtcagcctgaacgatgcacgggttgacccggcaattttcattggtgcgtttcagccc

SEQ ID NO: 33496 - DNA, 384 bp, Pseudomonas syringae
atggcttacagcgaaaaggtcatcgaccactacgaaaacccgcgcaacgtcggcaagatgaacgcggaagaccctgatgtgggcaccggcatggtcggcgctcctgcgtgcggcgacgtgatgcgcctgcagatcaaggtcaacgagcacggcgttatcgaagacgccaagttcaagacctacggctgcggctcggcaattgcctccagctcgctggccaccgagtggatgaagggcaagactctggatgaagcagagaccatcaaaaacactcagctggcggaagagctggcgctgcctccggtaaagatccactgctcggtactcgccgaagacgccatcaaggcggctgttcgtgactacaagcagaagaagggcctgctg

SEQ ID NO: 33497 - DNA, 1389 bp, Pseudomonas syringae
atgatgctggccatgatcaaagaccccttcgcaagactcggcctcgaccgggaagtccttactgtcagccagctcaacggccgtgcccgggtgttgctggaggatgtgttcagcagcatctgggtcgagggcgagatttccaatctgtcgcgtccggcgtcggggcatgtctacttcacgctgaaggattccggcgcgcaggtgcgttgcgcgctgttccgacaaagcgctgctcgcgtgcgtcaggcgctcaaggacggtttgcaggtcaaggtgcgcggcaaggtttcgctgtttgaaggccgtggcgactatcaactgattctcgacactgtcgaacctgccggtgacggtgctttgcgcctggcattcgatgcgttgaaggccaagctcagcgatgaaggactgttcagcgccgatcgcaaggttgccttaccgctgcacccacaacgtatcgggattatcagttcgccgacgggcgcggtgatccgcgacatcatcagtgtgtttcgtcgtcgcgcgccgcgggtcgagctgacgcttatccctaccgccgttcagggccgtgaggcgatcaatcagattgttcgcgcgctgaaactggcggatgccagaggctttgatgccttgatcctcgcccggggcggcggttcactggaagacctgtggtgtttcaacgaggaagccgtggcccgcgccattgacgcctgcgtaacgccgattgtcagtgccgtcgggcatgaaaccgatgtgtccatcagtgacttcgtggccgatgtgcgagccccgacgccctccgccgcggccgagttgttggccccggattccagtgacctgcaccgccgcgtcgataacctgcaccgccggctggtcagccgcatgcaggatcgcctgatgcgcgagcggttgcgtctggagggtatttccagacgtctgcgtcaccccggcgagcggttgcgccagcagtcgcagcgcctggatgatctggacatgcgcctgcgccgtgctttcgagcagagcatgcataagaagcaggtgcgtctcgcgcacatggaaagtcgtctgactgcgcagcacccaggccggaccctggcctttttgcgccagcggcttgatgcgctggccgagcgtttaccgagagccattcgcgagcagatcaaggtccgtaagctgcaactgcaaagccagatgcagaccctcaatgtcgtcagcccgctcgccacactgggccgtggctacagcatcctgctcgatgagcggggtcatgcgatccgtaatgccgctcaaacgcaacccggccagcgactgaccgcaaggctgggcgaaggcgaactgcaagtacgcgtcgaagacaatcacctcacgcctgtgaccctctcccttctggac

SEQ ID NO: 33498 - DNA, 558 bp, Pseudomonas syringae
ttgatcgccacgtcgcgcattccggtggaaaacctgctggtgctgctcttcccgctcgggatgatcaccgtgctgctcgcccagttcgcacccagcggcacggtgcagccgatcatggaagagcccggcatcctcagccatattctgctgtcgctgctggcctacggcatgttcaccattgcggtgtttcaggccttgctgttgctgttgcaggactaccggctcaagcacaaacacccttccgggctgatcaagaacttcccgcccctgcaaaccatggaaagcctgctgttcggcttcctctgggctggctggacgctgctctcgctgtcgctgctttccggctggctgttcgtcgaaaacctgtttgcccagcatctggtgcacaaaaccctgctggcgtttctggcgtgggtggtgttcagcgtgttgttatggggacgcaatcgcctcggatggcgcgggcacaaggctattcgctggaccctgggcggcttctgcctgctgatgctcgcctacttcggcagcaagctggtacgcgaattcattctgcacatc

SEQ ID NO: 33499 - DNA, 1374 bp, Pseudomonas syringae
atgtttgaaaatctgactgaccgcctctcacagacgctgcgccacgttactggcaaggccaagctgaacgaggacaacatcaaagataccttgcgcgaagtgcgtatggcgttgctcgaagccgacgtcgccttgccggtggtcaaagacttcgtcaacagcgtcaaggagcgtgctgtcggcaccgaggtgtcgcgcagcctgacgccgggccaggcgttcgtgaagatcgtccaggccgaactcgaaagcctgatgggcgccgccaacgaagacctggtgctcaatgtcacgccgcctgcggtcatcctcatggctggcttgcagggtgcgggcaagaccaccactgccggcaagctggcgcggttccttaaagagcgcaaaaagaaaaccgtgatggtggtgtcggtcgacgtttaccgtcccgccgccatcaagcagcttgaaaccctggccaacgacatcggcgtgacgttcttcgcgtccgacatcagccagaagccggtggacatcgccctggctgccatcaaggaagccaggctgaagttcatcgacgtggtcatcgtcgataccgccggtcgtctgcacgtcgatgtcgagatgatgggcgagatccaggcgctgcacgctgcgaccaagccagccgaaacgctgttcgtggtcgatgccatgaccggtcaggatgcggccaacaccgccaaggcattcggcgatgcgctgccgctgaccggtgtcatcctgaccaaggtcgacggtgatgctcgtggcggtgctgcactgtcggtgcgtgcaatcaccggcaagccgatcaagttcatcggtatgggcgagaagagcgaggcgctggagccgttccacccggaccgtatcgcttcgcgaatcctcggcatgggcgacgtgctcagtctgatcgagcaggccgaacagaccctcgacaaggacaaagccgacaaactggcgaaaaaactcaagaagggcaaaggcttcgatctcgaagacttccgcgaccagttgcagcagatgaaaaacatgggcggccttggtggcctcatggacaaactgccaagcatcggcggcgtcaacctgtcgcagatgggcaacgcccagggcgcagccgagaaacagttcaagcagatggaagcgatcatcaactcgatgacgccagccgagcgccgcgacccggacctgatcagcggctcgcgcaagcgccgtatctctcaggggtcgggcactcaggttcaggatatcgggcgtctgatcaagcagcacaaacagatgcagaagatgatgaagaagttctccgccaagggcggaatggcgaaaatgatgcgcggcatgggtggaatgctccccggcggcggcatgccgaaaatg

SEQ ID NO: 33500 - DNA, 255 bp, Pseudomonas syringae
atgcttaccatccgtcttgcccttggcggctccaaaaagcgcccgttctaccacttgaccgtaaccgacagccgcaacgctcgtgacggttcccacaaggaacaaattggtttcttcaacccggttgcccgtggtcaggaaatccgtttgtccgttaacgaagagcgcgtcaactactggttgagcgtgggtgcacaaacttccgagcgcgttgcccagctgctcaaagagcacaacaagaccaaggccgcggcc

SEQ ID NO: 33501 - DNA, 987 bp, Pseudomonas syringae
atgaatccaaataccgtgcctacgcctgcccgcggcgccattcgttgggaggcccatacctgcctgccgctgctgcccaatcaggacatgtctgcgctgctgcgctaccgcgacaacggctttcaccacgtctcggtcaatgtcggcatggacatgaccgctgttggcgatgtgatgcaggtcatcgcaggctttcgccagtggctgatcaagcatccagagaacttcatgctggccggtacccttgcagatctgcaacgcgcccgcgtgcaggacaagctggcagtgtctttcgacttggaaggctccaacatgctgctgcaagaccaggcaatggtccgcttgtatgccgacctgggcgtccgccagatgcttctggcgtacaacctcgataacagctgtgcgggcggttgccacggcagtggcatgggattaaccgcgctggggcgggagtttgtgggagccatcaattcggcgggtatcgtgatggactgctcacatgccagcaagcgcgcgagtatggaaataatcgagctgtcacagcgaccggttgtcttttcacacactaatatcaaggcagtgtatgaccatccacgcacggtggatgatgagcagatcatggcctgtgttgaatcaggtggtgtgatcgggctgaccggtatggggatttttctgggcgatccgcaggcatcggtcgaagccttcgtgcgccaaatcgattatctggccgaacgagcgggaacggcacatatcggcctgggcctggacatcgaactgcaccccgacgataaggatttggccgagggcgtgaatgaagacgattggtggccaaaagaattctatggcggcatcaacgggcatcgtcaactgcagccggaagcgctgggtcaggtcgcagaagcattgctacggattggctatgacgccgcgcagatcaacggcatttttggcggcaactttatgcgggtcgctcaggccacttggcca

SEQ ID NO: 33502 - DNA, 369 bp, Pseudomonas syringae
gtggagctggtcagcggacgcttgcagagcaagtttctggtcgtaaagctcaagggtctcgatgatcgtgaagaagcccgtcttctctccggttacgaaatctgcgtgccgcgcaacctgttccctgatctggacgacggcgagtactactggtaccagcttgaaggcctcaaggtcatcgaccaactcgggcaattgctcggaaaaatcgatcacctgctcgaaaccggttcgaacgatgtaatggttgtaaagccctgcgcgggcagccttgatgatcgtgaacgcctgttgccctatacagagcaatgcgtgttggcaatcgacatggccgctggcgagatgaaggtggaatgggacgcggacttc

SEQ ID NO: 33503 - DNA, 348 bp, Pseudomonas syringae
atgactaacaaaatcattcttgccctcgaagcagagcagatgaccaaagagatccctacctttgcaccaggcgacaccatcgtcgtccaggttaaagtgaaggaaggcgaccgcgctcgtctgcaagcattcgaaggcgttgtcattgccaagcgtaaccgtggcgtgaacagtgctttcactgttcgtaaaatctccaacggtgttggcgttgagcgtactttccagacttacagcccgcaaatcgacagcatggctgtgaaacgtcgcggtgacgttcgcaaggccaaactgtactacctgcgtgacctgtccggtaaagcagcgcgcatcaaggaaaaactgtcc

SEQ ID NO: 33504 - DNA, 894 bp, Pseudomonas syringae
atggctgccatcgaccacccgctgattgaccggtttctcgacgcgctctggctcgaaaagggcctgtccgataatacccgtgactcataccgcagtgaccttgcgctgttcaacggctggttgcaggagcgcaacgtcgatctgcccggtgccgggcgcgaagtgatcctcgatcaccttgcgtggcgcgtggaaaatgcctacaagccacgttccactgcgcgttttctgtccggcgcgcgtggcttctaccgctacctgctgcgcgaaaagctgatttccgtcgatcctaccctgcagatcgacatgcctcagttgggcaaaccgttgcccaaatcgctttccgaagccgatgtcgaagcattgcttgctgctcccgacctgagcgagcccatcggcgaacgtgaccgtgccatgcttgaagtgctgtatgcctgcggtctgcgcgtgactgagttgatcagcctgaccctggagcaggtcaacctgcgccagggcgtgctgcgggtcatgggcaagggaagcaaggagcggctggtgccgatgggtgaagaggccatcgtctgggtcgaacgctacatgcgtggtgcccgcgacgagttgttgggcggcaagcccagcgacgtcctgttccccagcacccgcggcgaccagatgacccggcagactttctggcaccgtatcaagcatcaggcgacggttgccggcatcggcaaatccctgtcaccgcacaccctgcgtcacgccttcgcgactcatttgctcaatcacggcgccgacttgcgtgtagtgcagatgttgctcgggcacagcgatctgtcgacgacccagatctacacccatgtggcgcgtgcacggctgcaggaaatgcacgcgaagcatcatcctcgggga

SEQ ID NO: 33505 - DNA, 171 bp, Pseudomonas syringae
gtgctggtcagcggcctcaagcgcaagggcgagaccctcgacgtcagcggcaagccacctttgaccctgcgtctgggcttcgcgcgcggtgcgcaggtcagctataacggtcaggcggtagacgtggcacctttcaccagcggcgagactgctcgcctgaagctagggcaa

SEQ ID NO: 33506 - DNA, 1425 bp, Pseudomonas syringae
atgctcggcgcctgtgtggagaaacccaccacactggagcgagtcaaggaggacggcgtgctgcgcgtgatcactcgtaacagcccggcgacttattttcaggatcgcaacggtgaaaccggcttcgaatacgagctggtcaagcgtttcgccgacgatctgggcgtcgaactgaagatcgaaacagccgacaatctggacgatctgttcgatcagatgaacaaaccgggcggtccggtcctcggcgcagcgggcctgatcgagacgtcaaagcgcaagcaacaggcgcgtttctcgcactcttacctggaagtcacccctcaggttgtctaccgcaacggccagtcgcgccccaccgaccccggcgatctggtgggtaaacgcattgtggtcctcaaaggcagcgcgcacgccgagcagcttgcggcactcaaggcgcagacccccgctatcgaatatgaagagtcggacgcggtcgaggtcgtcgatctcctgcgtatggtcgacgaaggccagattgacctgacgctggtcgactccaatgaactggcgatgaaccaggtgtacttccccaatgtgcgtgtggcgtttgacctgggcgaagcccgtgagcagcgctgggcggtggcaccgggtgaagacaacagcctgctcaacgaaataaacgcttacctggacaaggtcgagaaaaacggcacgttgcagcgcctcaaggaccgctattacggtcacgttgacgtgctcggctacgtcggcgcctacacctttgcccagcacctgcaggaacgcttgcccaaatacgagaaacacttccagacatcggccaagaaagaacaggtcgactggaggctgctggctgccatcggctatcaggaatcgatgtggcaaccggccgtcacgtcgaaaaccggcgtacgcggcctgatgatgctgacccaaaacactgctcaggcgatgggcgtgaccaacaggctagatgcacggcaaagcattcagggcggggccaagtactttgcctacgtaaaggatcagctggacgacaagattcaagagcccgatcgtacgtggctcgctcttgcttcctacaacattggtggcggtcatctcgaagatgcgcgaaaactggctgaaaacgaggggctgaaccctaataaatggctggacgttaaaaaaatgttgccgcgtctggcgcagaagaagtggtacagcaaaacgcgttacggttatgcccggggcggcgagcccgtgcattttgtcgccaacattcgccgctactacgacattctgacctgggtcacgcagccgcaacttgaaggcagccaggtcgccgatggcaacctgcacgttcccggcgtcgacaagacccagccacctgcgccgaccgcacccgttgtacccgcttccagcccggaaaagcccgcgctc

SEQ ID NO: 33507 - DNA, 1107 bp, Pseudomonas syringae
atgcacggcgaatctccgatcaagcgtcgcgaatcccgaaaaatatgggtcggttctgtaccggtcggcggcgatgcgccgattgctgtgcagagcatgaccaacagcgacaccaatgatgtggcggccactgttgcgcagatcaatcgtctggaagcggccggtgtcgatatcgtgcgcatctccgtaccggacatggatgctgccgaggctttcggtcgcatcaagcaactggtcaaggtgccactggtcgccgatatccatttcgattaccgcatcgcgttgcgcgtggcagagctgggtgtcgactgtctgcgtatcaaccctggcaacatcggtcgtgaagaccgcgtgcgcgcggttgtcgacgcggcgcgtgatcgcggcataccgatccgtatcggcgtcaacgccggttcgctggaaaaagacctgcagaagaagtatggcgagcccacgccagaggcgttggtagagtcggcgctgcgtcatgtggagcaccttgagcgcctgaacttcaaggacttcaaggtcagcgtcaaggcctccgatgtgttcatggcggtcgctgcttatcgcctgctggccaaacagattgtccagccgctgcatctgggaatcaccgaagccggtggcttgcgttcgggcaccgtgaaatcggctgtcggtctcggtatgctgcttgccgaagggattggcgatactatccgcatctcgctggccgctgacccggtcgaagaggtgaaggtcgggtatgacattctcaaatcgttgcgccttcgttcccgtgggatcaacttcatcgcctgcccgagctgctcgcggcagaactttgatgtggtcaagaccatgaacgagctggaaggtcgcctcgaagatttgctggtgccactcgatgtcgcggtgatcggctgtgtggtcaacggtcctggcgaagccaaggaggcgcatatcggcctcacggggggtacgccgaacctgatctacatcgacggcaagcccgcgcagaaactgaccaatgacaatctcgtggatgagcttgaacgcttgattcgcgagaaagcggccgaaaagaccgcagccgacgcctcggtcatcgtgcgcggc

SEQ ID NO: 33508 - DNA, 3894 bp, Pseudomonas syringae
atgttgatcctgcgcggtgctcctgccctttctgcctttcgccacagcaaattgctggaacaactgaaacaaaaagtttcagctgtcagtggtctgtacgccgaattcgcccacttcgctgacgtcaatgacgtgttgaccggcgaagaacagcaggttctcgaccgcctcctgaaatacggcccgagtgtgccggttcaagagcctgccggccgtctgtttctggtgttgccgcgttttggcactatttcaccctggtcgagcaaggccagcgacatcgcccgcaattgcggcctgactaaaatccagcgtatcgagcgcgggattgccttctatgtagaaggccagttcagcgatgcagacgctcaggccattgctgacagcctgcacgaccgcatgacgcagctggtattgggcgaccatgcgcaggccgccggtctgttcagccacgccgagcccaaaccgctgaccgctgtggacatcctcggtggtggccgcgcggcgctggaaaaagccaacgtcgagctgggcctggccctggctgaagatgaaatcgattacctgatcaccagcttcaacggtctggggcgcaacccacacgacatcgaactgatgatgtttgcccaggccaactccgagcactgccggcacaagatcttcaacgccagttgggatatcgacggccagagccaggaaaaaagcctgttcggcatgatcaagaacacctatgagatgcacagcgaaggcgttctgtccgcttacaaggacaacgcctcggtgatcgtcggcagcgttgccggccgtttcttcccggaccctgacacccgccagtacggcgcggtgcaggagccggtgcatattctgatgaaggttgaaacccacaatcacccgactgccattgcgccgtttccaggcgcagcgaccggctccggtggcgagattcgcgacgaaggtgcaaccggtcgcggtgccaaaccgaaagcgggtctgaccggtttcaccgtgtccaacctgcagatccccggttttgtgcagccttgggaagtgccgtacggcaaacccgagcgcatcgtcaccgcgctggacatcatgattgaaggcccgctgggtggcgcggcgttcaacaacgagttcggtcgcccggcgctgactggctacttccgtaccttcgagcagtccattaccacaccgcatggcgatgaggtgcgtggttaccacaagccgatcatgctggcaggcggtatgggcaatatccgcgaagatcacgtccagaaggccgaaatcactgtcggctccaagctgatcgtgctgggtggcccggccatgctgatcggtctgggcggcggtgcagcgtcctcgatggcaaccggtaccagttctgcagacctggattttgcttcggttcagcgtgaaaaccctgagatggagcgtcgttgtcaggaagtgatcgaccgctgctggcagttgggcgatcgtaacccgatcagcttcattcatgacgtcggcgctggcggtctgtccaacgccttccccgagctggtcaacgatggcgatcgcggtggtcgtttcgagctgcgtaacgtgcctaatgacgagccggggatggccccgctggaaatctggagcaacgagtcccaggagcgttacgttctggcggtcggtgtcgcagactacgaacgcttcaaggccatctgcgagcgcgagcgttgcccgtttgcagtggtcggcgaagccactgccgagccgcaactgactgtaaccgacagccacttcggcaacagcccggtggacatgccgctggaagtcttgctcggcaaggcgccgcgcatgcaccgttcggttgcgcgtgaagccgaaatcggcgacgacttcgacccgagcacactggatatcgaagaaagcgtacagcgcgtcttgcgtcacccggccgttgccagcaaaagctttttgatcaccatcggcgaccgcagcatcacgggcctggtagcccgcgatcagatggtcggcccgtggcaggtgcctgtggctgactgcgccgtgaccgcgaccagcttcgacgtcaacaccggtgaagccatggcgatgggcgagcgtactccgctggccctgctggatgctccggcgtccgggcgcatggcgatcggcgagacgctgaccaacatcgcggcttcgcgcattgaaaagctgtctgacatcaaactgtcggccaactggatgtcggcggcaggccatcccggcgaagatgcgcgcctttatgacaccgtgaaagcggtcggcatggagctgtgtccggaactgggcatcactattccggtgggcaaggactcgatgtccatgaaaacccgctggagcgacgaaggcaccgagaagagcgtgacctcgccgctgtcgctgatcgtgaccggctttgcgccagtggtcgatatccgcaagaccctgacccccgaactgcgcatggacaagggcatcactgacctgatcctgatcgacctgggtcgtggccagaaccgcatgggcgcgtcgattctcgcccagacccacggcaaactggggcgtgtggcaccggacgtcgatgacgctgaagacctcaaagccttctttgccgtgattcagggcctcaattcagatggccatatcctctcctatcacgaccgttccgacggtggtctgctggtcagcacgctggaaatggcctttgccggtcactgcggcctgaacctgcacctcgacggtctggccgacaatgtttccgagctgagcgccatcctgttcaacgaagagctgggtgcggtcattcaggtgcgtcaggacgctacgccgctggtcttggcgcagttcagcgctgccgggctggaagattgcgtcgctgtcatcggtcagccgatcaacaatgacgaagtgtcgatcagcttccttggcgagccggtattcagtggccagcgccgtctgttgcaacgccagtgggccgagaccagctaccagatccagcgtctgcgtgataacgccgagtgcgctgatcaggaattcgacgcactgctggaagaagacaatccaggcctgaccgtcaagctgggcttcgacgtcaacgaagacatcgccgcaccgtacatcaagacgggcgtgcgccctcaggtcgccgttctgcgtgagcagggtgtcaatggtcaggtcgaaatggccgcagcctttgatcgcgccggtttcaacgcgattgacgtgcacatgagtgacattctggccggtcgtgtcgatctgaacgacttcaagggcatggttgcctgtggcggtttctcttatggcgacgtgctgggtgccggtgagggttgggccaagtcggcactgttcaacagccgtgcccgcgatgcgttccagggcttcttcgagcgttccgacagcttcacgctgggtgtgtgcaacggttgccagatgctttccaacctgcacgaactgattccgggcagcgagttctggccgcactttgtgcgtaaccgctccgagcagttcgaagcgcgtgtggcaatggttcaggttcaggagtcggcgtcgatcttcctgcagggcatggccggctcgcgcatgccgatcgccatcgctcacggcgaagggcatgcggaattccgcaacgacgatgcactgcttgaagcggacgtgtccggtactgtggcgctgcgtttcgtggataaccacggcaaggtcactgaaagctacccggccaacccgaacggctcgccgcgcggtatcggcggcatgaccaccctcgacggtcgcgtgaccatcatgatgccgcacccggagcgcgtattccgcgcggtgcagaactcatggcgtcctgaggactggaacgaagacgctgcctggatgcgtatgttccgcaatgcgcgggcctgggttaac

SEQ ID NO: 33509 - DNA, 1287 bp, Pseudomonas syringae
gtgagtaagtctctacaagccattcgtggcatgaacgacattctgcccgagcagacgcccctgtggcgtcactttgagggcactgtttcgcgtttgctggataactacggttaccggcagattcgtatgcctgtcgtcgaattcaccgacctgttcaagcgctctatcggcgaagtaaccgatatcgtcgaaaaagagatgtacaccttcgccgaccgtaacggcgactctctgaccctgcgcccggaaggcactgccgcctgcgtgcgtgcggttcttgaacacggtattaccggtggcggtcaggttcagaaactgtggtacatcgggccgatgtttcgccacgagcgtccacagaaaggccgctatcgccagtttcaccagatcggtgtagaggttttcaatcttgacggcccggacatcgatgcagaactgatcgtcatgacctggcgcctgtggggcatgctgggcattcgtaatgccgtcaagcttgagctgaacagcctgggcaccagtgaggcgcgtgcgcgttaccgcgatgcgctggtcgagtttctttcggcccatcttgatcaactggacgaagacagccagcgtcgcctgaaaaccaatccgctgcgtgtactggacaccaaacaccctgaaacccaggctgtgctggttgatgcgcccaagctggcggattatctggatgacgagtcgcgcatccacttcgaaggcctcaaggcccgtctggacgctgccggcattccttatgtcatcaaccccaagctggtacgcgggctggattactacagcaagaccgttttcgaatgggtcaccgatcaactgggtgcccaaggtacggtctgcgcgggcggtcgttacgacggtctggtcgagcagatgggcggcaagcccactgccggcgtcggttttgcaatgggcatcgagcggctggtattgctgcttgaaacccttgaacaggttcccgaagaaattgcccgtcaggtcgatgtctacctgtgtgccttcggcgaagcggccgaactggctgcgctggcgctgaccgaacaggtccgtgaccggttgcccaacctgcgcctgcaggtcaacgccggtgcgggcagcttcaagagccagttcaagaaggctgacaagagcggcgcgctgtacgcgctgatcctcggtgaagaagaactggctgcaaagatcataggcgtcaaacccctgcgtggtcagggtgaacaacaaaatattgcctgggacgctctgtcagagcacctggcctcctgcgttgtgcagggt

SEQ ID NO: 33510 - DNA, 1407 bp, Pseudomonas syringae
atgcgctatatcagtactcgcgggcaagcgcctgcattgaatttcgaagacgtgctgttgactggtctggccagcgatggtggtctgtatgtgccggaaaacctgccacgtttcacacaggaagagatcgcttcctgggccggcctgccgtatcacgagctggccttcaaggtgatgcgcccgttcgtcgccggaagcattccggacgccgatttcaagaagatcctggaagaaacctatggtgtcttcgcccacagctcggtcgcgccgttgcgccagttgaacggcaacgagtgggtgcttgagctgttccacggcccgaccctggcgttcaaggactttgccctgcaattgctcggtcgtttgctggactacgtgctggccaagcgcggcgagcgtgtggtgatcatcggtgccacttcgggcgataccggttctgcggccatcgaaggctgccgtcgctgcgataacgtcgatatcttcatcctgcacccgaacaaccgtgtatcggatgttcagcgtcggcagatgaccaccatctttggcgataacattcataacatcgcagtggaaggcaacttcgacgactgccaggaaatggtcaaggacagcttcgccgatcagagcttcctcaagggcacgcgtctggtggcggtcaactcgatcaactgggcgcggatcatggcccagatcgtctactacttccatgcatcgctgcagttgggcggcccggcgcgttcggtatcgttctcggtgccgaccggcaacttcggcgacatcttcgccggttacctggcgcgcaacatggggctgccggtcaatcaactgatcgttgccaccaaccgcaatgacattctgcaccgcttcatgagcggcaatcagtacgtcaaggaaaccctgcacgcaacgttgtcgccgtcgatggacatcatggtctcgtcgaatttcgagcgcctgctgttcgacatgcacggtcgcaacggctcggcgattgccgatctgatgagcaatttcaggcagggcggcggtttcagtgtcgaagaagagcgctggaccgaaacccgcaaactgttcgactcgctggcggtcagcgacgaagacacctgcaagaccatcgccgaggtgttcgccagcaccggcgagctgctcgacccgcacactgctatcggtgtgaaggctgcccgcgaatgccgtcgcagccttgacaccccgatggtgattctggggacggcacatccggtcaagttcgctgagtcagtggagaaggccggtgtaggaaaagcgctggagctacctgcacatttgtctgatttgttcgagcgtgacgaacgttgcaccgtgttgccaaatgacctgaaagccatacaggcgtttgtcagccagcatggcaatcgcggcaaaccgctc

SEQ ID NO: 33511 - DNA, 1065 bp, Pseudomonas syringae
ttgcctccggccgagctgaccgacttcaaagaagaagtggttctgcacaagcagtggagccgttcgattggtgacggccagggcaagacctacaacatgatggtcccggccattgatggcgaccgtatttatgcggctgacgtcactggcgaagttttttcgctggatcgtctgaccggtgacgtgatctggaagaaagatctcgatcttccggtttccggcgctgtgggtgtgggctacggcctggtgatgatcggcaccctcaagggtgaagtggtcgccatggacgcctcgaccggcgaagaaaaatggcgcgcccgcgtgaccagtgaggtgctggctccgcctgccaccaacggttccgtggttgtggttcagactcaggatgaccgtgttgtcggctttgatgcctccaccggctcccagctctggatctacgaaagcacgccagcggtgctgacactgcgcggcaccggtgctccactggccaccaaccgcctcgctgtagcgggtctgtcgaccggcaaggtcgtcgcgctggatatttccaatggcgtgccgatctgggaacagcgcgtagcgatccctaaaggtcgctcggaactggaccgcgtggtcgatatcgacggtggcctgctgctgtccggcggtacactgtacgtcgctacctatcagggtcgagttgccggcctggaactggaaagcggtcgtgtgctgtggcagcgtgatgcttcaagctactcgggcgttgcccagggctttggcagtgtttacgcaaccctggcctccggtactgtcgaaggcatcgacgagcgctcgtcctctgcactgtggagcaacgaatcgctggctcgccgccaactgggcgcaccggaagtgtattcaagctatgtagcagtgggtgacatggaaggctaccttcacctgttgagccaggtcgacggtcgttttgtcggtcgcgagcgcattgacagcgacggcctgcgtgctcgtccgctggtggttggggacatgatttacgtgtatggcaacagcggcaaactggaagcgctgtccatcaagcaa

SEQ ID NO: 33512 - DNA, 1479 bp, Pseudomonas syringae
gtggagagcctaatggttcccgtaatcgccctggtgggtcgaccgaacgtcggcaagtccaccatgttcaaccgcctgaccaggacccgcgacgctattgtcggcgatctgtccggtcttacccgtgatcgccaatacggagaggcgaagtggcaagggcgctcctatattctgatcgacaccggcggtatttccggtgacgagcatggcatggacgaaaaaatggccgagcaatcgctgctcgccattgaagaagccgatgtggtgctgtttctggtggacgcccgtgcgggctataccgccgctgatcagatgattggtgagcacctgcgcaagcgcaacaaacgttcttacgtggttgccaacaagatcgacaacatcgatgagaacctggcgcgtgccgagttcagcccgatgggtctgggcgatgccattccggtggccggtgcccacggtcgcggcatttcgcagatgctcgaaatcgccctgcgcgaattccccaaggacgaggacgagctcgaagaaggtgaagtcgaggaagttgccgaaggtcaggaagccaagcgcattcccggcccgagcgaaaaagacggcatcaagatcgccatcatcggccgtcctaacgtcggcaagtcgacgctggtcaaccgtatgctcggtgaagaccgggttatcgtctatgacgagcccggcaccacccgcgacagtatctacattcccttcgagcgtaacgaagagaagtacacgctgatcgacaccgccggtgtgcgcaagcgcggcaagatccacgaagaagtagaaaagttctccgtggtcaagacgctgcaggccatcaaggacgccaacgtggtgatcttcgtgatggacgcccgtgaaggtgtggtcgaccacgacctcaacctgctgggcttcgcacttgaagcggggcgtgcactggtcatcgcgctgaacaagtgggatggcatgacgccgggtgagcgtgacttcgtgaaaatcgagctggaacgccgattgttcttcgttgatttcgcggatatccacttcatctcggccttgcatggcacgggtgtgggtaacctgtatcagtcggtacagaactcgttcaagtctgcggtaacgcgttggcctaccagccgcctgacccagattctggaagatgcggtcagcgagcacgcaccaccgatggtcggcagccgccgcatcaagttgcgctacgctcacttgggcggcgccaacccgccgttgatcgtgattcacggtaaccaggtcgaaaaagtacccaagtcctacgtccgttacctggaaaacacctatcgccgtgtgctcaagctggtcggtacgccgatccgcatcgagttcaagggtggcgagaacccgtatgaaggcaacaagaacacgctgactgaccgtcaggtcaacaagaagcgtcgaatgatgtcgcaccacaagaaagccgacaagaagcgccgcgacaagcgc

SEQ ID NO: 33513 - DNA, 594 bp, Pseudomonas syringae
atgctggatgagctacttcgccgtgtagtcagtcatacgccagaaaccttggactcggatcgacaattccccgaggccgctgttctggtgcctgtcacccgcagtgagcagcccgagctgatcctgaccttgcgtgccagtggcttgtcgactcacgggggcgaagttgcttttccgggcggtcgtcgcgatccgggtgatcccgatctgatcttcacggccctgcgcgaagccgatgaagagatcggtctgcctccggggctggttgaagtcatcggaccgcttagcccgctgatctccaaacacggcatcaaagtcaccccttatgtgggggttatccccgactttgtcgagtaccggcccaatgacggcgagatcgcggcggtgttcagtgtgccgctggagttctttcgtcaggacacccgcgaacacactcaccgtatcgattacgaaggtcgcagctggtacgtgcccagttatcgatacggcgaatacaagatctgggggctgaccgcgatcatgatcgtcgagctggtcaacgtactgtacgacaccaggatcagcctgcaccatccgcccgagcgctcgaccaac

SEQ ID NO: 33514 - DNA, 528 bp, Pseudomonas syringae
ttggtcgacctctgtcggtcttgcagaaggctgcagttacatactgttttagtcactgatcgaacgtgttcagtaacccttgcttcatcattttcacttatccgggaaaacctgatgcgcgcgtataaaaacctgacggcaaagatcggcggctttctgcttgcgctgacgatcattggcacttcgctacctgcatttgccgtaaacgattgtgatctggacaacgacaacagcaccggtgccacgtgtggcggcaacgacaaggatctggataacgacaacgtgactgacgcggcatttggcggcaacgacaaggatatggacaatgaccaccacaccgacgcggcatttgggggtaacgacaaggacctggacaacgatcaccatacggatgcagcgtttggcggtaacgacaaagatctcgacaacgacaacaaaaccgatgcggctttcggtggaaatgaccgcgatcttgataacgacaacaacaccgacaactacaacggcacgccgtctgccgctaaaaag

SEQ ID NO: 33515 - DNA, 1062 bp, Pseudomonas syringae
atgcgcgtcgctgactttaccttcgaactccccgattccctgattgctcgtcacccgttggccgagcgtcgcagcagtcgtctgttgacccttgatgggccgacgggcgcgctggcacatcgtcaattcaccgatttgctcgagcatttgcgctcgggcgacttgatggtgttcaacaatacccgtgtcattcccgcacgtttgttcgggcagaaggcgtccggcggcaagctggagattctggtcgagcgcgtgctggacagccatcgtgtgctggcgcacgtgcgtgccagcaagtcgccaaagccgggctcgtcgatcctgatcgatggcggcggcgaggccgagatggtggcgcggcatgacgcgctgttcgagttgcgctttgccgaagaagtgctgccgttgctggatcgtgtcggccatatgccgttgcctccttatatagaccgcccggacgaaggtgccgaccgcgagcgttatcagaccgtttacgcccagcgcgccggtgctgtggcggcgccgactgccggcctgcatttcgaccagccgttgatggaagcaattgccgccaagggcgtcgagactgcttttgtcactctgcacgtcggcgcgggtacgttccagccggtgcgtgtcgagcagatcgaagatcaccacatgcacagcgaatggctggaagtcagccaggacgtggtcgatgccgtggcggcgtgccgtgcgcggggcgggcgggtgattgcggtcgggaccaccagcgtgcgttcgctggagagtgccgcgcgtgatggccagttgaagccgtttagcggcgacaccgacatcttcatctatccggggcggccgtttcatgtggtcgatgccctggtgactaattttcatttgcctgaatccacgctgttgatgctggtttcggcgttcgccggttatcccgaaaccatggcggcctacgcggcggccatcgaacacgggtaccgcttcttcagttacggtgatgccatgttcatcacccgcaatcccgcgccgacggccccacaggaatcggcaccagaggatcacgca

SEQ ID NO: 33516 - DNA, 1113 bp, Pseudomonas syringae
atgtctttcgagttgttggccaccgacggcaaggcccgtcgcggtcgcctgacctttccgcgtggcgtggtcgagaccccggcgttcatgccggtgggcacctacggcacggtcaagggcatgttgccgcgtgatatcgaggccaccggtgcgcagatgattctgggcaacaccttccacttgtggctgcgtccgggcaccgaggtcatcaagggccacggcgacctgcacgatttcatgcagtggaaagggccgattctgaccgactctggcggttttcaggtgttcagcctgggcgccatgcgcaagatcaaggaggagggcgtgaccttcgcctctccggtcgatggtgccaaggtgttcatgggcccggaagagtcgatgcaggtccagcgtgacctgggttcggacgtcgtgatgattttcgatgagtgcacgccgtacccggccgacgaagacgtagcacgtgtctccatggagctgtcgttgcgctgggccaagcgctccaaggtcgcgcacggcgaaaacactgccgcgctgttcggcattgttcagggtggcatgcacgagaacctgcgcaagcgttcgctcgaaggcctggatgagatcggctttgacggcctggcgattggcggtctgtcggtgggcgagcccaagcacgagatgatcaaggtgctggattacctgccgggccttatgccagcagacaaacctcgttacttgatgggtgtaggcaagcccgaagatctggtcgaaggtgtgcgccgtggcgttgatatgttcgattgtgtcatgccgacccgcaacgcccgcaacggccacctgttcatcgataccggtgtgctgaaaatccgtaacgcgttccatcgccacgacaatacgccgctggatccgacctgcgattgctacacctgcaagaacttctcgcgtgcttatctgcatcacctggacaagtgcggcgaaatgctggggagcatgctcaatacgatccacaatttgcggcactaccagctgctcatggctggtttgcgtgaggctattcaacagggtacattggccgccttcgtcgatgccttctatgccaaacgcggccttccaacgccgcctctgggt

SEQ ID NO: 33517 - DNA, 909 bp, Pseudomonas syringae
atgataaaacaacgcaccctgaaaaatattatccgtgccacaggtgtaggcctgcactccggggagaaggtttacctgaccctcaagcccgcacctgtgaataccggcattgtgttttgccgagctgaccttgaccccgtcgtgcagatccctgcgcgtgcggaaaacgtcggcgacaccactctgtcgaccactctggtcaatggtgatgtcaaagttgatacggtagaacacctgctctcggccatggctggccttggcatcgataacgcctacgtcgagctctctgcctccgaagttcctatcatggacggcagcgcaggccctttcgtattcctgattcaatcggcaggcctggaagaacaggacgcgccgaagaaattcatccgtatcctgcgtgaagtcacagtggaagagggcggtaaacgcgctactttcgtgcctttcgaagggttcaaggtcagtttcgagatcgatttcgatcaccccgtcttccgtgaccgcacccagagtgcaagcgtggacttttccagcacttcctttgtgaaggaagtcagccgtgcccggaccttcgggttcatgagtgatatcgagtacctgcgcaagcacaacctcgcactcggcggcagtgtggaaaacgccatcgtggtcgacaaggacggtgtactgaacgaagacggcctgcgttacgaggacgaattcgtcaaacacaaaatcctcgatgctatcggtgacctctacctgctgggcaatagcctgatcggtgagttccggggcttcaaatcggggcatgcactgaacaatcgtctcctgcgcgccttgatcgagcagacagacgcctgggaagtcgtgaccttcgaggatgccagtacggcacctatttcttacatgcgtcctgtcgcggccgtg

SEQ ID NO: 33518 - DNA, 1185 bp, Pseudomonas syringae
atgttcgaactcgtagacaacgtcccgcaaagcccggttatcaaggttatcggtgtaggcggtggtggcggaaacgctgtcaatcacatggtcaagagcaacatcgaaggcgtggaattcatctgcgccaacacggatgctcaagcgctgaaaaacatcggcgcgcggaccattctgcaactgggtacaggcgtgaccaaaggccttggcgctggcgccaaccctgaagtcggtcgtcaggccgcactggaagatcgcgagcgcattgcagaagttctgcagggcaccaacatggtcttcatcaccactggcatgggcggcggtaccggtaccggtgcagcaccgatcattgctgaagtggccaaggaaatgggtattctgacggtcgcagtcgtgactcgtccgttcccgttcgaaggtcgcaagcgtatgcagatcgccgatgaaggcatccgtatgctgtccgaaagcgtcgactcgttgatcaccattcccaacgagaagctgctgaccatcctcggtaaggacgccagcctgctgtcggctttcgccaaggctgacgatgtactggccggcgccgttcgcggtatctccgacatcatcaagcgtccgggcatgatcaacgtcgacttcgccgacgtgcgcaccgtgatgagcgaaatgggcatggcgatgatgggcactggctgcgccagcggtccgaaccgtgcgcgtgaggcgactgaagcggctatccgcaacccgttgctcgaagacgtcaacctgcagggcgctcgcggcatcctggtcaacatcactgccggtcctgacctgtctctgggtgagtactcggacgtgggcagcatcatcgaagcgttcgcttccgagcacgcgatggtcaaggtcggtacggttatcgatcctgacatgcgtgacgagttgcacgtgacggtggttgctaccggcctgggcgcgaaaatcgagaagcctgtcaaggtcatcgacaacacgctgcagaccacccagcaggctcctgcacagcaggcggcccgtcaggaagctccttcggtcaactaccgtgatctggaccgtcctaccgtgatgcgcaaccaggcacacgcaggcgcaacagctgcggcgaagatgaatccaaacgatgaccttgattacctggacatcccggctttcctgcgtcgtcaggccgat

SEQ ID NO: 33519 - DNA, 615 bp, Pseudomonas syringae
atgggcgtgaccaaccggttggcctgttactccgaccccgccgaccactattcccatcgcgtgcgcatcgtgctcgcggagaaaggtgtcagcgccgagatcattgaggttgtggcgggtcgtcatccgccgcagcttatcgaagtcaatccgtatggcagcgtgcctaccctggtcgatcgcgacctggccttgtacgagtccacggtggtgatggaatacctggatgagcgttatccgcatccgcccttattgcctgtctatccagtcacccgtgccaacagccgtctgctgatccatcggatccagcgtgactggtgtggccttgtggacctgattctggatactcgcagtaaagagcctgcccgtgttcaggcgcgcaaggagctgcgtgaaagcctgaccggggtttcgccgttgttcgcggaaaaagcttttttcatgagcgacgagctaagtcttgttgactgctgtctactcccaatactctggcgtttgccgattttgggtattgaattgccgcggcctgccaagccgttgcttgattatatggagcgtcaatttgcgcgtgaggcttttcaggcaagtctgtctgccgccgaacgtgaaatgcgc

SEQ ID NO: 33520 - DNA, 1230 bp, Pseudomonas syringae
atgatcgtcgggctggatatcggtacctccaaggtggtggcgctggtaggcgaagtcgcggccgatggctcgctggaaatcgtgggtatcggtacccatccgtcccgcggcctgaaaaaaggcgtggtggtgaatatcgaatccaccgtgcagtcgattcagcgcgctatcgaagaagcgcagttgatggccggttgccgtatccactcggcattcgtcggtgttgcaggcagccacattcgtagcttgaactcccacggcatcgtggcgattcgtgatcgtgaagtcagcgctgcggaccttgagcgcgtgcttgatgctgctcaggcggtggctattcctgccgaccagcgcgtgctgcataccctgcctcaggattacgtgatcgataaccaggaaggcgtgcgtgaacccctgggcatgtccggcgtgcgtctggaagccaaggtccacgtcgtgacctgcgcggtgaacgcggctcagaacatagagaagtgcgtgcgtcgctgcggtctggaagtcgacgacatcattcttgagcaactggcatcggcctattcggtactgaccgacgatgagaaagagctgggcgtctgcctggtggacatcggtggcggcacgaccgacatcgcgatcttcaccgaaggcgccattcgtcacacggcggtgatcccgattgccggcgatcaggtcaccaacgacatcgccatggcgttgcgtaccccgactcagtacgccgaagaaatcaagattcgttatgcctgcgctctggccaaactggccggcgccggcgaaaccatcaaggtaccgagcgtgggcgaccgtccacctcgcgagctgtcgcgtcaggccctggccgaagtggtcgagcctcgttatgacgaactgttcaccctgatccaggccgaactgcgtcgcagcggctacgaagacctgatcccggccggcatcgtgctgaccggtggtacggcgaaaatggaaggtgcggtggaactggccgaggaaatcttccacatgccggtgcgcctgggcgtgccgcacagcgtcaaagggctcgcggatgtggtgcgcaacccgatctattcaacgggcgtaggcctgttgctgtatggcctgcagaaacagtcggacggtatttcgctgtccgggattgtcggcaacagcagctacagcgacgaaaccaaggccccggtgcttgagcggatcaagcgttgggtgcagggcaatttc

SEQ ID NO: 33521 - DNA, 426 bp, Pseudomonas syringae
atgaaaacttttactgctaaaccggaaacagttaagcgcgactggttcgtcgtcgacgctgctggtcagaccctgggtcgtctggccaccgaaatcgcgagccgtctgcgtggcaagcacaaaccggaatacactccgcacgttgacaccggcgactacatcgtcgtgatcaatgccgagcagatccgcgttactggtgccaagaccaccgacaagatctactactcacactccggttttccgggcggmatcaagtcgatcaacttcgaaaagctgatcgccaaagctcctgagcgcgtgatcgagaccgcggtcaaaggcatgctgcctaagaacccgctgggtcgcgacatgtatcgtaagctgaaagtctatgcgggcgctgtacaccctcatactgctcagcagcccctagaactgaagttt

SEQ ID NO: 33522 - DNA, 867 bp, Pseudomonas syringae
atgtacggcccgtcggcacgtcctcagccccccgctcccggccgcaacaagcccgtgccgcgtggcgccagccggatggtggccaaagagcctctgtcggcgcgcctgcccaaggccaacttcagttttctgaagcgtttgttctggccagtgctgttggtggtgctgggctttggtacttatgagggcgcacagcgtctgctgccgtatgccgaccgcccgattgcccgcatcaatgtgcagggcgatttgagttacatcagccagcaggctgtgcagcaacgaattgcgccttatgtggcgtcgagttttttcaagatcgatctggccgccatgcgcaccgaacttgagcagatgccgtggattgcacacgctgaagtgcgtcgcgtctggccggatcaggtggtcattcgtcttgaagagcagttgccggttgcccgttggggcgatgaagcactgttgaataaccaggggcaggctttcacaccgcgtgaactgtccaattacgaacatcttccccagttgttcggcccgcagcgggcccaacagcaggtgatgcagcagtaccaggtattgagtcagatgttgcggccaatgggcttctccatcgtgcgcctggaactgcgcgagcgcggcagctggttcctgacaacaggcgccggtagtgctggcccgggtatcgaactgttgcttggacgcgaccaccttgtcgagaagatgcgccgcttcatcgcgatctacgacaaaacgctgaaagaacaaataacgaatatcgcgcgcgtcgacttgcgttactccaacggccttgcggtcggttggcgcgaacaggcagcggcaacgacggacaaacccgccgtcgcgaagaat

SEQ ID NO: 33523 - DNA, 1437 bp, Pseudomonas syringae
atgccccagcctgaaatgcgccgtatccgccgcatccatttcgtcggtatcggcggcgttggcatgtgcggtattgccgaggtgctgttgaacctcggttacgaagtgtccggctccgacctcaagggctcggccgtgaccgaacgccttgagtcgttcggtgcgcagattttcgtcggccatcgcgccgagaacaccgtgggtgccgatgtactggtggtttccagcgccgtgaacacgtccaacccggaagtcgctaccgctctggagcgtcgtattccagtggtgccgcgtgccgagatgctcgccgagctgatgcgctatcgccacggcattgccgttgccggtacgcatggcaaaactaccaccaccagcctgatcgcctcggtgttcgcggccggtggcctggacccgacgttcgtcattggtggccgtctgaacgccgccggcaccaacgcgcaactgggcaccagccgttacctgattgccgaagccgacgaaagcgatgccagttttctgcacctgcaaccgctggtcgcggtggtcaccaacatcgatgccgatcatatggcgacctacggcggcgacttcaacaaactgaagaagacctttgtcgagttcctgcacaacctgccgttctacggtctggcagtgatgtgcattgatgatccggtggtgcgcgatattctgccgttggtcaagcgcccgaccatgacttatgggtttagcgaagattctgacgtacgcgcgatcaacgtgcgtcaggacggcatgttgacgttcttcaccgtgctgcgccgcgaccgcgagccgctggacgtgtcggtaaacatgcccggcaaccacaacgtactgaactcgctggcgaccatcgccatcgcgactgacgaaggcgtcagcgacgaagccatcgttcaagggctttcgggctttcagggcgtcggccgacgcttccaggtctacggcgagctgccggtcgaaggcggccacgtgatgctggtcgacgattacggtcaccacccgcgtgaagtcgctgctgtgatcagtgctgtacgtggcggctggccggatcgtcgtctggtcatggtttatcagccgcaccgtttcagtcgtacccgcgatctgtacgacgatttcgtgcaggtgcttgctgaagccaatgtgttgctgttgatggaggtctacccggccggtgaagagccggtccctggcgcggacagccgcaacctgtgccatagcattcgccagcgcggccaactggacccgatctatatcgagcgcggcgtcgagctggcgccgctggtcaagccgctgctgcgcgcaggagacattttgctgtgtcagggcgctggtgacattgctggtctggcaccgcgattactgaatagcccgctgttcgtcggcgcgaaagtggcttcgaccgaaggtaagttgaaa

SEQ ID NO: 33524 - DNA, 1347 bp, Pseudomonas syringae
atgaccactcgtatcctgaccggtatcacgaccaccggcactccccatctgggcaactacgcgggcgcgattcgcccggccatcgttgccagccgtcagagtgacgtcgattcgttctactttctggccgattatcacgcgttgatcaaatgcgatgacccgctgcgcattcagcgctcgcgtctggaaatcgccgcgacctggctggcagccggtcttgatgtcgatcgtgtgacgttctatcgccagtcggacatcccggagatcccggaactgacctggctgctcacctgcgttgcggccaagggcctgctcaaccgtgcgcacgcttacaaggcgtcggtcgacaaaaacgtcgaaagctgcgaagacccggatgcgggtatcaccatgggcctgtacagctacccggtgctgatggcggccgacattctgatgttcaacgcgcatcaggttccggtgggccgcgatcagattcaacacgttgaaatggcccgtgacatcggtcagcgtttcaaccacctgttcggcaagggcagggaattctttgtcatgccggaagcgttgatcgaagagagcgttgccacgttgccggggctcgacgggcgcaagatgtccaagagctatgacaacaccatcccgttgttcagcagcgccaaagacatgaaaagcgccatttcgcgcatcgtcaccgactcgctggcgcccggtgaagcgaaagacccggacaactcccatctgttcacgctgtatcaggcgttctccacccctgagcagtgtgcacagttccgttccgaactgttgcagggccttggctggggtgaggcgaagactcgtatgtttaccttgctggacgagcagttgggcgaggcgcgtgagcagtacctgagcctgatcgagcgcccggctgatctggaagacatcctgctcgccggtgcccagaaagcccgtcgcgtcgctaccccgttccttgaggagttgcgtgaggccgttggcctgcgctcgttccgtaccgcggtgcagaacgccgacaccggcaagaaaaagactaccaaaggcgcgcgcttcgtcagcttccgtgaagacgacggcagtttccgtttccgcctgctggccgccgatggcgagcaattgctgttgtcgcgcacttttgccgacggcaaggcggccggcatcgtcagcaagcagttgcagcagggcggtgaactggatctgcgcagtgaagccgatcgctttacgctgtggctgaacggcgagtgtgtagccgacagcccggtgttcgccgatgccactgcgcgtgacaatgcggtcgagaccctcaagctggcactcgctcctcaacaggac

SEQ ID NO: 33525 - DNA, 1068 bp, Pseudomonas syringae
atggacgctaatgtgctgattatggctggcgggaccggcgggcatgtgttcccggcactggcctgcgctcgcgaattccaggcccgtggctacaaggtccattggctgggtacgccgcgcggcattgaaaacgagctgattccgcaggcgggtctgcccctgcacctgatcaatgttaccggtctacgtggcaagggccggttgtcgctgctcaaggcgcctttcatgctgctcaaggccctgatgcaggcccgcaaggttgtgcgtcaggtgaaaccggtctgcgtggtcggctttggtggttatgtcaccggccccggcggtctggctgcaaggcttgctggcgtaccgttgatcatccacgagcagaatgccgttgccggcactgccaaccgcagtctggcgtcgttcgccagccgcgtgtgcgaggcgttcccgaatacatttgccgcctcggccaagcgccgcaccaccggcaacccggtgcgtgtcgagctgtttcttgaaacaccgcgtcaggcgctggccggccgcaaggcgcgtctgctggtgctgggcggcagcctgggcgcggagccgctgaacaagttgttgcccgacgcgctggcgcaactgcctcaggacatccagcccgaagtgtttcatcagtcgggcaagaatcatgacgccgtcactgccgagcgctatcgcaacgtgggcgtcgaggcgcaggttgcgcctttcatccagaacatggcccaagcctatagctgggccgatctggtggtctgccgcgcaggcgcattgaccatcagcgaactggccgccgccggtctgccgtcgttgctgataccgctgccccacgcgattgatgaccatcagtcgcgtaacgccgactatctggcccgcgaaggcgcagccttcgtcatgccgcaagcgacaactggcgccgccgagatggccgcacgcctgaaagaggttttgatgcaacccgaacaattgaacagcatggcccgtactgcacgcagcctggccaagcctgatgcaaccaacaccgtcgtcaatgtctgtgtggaggtggcccatggt

SEQ ID NO: 33526 - DNA, 441 bp, Pseudomonas syringae
gtggaacactcgctcttagtctggttgttgccgacgctcgccctggtggccggtgtcgtcattggttttctggtggcacgtttgctgcccaacaccgttccgaacagcactcagcgccagctggatgacattcaggagcgtttcgacacctatcagaacgaggtagtcactcacttcaacagcacggctaatctggtacagaagctttcgcaaagctatcaggacgttcaggagcaccttgcagaaggcgccaaccgtctggcactcgatgacctgacccgccagcgtctgctggccgcgctgcacccggaggccaatcaggcacaccgcgaccatcgtgatcgcctgaccccgccgcgcgacaccgaaacacccaaggactacgcccccaagtcgcctaataccccaggcatgctcgatgagcactacggcttgaaaaag

SEQ ID NO: 33527 - DNA, 1212 bp, Pseudomonas syringae
atgatcttcggtgtgatcaagccttatccatcgccactgatcagcgggcgcggtatcgacctcgacttcccgatgctggtcggttgtctggcgctgctgggcctcggtctggtcatgattacttctgcttcgtcggaagttgccgccgtgcagtcgggcaatacgctgtacatgatgactcgccacctggtctatctgctgatcggtctgggcgcgtgcggtgtgaccatgatgatcccggtcgccacctggcagcgtcttggctggctgatgctgctcggcgcgttcggcctgttgctgctggtgctggtgccggggatcgggcgcgaggtgaacgggtcgatgcgctggatcggcttcggcgcgttcaacgtgcagccgtcggagatcgccaaagtgtttgtggtgatcttcctggcgggctacctgattcgtcagcagcaggaagttcgcgagagctggatgggcttcttcaagccgttcatcgtgctgttgccgatggccggtctgctgctcatggagccagacttcggcgcaaccgtggtgatgatgggcgcggcagcggccatgttgtttctcggtggcgtaggcctgttccgtttctcgctgatggtcgtgctggcggtcgcctcggttgtcgttctggttcaggcccagccttaccggatggcgcgtctgaccaacttcaccgacccgtgggccgaccagttcggttcgggctatcaattgacccaggcgctgattgccttcgggcgcggcgagtggatcggcgtcggcctgggcaacagcgtgcaaaagcagttctatctgccggaagcgcacaccgactttgtgttctccgtgcttgcggaagagctgggcgtggtcggctcgctgatcacggttgcgctgtttctgttcgtcgccattcgcggcatgtacatcggtatgtgggccgagcgcgccaagcagttctttggcgcttatgtggcctacggtctttcgtttctgtggattggtcagtttctgatcaatatcggtgtgaacgtcggcctgctgccaaccaagggcctgaccctgccgttcctcagttatggcggcagctcgctggtcatctgctgcgcaagccttggcttgctgctgcgcatcgaatgggaatcgcgcaacaacatgggcagcgaagaagccgagttcaaggaaagcgacttcgccgaggagacgccccatggacgc

SEQ ID NO: 33528 - DNA, 1182 bp, Pseudomonas syringae
gtggaagtgcggtgtggcgaactggacgtggacttcctctgccgtgccgacgagctttatgtcagccctggtctggccctggccacaccggccttgcagcaggcgcatgcacgcggcgccaagctgtccggcgacatcgaactgtttgcccgttacgccaaggcaccggtgattgcgattaccggttccaacgcgaaaagcaccgtgaccacgctggtcggcgagatggccgcagctgccggcaagcgtgttgctgtgggcggcaacctgggcaccccggcgctggacctgctcagcgatgatgtcgagttgtacgtgatggaattgtccagttttcagctcgaaaccactgatcagctcaatgccgaagtggcgaccgtgctgaacatcagcgaagaccatatggaccgttattccggtctgccggcctatcacctcgccaagcaccgtattttccgtggcgcgcggcaagtagtggtcaatcggcaggacgcgctgtcccgtccgttgatcggcgaaggcctgccttgctggacgttcggcctcaacaagcctgacttccacggctttggtctgcgtgaagagaacggcgaaaaattcctggcattccagttcgagaacctgatgccggtgagcgagctgaaagttcgcggcgcacacaatcaggctaacgcactggcagccctggcgctggggcatgccgtgggcctgccgttcgacgccatgctttccagcctgcgtgagttcaccggccttgagcaccgctgccaatggctgcgtgagcgcaatggcgtggactactacaacgattccaaggccaccaacgtgggtgctgcactggccgctatcgaaggcctgggctcggatatcggcggcaagctggtgttgatcgccggtggcgatggcaaaggtgccgacttcagcggcctgcgtgcccccgtggctaaatactgccgcgctgcggtgttgctgggtcgcgatgccgagctgattgcccaggcgctgggtgatgccgtgccgctgattcgtgtcgacacggttcaggcggctgccgagcgcagcgccgagctggctcagcgcggcgatgccgtgttgctttcccctgcatgcgccagtctggacatgttcaagaattatgaagagcgcggacgtgtgttcgcgcaggcagtggagtgcttgtca

SEQ ID NO: 33529 - DNA, 1080 bp, Pseudomonas syringae
atgctgctgctgttggccgagttcttacaacagttctacaaaggctttgcggtctttcagtacctgtctctgcgcgggatccttggcgtgctcactgcgctgacgttgtcgctgtgcctggggccgtggatgatccgcaccctgcagatgcgccagatcggccagtcggtccgtaacgatggtccgcaatcgcacttgtccaagtccggtacgccgaccatgggcggtgcgctgatcctctcgtccatcggtatcagcaccttgctctgggctgatttgagcaaccgttacgtctgggttgtgttgctggtgacctttctgttcggtgccatcggctgggttgatgactaccgcaaggtcattgaaaagaattcccgtggtctgccgagtcgctggaagtatttctggcagtcggtgttcggcctttgcgcggcaatctttctgtacacgactgcgccatcggcgaccgaaaccacattgatcgtgccgatgctcaaggatgtgcgcattccgctcggcatcggcttcatcgtgctgacgtactttgtgattgtcggttccagcaacgcagtcaacctgactgacggcctggacgggctggcgatcatgccgacggtgatggtcggcggtgcgctgggcatcttctgctacctgtcgggtaacgtgaaattcgcggaatacctgctgattccctacgtgccgggggcgggtgagctgattgtcttctcgggtgcactgattggtgcggggctcgggtttctctggttcaacacctatccggctcaggtgttcatgggcgacgtcggtgcgctggcactgggcgctgcgctgggcaccatggccgtgatcgtgcgtcaggaaatggtcctgttcatcatgggcggcgtgttcgtgatggaaaccctttcagtggtcattcaggttgcgtctttcaaactgaccggccgccgcgtattccgcatggcgccgattcaccaccactttgaactcaaaggctggcccgagccacgcgtgatcgtccgtttctggatcatcaccgtgattctggtgctcatcggccttgccacactgaaactgagg

SEQ ID NO: 33530 - DNA, 1356 bp, Pseudomonas syringae
atgacattcagcgaactgaccgtaccgctcgacgcgcgtctggtcggcggcgattgcagctttgacggtgtgagcaccgacagccgtggcatcgcgccggggcaattgttcgtggccctgaccggcccgcgcttcgacggccatgagtacctcgaccaggtcgcagccaaaggcgcagtcggtgccctggtcgagcacgaagtggagggcgctgccttgccacaactggtggtactcgatactcgcaaggcgctcgcgcaactgggtgcgatgaaccgcaacgggtttgtcgacaggcctgtcgccgccgtcaccggctccagcggcaaaaccactgtcaaggaaatgctcgcgagcatcctgcgcacgcgcggccctgtattggcaacgcgcggcaatttgaataacgaactgggcgttccgctgaccctgctggagctggcgccggaatacacctctgccgtcattgagttaggcgcttcacgggtcggcgagattgcctacaccgtgagtctgaccaagccgcatgtggtcattattaccaatgccggaaccgcccatgtcggcgagtttggtggccccgagcgaatcgtcgaggccaagggcgagattcttgaaggcgtcgaagccagcggcacagccgtgttgaatctggaagacaaggcattcccgatctggcgcaagcgcgccggtcaccgcaacattctgaccttcgcgctggctgatgcggcggctgatttccatgccggcgagctgagccgtgatgcgcgaggctgcccgagcttcaccatggccagcccgctcggcagcgcgcaggtacagctgaatctgctgggcacgcacaacgtgaccaacgccttggccgctgccgctgccgcctgcgcactgggcgtgagcctggagggcatcgttgccggcctgaacaacgtgcagccggtcaaaggtcgcgctgtcgcgcaaatcgccagcaacggtgtgcgcgtcatcgatgacacctacaacgccaaccctgggtcgatcaacgctgccgtcgacatccttaccggttttaccggccgtaccgtgctggtgctgggcgatatcggcgagctgggcgaatgggccgagcaggggcatcacgacgtgggcgcctatgccgctggcaaggtgtcggcgctgtatgcggtcggcccactcatgacacacgccgtcagtgccttcggtgaacatgcctaccactttgccagtcaggcagagctgattgcggcgctgggcgccgagcaagaccccaataccactttactgatcaagggctcgcgtagcgctgcgatggaaaacgtcgtggctgccttgtgcggttctagcctggagaaacat

SEQ ID NO: 33531 - DNA, 1728 bp, Pseudomonas syringae
atgatgaagcttgagggcgcactgtatccttggcgttttcgcgtagtcgtgggtcttctggtctccctggtgcttgccatttgctggcgcatcgtcgatctgcaggtcatcgaccacaccttcctcaaggagcagggtgacgcgcgcagccttcggcatattccgattccggctcaccgtggcctgatcaccgaccgtaatggcgaaccgcttgcagttagcacgccggttaccacgctgtgggccaacccgcgcgaaatgcagcaggacaagtccaagtggccgatgcttgcagcggctacaggtcaggatctcaaagcgctgaccgatcgcctggaatcgcaggccaccaaggagttcatttacctggttcgcggcatgacgccggagcaggggcaggcggcgctggatttgaaagtccccggcgtttatggcatcgaagaattccgccgtttctacccggcaggtgatgtgaccgcgcacatggttggttttactgaccttgatgatcacggtcgcgaaggtgtcgagctggcgtatgacgactggcttgccggagtgcccggcaagcggcaggtcatcaaggaccggcgcggccggctgatcaaggacgttcaggtgaccaagaatgccaaggccggaaagaccttggctttgtctattgacctgcgcctgcaatacctggccacccgtgaactgcgtaacgccatcgttgaaaacgaagcgaaggcaggcagcatggtgatcatggacgtcaagaccggcgaggttctggcgatggtcaaccagccgacttacaacccgaacaaccgccgcaccatggtgccagccgccatgcgcaaccgggcgatcattgacgtgttcgaaccaggttcgaccatgaagccgatctccatgaccgcagcgctggacagcggccgttggaaaccgaccgacaaggtcgaggtttatccgggcaccctgcagatcggcaaatacacgattcgcgacgtcaccaagaccgaaggcccggtgctcgacctgaccggcatcctgatcaactccagtaacgtcgggatgagtaaagtcgcgttcgacgtaggcggcgaagctattttccgcgccatgcagcgcgtcggcttcggtcagtacactggcctgggcttcccgggcgagcgcgtcggcaacctgcctaactaccgcgaatggcgcaaggcagaaaccgccacgctgtcttatggctacggtctgtcggtaacggccctgcaactggtgcatgcctacggcgcgctggctaacaatggccggatcgtaccgctgaccattttgaaaacagacaaagagcccgagtcgactcaggctattcccgagaaaaccgccaagaccctgcaaggtatgttgcagcaggtgatcgaagacccgcgcggcgtgtatcgcgcccgtgtgccgtcctatcacgtcggcggtaagagcggtacagcacgtaagacgtcgatcggcaccaagggttatgcggagaactcctaccgctccctgttcgccggtttcggccccatgagtaacccgcgttacgccatcgtcgtggtcatcgacgagccgagcaagggcggttactacggcggtctggtttcggctccggtgttcagcaaggtcatgtccggcacgttgcgtctgatgaacgtgacgccagacaaccttgcgccaccggaacaagtcaatgtcgcacctgcagccaaaggagggcgtggt

SEQ ID NO: 33532 - DNA, 939 bp, Pseudomonas syringae
atgaatagcggttttacccacatcaccgtgctgctcgaagaagccgtggaggctctcgcggtgcgcgctgatggctgctatctggacggtacgttcggacgtggcgggcatagccgtctcatattgaaccacctcggccccgacggtcggctgctgggtttcgacaaggacccccaagcgattgccacagggcaagcgctagcggccgaagacggccgctttgtcattgtgcagcgcagctttgccgagttgggctcgcaagctcaggagcttggcctggcgggcaaggtcagcggcattttgctcgacctgggcgtgtcgtcgccgcagctcgacgaccccgagcgcggtttcagtttcatgaatgacggccctctggacatgcgcatggacccgacccgcggcgtcagcgctgccgaattcattgccagcgcgcccgccgaagaaatcgcccgcgtgttcaaggaatacggcgaagagcgctttgccaaacgcatggccaatgccgtcgttcagcgccgtgaaatccagcctttcgagcgcactgccgatctcgctgaagtcctcaaggtcgccaacccggcctgggaaaaaggcaagaatcctgcaacgcgtgcctttcaaggcctgcgtattcatgtcaacaacgaactgggcgatctggaagccgggcttgaagcggcaatggagtctctggaagtcggtggccgtctggtcgtcatcagttttcactcgctggaagaccgcatcgtcaagctgtttatgcgcaagctcgccaaaggcgaagccgacaacatgccgcgcaacctgccgatccagtacaaggcgttcgagccgaaaatcaagatccacggcaaagctcaattcgcatcggatgtcgaaacaaaggccaacccgcgctcgcgcagtgctgtcatgcgcgtagcggagaagctcagg

SEQ ID NO: 33533 - DNA, 453 bp, Pseudomonas syringae
gtgttccgtggtgccaatgcgatcaatctcgatgcaaagggccgtctcgctatgccgagtcggtaccgtgacgagttggattcgcgtagcgccgggcaaatgatcgtgactatcgatgctgttgacccatgcctgtgtctgtatccgctgtccgaatgggagctgatagaagcaaaacttcgtgatctggcgacgttccgtgaagagaaccgtcgtctgcaacggctgttgattggtaatgctgtcgatctggaactggacggcagtgggcgttttctggtgccgcctcgcctgcgcgaatacgcaaggctggacaagcgcgtaatgctggtgggccaactcaacaagtttcaactgtgggacgaggacgcctggaatgctcttgctgatgctgacctggctgccattcaaaaacctggcgcgatgcccgacgaattacgtgatctgatcctg

SEQ ID NO: 33534 - DNA, 396 bp, Pseudomonas syringae
ttggtgaaagaagagccgcgcacgctgatctactatgaggcgccgcaccgcatcctggaatgcctgcaggacatggagctggtattcggtgcggaccgtcatgcgttactggcgcgtgaaataaccaaaactttcgaaaccctcaagggtctgcctttgggtgagcttcgggcatttgtagaggccgacagcaatcagcagcgtggcgagtgtgtggtgctggtggctggctggacgcagcccgaagacgaagacgttattggtgccgaggcgcgccggattctggatctgctgcttgaagagatgccactcaagcgtgccgcagcgctggctgccgagataaccggggtgcgcaagaacctgctgtatcaggtggcgctggagaagcagaagggc

SEQ ID NO: 33535 - DNA, 2034 bp, Pseudomonas syringae
atgcctttgcgccaacgcctggaaaacctgccggtaggtcagaaactgctggctgccctgctggtcctgatgaccaccgtgctgctggtcgccaacctgaccttcatcggtgccgcgtattacatctctcaagaagcgatggcgccacaggccttgcagaccatcggccgactgatcagcagcgccgacctcaacgagcgggccttgtactcgccaaacgaagcacgtgccctgctcaaagagctgaaaagttacgggccgttacgtgcagcggcgctgtatgacaatgacggcgagcggcttgaacagatgcaacagggtcagagccttgaactgcccaggcacttcaaagacctcgatagctggcgcctgaccgagtttcgcagcacgcaggtgatcaccgtgcccaagggagacgagccgcccgggcatctgttgctggtcgccagcagcgagctgccgcctgcgttctataccggcacgctgaccgccagccttggcattctggtgttcagcgtgttgctgtggctggtggtggcgcggcagatcaggcgcttgatcaccgagcctatctaccaactcgaagaactgtcccggcaggtgacccgcgaagaaaactacgccttgcgcgcggagcctggcaacgtcgatgaaatcggcagtctggccgaggcgttcaataccatgttgtcgcgtatcgaggcgcgtgagcagcaactcaagcgcgcccgtgacgattcccaggaagcctacgatcaggctcaggggctggccgaggaaacccgccacaccaaccgcaagctggagctggaagttcaggtgcgcagcaagatcgagaagaagctcaccggttttcagaactacctcaacagcatcatcgattcgatgccttcggcgatgatcgcgctggatgagcagttgtacgtgacccagtggaatcaggaggcgaccgcgctttccgggaccacgctggacgaggcgctgaatcagccgatttttctcgcattcgagccgatgcgttcgtttctgccgcagatcaagcatacggtcgagcggcacagcgtgaccaagatcgagcgtgtgaactggatcaagaacgacgaggcgcgccactatgcgctgaccttttacccgctgaccggcgatgccgggcggggcgtggtgatccgcatcgatgacatcacccagcgtatttcgctggaagaaatgatggtccagtcggagaagatgctgtcagtcggcgggctggcggcgggcatggcgcatgagatcaacaacccgctgggggcgattttgcacaacgtgcaaaacatccgacggcgcctgtctccggaattgccaaagaacatcgaacaggccgaggccgatggcatcgatctggcacaggtcaatctttacctggaaagccgcgacgtgccaaagctgctcgacggcattcagcaggccggtgcaagagccgcgaaaatcgtcagccacatgctcaacttcagtcgcttgagcagccgtcagctgtcgcccagcgacttgccggcactggttgatcaggccgtggagatcgccagtaacgacttcgacctgaccatcggtttcgacttcaagggccagcacatcattcgtcagttcgacccggaactgggtccggtgccgtgcatcgccaacgagctggaacaagtgctgctgaacttgctgaaaaacgctgcccaggcaattcatcagcgacccgagagcgaagagcccggacgcattatcctgcgcacccgtctcaatccaccgtgggccgaaattcaggtggaagacaacggcatcggcatgtcggagagcgttcgcaaacgtactttcgagccgttctttaccaccaaggagattggtcagggcaccgggctgggtctgtcggtgtcgtacttcatcatcaccaacaaccacaaaggccagatggaggtgcagtcctccctcggcaccggcacctgctttaccctgcgtttaccgctggtagccaatcaggtgaatgttcagcagcaggtcatttccaagtct

SEQ ID NO: 33536 - DNA, 600 bp, Pseudomonas syringae
atgagcctgcatctgattatcggcgacaaacgctactcctcctggtcgctgcgcccctggctggtgctggaaatgatcggtgcgcccttcaccgatcaagttatccgcctcaaccagcctgatacccgcgataacattctccagtattcgccgaccggcaaagtgcctgcgctgcagtgcgagcacggtacgatcattgattcgctggccatttgcgaatacctggtcgagcgcttccctgacgccgacttgtggccgcgcgacatcgctgcccgtgcccaggctcgttcggcctgtgcgcagatgcacagtggtttcgtcagcctgcgctcgaacatgccgatggacctgcgtcgtgatcaggcgctggaagtgatttctgtcgacacccagaacgacatcgaccgcatcgttgcgttgtgggccgagtgccacgctgctgctgtcgagacgggccccttcctgtttggtaaaccgagcattgccgatgcgttctttgcgcccgtggcgattcgcctgcgcggctatcgtgtccagttgcctgccgaggcgctggcgtacgttgaaaccctgtaccagtggcctgcattcaagcgctgg

SEQ ID NO: 33537 - DNA, 2679 bp, Pseudomonas syringae
atgctcaagacggtacagatcgtcaatgccttcgaagagcaaatggtggccctttcggacgagcaattgcgcgccaagaccgaagagttcaaggcccgcatagccaaaggcgagaccctcgatcaattgctgcctgaagccttcgcggtggcccgtgaagcgggcaagcgtgtcatgggcatgcgccacttcgacgttcagttgatcggcggcatgaccctgcacgaaggtcagatcgcagaaatgcgtaccggtgaaggtaaaaccctcgtcggcaccttggctgtgtacctcaatgcgttgtccggcaagggcgttcacgtggttaccgtgaacgactacctcgctcgccgcgacgccaactggatgcgcccgctgtacgaattcctcggtctgaccgtcggcatcgtcacgccattccagccgccggaagagaagcgcgccgcctacgctgccgacatcacctacggcaccaataacgaatacggcttcgattacctgcgcgacaacatggcgttcagcatggacgacaagttccagcgcgaactcaacttcgccgtgatcgacgaagtcgactcgattctgatcgacgaagcgcgcacgccgttgatcatctcgggtcaggccgaagacagctccaagctgtataccgaaatcaaccgcctgatccccaagctcgagcagcacatcgaggaagtggaaggcgaagttaccaagccgggccacttcaccgttgacgaaaaaacccgtcaggtcgagctgaacgaagccggtcaccagttcatcgaagagatgctcaccgaagtcggcctgctggccgaaggcgagagcctgtattcggcgcataacctgggcctgttgacgcacgtctatgccggtctgcgtgcgcacaaactgttcaatcgcaacgtcgagtacatcgttcaggacggtcaggtgctgctggttgacgagcacaccggtcgtaccatgccgggtcgtcgcttgtccgagggtctgcatcaggctatcgaagccaaggaaaacctgaacattcaggctgaaagccagaccctggcctcgaccaccttccagaactacttccgtctgtacaacaaactgtccggcatgaccggtacggccgacaccgaagcgttcgaattccaccagatctacaccctggcggtgatggtcattccgccgaacaagcctttggcgcgtaaagacttcaacgacctcgtctatctgacggcggaagagaagtacgcggccatcgtgactgacatcaaggcctgcctggccgagaatcgtccggtgctggtcggtacggcgaccatcgaaacgtccgagcacatgtcccgcctgctcaacaatgaaggcatcgaacacaaggttctgaacgccaagttccacgaaaaagaagccgaaatcattgctcaggccggtcgtccaggtgcgctgaccatcgccaccaacatggctggtcgcggtactgacatcctgctgggcggcaactgggaagtcgaagtcgccaacctggaagacccgacccccgagcagatcgcacagatcaaggctgactggcagaagcgccaccagcaggtgatcgaagcgggcggcctgcatgtgattgcctccgagcgtcacgaatcgcgtcgtatcgataaccagctgcgaggtcgtgcgggtcgtcagggcgataccggttccagccgtttctacctgtcgcttgaagacagcctgatgcgcatctttgcctctgaccgggtgaagaacttcatgaaggcgctgggcatgcagtccggtgaggccatcgagcaccgcatggtgaccaacgccatcgaaaaagcgcagcgcaaggtggaaggtcgtaacttcgacatccgcaagcaactgcttgagttcgatgacgtggccaacgagcagcgcaaagtgatttatcacatgcgtaacagcctgctggctgctgagaacatcggcgacaccattgctgacttccgcgaagaagtgctcaacagcctggtcagccagcacatcccgccgcaatccctgccagagcaatggaacgttgccggtctggaagctgcactgaacaccgactttgccgtgaaaatgccgatccagcagtggctggacgaagacgacaacctgcacgaggacagcctgcgcgagaaaatcatggcgcagttgctggtcgcgtataacgagaaggaagatcaggccagcgccgaagcgctgcgttctttcgagaagcaaatcctgttgcgtgtcgtcgacgacctgtggaaagaccatctgtcgacgatggaccacctgcgtcacggcattcacctgcgcggttacgctcagaagaatccgaaacaggaatacaagcgcgagtcctttacgctgttccaggagttgctggattcgatcaagcgcgacaccattcgcgtgctttcgcacgtgcaagtgcgccgcgaagatccagaggaagaagaggcgcgtctgcgtcgcgaggccgaagaactggccagccgcatgcagttcgaacacgcgccagcgccgggtctcgatcagccgctggctgatgaagagggcggcgaagtgccggtagccgtggtctcggagccaattcgcaacgaccagaaactgggtcgtaacgagctgtgctggtgtggctctggcaagaaattcaagcactgtcacggccagatcaat

SEQ ID NO: 33538 - DNA, 1854 bp, Pseudomonas syringae
atgaacccattgcattccctgcgcgcgcaagcggccggcctgctgctggccagcctcgcttgcacggtacaggcggcgcctcagcatggcgtgacgctgtacgacgaacagcccaaatacccggccgacttcaagcacttcgactacgtgaacccggatgcgcccaagggcggcacgttccgtcaggcaggctttggcgggttcgacagcctcaacccgtttatcaacaagggcgtgccggcagatgacatcggcttgatctacgacaccctggcccgcgccagcctggacgaacccttcagtgaatacgggctggttgccggcaaaatcgagaaagcgccggacaacagctgggtacgcttctacctgcggcctgaagcacgcttccatgacggccacccgatccgcgccgaagatgtggaattcagcttcaagaccctgatggaacacggctcgcccatgtacaagggctactacgccgacgtcgatcaggtcgtcgtcgaagacccgctgcgggtgctgttcaagttcaagcacaagggcagccgcgaaatgccactgattcttggccagttgcccgtgctgcccaagcacttctgggccgaccgcgacttcagcaaaggcaacctggacttcccgctgggcagcgggccgtacaaggtggtcgatgtaaaagccgggcgctcggtgcgctatgagcgggtcaaggattactggggcaaggacctgccgatcaacaagggtttctacaatttcgacgtgctgaccaccgactactaccgcgacaatactgtcgctctggaagccggcaaggccgggcagttcgactactggatagagaccagcgccaaaaactgggcgaccgcctacaacaccccggcagtccgcgatggcaggctggtcaaggaagagctgcccaacggtaacccgaccggtatgcaggggttcgttttcaacttgcgcaaaccggtattccaggacgcgcgggtgcgcgaagcgctgaccttgctgctggatttcgagtggaccaacaaacagcttttcaacggtgcctacagccgtaccaaaagttatttcgacaactcggaaatggcctcaagcggcctgccctctgccgaggaactgaaaatcctcgaaccgctgcgcggcaagattccggatcgggtattcaccgaggcttttcagctaccggttaccgacggcagcggcatgattcgcccacaacagcgtcgggccttccagcttttgcaggaagccggctggaaaatcgtcgatgacaagatggtcgacacccaaggcaacccggtgaagctggaatttttgatcgcacagaccgaattcgagcgcatcctgctgccttacaaacgcaacctgagtaatctgggtatcgaactggtgattcgccgcgccgatgtgtcgcaatacatcaaccgtttgcgttcgcgggactacgacatgattgtcagcagctttccgcagtccagctcgcccggtaacgagcagcgcgtgtacttcgactcgtccagcgccgacaatccgggcagtcgcaatgtcatcggtttgaaggacccagccgtcgatacgctggtcaacggtctaatcaacgccgactcacgcgccagcctcatcaactacaccaaggcccttgaccgggtgttgctgtggggtttctatgtggcccccaactggcacatcaagacctggcgggtggcttactggaaccacatcgatcaccccaaggccaaggcgctttctgatatcggcctgatgacctggtgggccaaaccggatgtcaaacccgtgaccgcgaccccgtcagccactgatcaggccaagcctgcgaacgcggagcaa

SEQ ID NO: 33539 - DNA, 1311 bp, Pseudomonas syringae
atgagttcagtttccaaccgtaaagcctaccgcgccgccatcgttcacagcattgccgacccggctgaagtggcaattgaagcgtcttatgcgtatttcgccgacggcctgctgctggtcgaggatggcaagatagttgcgctgggccatgccgccgatctgctgggcagcctgggcagtgacgtggagctgatcgagtatcaggacgcgctgatcacgccgggcttcatcgacacgcacattcacctgccgcaaaccggcatgatcggcgcgtatggcgagcaattgctggactggctgaacacttacaccttcccctgcgaaagccagttcgccgaccccgagcattctgccggggtggcggatatcttcatcaaggaattgctgcgcaacggcaccaccacggcgctggtgttcggcagcgtgcacaaagagtcggtggaggcatttttcagtgcggcgcaggcgcttgatctgcgcatgatcgccggcaaggtgatgatggatcgtaacgcgccggattatctggttgatacgccagaatccggctacgccgacagcaaggcgctgatcgagcgctggcatggcaagggtcgcctgagctacgccgtgaccccgcgcttcgcaccgaccagcagcccggaacagctgagcctggcaggccagttgttgactgaataccccggtttgtacctgcagacccacatcagcgaaaaccttcaggaaatcgagtgggtcaaggcgctgtttccggagcgcaagcactacctggacgtctacgaccacttcaacctgttgagcgaacgctcggtgtttgcccacggcgtgcacctgtgcgacgaacaatgcgcgcggctggcgcaaaccggctcggccatcgccttctgcccgacctccaacctgtttctgggcagcggcctgttcaacctgccgatggccgagaagcacaaagtcaatgtcggcctgggcaccgatgtgggcggcggcaccagcttctcgattctgcagacgctgaacgaagcctacaaagtcatgcaaatgcagggcgcacggctcagcccgctcaaatcactttacctggcgaccctgggcggcgcgcgggcgctgcgcctggaagacaaggtcggcagcctcaaaccgggcaacgaggccgactttctggtgctcgattacaacgccacaccgctgctgtcgtaccggctaaaacaggcgaaaagtattgaagagattctgttcgtgctgatgacgattggcgatgaccggacagtgaagcatacgtggtcgggtgggcggttggtgcatgagcggggt

SEQ ID NO: 33540 - DNA, 2376 bp, Pseudomonas syringae
atgtctgagcattcctcccccctcacccaggccgacatgctggccctgtttcaacaggacctgagcactggcgtcggccgcagcgtgaagcacgacagcgccgacaaacatgtgtccggcgaagcggtgtacatcgacgatcgccttgagtttcccaatcaactgcacgtttacgcgcgcctctcggaccgcgcccatgcgcgcatcgtcagcattgataccgcgccctgccatgcgtttgaaggcgtaagaatcgcgattacccaccaagacattcccggcctgaaagacatcggcccgctgctgcccggcgacccgttgctggccatcgacaaggtggaattcgtcggccagccggtgcttgcggttgccgcgcgggatctggacgtcgcgcgtcaggcagctatggcggcaatcatcgaatacgaagacctggagccggtgctggatgtggttcaggccttgcgtcagaagcatttcgtgctcgacagccacacccacaagcgcggcgattcggcgacggctctgcaaggcgcaacccaccgtttgcagggcaacctgcacattggcggccaggaacatttctacctggaaacccagatctcctcggtcatgccgactgaagacggcggcatgattgtctattgctcgacccagaaccccacggaaatccagaagctggtggctgaggtgctgaacgtgccgatgaaccgcattgtggtcgatatgcggcgcatgggcggtggcttcggcggcaaggaaactcaggccgccagcccggcgtgcctgtgcgcagtgattgcgcggctgaccggtcagccgaccaagatgcgcctgcaacgcttcgaagacatgcagatgaccggcaagcgccacccgttctacatcgaatacgacgtgggctttgacgataacggtcgcctgcaaggcatccaactggatctggccgccaactgcggctattcgccagacctgtcggcctcgattgtcgaccgcgcaatgttccatgccgacaacgcctattacctgggcgaagcaaccatcaacggccatcgctgcaagacccacacggcgtccaacaccgcgtaccggggctttggcggcccgcaaggcatggtggccatcgaagaagtcatggactgtatcgcacgttttctgggcaaggacccgttggcggtccgcaaggccaactactacggcaagaccgaacgtaacgtcacccattactaccagaccgtcgagcacaacctgctggaagaaatgacggcggatctggaacagagcagccagtacgccgagcgccgcgaggccatccggggtttcaacgccagcagcccgatcctgaaaaaaggcctggcgctgacgccggtaaaattcggcatctcgttcaccgccagctttctcaatcaggcgggggcgctgatccacatttacaccgacggcagcatccacctgaaccacggcggcaccgagatgggccagggtttgaacaccaaggtcgcgcaagtcgtggctgaagtgtttcaagttgatattgaccgcattcagatcaccgcgaccaacaccgacaaggtgccgaacacctcgccgacggcggcgtccagcggcactgacctgaatggcaaggcggcgcaaaacgccgctgaaattctcaagcaacgtctggttgaatttgccgcgcggcattacaacgtggcagaaaccgaggtcgagtttcgtaacggtcatatacggatcggtgagattgtcctgccctttgccgagttggctcaacaggcatggatgggtcaggtgtcgctgtccagtaccggttattacaagacgccgaagatcttctacgaccgcagccaggcgcatggccggccgttctattacttcgcgttcggtgcggcctgcgtcgaggtgatcgtcgacaccctgaccggtgaatacaagactttgcgcactgacatcctgcatgacgtcggcgcgtcgctgaacccggccatcgacatcggtcaggtcgaaggcggctacattcagggcgctggctggctgaccaccgaagagctggtgtggaacgacaaaggcaaactgatgaccagcggcccggcgtcttacaagatcccggcggtggccgacatgccgctggatttgcgggtcaagctggtggagaaccgcaagaacccggaagacacggtgttccattccaaggccgtgggcgaaccgccgttcatgctcggcatagccgcgtggtgcgcaatcaaggacgccgtggcaagcctgggtgattatcgccatcaaccgaacatcgacgccccggcgacgccggaaaaggtgttgtgggggtgtgagcagatgcgtcagttgcacacagcagagacccatgagtatgaa

SEQ ID NO: 33541 - DNA, 3486 bp, Pseudomonas syringae
atgcgcctgaagtgcatcaaactggcggggttcaaatctttcgtcgaccccaccacggtgaacttccccagcaacatggcggctgtcgtcggccccaacgggtgcggcaaatccaatattatcgacgccgtgcgctgggtcatgggcgaaagctcggccaagaacctgcgcggcgagtccatgaccgacgtcattttcaacggctcgaccagccgcaagccggtcagccaggcgagcatcgagctggtcttcgacaactccgacggcacgctggtcggcgagtacgcggcctacgcagaaatctccattcgccgcaaagtcacccgcgacagccagaacagctattacctgaacggcaccaagtgccgtcgtcgcgacatcaccgacatcttcctcggtaccggcctgggaccgcgcagctactcgatcatcgagcagggcatgatctccaagctgatcgaagccaagcccgaggacctgcgcaacttcatcgaagaagccgccggcatctccaagtacaaggagcgccgtcgggaaaccgaaaaccgtatccgccgtacccacgaaaacctcgcgcgcctgactgaccttcgcgaagagctcgagcgccagctggagcgcttgcaccgccaggctcaggctgccgagaagtatcaggaatacaaagccgaagagcgccagttgaaggcgcaactgtcagccctgcgctggcaggcattgaatgagcaagtaggtcagcgcgaggcggtgatcggcaatcaggaagtcggtttcgaggcactggtggccgatcagcgcagcgccgatgccagcatcgagcgcctgcgcgacgggcatcatgacctgtccgagcgcttcaatctggtgcagggacgcttctattcggtgggtggcgacatcgcccgcgtcgagcagagcattcagcacggtcagcagcgcctgcgccagttgcaggatgacctgcgcgaagccgagcgcgcccgtctggaaaccgaatcgcacctgggacacgacagcaccttgctcgccaccctgggcgaagagctggaaatgcttgagcccgagcaggaaatgaccagcgccgccgccgaggaatcggccattgcgctggaagacgccgagtcggcgatgcagggctggcaggagcagtgggacgtcttcaaccagcagtccgccgagccacagcgtcaggcgcaggttcagcaatcccgtattcagcaactggaacagagcatcgagcgtctggccgagcgccagcgacgtctggccgaggaacgtcaattgctgacggccgacccggaagacgcggccattctcgagttgagcgaagaccttgcgacccgagacatgaccctcgaagaactgcacatgggtgaagagcaaacggtcgagcgtctggagcaattgcgcgaggccctgcagaacgccagtcacgcacagcagcaggcccagggcgagttgcaacgcctcaacggccgactggcatcactggaagccctgcaacaggctgcgctcgatccggataccggcaccgccgaatggctgcgtgatcagcaattggccgaacgcccgcgcctggccgaggggctgagcgtcgaggcgggctgggagttggcagtcgaaactgtattgggtgccgatttgcaggcggtgctggtcgatgactttgacgggctcgatctggccagctttcagcagggcgatctgcgcctgctcagcgccagtgccgacacggtccgggtgccgggcagcttgctggaaaaggtcgaaagcacggtcgatctgtcggcctggctgggtcaggtgatgcccgtcgagaatctggacgaagcactggcgcgccgcacgcaactgagcgccggacaaagcctgatcagccgcgacggttactgggtcggccggcacttcttgcgggtacgacgtgccagcgaagcgcagagtggcgtgttggcgcgtggtcaggaattgcagcggctggggctggaacgcgacgagcgcgaagcgaccctggcatcccttgaagagcaattactgagcctgcgcgagcaacaatcgcagcaggaagacgcccgcgagcaactgcgtcgtcgggtgcaggacgaaacccgtcagcaaagcgaactcaaggcgcagctgtcggccgccagggtcaaagtcgagcagttgactctgcgccgcacgcgtctggacgaagagctggccgagctgggcgagcagcgctctgtggaacatgagcatctgggggaatcgcgcctgcaactgcaggatgcgctggattcgatggcgctggataccgaacagcgagaagtgctccaggcccagcgtgatgcgctgcgcgagcgtctggaccgaatacgtcaggacgcgcgacaacacaaggatcacagccaccagttggccgtgcgtctgggctcgatcaaggcgcaatacgattcgacgcgtcaggcgctggagcgcctgcgcatgcagtccgaaaggctgacggaaaaacgcgaacaactgagcctgaacctggaggagggcgaggcgccgcttgaagagctgcgtctcaagcttgaagagctgctggagcggcgcatggtggtcgatgacgaaatgcgcatcgccaaaaacgcactcgaagacgccgatcgtgagttgcgtgaagcagagaaacgccgtactcaggccgagcagcaatcgcaactgctgcgtggtcagctcgagcagcaacgcctggagtggcaggcgctgagcgtgcgccgcaccgcgttgcaggaccagttgcacgaagacggctacgacctgcacggcgtgctcgccaccctgacatcggaagccagcgagcaggccgccgagcagcagctggaaagcatcgccgggcgcattcagcgcctgggcgcgatcaacctcgccgccatcgacgagtatcagcagcaatccgggcgcaagcgttatctggatgcgcaggacgccgatctggtggaggcgctcgacacgctggaaaacgtcattcgcaagatcgacaaggaaacccgaaaccgcttcaaagataccttcgatcagataaatagcggaattcaggcacttttcccgaaagttttcggtggtggctccgcttatttggaactgacaggcgaagatttactcgatacaggggtgacaatcatggcgcgtcctcctggcaagaagaacagcaccatccatttgctgtcgggtggggaaaaagcactgacggcgcttgcactggtttttgccatcttcaagctcaatcctgcaccgttctgcatgcttgacgaggtcgatgcaccactggatgacgccaacgtgggacggtatgcgcgtttggtgaaagaaatgtcacaaactgtgcagttcatctacatcacccacaacaagatcgccatggaaatggccgatcaactgatgggggtaacgatgcacgagcccggctgttcaaggcttgtagcggtggacgtcgagcaggccatggcgttggtggatgct

SEQ ID NO: 33542 - DNA, 864 bp, Pseudomonas syringae
atggaaatcggtctgcgcgagtggctgatcgtcatcggcataatagtcattgccggtattctctttgatggctggcgccgtatgcgcggcggcaagggcaaattgaaattcaggctggatcggagcttctccaaccttccggatgaagaagaaaccacgtctgccgaagtgctgggtccgccgcgtgtgctggacacgcacaaggagccgcagcttgacgagcatgatttgccgtcgatgagcgccaacccgcgtgacaacaaacgcggtgccggcagcgaaaaacgtggtgacaagaagcgtaaggacgagccgcagcagggcgatcttaatctagatctggacggcccgagcctgttcacggcgcgcgacgacgatttcccggatgataaaccggcccagcgcatcaccgaagacaaggacctgccaccagtagaagaagtactggtcatcagcgtgatctcgcgtaatgaaggcggcttcaagggcccggcgttgctgcagaacattctggaaagcggtctgcgttttggcgagatggacattttccatcgtcacgaaagcatggccggcaacggcgaagtgctgttctcgatggccaatgcggtcaagcccggcgtattcgatctggacgacatcgaccatttcagcacccgcgcagtgagcttcttccttggcttgccaggccctcgtcgtcccaagcaggcttttgatgtgatggttgccgctgctcgcaagctggctcacgagctggatggcgaattgaaagatgaccagcgcagtgtcatgaccgcgcagaccatcgagcattatcgccagcgtatcgtcgagttcgagcgtcgtgcgctaacccagcgtcgcggg

SEQ ID NO: 33543 - DNA, 1896 bp, Pseudomonas syringae
atgaaggccgccgaaacccgaatcctggaactgcgtgcagagctggatcagcacaactaccgctatcacgttctggacgagccgagcatcccggatgccgaatacgaccgcctgttccacgagctcaaggcccttgaggcagaaaacccgcatctggtcacgcccgattcgccgacccagcgggtgggcagtgccgccttgtcggctttcacccaggtgcgtcacgaaatggccatgctcagcctgggcaacgcctttgaagaaaacgacctgcgcgagttcgaccgccgtgtaaccgaagggctggacctgcctgccggggatctgtttggcgaaggcggcaaggtgcaatacagctgcgagcccaagctggacggtctggcggtcagcctgctgtaccgcgacggcgcactggtacgcggtgccacgcgcggcgacgggaccacgggcgaagacatcagcgtcaatgtgcgcaccgtgcgcaatatcccgctcaagctgcaaggcaagggctggccagagctgctggaagtacgcggcgaagtgttcatgtccaaggccggtttcgagcggctcaacgccagccagctggaagttggcggcaagaccttcgccaacccgcgcaacgccgctgctggcagcctgcgccagctggattcgaagatcaccgccaaccgtccgctggaattctgttgttatggcctggggcagacctcggcagaaattgccgacacgcacatcggcgtgcttgaaacgttgaaaaaatggggtatgccggtcagtcgcgaactgaaactggcggacggcgtcgaggaatgtctggcttactaccgcgacatcggtgagcgacgtctttcgctgacctacgagatcgacggtgtggtgttcaaggtcaacaacctggcggcgcagcgcgaactgggctttcgtgcccgcgagccacgctgggcgattgcccacaagtttccggccatggaagagctgaccgaactgctggacgttgaatttcaggtcggccgcaccggcgcggtcacgccggtcgcgcgcctcaagccggtcaaggttgccggtgtcatggtcgccaacgccacgttgcacaacatggatgaagtggcgcggctggggctgatgattggcgacacggtgattatccgtcgcgccggtgacgtgattccgcaggtagtgcaggtcgtcgtcgagcgccgccccgaaaccgccaaaccggtcgaagtcccgcaaagctgcccggtgtgcggctcgcatgtcgagcgcacgcagttgatcaaacgcagcaagggcaaggaaaccgttaccgaaggcgcggtgtatcgctgcgtcggacggctggcctgtggtgcgcaactcaagcaggcgatcattcactatgtgtcgcgtcgggcaatggacatcgaaggcctgggcgacaagaccatcgagcaactggtcgatgaaaagctcattggttcgcctgccgacctgtacaaactgaaatacgaacagatcatcgacctggagggttttgctgaaatctccagcaacaagctgctcaaggcgattgccgacagccgacagccgaccctggcgcgcttcatctatgccctgggtattcccgatgtaggggaggagacggccaaggtactggcgcgctcactggcgtcgttggaccgcgtcaaacaggcactgccggaggtgctgacgtatctgccggatgtcggtctggaagtcgcttacgaaattcacagcttcttcgaggatgagcacaaccgcaacgtcatcgacgcgctgctgggcgagtgcggtctgcaattgcaggatcagggtgagctgggtgcagagtttgccgccagcaccacgctggaaggccctgatcgaccaagctgcacccattcccatcgg

SEQ ID NO: 33544 - DNA, 2394 bp, Pseudomonas syringae
atgaagaccactattgaattgcctctcttgccattgcgtgatgtcgtggtttatccgcacatggttatcccgctgttcgtggggcgcgagaagtctatcgaagcccttgaagcggcgatgacaggcgacaagcagatcttgctgctcgcgcaaagaaacccggctgacgacgatcctgacgaaaaggctctgtacagcgtcggcaccatcgccaccgtattgcagctgctcaaactgccggatggcaccgtcaaggtgctggttgaaggtgagcagcgaggttcggtggagcgtttcatcgaagtcgatggccattaccgtgccgatgtggcgttgatcgacgaagtcgatgcgccagaccgcgaatcggaagtgtttgtgcgcagcctgctggctcaattcgagcagtacgtgcaactgggcaagaaagtccccgcagaagtcctctcttcgctcaacagcattgatgagccaggccgcctggtagacaccatggcggcgcatatggcgctgaaaatcgagcagaagcaggaaatccttgagattatcgacctgtcagcccgtgtcgaacacgtgctggccttactggatgccgaaatcgacctgctgcaggttgaaaagcgcatccgcggtcgcgtgaaaaagcaaatggagcgcagccagcgcgagtactacctgaacgagcagatgaaggccattcagaaagaacttggcgacggcgacgaaggccacaacgaaatcgaagagctgaaaaagcgcatcgacgctgctggcctgcccaaagacgctctggccaaggcaactgccgagctgaacaagctcaagcagatgtcgccgatgtcggccgaggcgaccgttgtgcgcacctacatcgactggctggttcaagtgccgtggaaggcgcagagcaaagttcgcctggaccttgcgcgtgccgaagcgattctcgacgccgaccattatggtctggacgaggtcaaggaacgcatccttgaatacctcgctgtgcagaagcgcgtgaagaagattcgtggtcctgtgctgtgtctggtagggcctccaggtgtgggtaaaacctccctggccgagtccatcgccaatgcgaccaatcgcaaatttgtgcgtatggcgctgggtggcgtgcgtgacgaggctgaaatccggggtcatcgccgtacttatatcggttcgatgccaggaagattgatacaaaagatgacaaaggtgggcgttcgcaacccgctgttcctgctcgatgaaatcgacaagatgggcagcgacatgcgtggcgatccggcctcggcattgcttgaggttctggaccccgagcagaaccacaatttcaacgaccactaccttgaagtcgactacgacctttcggatgtgatgttcctctgcacctcgaactcgatgaacatcccgccagccttgctggaccggatggaagtcattcgtttgccgggctacaccgaagacgaaaagatcaacatcgccgtcaaatacctctcgcccaagcagattcaggccaacggcttgaagaaaggcgaggtccagttcgacgaggcagcgatccgcgacatcatccgttactacacccgggaagcgggcgtgcgcgggcttgagcgccagattgccaaggtctgccgtaaggcggtcaaagaacacacgatggaaaaacgcttctccgtgcaggtcacagccgagatgctggaacacttcctgggcgtgcgtaaattccgttacggactggccgagcagcaggatcagatcgggcaggtaaccggtttggcgtggacgcaggtgggcggtgaattgctgaccatcgaagccgcagtggtctcgggcaaagggcaattgatcaagaccggttctctgggcgatgtgatggttgaatcgatcactgccgcacaaaccgtggtacgcagcagggcccgtagcctgggcattccagcggatttccacgagaaacacgacacgcacatccacatgcctgagggcgctacgccgaaggacggcccgagcgccggtgtgggcatgtgtaccgctcttgtgtcagcgcttacacagatcccggtgcgtgccgatgtggcaatgaccggcgaaatcaccttgcgcgggcaggttctggcgattggtggcctgaaggaaaaactgctcgctgcacatcgcggtggcatcaagacggtgatcattccggaagaaaacgtgcgtgatttgaaggagattcctgacaacatcaagcaggatctgcagatcaagcccgttaaatggattgacgaagtcctgcaaattgcgctgcaatacgcgccggagccgttgccggacgtggctactgatctggtcgcaaaggatgaaaaacgcgagtcggactctaaggatagaattagcacgcat

SEQ ID NO: 33545 - DNA, 792 bp, Pseudomonas syringae
atgggttttctcgccggtaagcgcgtcctgatcgtcggtgtcgccagtaaactgtccatcgcatccggtatcgccgccgccatgcatcgtgaaggtgctgagcttgccttcacctaccagaacgacaaactcaagggtcgtgtcgaagagttcgccgcaggctggggttcaggccctgagctgtgcttcccttgcgatgtggccagcgacgaagagatcaacaaggtctttgaagagctgagcaagaagtgggacggcctggacgtgatcgttcactcggttggcttcgcgccgggcgaccagctcgatggcgacttcaccaacgccaccacccgcgaaggtttccgcatcgctcacgacatcagcgcctacagcttcgtggccctggccaaggccggtcgcgaaatgatgaaaggccgcaatggcagcctgctgaccctgtcgtacctgggcgcagagcgcaccatgcctaactacaacgtcatgggcatggccaaggccagccttgaagccggcgttcgttacctggccggcagcctgggcccggaaggcactcgcgtcaacgccgtgtcagcaggtccgatccgcacgctggccgcttcgggcatcaagaacttccgcaagatgctggcagccaacgaagcgcagacccctctgcgccgcaacgtcaccatcgacgaggtcggcaacgccggcgcgttcctgtgttcggacctggcgtcgggcatcagcggtgaaatcatgtacgtcgatggcggtttcaacaccaccgcgatgggcagcatggacgag

SEQ ID NO: 33546 - DNA, 3132 bp, Pseudomonas syringae
atgtcgaaattttttattgatcgacccatttttgcctgggttattgccctcgtgatcatgctggtcggtgcgctgtctatttccagcctgccgatcaaccagtacccaagtatcgcgccaccggccattgcgattcaggtgacctacccgggcgcttctgcgcagaccgtgcaggacaccgtggtgcaggtcatcgagcagcagctcaacggcatcgacaacttgcgttatgtgagttcggaaagtaactccgacggcagcatgaccattaccgcgaccttcaatcagggcaccaacccggataccgcgcaggtgcaggtgcagaacaagctcaacctggcgaccccgctgctgccacaggaagtgcagcaacagggtattcgcgtgaccaaggcggtgaagaacttcctgatggttatcggcctggtgtccgaagacggcagcatgggcaaggaagacctggccaactacatcgtctcgaacatgcaggacccgatttcccggacctccggtgtgggcgacttccaggtgttcggctcccagtacgccatgcgcatctggctcgacccggccaagctcaacaacttccagctgaccccggtggacgtgcgagacgcaatcaccgcgcagaacgttcaggtgtcgtccggtcagttgggcggtctgccctcgataagcggccagcaactgaacgccacaatcatcggcaagacgcgtctgcagacggctgaacagttcggcaatatctttctcaaggtcaacaccgacggctcacaggttcgcctcaaagacgtcgccaccgtgggcctgggcgcagagaactacagcaccgactcgcagttcgacggcaaaccggcctcgggtctggcgatcaagctggccaccggcgccaatgcgctggacaccgccaaggccatccgcgcgaccgtttcgtcgctggagccgtttttcccgccgggcatgaaagtggtttacccgtacgacaccacgcctgtggtgagcgaatcgatcaaaggtgtggttcacaccctgatcgaagccatcgtgctggtgttcctggtgatgtacctgttcctacaaaacttccgcgccaccgtgatcaccacgctgacggttccggtcgtactgttgggcaccttcggcatcctcgcgggcttcggtttcaccatcaacaccctgaccatgttcggcatggtactggccatcggcttgctggtggacgatgcgattgtggtggtggaaaacgtcgagcgggtgatggaggaagaaaagctttctccgcgtgacgcaaccatcaaatccatgacgcagatccaaggcgcactggttggtattgcgctggtgctgtcggcggtgctgctgccaatggcgttcttcggcggctcgaccggtgtgatctacaagcagttctcgatcaccatcgtctcggccatggccctgtcggtagtggtcgcgctgatctttaccccggcgctgtgcgccaccatgctcaagcctatcgacgagaagacccacggccagcccaagcgtggtttcttcggctggttcaaccgcaccttcgaccgcagcgttgtgagttacgaacgcggcgtgggcaacatgctcaagcacaagtggctgtcgtacctgggctatatcgtgatcgttgccggcatggtcttcatgttcatgcgcattcccgcagcgttccttccggaagaagaccagggcgttatcttcgctcagatccagacaccggccggctcctcgaccgagcggacgcaagaagtcatcgacaacatgcgtgaatacctgctgaccaaggaaagcggtgcagtgaagtcggtgttctcggtgaacggcttcaactttgcgggccgcggtcaaagctcggcgattgcatttgtcatgctcaagccgtgggaagaacgtgacgccgaaaacagcgtcttcaaactggcagagcgcgctcagggctacttcttcagcctgcgtgatgcaatggtgttcgccatcgtgccaccgtcggtactggagctgggtaacgcgacaggcttcgacgtctacctgcaggatcagggcggtgtcggccatgcaaaactgatggaagcacgtaaccagttcctcggcatggccgcgcagagcaagattctcgccggtgtgcgtccgaacgggctgaacgacgagccgcagtaccagttgctcatcgacgacgaacgcgccagtgcgttgggcattaccctgtcggacatcaacaacaccctgtccatcgcgttgggtggcagctacgtcaatgacttcatcgaccgtggccgtgtgaagaaggtgtacatccagggtgatgcaggtgcccgcatgacgcctgaagacttgaaaaaatggtacgtgcgcaacagcgcgggcgaaatggtgccgttctcggccttcgccagcggcaagtggacctacggttcgccaaaactgtcgcgctacaacggcgtggcggcagaggaaatcctcggtacgccggcaccgggctacagcagcggcgatgcaatggccgaagttgaagcgctggccaagaaactgccgcaaggaatcggcatctcctggaccggtctgtcctacgaggagcgcctgtccggctctcaggcccctgccctttacgcgctgtcgttgctggtcgtcttcctgtgcctggcggcgctgtatgaaagctggtcgatcccgatcgcggtcattctcgtggtgccgctgggggttatcggtgcactgatggcaaccagcctgcgcggactgtcgaacgacgtgttcttccaggtagggttgctggtcacagtcgggttggcggcgaagaacgccatcctgatcgtcgagtttgccaaagagctgcacgaacagggcaagagcctcaccgatgctgcgatcgaagcctgtcgcatgcgcctgcgcccgatcatcatgacgtccatggcgttcatcctcggcgttgtgccgctggcgatttcctcgggcgcaggttcgggcagtcagcattcgatcggtacaggcgtaattggcggtatgatcacagccgtcgttctggcgatcttctgggtgccactgttcttcgtatcgatttcagggctcttcaagagcaagcagaaacatatttcacacgatgaggctggccaa

SEQ ID NO: 33547 - DNA, 621 bp, Pseudomonas syringae
atgtctgacgctattcactcctacgagccctccaaaggtcacggcctgccgcatgatccgttcaacgcgatcgtaggtccacgcccgattggctggatttcctcccaggatgccaacggcaagctgaacctggcaccctacagttttttcaatgcgttcaattacgtgcccccgatcatcgggttctgcagtgtcggtcgcaaagacagcctcaacaacatcgaacaaactggcgagttcgtctggaacctggcgacccgctcgctggccgaggcaatgaatcagagctgcgcgccggtctcacccgacgtcagcgaattcgagctggcgaatctgacgcccctgaaatcacagatcgtttcggtgccacgcgtacttgagacgccggtgtcgttcgagtgcaaggtcacgcaaatcattcagctgcagcgtgccgacaaggaactcgtgcccagctggctgattctgggcgaagtggtggcggtgcatatcgagaagtcactgctcaaggacggcgtctacgatacggcggccgcagagccgatcctgcgtggcggcggccctgcggactacttccagctcgggccggaagcgctgttcaagatgttccggccaggcgcc

SEQ ID NO: 33548 - DNA, 1470 bp, Pseudomonas syringae
atgatcgatttattcagcgggcttgatgcctgggtgcttgtgagcctgctgctcgccctggcgttcgtcctcaccttcgagttcatcaacggctttcatgacaccgccaacgcggtggcgacagtcatttacaccaaagccatgccgcctcatctggcagtattcttctccggtgtattcaacttccttggcgtgttgctgggcggcgtgggcgttgcctatgcgattgtccatcttttgccggtcgaactgctcatcaacgtcaacaccggacacggcctggccatggtgttttcgctgctggcggcggccattacctggaacctcgggacctggtacttcggcattccggcctccagttcacacaccctgatcggctcgattctcggtgtgggcctggccaatgcgctgatcaacggcattccgctggccgatggcgtcaactggcagaaagcgatcgatatcggcgcctcgctggtattctcgccactggccggctttatcgttgccggcctggtcctgctggcgctgaaatggtggcgcccgctgtcgaagatgcacaagacgccagaccagcgccgcaagctggatgacaaaaagcatccgccgttctggaatcgtctggtgctggtcatctccgccatggcggtcagcttcgtgcatggttccaatgatggccagaaaggcatcggcctgatcatgctggtgctgatcggcatcgtgccgagccagtttgtactcgacctcaccagcacgacctatcagatcgaacgcacccgtgatgcaacccagcatctgagccagttttatcagcgcaacagcagcacgctgggcgagtatctggcgatgggcaaagctgaaaaaggcgacctgccgtccagttccgcgtgcaacccgaaacagaccgaaccgaccatcgacgcgttgctcgatcgccttaaaggtgtgtccgactaccactcgctggcacctgaaagccgcatcgaagtgcgtcgctatctgttatgcctggacgataccgcacgcaaggtcggcaaacttccagacctgtcagcgcgtgaaaaatccgatctggacaaactgcgcaaggacctgaccaccactaccgaatacgccccgttctgggtaattctcgcggtcgccctggcactgggcatcggcaccatggtcggctggaagcgcgtagtcctgaccatcggcgagaagatcggcaagcaaggcatgacctacgcacaaggcatgtcggcgcagatcaccaccgcctgcgccatcggcctggccaacgtgttcagcctgccggtttccaccacccacattctgtcatcgggtgttgcgggaaccatggtcgccaacaagagcggcctgcaaggcggaaccgttcgcaccatcctgctggcctgggtactgaccctgccagcgacagtcgccttgtccgccgccctgttctggctggcgtccaaagctctgtcc

SEQ ID NO: 33549 - DNA, 1083 bp, Pseudomonas syringae
atgctcgccatacgcaaatacggatttctcaaggcgctgatcgtcaccgatgcagggctggccaaggccggtgtggccagccaggtcgccggactgctggtggagcagggcatcgactcggtggtgtatgacggtgccagacccaacccgaccatcgccaacgtcgaaaacggcctggctttgctgcggaaacgtcagtgcgatttcgtgatttctctgggtggtggctcaccccacgactgcgccaagggcattgccctgtgcgccagcaacggcgggcacatcagcgactatgaaggcgtcgaccgttcggcaaagccgcagttgccgctgatcgcgatcaacaccacagccggaaccgccagcgagatgacccgcttctgcatcatcaccgatgaagcgcgtcacgtaaaaatggccatcatcgaccgcaacgtaacacccctgttatccgtaaacgacccgaacatgatggtcgccatgcccaaatcactgaccgccgccaccggtatggatgccttgacccacgccatcgaagcgtatgtgtcgaccgccgccacgccgatcaccgacgcctgcgcattgcaggccatgtcactgatcgccaacaatctgcgcgaggcagtcagcaacgggacaaacatcactgcgcgcgagaacatggcctatgcccagtttctcgccggcatggctttcaacaatgcctcgctgggttacgtgcacgcgatggcgcatcaactgggcggcttctatgatttgccgcatggcgtgtgcaatgccgtgctgctgcctcatgtgcagcgtttcaacgcgagcgtcagtgctgcacgtctgaccgatgttgcccatgcaatgggggccagcgttcgtggtctgtcgccggaagaaggtgcgcacgcggcaatcgaggctattcgggccttgtctgctgcggtagagatcccggcgggcctgactgcactgggcgtcaaggaagaggatttccctgttcttgccgccaatgcattgaaagacgcttgcggtttcaccaacccacgcccggcggatcttgagcagattcaggaactgttccgccaggcactt

SEQ ID NO: 33550 - DNA, 711 bp, Pseudomonas syringae
ttgaagtctgtttcacggttgatgttgtgcatggtgatgtttttgggaggggtatttcgtgccgacgcgcaggagccagcactggtatttccgccgatgaccggtagcgtggtcgatgctgcgcagatgctcgacagccagaccacggttcgtctggcaaggctgctacgtgcccacgagcaggcaaccggtgagcgggtagtggtggtgacccaggctgatttgcagggtgcgagcctcgaggaattcggcgctcggctgggcgatgcgtgggggttggggctgcacggcgaggacgacagcgtgctgctgatgatcgaccgtgacaagcgcaaggtgtttatggaggtcggcgctgccttgcaggatcgtctcagtgacgcgcagagctcgttgatcatcgacatgctgatgacccccgagtttgacgatggccgctttgctgtcggtatagagcgtggtgcccgtgcggtcatcgcagcgctgggtggtcagatacctgactatcctgaaccgacacggcagatggctggctatgaggagcaggccagtgacgatcaggtctggctgttcgctgttgtgctgacccttattgtgttggcgattgtggttatcagcatcaggcgcggtgccgctgtacggcctgcacgtgacagaaccgctgaacgcagcggcgggcgcttcggtggcggcggtgcatcaggcaactgg

SEQ ID NO: 33551 - DNA, 2295 bp, Pseudomonas syringae
atgaataagctgtgtttattaggtttgctggtcggtatggccagtcagtcagtgatggcccaaagcgctgccgccacggacaatacaacgcttcaggccaagaatgccttcatcggcaaactgatgaaacaaatgactctggacgaaaagatcggccagttgcgtttgatcagtatcagcggggaaatgccgcagccgcaaatcctcaaggagattgctgccggaagaatcggcggcacgttcaactccattacacgctcggaaaaccgtccgctgcaggaagccgccgttgccaacagccgcctgaagattccgatgttctttgcctatgacgtcgttcacggccatcgcacgattttcccgatcagcctgggcatggccgccagttgggacatggacgccgtcgccctgatgggtcgtgtttcggctaaagaggcgagtgccgacagtatcgacatgacctttgcgcccatggtcgacatttcacgcgatccgcgctggggccgtagctccgaaggctttggcgaggacacttatctggtgtcacgcatttccgacgtgatggtccgctcttttcagggcaagaacgtcgctgcgaacgacagcatcatggccgccgtcaagcacttcgccctgtacggcgcggtcgagggcgggcgtgactacaacacagtggacatgagcatgacgcgcatgtaccaggactatctgccgccttacaaagccggcatcgatgccggggctggcggcatcatggtcgcactcaactcgatcaatggcgtcccgtccacctccaataaatggctgatgcaggacctgctgcgcaaggactggggcttcaagggcgtgaccatcagcgaccacggcgcgatcaaggaactgatcgaacacggcgtggccaaggattaccgcgaagctgccaagctggcaatcaaggctggcgtcgacctcagcatgaacgatgtggcctatggcgagcagttgcccggcctggtcaaggacggcgaggtctccatgaaggaaatcgacagcgccgtgcgtgaagtgctcggtgccaagtacgacatgggcctgttcgcctcgccttacgggcgcattggagttgccgccgatgatccggccgacacgtattccgacgaccgcctgcaccgcgccgaagcccgcgatgtcgcgcgcaagacgctggtcctgctgaaaaaccagaacgacaccctgccgctgaagaaacagggcaccatcgcagtcattggcgggttggcacaaagccacctcgacatgcttggcagttggtcggctgctggccgtcccgctcagtcggtgaccgtgtatgaaggtctggccaatgcggtcggtgacaaagccaaactgctttacgcccgcggcgccaacgtcagtgacaacgaacacgttctcacttacctgaacttcatcgagaaagaagtagagatcgacccgcgcccggcgcaggaaatgatcgacgaagccgtcaaggtcgccgagcagtccgatgtaatcgttgccgtggtaggcgagtcgcgtggcatgtcccacgaatcggccagccgcagcagcctgaacattccaggcaagcaacgtgatctgatcaaggctctgaaggccactggcaagccgttggtgctggtgctgatgaatggtcgtccgctggtactggtcgacgaacaggagcaggcagacgccatgctcgaaacctggttcccgggcaccgaaggcggcaatgccgtggctgacgtgctgttcggcgactacaacccgtcgggcaaactggccatgtcgttcccgcgctcgattggccaactgccggtctactacgcgcacctgaacacgggtcgtccataccacgaaggcaagccgggcaactacacctcgcattacttcgaagagcccaatggcccgctgttcccgttcggttttggcctgagctacacgcagttcgacgtctcggacatcaagctgtcggatgccaacatggcgcgcaaaggcaagctcaccgccagcgtgaccgtgaagaacaccggcaaggtggcgggcgctaccattgtgcagctgtacctgcacgacgtggcggcctcgatcagtcgtccggtcaaggagctgaaaaacttcgacaaggtaatgcttgagcctggtgaggaaaaagtcgttaccttcaccctcggcgaagacgacctgaagttctacaacagcgagctcaagtacgctgcagaacccggcgaattcaaggtcatgatcggcctggattcacagaccgtgaaagaagccaccttcaacctgttg

SEQ ID NO: 33552 - DNA, 453 bp, Pseudomonas syringae
atgtttcacgtcatcctttttcaaccagaaattccgccgaataccggcaatgtcatcaggctgtgcgccaacagtggctgcaccctgcatttgatcgagccgttgggtttcgagctggacgacaagcgcctgcgccgtgccggtctcgattaccacgagtatgccacgctgcagacgcacgcagacctggcaagctgcctggagaagatcggcaaccctcggttgttcgccttcaccaccaaaggctcgcggccttttcatgatgcgagctttgcgccaggcgatgcgtttctgttcggccctgaaagccgtggcctgcccgccgacattctcgactcgctgagcagcgaacatcgcctgcgcctgcccatgcgcgaaggctgccgcagcctgaacctgtccaacaccgtggcggtggccgtctatgaagcgtggcgccagcacgggtttgcc

SEQ ID NO: 33553 - DNA, 1530 bp, Pseudomonas syringae
atgacggaggccaagacactgctatcaaggatgattatgaaattacccacgattacaggtgcgtgctgtatcgccgcactgctgcccttttccattcatgctgccgccacagacctgggcgaaggactgctttcccttgccccctccaaagtcctgctcaatgccgatagctcacgcgaccactggaacggaatcggtcgtatcaagagcaagggcgggtcgagctgcactgctacgctgatcgacacccgaagcccggacagcacgcctgacgccccggcctatgtagtcaccagtggccactgcatcagccgacagaacggcgtgatcatcaccgaccgtgaggtcgaaggcagtatccagttcaacttcttcactgacagcacggcgcgcagctatccgctgaaacgcatcaactggagcagcatgcagggcgtggacctcgccgttgtcgagttgcagccaacgctcaagtcgctgatcgacgacggcattcagccgcttgcactggccagcgaaatgccggagcaggaccgcgaaattctatgggtgggtgccccgctcaacaaggataccgggcatctgcgcatggcagcgtgtgtgcatcagccgtcggaggtgatcatggagcagccttgggtctggcgtcaaacggtgcgcaatcaatgccgggatgtcgataccggggcctccggcagcccgcttctgacccgcgacaacaacgaggtttatgcggtcctgaacctcaccaaccaagcctcgtcggataacgcaactgaaaacttcagtgacgaaatacccggctttccacccatggtcgccgacagtaactatggcaacccggtcacgctgctgaacaaatgctttgtcgacggcacgttgagtacggatccggcaatctgtgacctgtttccaacgttctcggtcgactttgaaacgctgggcaggcagccggcgcagcttgcaagggtgcaactggatgccgaaggcaggaatgtctatccgtcctgggacctgcgatttctgatcgatacgccgctgtaccgttacaagaaggtcgactcggccatgcagtgcgaagacccggtgggttacagccacaccatcagctcacaggatgcggccattgatgatcctgtggatcggcagatcggaatcaactggctgtgcatgatcggcgtgtcttcggcagagcaccttcccactgtcggtctgatgcgcaatgcactgacgcttgccatcgagctgcaaccggcgggacctacacctgagccgcaggtgaagatcggcaaaaaccgctttggcgcatcatcggtcagttggtcctatgagcatcgcttgatcgaccactacacggtcaagatgggtccaccggatactactgactgttcggagcctgaaggtttcaaaacccagctccgcgacctgacactgcgcgcaaagtcgctgccgcagaagatctgcacctacgcccacgatatcaatgggcagcattctgccttacgcgaagacatcgttcccgcagccggt

SEQ ID NO: 33554 - DNA, 780 bp, Pseudomonas syringae
gtgcgctttctcggctcgcttctgttggcactctcgatcactggcgctgcgcatgcagcgccagtcgatcatgctgaaaaaacctcgaaagcctacttcaccctgatcatcgacgatctgggccagaacccggtgcgcgacagccgtactctggcgctcccaggcccggtcacgctggcgatcatgcccgacaccccgcacgccaccgagtttgcccgcgaggcccatcgcgccggtaaaacggtgattctgcacatgccgatggaccccgcgaccggcccttacgcctggcaccccgagctgcctctgccggaactggaaagtcgtctgaatgcagcgctgttgaaagtgccgtatgccgccggtatcaataaccacatgggcagccgcatgaccgccgagccggtagccatgacctggctaatggccgaactgcagcgacgtcatctgtttttcgtcgacagccgcaccagcgcaaaaaccgtggccgccgccgaggcgcagcgcatcggtctggccagcgtttcgcgcgatgtgttcctggacgacgaacgcacggccgaagccatcacccgccaattgcagactgcaatcaaactggcccaaaagcacggttcagcggtggttatcggtcacccctacccggtcacgctggacgtgctggagcgcgagctgcccaagctcaaggctcagggcgtcgaatggatcgacctgcgcagcatgatcagcgaacgcggcaatcaggcgagtgcggcgcatggcaagaatggactttaccgc

SEQ ID NO: 33555 - DNA, 411 bp, Pseudomonas syringae
atggttgctcacctgcttgaattcgccactacccactatttgatcaccggtgccttcgtcattctgctgggcctgctgattgcttacgaactgagcaagggcggcgccagcctgagcactcgcgagctgaccgcactggtcaacagcgatcagggcgtggtcatcgacgtgcgctcgaaaaaggacttcaccgccggccacatcgttggctccctgaattttccgcaggacaaggtgctgacccgcaccgccgaactgcagaaatacaaggacaagacgttgatcatagtcgatgcaatggggcagcatgcgggctctaccgcccgcgagctgctcaaaaccggcttcaaggcggccaagctgtccggcggtatttccagctggcgcggcgataatcttcctctggtgaaa

SEQ ID NO: 33556 - DNA, 249 bp, Pseudomonas syringae
atggctcaagtcatcgtctattccagcgactactgcccgtattgcatacgtgccaagcagctgttgcagagcaagagcgtggccttcgaagaaatccgggtcgacggcaagccgcaattgcgcgccgaaatgaccaagaaggccggtcgtacttctgtaccgcagatctggatcggcccgacccacgtgggcggctgcgatgacctgtttgctctggaacgtgccggcaagcttgatgccctgctggcc

SEQ ID NO: 33557 - DNA, 1329 bp, Pseudomonas syringae
atgctgtcgattgccggcgtcattggcgctggtctgttcgtcggctccggccacgcgattgccgaggccgggccagccgtgctgttggcctacgccgcagcgggtacgctggtggtgctggtcatgcgcatgctggccgaaatggccgttgcctcgccggataccggctcgttttcgacctacgccgaccgggccatcggacattgggccggctttaccatcggctggctgtactggtggttctgggtgttggtgattccgctggaagccaacgccgctgcgaccattctgcacgcctggttccccgacatcgccatatggatgttcaccctggtcatcacattgctgctgaccgcgaccaacctgttcagcgtgaagaactacggcgaattcgagttctggtttgcgctcatcaaggttgtggcgatcatcgccttcgtggtgctgggtgttgcggccatttttggtttgctgccgaccagtagcgtgagtggcgtcagtcatctgttcgacaccggtggtttcctgcctaacggcatgggcgcggtgcttgctgccatgctgactaccatgttctcgttcatgggcaccgagatcgtgaccattgcggcagccgagtccaggaaccctggcaagcagatcaccaaggccaccaattcagtgatctggaggatcttcctgttctatctggtttcgatcttcatcgttgtgtcgctggtgccgtggaatgatccgcgcctggccgaggtgggttcgtatcagaccgtgctggatgcgatgggcattccgaacgccaagctgattgtcgatctggtggtgttggttgccgtgaccagttgcctgaactcggcgctgtataccgcttcgcgcatgctcttctcgctcggcaagcgcggcgatgcaccggcgttgtccaagcgcaccagcaagggcggcacgccatactgggcggtgatcatgtcgactgcggcggcgttcctgaccgtatttgccaactacgtcgcacccgctgccgtgtttgacttcctgctcgccagctccggtgccattgcgctgctggtgtatctggtgattgccgtttcgcaactgcggatgcgccagaagcgcattgctgcaggcgagaccatcgacttcaaaatgtggctgttcccatggctgacctgggcggcgattgcgttcatcgttgccgtgctgaccatcatgttgatccagcaagagcaccgcgtcgaaatcatcgccaccggcgtgctcagcctgctggtgatcggcgccggcctgatcgtctctcgtcgccgcaaggccgggcccgtgggcgctgctgcactgggc

SEQ ID NO: 33558 - DNA, 438 bp, Pseudomonas syringae
atgggccttatcagttttatcaaagaagccggcgagaaaattctggacgcgctgacgccagaccatgctaacgcagacgacgtattgaaaaagcatatctccgaagtgggcctgggcaatcccaatgttcagactgaggtcagcggtggcactgtcaccgtgaaaggccaggtcgccaatcaggaggaaagggaaaagattgtcgtcacgctgggcaatattcatggcgtggataaagtcgacgaccaaatgactgttgcgggcggcgagactgctgaatccgaatacgtcgaagtgaaatcgggcgacaccctcagcgatatttccaagcgcgtatacggcgatgccaatcagtaccagaaaatctttgaagccaacaagccgatgctcaaggacgtaaacaagatttatccgggccagaagcttcgtattcccaag

SEQ ID NO: 33559 - DNA, 768 bp, Pseudomonas syringae
atgcgtgcgattgatctaaatagcgacctgggtgaaagcttcggcgcctggagcatgggcgacgatgccgcgatgctcgacatcgtaaccagcgccaatgtcgcctgtggttttcacgccggcgacccggcgggcatcctgcggacactgaaagccgctgccgcaaagaacgtcacgattggcgctcacgtgtcctacccggacaaggttggctttggccgccgtaacatggacgtggccagcgacgaactgaccgccgacgtgatttatcagatcggttcgctgcaaggcctggccaaggctgctggcacctcggtgcgctacgtcaagcctcacggggccttgtacaacaccattgcgcacgaccgcagacaggcgatggcggtgattgaggcgatccgcgccattgatcctgcgctggtgctcgtcgctctggcgggctccaccctgattgagctggcccgtagcgaaggtttgcagtgcatcgccgaggccttcgctgatcgtgcgtatacgccacaaggcactctggtttcgcggcgcgagcccggggctgtgcttcacgacccggagctggtggcccagcgcatgttgcgtctggttcagtcaggctccatcgaagccattgatggcagcctggtcaggatagaggccgactcgatttgtgtgcatggcgacagccccgccgccgtagagatggcccgcgagctgcgccgcgtactggaacaagccagtacatctttgcagccctttgccggaaaacgctca

SEQ ID NO: 33560 - DNA, 3120 bp, Pseudomonas syringae
atgaccgaagaccaattggaacaggaaaccctcggctggctggcagaaacgggctacagccatgtctacgggccgactatcgcctatgacggcgagagcccggaacgtgacaactaccgtcaggtgctcctggtcgagcgcttgcgcagcgctatagtcaggcttaaccccaaggtaccgcttgcagcacgtgaggatgccctcaagcaggtgcaggaactgggtctgccggtacagctgtcggccaaccgcctgtttcatcgtctgttggtcagtggcgtaccggtgcagtatcaaaaggacggtgagacccgtggcgacttcgtgcgcttgatcgactgggtcgaggtgaaggccaatgactggctggccatcaatcagttcagcatccaagggccaaaacatacccggcgtccagacatcatcctgttcgtcaacggcctgccattggtgctgctggagctgaaaaacccggccgatgtaaaagccgacctgggcaaggccttcgatcagatccagacctacaaggagcagatcccggatctgttccagtacaacgaaatcctggtgatttctgacggcagtgaagcgcgcatgggctcgttgtcggctgatgttgaacgcttcatgaactggcgcaccatcgacggcaaagatctcgacccactgggtcagttcaatgaactggagaccttggtgcgcggtgctctggcaccgccgatgctgctcgattacctgcgctacttcgtgctgtttgaggacgacggccgactggtgaagaagattgccggctatcaccagttccacgccgtacgcgccgccattggccaagtggtcagtgcctcgcgtcccggtggtacccataaaggcggcgtggtctggcatacccagggttcgggcaagagcatcaccatgacctgcttcgccgcccgggtgatgcaggacgcggcaatggagaacccgaccatcgtggtgatcaccgatcgcaacgacctggacggccagttgttcggggtgttctcgctgtcccatgatctgttgcgtgaacagccctttcaggtggaatcgcgcggtgacttgcgcagcaaactgaccaatcggccgagtggcggcattgtctttgccacaatccagaaattcatgccgggtgcggatgaggacatctttccgatcttgtccgaccgctccaatatcgtggtcattgctgacgaagcacatcgcacccaatacggctttggtgctgagttgaaagtctcagaagcgacggctgacaccgcgagccagacccgttaccaggtcgggtatgcccagcacctgcgcgatgcactaccgaacgcgacctttgtggctttcaccggcacacccgtctccagtgaagaccgcgacacccgttcggtcttcggtgaatacattcacatttacgacatgcagcaggccaccgaagatggcgcaacggtcgccatctattacgaatcgcgactggccaagctgtccttgaaagatagcgagctacccgcgattgatgatcagttcgatgaactggccgaagatgaagaggacgaccagcagtcacggttaaaaagccgttgggccgcgctagaaaaagtcgtcggagccgaaccacgtatccgcaacgttgcagctgatctggtcaaacattcggaggagcgtaatcagggcctggtaagcatgggccagatgcctggcaaggccatgatcgttgccatgagccgggagatctgcgtgcacctgtacaacgagatcaccgccctgcgcccggagtggcatgacgaagatccagaaaaaggcgcaatcaaggtcatcatgacgggtagcgcctcggacaaggcttcgctgcgtccacacatctactcagggcagatcaagaggcgcctggaaaaacgctttaaggatccgcttgatccactcaagctagtaatcgtccgtgacatgtggctgaccggctttgatgctccctgcgttcacacgctgtacgtcgacaagcccatgaagggccataacctgatgcaagccatcgcccgggtcaaccgcgtattcaaggacaagcagggcggcctggtggtggattacatcggaatcgccaatgagctgaaagctgcgctcaaggagtacaccggcagcaagggcaaaggccgaccgaccgtggatgcccacgaagcctattcggtgctggaggagaagctcgacgtcctgcgcagtctgctgcacggcttcgattgcagcgatttcctcaccgggggccacaagctgttggccggggccgctaaccatgtgttgagtctggaagatggcaagaagcgctttgccgacaccgcactggccatgagcaaagcctttaccttgtgctgcaccttggatgaagccaaggccgtccgcgaggaagtggcgttcttccaggcaatcaaggtgatcttgatcaagcgtgaagtcagccagcagaaaaagaccgacgaagaacgcgagctagtcatccgccagatcatcggcaatgccgtggtctctggcgacgtggtggacatttttcaggccgtgggcctggataaaccaaatatcggcctactcgacgatacgtttctcgccgaggtgcggaatcttcccgagaagaatctggcagtggagctgctggagcgtttgctcgaagatgagatcaagagccattacagcaccaatctggcccaggagaagaagttctccgagctactggtcaatgtgatcaaacgctatcaaaaccgctcgattgaaaccgcccaggtcatcgaagaactgatcggaatggccaagaagttcgcagccgccagtcagcgtggcgatgcgttggggctcaacgatgacgaactggcgttttacgatgccttggccaacaacgaagcatcggtacgcgaactgggccacgagatcctggccaaaattgcccacgagctgacggccagtctgcgggccaacgtcagtgtggactggaacagccgcgaaagtgtgagggccaaactgcgcatcctggtgcgacgcatcttgcgcaaatacaagtacccgccggatcacgcggaggaagcggctcagctcatcctcaatcaggcggaaactctttgtgaggcatggttg

SEQ ID NO: 33561 - DNA, 1026 bp, Pseudomonas syringae
atgcgtggcgcacttacgaaaacacaaagaatagacccttggccatccctatgcggatcgagggatttggagaaactgatgagcagcggtaaggattttttcgttcacagccacgccctgtgcgagtcagagaatatcggtaaggattcgcgagtatgggcgttcgctcatatcttgcctggcgcccgtctgggtagcgaatgcaacgtctgcgacaacgtattcatcgagaacgacgttatcattggcgatcgagtgacactgaagtgcggcgtacaggtctgggatggcattaccattgaggacgatgtattcatcggccccaacgccacctttaccaatgacctgttcccgcgcagcaaggtctatccgcaaacctttgctcgcaccatcatccgaaaaggcgcatctctgggcgccaactgcacgatcctgccgggtattacaatcgggatcaacgcaatggtgggtgcaggggctgtggtgacacgctcagtgccgcctaacgcgatagttgtcggcaacccggccaagatcattggttatgtggacgccaagcctgtcaacgccaacagtgaaacgcgagcagaacagaaagcgcctggcgtaaccgctacctccgtcaagaacgttacgctgcacaccatgaatgaagtggctgacattcgcggcagtttgtcggcgggcgaattcgagcgctcagtgcccttcaagaccgaacgttacttccttgtttatgacgttccgactgccgaaacccgaggcgagcatgctcaccgcatctgtcaccagtttctggtagcggtaaagggctcggttcacgttgtagcagacgacggcgttaatcgtgaagagtttattctcgacaaaccgaatcagggcatacatttgcctccaatgacttggggtattcagtatcgctactctcaggatgccgtgctgctggtgttcgcttcgcactactatgatgccggggactacattcgtaattacgaagagtttaagtccctgatcgcgaacgctgaa

SEQ ID NO: 33562 - DNA, 1728 bp, Pseudomonas syringae
atgacggatcagaagggcgaacaggccatcaacagcctcgccgagcaggcactcaatgaagcccgggcgcgtttttctccaaacgaaagcggtgccgagccagaattcgagccactgaagaaaaagcccgggcgcaaagcggctgtgactgccaccagcagtaccctgcaagacctggaaaagaccctgtgggccaccgccgataagatgcgggccaacatggatcccgcagagtacaagcacatcgtgcttggtctgatcttcctcaagtacatctccgacagctttgctggccgccgcgcggaactggaacgcaaattttccgatgctggcgacgattattacttgggcggtgacgatccgacgtatctggcctcagagctcgaagagcgtgactattacaaagaagtgaatgtgttctgggtaccggagccggcgcgatgggagtcgctacgtgcagccgctaaacaggttgacatcggcaagcgtattgatgacgccctggccgatatcgaagcggaaaacccccagctaaagaacattctcgacaagcgttatgcccgcgcccagttgccggatggcaagcttggcgaactggtcgatatgatttccatcattgggtttagcagcgacgcaaacaaagctcgtgacctgctgggccaagtctatgaatacttcctcggccagttcgccagtgccgaaggcaagcgtggcggacagttctacaccccggcgagcatcgtcaagaccctggtggctgtgctcaacccgcaccatggcaaggtctacgacccctgctgcggctccggcggcatgtttgtccagtcagaaaaattcatcgaagcccacggcggcaagctgggagatgtttccatctacggtcaggaatccaacccgaccacctggcgcttggcggcgatgaacctggccattcgtggcatggatttcaacctgggcaaggaaccggccgacagctttatccgcaatcagcacagcgatctgcgggccgacttcgtcttggccaatccaccgttcaacatcagcgactggtggcacggcagcctcgacggcgattcacgttgggtctatggcacgccgccacaaggcaatgccaactacgcctggctgcagcacatgctgtttcacctcaaatccagcggtcgcgctggcatcgtcctggcgaacggctcgatgagctccagccagaacagcgaaggtgacatccgccgcgccatggtcgaggccgacgtggtcgaagtgatggtcgccctgcccggccaactgtttttcaacacgcaaatcccggcctgcctgtggtttttggccaagcaaaaaaacaaacgtcctggcgaagtgctgtttatcgacgcgcgcaagctcggcaccaacattagtcgggtgcagatcgaactgctggatagcgacatcgaaagcatcgcgcagaccgttgctaactggcgcggggtgccactggaggtcgacggcgagatcgccgaatacgctgacgttgccggtttctgccgcagtgtgcctctggcggaaatcgccgagcatggtcatgtgctgaccccagggcgttatgtcggggccgaggccgtcgaggatgacgacgaagcctttgccgacaaaatgcaggaccttactgcgctcttgggtgaacagctggccaagggcactgagctcgatcagttgatccgccacaagctgggggggctgggttatgagttc

SEQ ID NO: 33563 - DNA, 1413 bp, Pseudomonas syringae
ttgcggccatggggttctggttcttccaaaagacacgtaaaggattcgctgatgtcatctgatcaaccggttatcagcgtacaaaacgtctcgaagtgtttttacacctacgacaagccccacgaccgcctgaaacaggcactggtgccaaaactccagcgctggtcgggtcagccgaccactacctatggcaaagaattctgggcgctgcgcgacatcagctttgatgtcggcaagggcgaaacagtcggtatcgtcggtcgcaacggctccggtaaatctacgttgctgcaaatcatttgcggcacgttgagccccactatcggtgagattcagacccgcggccgggtagcggcattgctcgagctgggctcaggcttcaaccccgagttcaccgggcgtgaaaacgtttacctgaacgcagcagtactgggcctgacgcgtgacgaagtggacgaacgctttgacgcgatcgcaggttttgccgacatcggcgagttccttgatcaacccgtcaagtcttactcgagcggtatggccgtgcgcctggcgtttgccgttcaggcgcaagttgatcctgaaattctcgttgtggatgaagcgctgtcagtaggcgacgcgcgattccaggccaagtgtttcgagcgcctgcgacagctgaaagaaaacggtaccagtatcctgctggtcacccattccagcgagcaggtcgtcacccactgcaatcgcgccattctgctggaaaagagcagaatcgaaatgattggcgaatcgcgcccggtcatcaaccgttacaccgacctgctgttcggacgcgacaagagccctatcaccgataagagcctggaccttgccgaagccgaacgcgtagaggcagctcctgtcgaaaccgacaagattgcgctgcgcttcgacgaagacgtatacgccagcaggcctggctataacccccatgaataccgctggggagacggggccgcaacgctactggacttccatatgagtgcttcgggacgtgagtttcccaacagtgtcgagtctggagaggaaatcgttcttgacctggcgttgcagttcaacagcacggtggtcaacccgatcatcggttttacgatcaagaccaaagagggcgtcaccgtttacggtactaactcgtacatgcaggattgcgaaggcacaggcctgataggcaacgctggcaatcaggcaaaagcacgtgtgaaattcagaaatgcactggcaaccggtgattacttcatttccatcggcattgcctcccggcaaagtgaagaaatcgtgccccacgacagacgttatgactcaatacactttgtcgtagaacctactccgaagcttctgggtttgatagacctgggcgcctccatggaaattgaaccggtaattgtcgatgtt

SEQ ID NO: 33564 - DNA, 4689 bp, Pseudomonas syringae
ttgtcgatgtttgaacttgatagatacggctacaaccttgatacgggcacaggggtttgggtgcgctccgactatcagggcattgcctacagcgatggcgacaactctgaaaacgaactggcaaagattgtccgtgaagccaacgacgtctctgtgctgtcaagcgagctaacgcaccactgtacggactggcccaaactctatcacctgagttcaacccgcggaaacatcttccgcccgttcgagcatcttctggaaggcaaatcagtcctcgaaatcggtgctgggtgcggcgcgatcagccgatacctgggcgaggccggagctaacgtattgtcgctggaaggtagccctcgccgcgccgctatcgcagcgagcagaacccgtgacctggacaacgtcacggtgctggccgagcgattcgacgacctgaaagttgatcagcaattcgatgtcgttacgctcatcggcgtactcgaatacgccagcatgttcagcaatgacgaagatccggcatttggaatgctgatgcgtgttcgaaagctgctcaaacctgacggccacctgttcattgccatcgaaaaccagcttggcctcaagtattttgcaggcgctccagaagatcacgtcggcgtcgcgatgtatggtatcgaaggtcggtatgcagaccgccagccaaaaacattcggccgtaaagggctggaagtattgatagctcgtgcaggttttgcatcatcaagctttctgtcgccctatcctgactacaagattcccaactcgctaatcactgagaacggtttcagatccaataatttcgacgcggccgcattggcgtgccagaacactcgaaaagatccacagctgccgtcaaatactacatttaaccttgaaaaagcctggccggttgtcatcgaaaatcacctgggcatggaccttgccaactcttttctggttgttgcttcgtgccagcagtatgaggcagttcctgccgacgttctggcctatcactacagcacaggtcgcaattccgagtactgcaaggcgtcggttttcgtagagacgccagaagggatagaagttcagtatcagcgccttgctggcacagaatcagaggaaaatccgggagatccattcaggttcatacttcctgctgctcacggctacgcaaaaggcgacctgctcagcttgcagttcctcgatgcctcaaccacgcaaaactggacggttgagacctttaccccattcttgacgacctatctggatagcctcagctaccttttggctaccgaaggacatgcttgcacgcttgataatgtcgatgtctgcctgccaggtcattacatcgacgcggttgcacagaacatcatcatcgacaccgaaggtaaaccgcacctcatagatatcgaatgggagatgaaggaaggcgtcgagcttgggcacctgctgatgcgcggtctcttgctgctgatcgcctccactattcctttttacccaagcaccaccatgatcagccgacgcgacttcattatccagttgatcggcagtacaggccttgaggtcactgaggaagagctgaatcgctatgcagtgctggaagccatgtttcaagaaagggtaaccggtcgtgacgctgcaagctttctgaactggtcaccggaagcaacccttcagaaaatggggtccctgaaagacaagacgcctaaactggcaacactttacatcggcgattcagaagggaatttcaaagaagagcggacgataagtcagtttgtgcacgacgggcgccagacgcttgtgttcacggtccctgcgacgtaccaatgtgcagcgttgcgatttgaccccacgaacattcgtcagtcattttcgattgacgccatcaccatttttgaagcgaatgtgagggtgtggtcctggcgcgacagcgcagaggcacctttaaaagccgctggcaccactgcgtttgttaatgatgtcaatgacagcactatgttcatggcgctgaatgatgatccccacatcgtacttccggttgatctcaattcgctattagcgaggaagtcgttcaaaatacaggtcacgtttactttattcacggaaggccaagtcgctgaacgactccttcaacaggaagaggagctcaagctagcgcttgagtctatatcggatttgaatcttaaagatcgctcagctttagaggctgttgaagtggctaatctcgccgtagaggaaagtcatcgcctggcgttggaagagcttgaagctgaaaatctggccgtgcaggacaaacaccgacaggcccttgaaaagctggaagccgaacacttggcctctcaggaaaaccaccgatctgttctagaacagtttgaggcggtacacctcgcttctcaggaaagctatcgactcgccctggaagaacgtgaagcagcaaacctggcggctcaagaaagccatcgacttgctctgcaagagcgtgaagccgcaaatctggccattcaagaaagtcaccgaactgctacggagagtctcaaggctgaaaaccttcgggtacaggccgatcaccttcgggtattagcagatattgatgccgccacactagatgcgcaagaaaagcatcgtgccaaactggcagagcttgagattgccatcctggcagcacaggaaagtcaccgcttggcattggtcgacaaagatacgcatgttcacaatctgaacctgcacattattgcaatggagtcatcgcacagctggaaagtaacggcaccactgagaaaaataacccgatcatttttccgagccaagcgtgtcgcctcttcgctgccattgatcattcgacgcgggggtggtctttccagcactgccaaaaaagcttatcaggtctggcggctcaggggactggctggcgttattgcacaggcccgctgggtaagaggcgaagcacaacatgctttcgttggaagcgagcttcgcgaagttccggatcgccacgattactctcgctgggtacagtactacgacactctgggcgaagcagagatcagtcgtatcaatgagcacatgaatcgctggattgaatacccgctcatttccatcatcatgccggtctataatccgccactggatcttttgcgtgaagccgtggacagcgtacgtgcgcagctctacaccaactgggaactgtgtctcgctgacgatgcatcgacaaatcctgccgtcatcgagtacctgaaatctctcaaggcgcaggacaagcgcatcaaagttgtcttccgcggcagcaatggtcatatatcccaggccagcaactctgcgctggcggtagccaaaggcgtgttcgttgccctgatggacaacgacgatctcctacccgctcacgcgctttactgggttgctcgtacaatccgtgaaaacccggatgtgggcttgatctactccgatgaggacaagatcgataccgacgggaaccgtagttcaccttatttcaagtcagactggaacgagtttctgtttcgctcacaaaatatggtctgtcaccttggcgcctatcgccgtgacctggtcaatgaggttgggcaattccgggtaggattcgagggtgctcaggattacgacctggctttgcgatgcgtagaaaagctcagaagtgatcagatcgtccacattccacgtgtgctttaccactggcgcatacacgctggcagcaccgccatggcaggtgatgagaaaccttatgctgcgttggcgggagtcaaagcacttgatgaacacctgcagcgtaaaggcaacgttggtacgacagagctgttacctacaggtcagtatcgtgtgcactacaacctgccggcaacactgccactggttacgcttgtcatcccgacccggaatgctcacgcattagtaaaacagtgcattgacagcatccagaacctgaccacctacaagaactatgaaattattctgatagacaacggttcggatgatcctgaatcactggagtatttcgcgaagatagatcaggaagaaaatattcgcgtgctgcgcgacgatggtccgtttaactactctgcgctcaacaatggcgcggtacgtatcgctaatggcgagctgatcggcctcatcaataacgacattgaagttatcacgccggaatggcttggtgagatggtctcgattgcattgcagcccagagtcggggcggtaggcgcaagactctggtatcccgataacaggctgcaacatggcggcgtagtggtagggatcggtggtgttgcaggccacgcgcacaagtaccttccaaaaggcgctcacggctatttctgcagagccgagttgattcaggagttttcggcagtaaccgctgcatgcctgatcatcaaaaagtcgatttttgacgaagtcggaggcctgaacgaggcggacctgaagattgctttcaacgacgtggatttctgcctgagagttcaggaggcaggctatctgaacgtgtggacgccgttctccgaactgtaccaccacgaatcagcgacgcgcggcctcgaagacacgcctcaaaagcaggagcgattcgggcaagagatccgctacatcaaaaatcgctggccgaacattctggtggactacgcctacagtcctaacctgacgctggatcacgaagacttcagtctggcctggcctccgaggattaaaaat

SEQ ID NO: 33565 - DNA, 1356 bp, Pseudomonas syringae
atgaccatcacgtccttcggccctgccaaccgcattgcgcgcacggcagaaacccatccgctgacctggcgtttgcgcgatgacggcgagccggtctggctcgacgagtatcagaccaaagacggctatgcggcggcgcgcaaggcgctgacccagcaggcccctgacgatatcgtccagtcggtcaaggactccggcctcaagggtcgcggcggtgcgggcttccccaccggcgtgaagtggggcctgatgcccaaagacgaatccatgaacatccgctacctgctatgcaacgcggacgagatggagcccaacacctggaaagaccgcatgttgatggagcaactgccccatctgctgattgagggcatgctgatcagtgcccgcgccctgaaagcctatcgcggctatatcttcctgcgtggcgaatacgtgacggcagcgaagcacttgaaccgtgccgtggctgaagccaaggccgccggtttgctgggcaagaacattcttggcaccggcttcgatttcgagctgttcgtgcacaccggcgccggtcgttacatctgcggtgaagaaaccgcactgatcaactcgctggaaggtcgccgcgccaacccccgctccaagccgcccttccctgctgcggtaggcgtgtggggcaagccgacctgtgtcaacaacgtcgaaaccctgtgcaacgtgccggccatcgtcaacaacggcaacgactggtacaagtcgctggctcgcgaaggcagtgaagatcacggcaccaagctgatgggcttctccggcaaggtgaaaaaccctggcctgtgggagctgccgtttggtgttcaggcccgcgaactgttcgaagactacgccggtggcatgcgcgacggcttcacactcaagtgctggcagcccggtggtgcagggactggtttcctgttgccggagcacctggacgcgcagatgtacgcaggcggtatcgccaaggttggcacccggatgggcacaggcctggcaatggccgtcgacgactcggtcaacatggtatcgctgctgcgcaacatggaagagttcttcgctcaggagtcctgtggcttctgcaccccatgtcgcgatggcctgccatggagcgtgaaaatactgcgtgccatcgagaacggtcacggccagccgggtgatatcgaaaccctgctcggcctagtcaacttcctcggccctggcaagacgttctgtgctcatgcaccaggtgccgttgaaccgttgggcagtgcgatcaagtatttccgttcggagttcgaagccggtattgcgcccgccagcgcagccatgcttgttccgggtaaaagtccgaccgtggtcggcgca

SEQ ID NO: 33566 - DNA, 499 bp, Pseudomonas syringae
catgaatagcccgctgattcagactgaccgtttcgtcttgagcgaaaccgagcgctcggccatcgagcacgagctgcaccactacgaagacccgcgtgcggcgtccatcgaagccctgaaaatcgttcagaaagaacgtggctgggtgcccgacggtgccatctacgccataggcgatctgctgggcatacctgccagtgacgtcgaaggcgttgctacgttctacagtcagattttccgccagccagtgggacgtcacatcattcgcgtctgcaacagtatggtgtgcttcatcggcggccacgaaaacgtggtggacgagatcaagacctcactgggcatcggcctggggcaaaccaccgctgacggtcgtttcacgttgctgccggtctgctgcctgggcaactgcgacaaagccccggccgtcatggtcgatgacgacactttcggcgatgtacagcctgctaccgttgccaaaatgctggagggttacctatga

SEQ ID NO: 33567 - DNA, 1298 bp, Pseudomonas syringae
acacgcgaacaacaaatagcggctctcgaaaaagactgggccgaaaatccgcgctggaaaaacgtcacccgtacctactctgcagccgatgtagtccgcttgcgtggctcggttcaacccgagcacaccttcgcaagactgggcgcggacaaactgtggaatctggtgacccaaggtgccaggccctcttttcgaccggacaaggacttcgtcaactgcatgggcgctctgaccggcggtcaggccgtgcagcaggtcaaggccggcattcaggcgatttacctttccggctggcaagtggctgccgacaacaactctgccgaatccatgtacccggatcagtcgctgtacccggtcgactcggtgccgacggtggtcaagcgcatcaacaactcattccgacgtgctgaccagattcaatggaaagccggtaaaacgccgggcgacgaaggctacatcgactacttcgcacccatcgtggcggatgccgaggcaggctttggtggcgtgctgaatgcgtacgagctgatgaaaaacatgatcgaggccggtgcagcgggtgtgcacttcgaagatcagttggcatcggttaagaaatgcgggcacatgggtggcaaggtgctggttccgactcaggaggcgatccagaaactggtggctgcgcgcctggcggccgacgtcgccggtgtgcccacgattattctggcgcgcaccgacgccaacgccgccgacctgctgacctcggactgcgacccttacgacaaggcgttcgtgaccggcgagcgcactcacgagggcttctacaaggtccgcgcgggcctggatcaggcgatttctcgcggcctggcctatgcaccttatgccgacctgatctggtgtgaaaccgccaaaccggatctggacgaggcgcgtcgcttcgctgaagcgatcaagaaggagtacccggatcagttgctctcctacaactgctcgccctctttcaactggaagaaaaacctcgatgacgcgaccatcgccaagtttcagcgcgagctttcggccatgggttacaagcaccagttcatcaccctggcaggcatccacaacatgtggtacagcatgttcaacctggcgcatgactacgcccgcaacgacatgacggcgtacgtgaagctacaggaacaggagttcgccgacgcggccaaaggctacacctttgtggcccaccagcaggaagtgggcaccggctatttcgatgacatgaccaccgtgatccagggcggcgtgtcatcggtcaccgcgctgactggctccacaga

SEQ ID NO: 33568 - DNA, 1173 bp, Pseudomonas syringae
gtggcactgacagacacagcattacgacaagctaagccaaaagacaaagcgtacacgttgcccgactcccttgggctgagcctatacgtggcacctaccgccattaagagctggcatttccgtttcacctggctaggtaaacaggttcgtatttcgttgggcacatacccagaaatcggcttgaaagaagcgaggattaggcgtgatgaagcgcgcgaagaggtagcgcgtggaatagatccccgcgaatcaaggaaagaaaagaaggcactgcttataaatgctcagggacatacccttcgccgcgtttacgaggaatggctggcattccggagaggaagcctgaaaccagggtcactgcggattatcagtaattcaatggagctcgactggcttccatccttcggtaatcgccagatgaactctatcactcgctctgaaattgtcagcgtgattcgccgaattgaaaaacgaggatccgtgacaacggccgtaaagactcggcagcgactgagccagatattccgatacgcaatcgccacgggcatcgtggataccaatccgacgctggaaatgcataccgtcacagagcgcatcaccctccagcgccactttccgttcttgccgtttagcgagttgccgaagacgatctccactattctgggttgctccgctggccagcagtacaaatccgccttcatgatgatgatctactgcgcatcccgcccaggagaagtgcgtcacgccatgtggaaggagatcgatttcgacaatgccatctggacgattcctgccggaaaaatgaagatgcgccgagaccacgtggtgccactgcccaaccaagcgattgaactgctgaagaccatgctgccgctgaccgggcaccttgagtacatttttgtgcatcgcagcgatccgacaaagccggtcagcaccaactacgccaacaacgtaatagagctttctggcctgaccggaatccagtctccgcacgggttcaggcatttattctctacagagatgaatgggcgtggttacaaccgcgactggattgagcggcagctagcgcattccgatacgagtatcatccgagacacctacaaccatgccacctatatagagcagcggcgcgagatgatgcaggactgggcagacttagtcaccgtagtggtc

SEQ ID NO: 33569 - DNA, 1416 bp, Pseudomonas syringae
atgtatgatgtgcgcccttttcgttgccagactgtccgagagcatcccatgcagctttcttcgctcactgcggtttcccctgttgacggccgctacgccggcaaaacccaagccttgcgccctattttcagcgaatacggcctgatccgtttccgcgtgatggttgaagtccgctggctccagcgcctggcggctcacccacagatcaccgaagttccggccttctccgcgcaagccaatgccattctcaatactctggctgaagacttttcggtggagcacgccgagcgcgtcaaggaaatcgagcgcaccaccaaccacgacgtcaaggccgtggaatacctgctcaaggaacaggctgccaagctgccggaactggagaacgtcagcgagttcattcactttgcctgcaccagcgaggacatcaacaacctgtcccatgctctgatgctacgcgaaggccgcgacaccgtgatgctgccgctgatgcgccagattgccgacgctatccgcgaactggcaatccgcttcgccgacgtgccgatgctttcgcgcacccacggccagccagcctccccaaccacgctgggcaaggaactggccaacgtggtttaccgcctggaacgccagatcacccagatcgccgcagtgcctttgctgggcaagatcaacggcgcggtcggcaactacaacgcccacctttctgcctatgccgatatcgactgggaagccaatgcacgcgccttcatcgaagacgaactgggcctgggcttcaacccctacaccacgcagattgagccgcacgactacattgccgagctgttcgacgccgttgcgcgcttcaataccatcctgatcgacttcgaccgcgatatctggggttacatctccctgggctatttcaagcagcgcaccatcgctggcgaaatcggttcgtcgaccatgccgcacaaggtcaacccgatcgacttcgaaaactccgaaggcaacctgggtatcgccaatgcgctgttccagcacctggcgagcaagctgcctgtctcccgctggcagcgcgacctgaccgactccaccgtgttgcgtaatctgggcgttggttttgcacacagcgtgattgcctacgaagccagcctcaaaggcatcagcaagctggaattgaacgagcaacgcattgctgccgatctggacgcctgctgggaagtcctggccgaaccgatccagaccgtaatgcgtcgttacaacatcgaaaacccgtatgaaaaattgaaagaactgacacgcggcaagggcatcggccctgaagcactgcaaactttcattgacggtctggatatgcctgcccaagcaaaggcagagctgaagaagctcacgccagccaattacatcggcaatgcggcagcccaggccaagcgcatc

SEQ ID NO: 33570 - DNA, 1128 bp, Pseudomonas syringae
atgcgtgatccagccccctcgaactcagaaatgaagcgcgtcatagtcggcatgtccggcggcgtggactcttccgtttccgccgtactgctcatggagcagggttatcaggtggaaggcttgttcatgaagaactgggaagaagacgacggaacggaatattgcaccgcccgcgaagacctggcagacgcccaggctgtgtgcgacaggatcggtatcaagctgcacacggccaacttcgccgccgagtactgggacaacgtcttcgagcacttcctcgaagagtacaaggccggacgcacgccaaacccggacatcctctgcaaccgggaaatcaagttcaaagcctttctggactatgccttgatgctgggcgccgatctgattgcaaccggccactatgtgcgccgtcgcgatatcgacgggcgtaccgagctgctcaagggcctggatccgaacaaggaccagagctacttcctgcatgccgtcggtggcgaacaaatcgcccggacgctgttcccggtaggcgagctggaaaaaccgcaagtgcgcgccattgccgagaaacacggcctggcgacggccaagaagaaggattccaccggcatctgcttcattggcgagcgccgcttcaccgattttctgcgccaatacctgcccgcccaacccggcgacatcaagaccaccgaaggcgaagtcatcggtcgccacagtggcctgatgtaccacaccatcggtcagcgccagggcctgggcattggcggcctcaaggacgccagcgacgacccgtggtacgtgctggtcaaggacctggacaacaacgaactgatcgttggccagggcaatgatcatccgtggctgttttcgcgggcgctggtgtcttcggaaatctactgggtcaacccgatcgacctgagcagcccgcgcaaactcaccgcaaaagtccgttatcgtcagagcgaccagccgtgcacgctggaaaaaaccgctggcggctaccgggccacattcgatgacccgcaacgcgctgtaacgcccggccagtccgtggtgttctacgatggcgaaatctgtctgggcggcggcgtgatcgaaattgccgaaccctggaccagcaaggacaagcgt

SEQ ID NO: 33571 - DNA, 2790 bp, Pseudomonas syringae
atggcgttgtggttcccgcagatcgccgacggcggcgtgattcgcgaggaatatttctggctgccaagccttgggatgaatttcgttctacgcatcgacggcttcgcctggctgttttcgatgctggtgctgggcatcggtgcgctggtgtcgctctacgcccgctattacatgtcgccggacgatccggtgccgcgcttcttcgcttttttcctggcgttcatgggtgccatgctcgggctggtcatgtccggcaacctgattcagatcgtgtttttctgggagctgaccagcctgttttcgtttctgctgatcggctactggcatcatcgcgccgatgcacgccgtggcgcgtacatggcgctgatggtcaccggcgcaggcgggctggcactgctggcgggcatgatgatcctggggcatgtggcaggcagttacgatctggaccgtgtgctggcctccggtgacgcgattcgcgcccatgccttgtacccggtattgctgaccctgattctgatcggcgcattgaccaaaagcgcgcagttcccgttccatttctggctgccccacgccatggcggcgcccacaccggtttcggcttatctacactcggcgaccatggtcaaggccggggtgtttctcatggcgcggatgtggcccgcgctgtccggcaccgagcaatggttctggatcgtcagcggcgcgggtgcctgcacgctgattctgggcgcctatgcagccatctttcagaatgacctcaaaggactgctggcgtactcgaccatcagccacctgggcctgatcacactgctgctgggtctgaacagcccgctggcagccgtcgctgcggtgttccatattctcaaccatgccaccttcaaagcctcgctgttcatggcggccgggatcatcgaccacgagagcgggacccgagatatccggcggctcagcgggctggtgaagctgcttccctataccgcgacgctggcaatggtcgccagcgcatcgatggccggcgtgccgctgctcaacgggttcctgtccaaggaaatgttctttgccgagacggtgttcatttccgccacggcctgggtcgagatcgcgctgcctgtcatcgcgaccattgccggtatattcagtgtcgcctattcgctgcgcttcacggtcgatgtgtttttcggaccggcagccaaagacctgccgcacttgccccatgagccgccgcgctggatgcgtgcgccggtcgaactgttggtgctgacgtgcctggtcgtcggcatattcccggcgcagtccgtcgcgcctctgctggcagccgctgcacgcccggtggtgggcggaacactgccccagtacagcctggcgatctggcatggctggaatctgccgatggtcataagcctggtggcgatggcgggcggcatcattctgtacctattgctgcgcaagcccctcaagcacgaacgcatcaccaccccgccgctggtgggacgtctcaacggcaaacgcttcttcgagcgcagcctggttgtcgtcatgcactgggcgcggcgtttcgagcgcaaggtcagtacgcgtcgtttgcagccgcaattgtttctgctggtgctggcggcggtgctgggcggcttcattccaatgtatttcagcggcctgacttggggcgaccggccaaaaattccgggctccggggtatttgtcacgctctggctgatcgcgattgcctgcgccatcggtgcggcatggcagggtaaatatcaccgtctggcagcattggtcatggtcagcgtgtgcggcctgatgacgtgcatcacctttgtctggttctcggcacctgatctggcgctgacacagctggtcgtggaagtggtgaccacggtgctgattctgctcggtctgcgctggctgccgcgacgcaacgaagacgtcgcaccgctcagtgcccgcctgcgcgctcgcacccggcggatacgcgactttggcctggcggtgctggtcgggctgggaatggcgatactgtcctacgccatgctcactcggcagacgcccaacgccatctcgtcgttctacctgagccgcgcgctgccacagggcggcggcaccaacgtggtcaacgtgatgctggtggatttccgtggcttcgacacgttcggcgaaatcaccgtgctggccgccgtggcgctcacggtatttgccttgctgcggcgcttccgcccaccgaaagaaagcattctgctgccgacccaacagcgcctgctcgcccgcgacgtggtgaccgacctggtcaacccgcgcagcgccagcgacaccgcgctcggcttcatgatggtcccggcagcgctggtgaggttgctcctgccgattgccttcatcatttcgatgtacctgttcgttcggggccacaaccagccgggcggcggttttgtcgccggtctggtgatgtcggtggcgttcattctgcaatacatggtcgccggcactcagtgggtcgaggcgcaaatgagcctgcgaccgctgcgctggatgggcaccggcctgctgtgcgcagtcctcaccggtgctggctccatgctgctgggctacccgttcatgaccacccacactgcgcatgtcgatttgccgatactcggcgatattcacatcgccagcgccctgtttttcgatgtcggcgtgtatgcggtggtggtcgggtcgacgctgttgatcctcactgcgctggctcaccagtcggtgcgcagccaccgtccgacacagctgcccaagcctgtcgccaacccgcaaggaatcctc

SEQ ID NO: 33572 - DNA, 1155 bp, Pseudomonas syringae
atgcacggattttccaccacgctgttgaccacaaccctgttgaaaaagaccctcctggccgcggcggtcatgtcgggcctgatgctgtcatccggtatggcagcggcggcggatgcgccgggcaaggtgttgagcgagaaatacggcctgccctggcccgccgcgatcgcccatcgcggtgcctcgtttgacgcaccggaagaaaccatcccggcctataccctggcgcgggatctgggcgcggattatctggagatggacatccagcgcaccaaggatggcgtgctgattgcgctgcacgacgacgtgctggaacgcaccaccaacatcgcccaagtgttccccacgcgggtcaaggatccggtcagcaccttcacgctggcagaactcaaacagctggacgcaggctcgtggttcaacaaggcctatccggaccgcgcgcgcgacagctacaacggcttgcagattctgaccctggacgaagtcatcgacatcgccgagggcggcgccaacaagccgggtctgtacatcgaaaccaaggtgccgaacaagtttcccggcgttgaagccgacctgaaaaaagtgctggccaagcgcggttggcttactcagcggcccgctgctgctgccgggcatgtcaacgtcgcgcacatgccggggcgcgtcgtgttgcagaccttcgagaaacagagcctggaactgctgcaaaaagaaatgccgcaggtgcccaaggtgctgttgctgtggattggcgaagggtcgatagagcctaaatccagcgtcgcgttcaaggactcgggggccaaggacaaggccagctattatgcagcgcaggaggtcaagtcgccggaggaattccagaagtggattgactgggccaaagcccatggcgcgatcggcaccggcccttcgtcgcaattggcccagggcggcgaccagagctacatggacctggtcaaaccctggatgaacaacctgacgcatgaaaaaggcatggtcatccacccgtataccgtggacgacgcggcggacttcaagcgcatccgcaatgacggtgtcgatggcttcttcactaaccgcaccgctgaactgttgaagttctatgatcggcccgcgaaagaaagcatcgatgccattctcaagcgtaacggctac

SEQ ID NO: 33573 - DNA, 1104 bp, Pseudomonas syringae
atgtccgggcaactgctgaccttaccgcactcgcctgcgctggcgacctcgatcagggcgactgcgcaggtattcgaggaccccaagtccagagccctgctcgctcatgtgcgccaagtggcacccagcgacgccagcgtgctgatcatcggcgagaccggcaccggcaaggaactggttgcaaggcacgttcacgagttgagcgcccgacgtgacaagccgtttgtggcggtcaactgcggcgcgttctccgaaaacctgatcgaggccgagctgttcggccacgacaaaggcgcgtttaccggtgcaatcagcgccaaggccggctggtttgaagaggccaacggcggcacgctgtttctcgatgagatcggcgatctgcccatgactctgcaggtcaaactgctgcgcgtgcttcaagagcgcgaagtggttcgcctcggctcgcgcaagagcattccgattgatgtgcgggtgctggcggccaccaacgtgcagctggaaaaagccatcaatgccgggcatttccgcgaggacctgtattaccggctggacgtggtcaatctggaactgagcccgttgcgtgaccggccgggcgatatcctgccactggcccggcatttcatcgaggtctacagccagcgcctgcgccatggccccgtgcggatcagtgccgaggccgagcacaaactcaggacctacagttggccgggcaacattcgcgagctggaaaacgtcattcaccacacgttgctggtctgccgcgacgggatcattcagcgtgatgacctgcgcatgtccaacttgaggattgagcgtcaggacgagcaaaaccaggctgacgagtcggccgaacagttgctcaaccgcgcgtttcagaagctgtttgaagaacaggctggtgcgttgcacgagaaggttgaagacacgctgctcagaacggcttatcgcttctgccaccataatcaggtacacaccgccagcctgctaggcctgacccgcaacgtgacccgcacccgcctgatcaagattggcgagctggcggtcaacaaacgcagaccgggtgagaatgtgcagggcgacaggatgttgcacttgtcggtg

SEQ ID NO: 33574 - DNA, 1278 bp, Pseudomonas syringae
atgctcgattccaaactgttacgtactcaacttcaggacgtagcggatcgcttggcttcccgtggctttacactggatgtggcgcgcattgaatcgctggaagcccagcgcaaggtggtgcagacccgcaccgaacagcttcaggccgagcgcaatgcacgttccaagtccatcggtcaggccaagcagcgcggtgaggacattgcgccgttgatggcggatgtcgagcgtatgggcaacgaactgagcgaaggcaaggtcgagctggacgccatccaggccgaactggacgcgctggtgctgaacatcccgaacctgcctcacgaatccgtgccggtgggtgccgacgaagaaggcaacgtcgaagtccgtcgctggggcacgccgacggcgttcggcttcgaggtcaaggatcacgttgcgctgggcgagaaattcggctggctggactttgagaccgcagccaaactgtccggcgcacgttttgcgttgttgcgtggcccgatcgcacgtctgcaccgcgcattggcgcagttcatgatcaacctgcacatcaacgagcatggctacgaagagacctacacgccttatctggtgcaggcacctgcactgcaaggcacgggtcagttgccgaagttcgaggaagacctgttcaagatctcgcgtgaaggcgaagctgatctgtacctgatcccgacggctgaagtgtcgctgaccaacattgtgtcgggcgagattctcgatgcaaaacagctgccgctcaagttcgttgcgcacacgccgtgcttccgcagcgaagcgggcgcgtcgggccgtgacacccgagggatgatccgtcagcaccagttcgacaaggtcgagatggtccagatcgttgcaccggacgattccatggcggcccttgaatcgctgaccggtaacgccgaacgcgttctgcaactgctggagctgccgtatcgcacgctcgcgctgtgcaccggcgacatgggtttcagcgccgtgaagacgtacgacctggaagtgtggatccccagccaggacaagtaccgcgaaatctcttcgtgctccaactgcggtgattttcaggcgcgccgcatgcaggctcgctggcgcaacccggaaaccggcaagccggaactggttcacaccctcaacggttcggggttggcggtaggtcgtaccctggtggccgtgctggaaaactatcagcaggcggacggttcgatccgcgtgccggaagtgctcaaaccgtacatgggcggccttgaggttatcggt

SEQ ID NO: 33575 - DNA, 1392 bp, Pseudomonas syringae
atggagtttctgccgctgttccataacctgcgtggcagccgcgtgctggtggtcggcggcggtgaaattgccttgcgcaaatcacgtctgatcgctgatgccggggctgtactgcgcgtggttgcgccggaaatagaaacccagttgcgcgagctggttgcacacagcggcggcgaattgattctgcgtggctacagcgaaagcgatcttgacggctgcgtgctgatcatcgccgccacggacgacgagccgctaaacgctcaggtttctcgcgatgcccggctacgctgcgtgccggttaacgtggtggatgctccggcgctgtgtaccgtcatcttcccggctattgtcgaccgttcaccgttggtgattgccgtgtccagcggcggcgatgcgccggtgctggcacgtctgatccgggccaagctggaaacctggattccctccagctacgggcagctcgccgggcttgccgcgcgttttcgcaatcaggtcaaaggcctgctccctaacgtgcagcaacgccgggcgttctgggaagaggtttttcagggggccattgccgatcgtcaactggccgggcagggtgccgaggccgagcgcctgctgatcgccaagatcgctggcgagccaccggcgcaaaccggtgaggtgtatctggtcggcgcaggtcctggcgatccggatttgctgacctttcgcgctttgcgtctgatgcagcaagcggacgtggtgttgtatgaccgccttgtcgcaccgacgatccttgatctgtgccgtcgcgatgccgaacgtgtctacgtcggcaagcgtcgtgcagagcatgctgtgcctcaggagcagatcaatcagcaactggttgcactggccaaacaaggcaaacgtgtcgtgcgcctgaaagggggcgatccgtttatcttcggccgtggtggcgaggaaatcgaagagctggcggcgcacggtattccgtttcaggtggttccgggtattaccgctgccagcggttgcgcggcgtacgcaggcataccgctgacgcaccgcgatcatgcgcagtcggtacggttcatcaccgggcacttgaaaaacggtacgacggacctgccctggtctgatctggtggcgcccgctcagacgctggtgttttacatgggcctgattggcttgccggtcatttgcgcagagctgatcaagcatggccgctctgccgacacacctgccgcgctggttcagcagggcaccacggtcaatcaacgggtgttcaccggcaccctggccaatctgccgcagctggttgccgagcatgaggttcatgcgccgacgctggtgattatcggcgaagtggtcaagttgcgtgagaagctggcctggttcgaaggcgctcaggccacgctc

SEQ ID NO: 33576 - DNA, 996 bp, Pseudomonas syringae
atgggccttttggtcgatgggcgctggcaagaccagtggtacgaaagcagcaaagatggcgcgtttcagcgcgaaaatgctcagcgacgcaactgggtcacgcgtgacggccaagctgggccatccggtgaaggtggttttgctgccgaagcgggccgttatcacctctacgtgtctctggcgtgcccatgggcgcatcgcacgctgatcctgcgcaaactcaagggcctggaaaagctgatcgatgtatcagtggtcagttggctgatgctggaaaatggctggacctttgatcagcagaaaggctcaagcggcgacgcgctggatgactttcagttctttcaccagcgctatacggccgatgaccctcgatacaccggtcgcgtgaccgttccggtgctgtgggacaaacaacagcagcgcatcgtcagcaatgagtctgcggaaatcatccgcatgttcaatgctgcgttcgacgaactgaccggcaatacccttgatttctacccgtccgcgttgcagtcgagcattgacgaactcaatgagcaaatttacccgaaggtcaacaatggggtctatcgagccgggttcgcaacgtcgcagggtgcgtacgaggaagccttcgatgacgtgttcgctgaactggatgtgctggaaaacctgctgggcgaaaagcgctatctgacgggaaaacacctcaccgaagccgacatacgtctgttcacaaccatcgtgcgcttcgatgcggtctattacagccacttcaagtgcaacctgcggcgcatcgcggactaccccaacctcagcaactggctgcgcgagctttaccaatggccaggcattgcagaaacggtagactttgagcacatcaaaggccactactacgctagccatcgcaccatcaacccgaccggaatcattcccaaggggccggcacttgatctgcaagcaggtcacgaccgcgagcgattgtcaggtgaaggtgcctggagcaag

SEQ ID NO: 33577 - DNA, 297 bp, Pseudomonas syringae
atggctaccttgcacattgtttctcattcgccctttgccgacacccgtctggacagctgcctgcgcctgctgggcacacatgacggcctgttactgtgcggcgatgccgcgtatgcgttgatgccagccagcgctcaaacacagaacctgcagcccctgatcgactcggtgaaactgttcgtccttgatgaagacctcaaggcacgagacctgcaactgcctgcgggagtgaacagcatcgactacccggctttcgtcgacctttcgttgcgcttcgacaaggtcaacacctggcta

SEQ ID NO: 33578 - DNA, 1173 bp, Pseudomonas syringae
atggaacaacattgcgaagtggccgtgctcggtctgggtgccatgggtgcagccactgtctatcaactggcgaaggccggagtcgatgtgattggcgtcgatcgctacgcccctccgcacacccaaggctccagccacggcgatacccgcatcacgcgcctgtcggtaggcgaaggcccgcagtacctgccgctggtgcgcagctcgcaccgcatctggcgcgaactcgaggcactgagcggcgagtcgctgttcgaacagtgcggcgtgctggtgatgacctccagcccgagctatgacgcagcggacgctgacgacttcacccacaagaccatcgcgctggcacgcgcctatggcgtggagcatcaggtgctgatggctaccgccattcgcgagcgttttccgcagttcgcaccggtgctggacacggccattggctactttgaacccgagggcggttttgttcggccagaacgctgcatcggcgttcagctcaggctggcagcgcaacacggcgcacggctgctgacccacgagaccgtcacgcatttacagccgtacggcgaacaggtgcgcattaccaccgaaaaaggctcgatcatcgccgacaaggtcgtggtcagtgccggcatgtggtcgacggagctgctgggtgcacctttcagtgacctgttgagggtgtgccggcaaaagctgttctggttcgaacgacagcaagacgcggtatttgctccgcgctcgcccagcttcatcatgattcacgggcccggtgatgctgacgtgagttacggcttcccgcctctgcccggcgaaaacagcatgaaggtcgccaccgagcaatacattgaggactcagcgccgaacacgctggaccgcaccgttaccgcgagcgaggagcaggacaggttcgacacccagataaagggcaaaattgcaggcctgagcccgcacgtcgtcaaatcctcggtgtgcgcctacaccgtcacgcccgactaccacttcatcatcgatgaacacccgtacctgaaaaacgtgaccgttgtatcggcgtgctccggtcacggcttcaagcattcagccgggctggggctggccctcgcgcaacgctgtattcacggcaagagcgatgtagatctttcagccttctcgctcgcacggttcagcgccgctgtt

SEQ ID NO: 33579 - DNA, 2352 bp, Pseudomonas syringae
ttgcactaccggctcaaggaaggggccctgatcgcctttggcgcactgtgcctgtacctgatgatggccttgctgacctacgaccagagcgaccctggctggagccataccagcagcaatgccgggcaggttcagaacgccgcagggtgggccggtgcgttctgtgccgacatcctgttcatgattctgggctatttcgcctacatatttccgttgctgctggcgatcaagacctggcaggtgtttcgtcatcgtcatgaaccctggcagtggagcggctggctgttctcgtggcgcctgatcgggctggtcttcctgatactggcgggtgctgcgctggcacacattcatttccacttctcggcgggttttccgggctcggcgggcggtgtgctgggcgaagtgttgggcgatctggccaagagggcgctgaacatccagggcagtaccttgctgttcattgccctgttcctgttcggcctgacagtgtttaccgatctgtcgtggttcaaggtgatggacgtcaccggcaagatcaccctggacctgttcgagttgtttcagggcgcggcgaaccgttggtggactgcccgtgccgagcgcaagcagatggttgcgcagttgcgcgaggtcgatatgcgcgtgaacgatgtcgtggcgcctgtcgccccggaccgtcgcgagcaggccaaggcccgagagcgcatcatcgagcgcgaagtgtcgctgagcaagcacatgaccgagcgcgaaaaacacgtgcctgcggtcatcgccccagcaccttcgaagccggcagagccaagcaagcgcgtcctgaaggaaaaacaggccccgttgttcgttgacagcgccgtcgaaggcaccttgccgccgatctcgatccttgatccggcggaaaagaagcagctcaactattcgccggagtctctggcggcggtcggtcatctgctggaaatcaagctcaaggagttcggtgtcgaggtctcggtggattcgattcatccaggcccggtcatcacccgctacgagattcagccggccgctggcgtaaaggtcagccgtatctccaacctggccaaggacctcgcacgttcgctcgccgtgaccagcgtgcgtgtggtcgaggtgattccgggcaagaccaccgtgggtatcgaaattcccaacgaagaccgccagatcgtgcggttctccgaggtactgtcgacccccgaatacgataacgccaagtcgcctgtgaccctcgcgctgggccacgacatcggcggcaagccggtgattaccgatctggcaaaaatgcctcacctgttggtggccggtacgaccggttccggtaagtcggtgggtgtgaacgcgatgatcctgtcgatcctgttcaagtccggcccggaagatgccaagctgatcatgatcgacccgaaaatgctcgagctgtccatctacgaaggcattccacatttgttatgtccggtggtgaccgacatgaaggacgctgccaacgccctgcgctggagcgttgccgagatggagcgccgctacaagctgatggcgaagatgggcgtgcgtaacctgtcgggcttcaaccagaaggtcaaggaagcgcaggatgccggagagccgctggccgacccgctgtacaagcgcgaaagcatccacgacgaagcgccgctgctgaccaagctgccgaccatcgtggtggtggtagacgaatttgccgacatgatgatgatcgtcggcaagaaggtcgaagagcttattgcgcgtattgcgcagaaggctcgtgcggccggtatccacctgattctggctacccagcgtccttcggttgacgtgattaccggtctgatcaaagccaacatcccgacgcgcatggcgtttcaggtgtcgagcaagatcgactcacgcaccatcatcgatcagggtggcgccgagcaattgctgggtcacggtgacatgctctacatgccaccgggcaccagtctgccaattcgcgtccacggtgcattcgtttccgacgaagaagtgcaccgtgtggtggaagcgtggaagctgcgtggctctcctgactataacgacgatattctcgctggtgtggaagagcccggcagcggctttgatggcggcagcagtgagggcggtgaagacagcgaaagcgatgccctttacgatgaagccgtgaaattcgtcctcgaaagccgtcgtgcatcaatttctgccgtgcagcgcaaactcaagattggttacaaccgtgccgcacgcatgatcgaagcgatggaaatggcaggcgttgtgacctccatgaacaccaacggctcgcgtgaagtcctggcccccgggccggtacgcgac

SEQ ID NO: 33580 - DNA, 1320 bp, Pseudomonas syringae
atggacctgttcagtcgcgaaccgatagctcagcctctggctgcacgtttgcgtgctaccaatctggatgagtatgtcggtcaggagcacgtactggcccacggcaagcctctgcgcgaggcgctggaacagggcgcgctgcactcgatgatcttctggggcccgcccggcgtcggcaagacgacgctggccaggttgttggccaaggtttcggatgcacatttcgagactgtttcggcggtgctggccggggtcaaggaaattcgccaggccgtggaagtcgccaagcaacaggccgggcaatacggcaagcgcacgattctgtttgtcgacgaagtgcatcgcttcaacaagtcgcaacaggatgcgtttctgccttacgttgaggacggcacgctgattttcatcggcgcaaccactgaaaacccttcgttcgaactcaataacgccttgttgtcacgagctcgcgtctacgtgctcaaaagcctcgacgaggcggcgttgcgcaaactggtcaatcgcgccctgaccgaagaccgcgggctcggccagcgcaagctgaccttgagtgacgaaggattcgcgatgcttatggccgctgctgatggtgacggccggcgcatgctcaacctgctggaaaacgcctccgatctggccgaggatggcagcgagattgatatcgagttgttgcagagtctgctaggcgacagccgacgccgcttcgacaagggcggcgaggcgttttatgaccagatatcggccctgcacaaatccattcgcggctccaacccggatgccgccctgtactggtttgcgcgcatgatcgacggcgggtgcgacccgctttacctggcgcggcgcgtggtgcgtatggccagtgaagacatcggcaatgccgatccgcgcgcgctgccattgtgcatgtcggcgtgggatgtgcaggaacgactcggcagccccgagggtgagctggcggttgcgcaggccattgtctacctggcctgtgcgccgaaaagcaacgcggtctacatggcattcaaggctgcgatgcgcgaagcgggcgaacacggatcgctggaggttccgttgcacttgcgcaacgcgccgaccaagctgatgaaacaactcggttacggtgaagaatatcgttacgcccacgacgagccggaagcttacgctgcaggcgaagactactttccggacgaactggagccacgccagtattatcaacccgtgctgcgcggccttgagctcaagatcggtgagaagctcaggcatctgaacgcgctggacaccgccagcgctcgccagcggagaaag

SEQ ID NO: 33581 - DNA, 675 bp, Pseudomonas syringae
atgatcagcatcagtgcgcgccccgacacttttaccttcgagccatcgcgtaccgctgtggtgatcatcgacatgcagcgcgactttctcgaacccggcggctttggtgctgcgctgggcaacgacgtcgccccgctgcaagccatcgtgcccaccgtgcagcaactgctggcgctggctcgcgaacagggtcttgtagtcattcatacccgagagtctcacctcccggacctgtccgactgcccgcaagccaaactcgaccacggtttaccgggcctgcgcatcggcgaccccggcccgatggggcgcattctggttcgcggtgaacccggcaaccagatcatcgacgccctgacgccgcttgccagcgagtgggtcatcgacaaaccgggcaaaggcatgtttttcgccaccgatctgcagcaacggctcactgttgcgggaatcactcatctgatcttcgccggcgtcaccaccgaagtgtgcgtgcagaccagcatgcgcgaagcctgcgacctgggttatcgctgcctgctgatcgaagacgcgaccgaaagctactttgcggccttcaaacaggccactctggacatgatcaccgcgcaaggtgcgattgtcgggcgagttgcctcgctcgccaatctgcagcacgccctgcacacaaggagtacgcag

SEQ ID NO: 33582 - DNA, 1908 bp, Pseudomonas syringae
gtgagggcggatatcaatgttcgccatcgggatagtttgctgcaccacgctcgcgacggttttcaaagcagggattcccgccgtcttgtctcgtggtgtaagttggaaggcttactgatcaaacgatcaggtttttttcaaacccctgcctgccaaggaatgccttcaaaaatgaatttcgcactcaaaaaactcgccgcagccacgctgctactgaccagcctttcagccgtgactacgtctgcctatgccaaccttgatgcgcaacagagcgccgtcatcgtcaagacgttcagcggtacatcgttaacagacttcaggcagtttctggcgagcgtgaacaagaacgatatcgccaggagcgcaaatatcggccctgcgatcgcggcctttctcgacaataaaaagctttcagaagcgcagcaaaacgaaattcatcgtctgctcggcctatacgcgcggatcaagtacggcagcgcggccaccgagacgctgcgtgagctggtcgccattccaacggtgcgtgtggacggcgttgcccagcatgagaaccctgagttcatcaagatcgccgagaagatcaaaagccttgccgaacgcttcgaccttaagtttcgcaacatcgataaccgcgtctatgaagtctcgctcgacggcagcggcgatgaagtcgtaggtattcatgtgcatgccgacgttgtccccgtgaccccagagaattgggtattacctgacggcactcggctggacccgttcaaagtcactttgatcggtgaccgcatgtatggccgtggcaccgaagacgacaagaacggcatcgtggtgtcgctgtatgccatgaaagtcatcaaagaagaaaagctgccgctggcgagaaacttcaagctgctgatagacaccactgaagagactgccggcgatgccattccctattacttcgagcgcaatccgacacccaattacaacctggcgctggatggcgggtatccggttgtgattgcggagaaaggctacggcaccgtcatggccagttttgccaagcgcgctgcgcagggtgagggcgccgagatcgtttcgatgacgggtggcatggccaccaatcagattccgtcgaaatcagtcgttacgctggtgaccgacaagcctgcgcaactggcagccagcctgcaacaggccggtgcagattatgtgaaacgcaatggcggcaacttcgagattgccgccaacgtggaaggcaaggacgtcaagttgacggtgaccggtgtttccgcgcactcatctgcgcccgagtctggggtcaacccggtagcgaggatgctggatttcatcaacagcctcgacggcaacgttgcgctcaagcacaaccacatcacggatgccgctcgctatgcggccgacaactggggcctggactatctgggcggcaagttgggtgttggtttctccgatgagttcatggggccgctgacgacttccctgacttacgttgcgctggatgacaaggcgttcaaactggcggtcaatttgcgcgtgccgaagggcaagtctccagaactgctcaaatctgaaatcgccgaaaaactcacggcatggagcacgaagaccgctatcaacccggtattcgactattccattgccgagccgatgtatcgcaacccggaaggcgagtgggtcaaggcattgctcgctgtggccactgaaaacctcgacatgaaacacgcgttcggcacttcggcgggcgctacatcggttcatgagttgcccaacggcgtgcagttcggtctggcaagacctgaagtcaaatacaccggccacactgataacgagttcaagaccaccgagcagtttctgctcgacctgcagatcgtgaccgagatgatgggccgtatcgggcagctgccgaaactc

SEQ ID NO: 33583 - DNA, 999 bp, Pseudomonas syringae
atgactctccgtatcgcaatcaacggttttggccgaatcggccgcaacgtcctacgtgcactgtatacccaaggctaccggcaggacctgcaggtcgtcgccatcaacgatcttggcgacagcgaaatgaacgcgcacctgctgcgtttcgacactgtacacggcccgttcagcggcaccgtggagtgtgacaaggaaagcctgaccgtcaatggtgaccgtatttcggtcagcgccattcgcaacccggccgaactgccgtggaaagcgcaggacatcgacgtggtattcgaatgcaccggcctgttcaccagccgcgacaaggctgccgcgcacctgaccgccggcgcccgcaaggtgattatctcagcaccggccagcggtgccgatgccaccatcgtctatggcgtcaaccacgacacgctgcgccagtcgcaccagatcatctccagcgcatcgtgcaccaccaactgcctggccccggtcgcccaagtgctgcaccgtgaactgggtatcgaaagcggcctgatgaccaccattcatgcctacaccaacgaccagaacctgatcgacgtctatcacaccgacccgtaccgcgcgcgctcggccacccagtcgatgatcccgagcaagaccggcgctgccgaagcggtgggcctggttctgccggaactggcgggcaagctcacggggatggctgttcgcgtgccggtgatcaacgtttcgctggtcgacctgaccgtcaccctgaagcgtgaaaccacggccgaagaagtcaacgcgctgatgaaagaagccagccagcactccaaggtcctgggttacaacaccctgccgctggtttcacacgacttcaatcacaacccgctgtcgtcgattttcgacgccaatcacaccaaagtgagcggcaagttgctgaaagtgctctcgtggtacgacaacgaatgggcgttctccaaccgtatgctcgacaactgcctggcgctgcataacgccgag

SEQ ID NO: 33584 - DNA, 1032 bp, Pseudomonas syringae
atgatagagggcgttatgagtcaagaaagcatcaactgggacactctgggttttgactatatcaagactgacaaacgctatctgtctcattggcgcgacggtgcctgggatcagggctcgctgactgaagacaacacgctgcacatcagcgaaggttcgaccgcgctgcattacggtcaacagtgctttgaaggcctgaaggcctatcgctgcaaggacggctcgatcaacctgttccgtcccgaccagaacgcacagcgtatgcagcgcagctgttcccgtctgctgatgccccatgtacccaccgacgtgttcatcgaggcctgcaagcaggtcgtcaaggccaacgagcgtttcatcccgccgtatggctccggcggcgcgctgtacctgcgcccgttcgtgatcggagtgggtgacaacatcggcgtgcggactgcgccagagtttatcttctcgatcttctgcattccggttggtgcttatttcaagggcggcctgaagccgaacaacttcgtgatctccggttacgaccgtgctgcgcccaacggcaccggtgctgccaaggtcggtggcaactatgccgccagcctgatgccgggttcggaagccaagaaacacagcttcgcggactgtatctacctcgacccgcagactcattccaaaatcgaggaagtgggttcggccaacttcttcgccatcaccagcgacgatgtgttcctgacgcctaaatcgccatcagtgttgccaggcattacccgcctgtcgctgatcgaactggcaaaaaaccgtttgggcctgacggtcgaggagggcgatgtgttcatcgaccagctcgacacattcaaggaagccggcgcgtgcggcaccgctgcagtgatcaccccgatcggcggcatttcctaccaggacaacctgcacgtgttctacagccagaccgacgtcggcccggttacccagcgtctgtacaaggaactgaccggtgtgcaatccggtgacatcgagccgcccgccggctggatcgtcaaggtc

SEQ ID NO: 33585 - DNA, 1266 bp, Pseudomonas syringae
atgacgctgccggccgatcagggcgggctgggtttgaatgcctacagcgaagggatgatcacggcttcgctgatcgtcggtgcagccttcggctcactggccagtggctatatttccgaccgtttcggacgacgcctgaccctgcgcctcctgtcggtgctgttcatcgcgggtgcgctgggtacggccattgcgccgtccattccgttcatggtcgccgcgcgcttcctgctgggtatcgcggtgggtggcggctcggcgacggtgccggtgttcattgccgaaatcgccggcccctcgcgtcgtgcgcggctggtcagccgcaacgaactgatgatcgtcagcggccagttgctcgcctatgtgctcagcgcggtcatggccgcgctgctgcacacgccgggcatctggcgctatatgctggcgatcgcgatggtgccgggggtgttgctgctgatcggcaccttcttcgtacctccttcgccgcgctggctggcgtccaaaggccgttttgacgaagctcaggatgtgctggagcaactgcgcagcaacaaggacgatgcgcagcgtgaagtggacgaaatgaaagctcaggacgagcaggcgcgcaatcgtcccaaggcaaaggaattgctgcgtcagcgctgggtcatcaagctgctgctgatcggcatcggtctgggctttaccgcacagctcaccggcgtgaacgccttcatgtattacacaccgatcatcctcaagaataccgggatgggcaccaacgctgcgctgacggccaccatcggcaacggcgtggtgtcggtcatcgcgaccctgctgggcatctgggcaatcggtcgttatggtcgtcgccacttgctcatgaccggtctggtgatggtcatcctgatgcaggccgcgcttggctgcgtactgcaattcatgccgcagaacctgacccagagctacacggccctcgcctgcattctggtgttcctgctgttcatgcaaatgtgcatttcgccggtgtactggctgttgatgtcggaactgttccccatgcaggtgcggggtttgctgaccggcacggcggtgtcgatgcagtggctgttcaacgcctcggtggcgtttaccttcccgattgcagtggataccatcggcaacccgacgttcttcatctttgcggccatcaacgtcggctcgctgatcttcgtgttcctgtgccttcccgagaccaagggcaagtcgcttgaacagatcgagaaacacctgaagaaagagctg

SEQ ID NO: 33586 - DNA, 882 bp, Pseudomonas syringae
atgatgccttcagaaaatcagagcctcacgcccaaacccttggtttcgatcgtggccccttgctacaacgccgagcgtttcctcgacgctgcgattcagagcatctttgctcaggactacgagcatttcgaggtcatcatcgttgacgatggctcgaccgacaacagcatcgcgatgcttgagtccttgcaggagcgttacccgttccagctttatcgtcaggccaaccaaggggtcagcgctgctctcaatcatggtcttcagtatgccaaaggcgtttatctctccacgccggatctcgatgacatcatgcttgcgtcttcagtgcgtatccgtgcggagtatctggacaagcaccccgaagtcggctgcgtcggtgcgctgatcagctacatggactgtgacggcaagaggatcaaatgccagtcgcgtgattacatagagcggctgacattcgacgacgtgttgcgtggcgcggtggtggtcggagcgccggtggcgctgtaccggatgaaggccatgcgcgacgcgaatggctacgacccgacaatcaaggttcaggatttccaggcgacgttgagaattgcctatctgggttaccagattcatgtcattccagaggtcgtgacgcgctatcgccgtcacccgaacaacctttcacgcaagtacaaggtcttgctggacgccgacctgaaaagcatcgagccctaccgcaatcatcgcgaatatcagcgggggcgtacgttgctcgtcaacaaggcgctaaaatacgcgacggtcgccgataaacgctatgcatggagcctgctgcgctccatcccgttgagatacgccaatctaacgaccctgcggcgctgcaagcgcttgctcctcagctatagg

SEQ ID NO: 33587 - DNA, 2010 bp, Pseudomonas syringae
atgtttggcaaattaagtctggaagcggtgccgttccacgagccgatagtcatggtgacactcgccatgattgcgctcggcggcattgcggttgtcgggttgatcacctatttccgcaagtggacgtacttgtggtctgaatggctgacgtctgtcgaccacaagaaaatcggcgtgatgtacatcatcgttgccatggtcatgctgctgcgcggctttgccgacgcaatcatgatgcgtacccaactggcgatggcccagaacggtgccgaagggttccttccgcctgagcactatgaccagatcttcaccgcgcacggtgtgatcatgatcatcttcatggcgatgccgttcttcacgggcctgatgaacatcgttctgcctctgcagatcggtgcccgcgacgtggcgttcccgttcctgaactccctgagcttctggctactggttgcaggcatgctgctgatcaacctgtcgctgggcgtcggtgaattcgccaagaccggctgggtcgcgtatccgcctctctccgggctgcaatacagtcctggcgtcggggtcgactactacatctgggcactgcagttatccgggctaggtacgacattgaccggggtcaacttcctcgtgaccgtactgaagatgcgtaccccaggcatgaaactgatggacatgccgatcttcacctggacctgcacctgggcaaacatcctgatcgtggcttcgttcccgatcctgaccgctaccctggcgctgctgaccctcgaccgctatatggacttccacatcttcacgaacgaaatgggtggtaaccccatgatgtacgtgaacctgttctgggcgtggggccaccctgaggtgtatatcctgatcctgccggcattcggcgtgttctcggaagtcatctccacgttctccggcaagcgtctgttcggccacaagtcgatgatcttcgcctccggtgcgatttgtatccttggcttcatggtctggttgcaccacttcttcacgatgggtgccggtgccaacgtcaacgccttcttcggcctggcgacgatgctgattgccatcccgacgggtgtgaagctgttcaactggctgttcaccatgtatcagggtcgtctgcgcttcacagcgccggtgctctggaccctgggcttcatggtcaccttctcgatcggcggcatgaccggcgttctgttggcgattccaggtgctgacttcgtcctgcacaacagcctgttcgtaatcgctcacttccacaacgtcatcatcggcggtgcggtcttcggttacatcgccggcttcgcgttctggttccctaaagcgttcggtttcaccctgaacgagaagtggggcaaggcagcgttctggttctggatcgtcggcttcttcgtcgcattcatgccgctgtacgcgctgggcttcctgggtatgacccgtcgtctgaacgctaccgacatgccagagtggaacatctacctggacgtcgcgctgttcggtgcggtgctgatcgcaatgggtatcgcttcgcagctgatccagttgttcgtcagtatccgtgaccgcgacagcaatcgcgatctgaccggtgacccgtggaatggccataccctggaatggtccacttcttcgcctccgccgttctacaactttgccgaactgccaaaagctgacgacatcgacccgttcaccgatgccaagcgtgctggcaccgcgtacaacgtaccggctcgctactcggcgatccacatgcctaacaacacggccaccggcctgtacatgggcatgttgctgacggtcttcggcttcgcattcatctggcacatctggtggctggtgggcgtgagcctggtcgcaaccattgcggtcttcgttgctcacgctgtacgtgacgaccagggctacatggtgcctgctgaagatgtagcgcgtattgaaggtgagcatcacaaggtcctggcggccaacggtgcatacactcctgtcaagtcctcgctggaacaggtt

SEQ ID NO: 33588 - DNA, 939 bp, Pseudomonas syringae
atgagtaaaaaaaggtaccccaggttttttggcttcttggcccttttctgtatgcttttgctcagtggatgcgaaggcgtacctctgctcgatccaaaagggcaggtgggtatcgagcagcggaacctgatcataatcgctacgctgctgatgcttatcgtggtgatcccggtcatcctgatgaccctgatcttcgcctggaagtatcgcgcgtccaacaaggccgccaagtacacgccggactggtcgcactccaccaagatcgaaatcgcagtctggggcgtacccatgctgctgctggtcttcctggggtacatcacttacgtctcgactcactcgctggacccttaccgtccgcttgattcgaacgtcaagccgatcaccattcaggcgatctcggtcgactggaagtgggtattcgtctacccggactacggcatcgccacggtcaacaagatcgtgttcccggccaagactccgatcaatttccaggtgacctccgacagcgtgatgaactccttcttcatcccgggtctgggtggtcagatctacgcaatggctggcatgcacacaaagctgcatcttattgccaacgagaatcacgagttcaacggtatttcggccaactacagtggcgcgggctttaccggtatgaagttcaaggccatcgctaccagccaggaagatttcgatgcctgggtcagcgaagtcaagaattcacctaaaaagcttggcaccgccgagtacgccgagctgatcaagccgagcgaacgtaaccctgtcgaactcttttcctcggtcactccgaacctgttccagatcgtcatcgacaagtatgaaggtatgaatccaggcaagaagatcgtcgctggtgaagaaaaggaagtggccggtgacgctgcggaaaaaggcaaaaattcagctgctggggcagaggag

SEQ ID NO: 33589 - DNA, 933 bp, Pseudomonas syringae
atgaccgccagtatcggcatcgctctttaccctgaagacggcgaagacgcacgcgagctggtcaggcatgcgtacaccgcgatgaacagtgcgaaaaagatcggcccggacacgtatcggttttataccgcacaaatgaacgcagacgtttcggcgcgcctggacctcgaagccgccttgcgcgacgcggtggaaaaacaagcgttcgagatcgtctaccagcccaagctgagcctcgtcaccggccggatatgcgggctggaagccttgctgcgctggccgcgcccaggccagcaaggcgtatcgcctgcggtgttcgttccggtgctggaaagcctgggtctgatcggcgaagtcggcaactgggtcgtcgatcgcgtctgcgcccagattgcgcactggcaacgcacggggctggggctgtttcaggtggcggtcaacgtctctggccagcagatttccaacagcagcctggtcgccgacatccgccaggcgctgaccaatcatcgggtcgccccccagtggctggaggtcgaactgaccgaaagctcattgatggaaaacacttctcacaccatcgcgaccctggaaaccctgaaggccaacggggtcagtatttccatcgacgatttcggcactggctattcaagtctggcgtacctgcgccgattccctatcgacaagcttaaaatcgacatcgccttcattcgcgaagtgaccagcaacccacaagacgcggcgattgcccgagcaatcatcgaactggcacacagcctgggcctgaaagtcatagccgaaggcgtggaaacgcctgagcaactggcgtttttgcgggacaatcaatgcgatcagattcagggttacctgatcagcaagccgctgccgctggcagagcttgaaacatttttaagcacgccagagcgacagttcggg

SEQ ID NO: 33590 - DNA, 2862 bp, Pseudomonas syringae
atgactgaccgcattgaactgaccaccgccaacgaattcattgcccgccacattggcccgcgtgccgctgacgagctggccatgctgcacaccctgggttttgactccattgaagcactcagcgacagcgtgatcccggaaagcatcaagggcaccagcgtgctgaacctgcctgccgggcagagcgaagccgatgcactggcctccatcaaggccatcgccagcaagaaccagctgttcaagacctacatcggtcagggttactacaacacccacacacccgccccgattctgcgcaacctgctggaaaacccggcctggtataccgcctacacgccctaccagcctgagatttcccaaggccgtctggagtcgctgctcaatttccagaccctgatcagcgacctgaccggcctgccgattgccaacgcctcgctgctcgacgaagccactgccgctgccgaagcgatgacgttctgcaagcgcctgagcaagaacaaaggcagccagcagttcttcgcctccagccactgccacccgcagacactcgatgtgctgcgcactcgcgccgagccgctgggcatcaccgttgtggtggccgatgaaaccgaactgggcgatgtcagcgactactttggtgcgctgctgcagtacccggccagtaatggcgacgtattcgactaccgcgaactggccgagcgctttcacggggcaaacgcactggtggcggtcgccgccgacctgctggccctgaccctgctgaccccgccgggtgaattcggtgccgacgtggccatcggcagcgcgcaacgctttggcgtaccgctgggctttggtggcccgcacgcggcctatttctcgacgcgcgatgcgttcaagcgtgacatgccgggccgtctggttggcgtgtcggtggatcgccacggcaaacaggctctgcgcctcgccatgcagacccgcgaacaacacattcgtcgcgaaaaggccaccagcaacatctgcaccgcgcaagtgctgctggccaacatcgccagcatgtacgccgtgtatcacggcccgcgcggcctgacacagatcgccaatcgtgtgcaccacctgaccgcgatcctggccgaaggcttgagccagttgggcctcaacgccgagcaggcctatttcttcgacagcctgactttgcacactggcggccggaccgccgcgctgcacgctgccgcccgcgcccgccacatcaacctgcgcgaaatcgacgaccagcgtctgggcctgtcgcttgacgaaaccacctcgcagtcagcggtcgaagtgctctgggacattttcgccagcacgggccagactctgccggacttcaccgcattggccgccagcgtcaagtcgcgcctgccagcagccttgctgcgccagtcggcgatcctcagccacccggtgttcaaccgctatcactcggaaaccgagctgatgcgctacctgcgcaaactggccgacaaggacctggcgctggaccgcaccatgatcccgctcggctcgtgcaccatgaaactcaatgcggccagcgaaatgatcccggtaacctgggccgagttcggcaacctgcacccgttcgcccccgccgagcaaagcgccggttaccagcaactgaccgacgagttggaggccatgctctgcgccgccaccggctatgacgccatttcgctgcaacccaacgccggttcgcagggtgaatacgccggcctgctggccattcgcgcctaccaccagagccgtggcgatgaacaccgcgacatctgcctgatcccttcgtcggcccacggcaccaacccggcgaccgctaacatggccggcatgcgcgtggtggtgacagcctgcgatgcgcgcggcaacgtcgacatcgaagacttgcgggccaaggcacttcaacaccgcgagcagcttgcggcgatcatgatcacctacccgtcgacccacggcgtgttcgaagagggcattcgcgaaatctgcggcatcgttcatgacaacggcggccaggtctacatcgacggtgccaacatgaacgcgatggttggcctttgcgctccgggcaagttcggcggcgacgtgtcgcacctcaacctgcacaagaccttctgcattcctcacggcggcggcgggccgggcgtgggtccgatcggcgttaaatcgcacctcgcaccgttcatgccgggccacgcacgcatgcaacgcaaggaaggcgcggtctgcgcagcgccgttcggcagcgccagcatcctgccgatcacctggatgtacatccgcatgatgggcggcgaaggtctgaaacgcgcctcgcaattggcgatcctcaacgccaactacatttcgcgtcgcctggaagagcactacccggtgctgtacaccggcaccaacgggctggtagcccacgaatgcatccttgacctgcgcccgatcaaagacagcagcggcatcagcgtcgatgacgtggccaaacgcctgatcgacttcggcttccatgccccgaccatgtcgttcccggtcgctggaacgttgatgatcgagccgaccgaaagcgaatcccgcgaagaactggaccgtttctgcgacgccatgatcaagatccgcgaagaaatccgcgcagtcgaagacggcaccctggacaaagacgacaacccgttgaaaaacgccccgcataccgcggcggaaatcgtcggccagtggagccatccttacagccgcgagcaggcggtgtacccggtcgattcgctgatcgagaacaagtactggcctccggtcggacgcgtcgacaacgtattcggtgaccgcaatctggtctgtgcctgcccttccatcgagagctatcaggaagcc

SEQ ID NO: 33591 - DNA, 1410 bp, Pseudomonas syringae
gtgctgatcggcgcagcccagttggtcgacatcaagagcggcggggccatctcggcggtcctcgagcgcggtgatctggcgggcaagtccggccagacacttctgctgaccaacctgcaaaacatcaaggccgagcgcgtgttgctggtcggcatcggcaaggacggcgagctgtctgaccgccaactgaagaaaatcgccggcagcgtgctgtccagcctcaaaggcctgggcggcagcgatgcggtgattgcgcttgatgacctgtccgtgaaaaatcgcgacacgtacggcaaggctcgcctgtttgtagaagctctggcagatggcgaatacgtcttcgaccgcttcaagacccagaaagccgaagttcgccccctgaagaaaatcaccctgctgactgacaaggtcagcgtggccgatgtcgagcgcgctgccaaccacgcgcaggccatcgccaccggcatggcattgacccgtgacctgggcaacctgccgccgaacatctgccacccgacctacctgggcgaagaagccaaggcgctgggcaaggcacacaaaaacctgaaagtagagattcacgacgagaagaaactcgccgaactgggcatgggttctttcctcgctgtggcacagggcagcgcccagccgccgcgtctgatcgtcatgaactatcagggcggcaagaaaggcgacaagccatttgtgctggtcggcaaaggcatcaccttcgatacgggcggcatcagcatcaagccggctgccggcatggacgaaatgaaattcgacatgtgtggtgctgccagcgtgttcggcaccctgcgcgccgtactcgaactgaaactgccgatcaatgtggtgtgcattctggcctgcgccgagaacatgccgagcggcaccgcgacgcgcccgggcgacatcgtcactaccatgagcggccagacggtcgaaatcctcaacaccgacgccgaaggccgtctggtgctgtgcgatgccctgacctacgccgaacgtttcaagccacaggccgtgatcgatatcgcgaccctgaccggcgcctgcgtcgttgccttgggcggccatacctccggactgctgggcaacaacgacgcgctgatcaatcagttgctcgatgcgggcaaactggctgatgaccgcgcctggcagttgcctttgttcgatgagtaccaggagcaactcgacagcccgttcgccgacatcgccaatatcggcggcccgaaaggcggcactatcaccgcagcctgcttcctgtcgcgcttcaccaaggcttatgaatgggcccacctggacatcgccggcactgcatggctgagcggcggcaaggacaaaggcgccaccgggcgtccggttccgctgctgacccagtacctgctcgaccgcgccggcgta

SEQ ID NO: 33592 - DNA, 1824 bp, Pseudomonas syringae
gtgttggggtattttgccaaatcaggaaacctttttcagagtttccttaaaagccagttcaccgtgggcgagacatttaccgactcgcaggtctttgacagcgtgcgttttcagggggcggcgctggcttctgacgacggcatgctgtctgacagcgagcgcgcttacgccccggtcatccgtggcatcgctgaaaccaacgcgacggtggaagttcgtcagaacggctttctgctttacagcggcagtgtgtcccccgggccttttgaaatcaccgatatctaccccagtggctccaatggcgacttgtcggtgtcggtcatcgaagccgatggacgcgtacgttccttcactcaggcttacgcctcgttgccgatcatggtcccgtcaggatccctgcgctacagcctggcgattggccaggtagacagcaacgatgcgcttcaggcctctccgggctttaccagcgcagccttgatctacggcctttccgagcggatcaccgggttcggcggcgtacagctggccgaagattatcaagcggcgaacatgggcgcaggggtcaataccgggctgggcgctgtgtcgctggacgtcacccattccgtcagccaaccggaccaacaatcgcgtagcgggcaaagcctgcggatgcgttatgccaatacgctggacgtgaccgacaccacgctggcagtggccggttatcgctattcgaccgaggaatatcgcaccctcagccagcatgtcagcgacaccgacccacagaggcgagtgacgagcaccggcctggctcgcgatcgactggagctcagcgtcactcagatactgcccgcgcaggccgcgtcattgagcctgaccgcttccgagcagcgttactggaacctgccgggcaagacgcggcaactttacctgtcctataacgccgcctggcataccgtcaattacagcctgtccatcgagcgcaacgaggatttcgggcgtgacggtgacgccagcaccgaccatcgcattgccttgagcgtgaccgtgccgctcggatcaagccccggctcgtcgcgcctgtcgttcaatgcggtgcgcgacagttccggcgattacaacgctcaggccgggctcaacggtcaggtgctgggagatcgcgatacgttctattcggttcaggccggcaacgacagcaactccggcagtttcggcgcaggaaaaatcaacaccaccaccggtttcggtcgtttcgaggccggttatagtcagggtcaggactacgacgcgttgaccctgtccgcagcaggttcgctggtggcgcatgccggtggcgtgaacctggggcaaacgttgggtgaaaccttcgccctggttcaggtgccggacgtcagcggtgcccgcttgaagtcctacaccaacgttgcaaccgcagccaatggctatgcggttttgccgtatgcgcaagcctatcggaccaactgggtcagcctggacacccgacagttgggcgctgatgtcgacctggataacgccattacccaggtcgtgccgcgcaggggcgcgatgccggtggtgcgcttcaaggcggctgtggggcggcgcgtccagtttgaactggtgcgcgccgatggcagcaacgtgccgctgggtgccagtgtcgaggatgagcagggcagggcgctggcggtggtcgatcctggcagtcaggcgctggtgctcagcgaccgggacagcggcagcctgagcgtgcgctggtccgaccaacggtgtcaggctgcattcgtactgccgcccagagaccctgcccgtgcctacgagcgaatcacggtggtctgccaa

SEQ ID NO: 33593 - DNA, 426 bp, Pseudomonas syringae
atgacccaagtcgacttctacatcctgcccagcgctgaccctgcggcccgcctggactttgcctgcaaactcacggaaaaggcctggcgcctgggccacaaggtttacctgcactgcagcgatgcagcgcagcgtgaagacctggacgcacggctctggcgcttccggggcgaagtgtttctgccccacggcgacgccgagagcgatcacgatgcacccgtggtgctgggcctgggcgatgactcgggcacgcatcaggacctgctggtcaacctcgacctgagcattccggccttcttcaagcgcttcgcccgtgtcgcggaagtggttgtcgaagacccggccatacgccttgccgcacgcgagagtttccgttcctaccgcgaacagggctatcctccgcaagatcaccgactgcagcgtctt

SEQ ID NO: 33594 - DNA, 1362 bp, Pseudomonas syringae
gtgcgggttgattcgattgccctgcgcctgagcggcctgtttgcgctggtcgcgctggtggttttcctgctgatcggctgggccttgtacctgcaggtcgacaagagcctcgacctgctgccgcgcgccgaagtggatgcgcgctacagcgtactggaatcggccatcgggcgtttcggcaatcccgagcactggagcaagatcaaggcaaaactggagttgctcagcgaagaagacaagcgcctgcgtttctgggtcgtcagcgacaacccgctgtacgaattcggcaacccggacccgaacattcgccgattcgcgcaaggcgcgccgggcatgcatgacctgaagctggccgatcacccgttcgccttcaaggtgctggtcagcgaattcccggccaaggaacagcgtccggcgctgcgttttctcaccgccatcgacaccgaaaccttctggcacacccagcactcgctgctggtcgcactgatcagcctggccacactgggcgtgctgctggcgtcggcgctgggttactgggtggcgcgcatcggcctgcgcccgttggccagcctctcgcaggaggtccagaagctggccccgccacgcctgtccgggcgcctgcaactgtcaccgctgccaccggagctcgagcagttcgtcgcctcgttcaactccacgctggaacgcgtcgaacaggcctactcgcggctggagtcgttcaacgccgatgtggcccacgaactgcgctcgccactgactaacctgatcggtcaaacccaagtggcgctgacccgcggccgttccgccgagcattatttcgaggtcttgcaatccaaccttgaagagctcgaacgcctgcgttcgatcatcaacgacatgttgtttctggccagcgccgatcagggcaccaaggtcaaggcgctgacctgtgcgtcactggccgaagaagtggcgacgacgctggattacctggacttcattctggaagacgcacaagtgcaggttcgggtccagggcgatgccagcgcaccaattgaaaaacctcacctgcgccgcgccctgatcaaccttctgcataacgccgtgcaacacaccgaggccgggcaggtcatcgaggtctgcatcgagtcgcgcgaggcgcatgtgagtatcggcgtgaccaatccgggcgcgcaaattgcccaggaacatctgcccagactgttcgagcgcttttatcgggtcgatgcctcacgcagtaacagcggtgccaatcatggcctggggctggccattgtcaaagcaattgcattgatgcacggcggcagcgtatttgttaacagtgcacacggggccaatacgtttggtatccagcttcctcgc

SEQ ID NO: 33595 - DNA, 2844 bp, Pseudomonas syringae
atggacaagacttaccagcctcacgccatcgaaacttcctggtaccagacctgggagtccgagaactatttcgctccgcagggcgcgggtgactcgtacaccatcatgatcccgccgccgaatgtcacgggcagcctgcacatgggtcacggtttcaacaacgcgatcatggacgcgctgatccgtttccggcgcatgcagggtcgcaacacgctgtggcaaccgggcaccgaccacgccggtatcgccacgcagatgctggtcgagcgtcgcctcgaagcgcaaggcgtaagccgtcacgagctgggtcgcgagaagtttctcgacaagatctgggaatggaaagccgagtccggcggcaatatcagccgtcagatccgccgcctgggttcgtccgtcgactggagccgtgagcgcttcaccatggacgacggcttgtccgatgccgtgaaagaagccttcgtgcgcctgcatgaagacggtctgatctaccgtggcaagcgcctggtcaactgggacaccaagctgcacaccgcgatctccgacctcgaagtggaaaatcacgacgaaaaaggccatctgtggaacctgcgctacccgctggcggacggcgcaaaaaccgccgagggcctggattacctgatcgttgccactacccgcccggaaaccatgctcggtgacgctgctgttgccgtgaacccgcaggacgagcgctacaaggcgctgattggcaagttcgtcgagctgccgctggttggccgccgcatcccgatcattgccgatgattactgcgaccctgaattcggcaccggctgcgtgaaaatcaccccggcccacgatttcaacgactatgaagtcggcaagcgccacaacctgccgctgctgaacattttcgacaagaatgccaatgtgttgcctgccgcccaggtgttcaacctcgacggcaagctgaacgaaagcgttgacggcaccctgcccgcggcctacgccgggctggaccgttttgaagcgcgcaagcagatcgtcgctgcattcgatgccgccggcctgctggtcagcatagatgatcacgccctgaaggtgccgaaaggcgaccgctccggcaccatcatcgagccatggctgaccgaccaatggtacgtgtccaccaagccgctggccgagcctgcaatcgctgcggtcgaagacggtcgcatcgccttcgtgcccaagcaatacgaaaacatgtacttctcgtggatgcgtgacatccaggactggtgcatcagccgccagctctggtggggccaccgcatcccggcctggtacgacgagtccggcaaagtctatgtaggtcgtgacgaagccgaagttcgcgccaagaacaacctgggcccggaaatcgcgctgcagcaggacaacgacgtactcgacacctggttcagttcgggactgtggaccttctccacgctcggatggccggaaaagaccaaggcactggagactttccactccacggacgtgctggtcaccggcttcgacatcattttcttctgggtcgcccggatgatcatgctcaccctgcatttggtgaagaacgaagacggcacgccgcaagtcccgttcaagacggtgtatgtgcacggcctggtgcgtgatggccagggccagaagatgtccaagtccaagggcaacgttctggacccgctggacatcgttgacggtatcgacctcgaaacgctggtagagaaacgcaccagtggcctgatgcaaccgcaactggcgaagaagatcgagaagcagacccgtcaggaattcgccgatggcatcgccagctatggcaccgacgccctgcgcttcaccttctgttcgctggcgtctaccggtcgcgacatcaagttcgacatgggccgcgtcgagggctatcgcaacttctgcaacaagatctggaacgccgcacgttacgtgctggacaagggcgaagactgcggccagaacggcgaagccgtcgaactgtcgctggcggatcgctggatcatctcgcaattgcaacgcaccgaagccgaagtgacccgccaactggaccagttccgtttcgacctcgccgcgcaggcgttgtacgagttcatctggaaccagtattgcgactggtatctggagctgtccaagcctgtgctgtgggacgaaaccgcatcgatcgaacgtcagcgcggcacacgtcgcacgctggttcgcgtgctggaagtcgcgctgcgtctggcgcatccattcatgccgttcatcacagaagaaatctggcagcgccttgcgccgctggccggtgtggaaggcaagaccatcatgctgcaaccctggcccgtggccaacgaagcacgcatcgatcaggctgccgaagacgacatcgaatggctcaagggcctgatgcttgccgtgcgtaacatccgtggcgaaatgaacatcggtccgggcaagccgctgcaactgttcctcaagaacgtcagtgccgacgaccagcgtcgcctgagcgaaaacgactacctgctcaggaagctggccaagcttgagtccatgacggtgttgaccgacggtgccgaagcgccgctgtctgccaccgcgcttgtgggcgacatggaagtgctggtgccgatggccgggttgatcgacaaaggggcggaactcgcgcgcctggacaaggaaatccagcgcctgcaaggcgaagtgcaacgtgtgggcggcaagctgtccaacgcagcattcgttgacaaagcgccgcctgacgtcatcgccaaggaacgcgccaagctgaccgaggccgaacaggcactgggcaaactggccgagcaacacgcgcgcatcgccagcctg

SEQ ID NO: 33596 - DNA, 471 bp, Pseudomonas syringae
atgcgtattggccatggctatgatgtgcaccgtttcgctgaaggcgatttcattaccttgggcggcgtgcggattgcacacgggttcggcctgctggcccactccgatggcgatgtcctgctgcatgcgctgagcgatgcgctattgggcgcggcagcgctgggcgacatcggcaagcactttcccgacacagacccgcaattcaaaggcgctgacagccgcgtattgctgcgtcatgtgctcaagcagatccacggcaaaggctggaaggtcggcaatgtcgacgccaccattgtcgcccaggcaccgaaaatggcaccgcatattgatgccatgcgtgcgttgatcgccgaggatctgctcgtggagctggatcaggtgaacgtgaaagcgacgaccacggaaaaactcggctttaccggccgtgaagaaggcattgcggtgcatgctgtcgcgttgttgctgcgcgca

SEQ ID NO: 33597 - DNA, 717 bp, Pseudomonas syringae
gtgggtgcgatgactgactttcttcctgccttctgggcagtgatacctgcggcgggcatcggtgctcgcatggcagctgaccgtcccaagcaatacctgcaactgggcggcctgacaattcttgaacacagcctgctttgctttctcgatcatccaaggctcaagggcctggtgatcagcctggctgtggacgatccttactgggctgcattgccctgcgcgcatgactcgcgtatccagcgagtggacggcggacgcgagcgttccggctcggtgctcaacgcgctgctgcacctgcatgcgcagggggcaagtgatgacgactgggtgctggtgcatgacgctgcgcgcccgaatctggcgcgcagtgacctggacaacctgctcggtcagttggcagacgacccggtcggagggctgttggccgtgccggcgcgcgacaccctcaagcgtgccgacagcgatggccgggtggttgagaccgttgaccgaagcctgatatggcaagcgttcacgccgcagatgtttcgtctgggtaccttgcaccgagccttggccgacagcctggtgtcgaatgtcagcatcaccgacgaggcatcggccatcgagtgggcagggcagtcgccgcgtttgatcgaagggcgttcggacaacatcaaggtcactcgccccgaagacctggaatggctgcgccagcgtcgcagcgaatttggccgt

SEQ ID NO: 33598 - DNA, 1404 bp, Pseudomonas syringae
gtgcgttccccgtcattcgtgacggggttgtcgcattcgggcctgcctttttctgcgcctgactgcgagcattgtttccccagctgcgtcgttttcgtcaatcttggagtgtttacaacaatggcaaaaatcgtcgacatcaaaggtcgtgaagttctcgactcccgtggcaatcccaccgtggaagcagatgtgctcctcgataacggcatcatcggcagcgcctgcgcgccgtccggtgcttcaaccggctcgcgcgaagcgctggagctgcgtgatggcgacaagagccgttacatgggcaagggtgttctgaaggctgttgcgaatatcaacggtccgatccgtgatctgctgctgggcaaagacccggttgaccagaaagcgctggatcacgcgatgatcgcgctggacgctaccgagaacaaggcaagtctgggcgccaacgcgatcctcgccgtctccctggcggcggccaaggcggctgcacaggatcaggacctgccactgtatgcgcacatcgccaacctcaatggcaccccgggcgtttattccatgccggttccgatgatgaacatcatcaacggtggcgagcatgccgataacaacatcgacatccaggaattcatgatccagccggtcggcgccaagagcttcgctgaagcgctgcgctggggtaccgagattttccatcacctcaaggccgtgctcaaggcgcgtggcctgaacaccgcggtcggtgatgaaggcggtttcgccccgaacctggcatccaacaaagaagcactcgaggctattgccgaagccgtcgccaatgcgggttacacgctgggcaccgacgtgaccctggcgctggactgcgcggcgagcgagttctataaaaacggcaagtacacgctcagcgaagaaggcgagtacagctctgccgagtttgccgaataccttgccgaactgacccgcaagcacccgatcatttccatcgaagacggtctggacgagtccgattgggacggctggaaagtcctcaccgagaagatcggcgagaaggtccagctggtcggtgacgacctgttcgtgaccaacaccaagatcctgaaagagggcatcgacaagaacattgccaactcgatcctgatcaagttcaaccagatcggcaccttgaccgaaacgctggaagccattcaaatggccaaggctgccggttacaccgccatcatctcccaccgctccggtgagaccgaagattcgaccatcgccgacctggccgtgggcacctctgccggtcagatcaagaccggttcgctgtgccgttccgaccgtgtttccaagtacaaccaactgctgcgcatcgaggagcaattgggctccaaagctgtgtatcgtggtcgtgccgagtttcgcggc

SEQ ID NO: 33599 - DNA, 843 bp, Pseudomonas syringae
atggctcagaaaatcatccgcacaggttcgatcgagatcgccaacgacaagccgatggtggtgttcggcggcatgaacgtactcgaatcccgggatatggccatgcaggtctgtgaagagtacgtaagggtgaccgaaaagctcggtatcccttacgtgttcaaggccagcttcgacaaggccaaccgctcttcggttaattcctaccgcgggccgggccttgaagaaggcatgcgtattttcgaagagatcaagcgcaccttcaacgtgccgctgatcaccgatgtgcacgagcctcatcaggccgccgtggtggccgaagtgtgcgacatcatccagctgccggcgtttctgtcgcgtcagaccgacctggtcgttgcgatggccaagaccggcgcaatcatcaatatcaagaaagcccagtttctcgcaccgcaggaaatgaaacacatcctgaccaagtgtgaagaggcgggtaacgatcagttgattctctgcgagcgtggttccagctttggttacaacaacctggtggtggacatgctcggcttcggcatcatgaagcagttcgagtacccggtgctgttcgacgtgacccacgcgctgcagatgccgggtggtcgctccgattctgccggtggtcgtcgcgcccaggtgctggatctggccaaggccggcatcagccagaacctggccggtttgttccttgaagcgcatcccgatcctgacaacgccaagtgcgatggcccatgtgccttgcgtctggacaagctggagccgttcctggcccaactcaagtcactggatgaacttgtgaaaagttttccgatcgtagagaccgct

SEQ ID NO: 33600 - DNA, 507 bp, Pseudomonas syringae
atgcgtcactggctcgcgccgctgacccgcctgccggacagcgatcactgggccggctgggaggcattgcgcgacgctgctcaggatgctcgtccattgtggcggctggccgatggtgcgctgcaccgggcgcaggggtgtatctggtggctgcccgctggctgggagcaggcgtgcagcgaggcagtgaactgggccgacccgcgcgcgccgctggaccttcccgaaaacggtcaggtgagcctggaaggtgaagcgccgttgggcgacctgagtgttcgctatcgtcagggcgctgaggtgatgcatctcagcgggcgtggccgtcgtgatctcaagcggctgctcaacgagcaggcggtgccggcatttctgcgcggcagatggccgctgctgtaccgtgatgacgagctgctggccgtcgccaacctgcccggactggacggttcgcccaatgaacgctggcgtttgcgctgggttgcaccgaccggcgaccaaagtttgagc

SEQ ID NO: 33601 - DNA, 3519 bp, Pseudomonas syringae
atgccggcttctttcgttcatctacgcctgcacaccgagtactcgctggttgacggtctggtccgggtcaaaccgttgatcaagtcgctgaccagcatgaacatgcctgccgtggcggtgaccgatcagaacaacatgtgttcgctggtcaagttctacaaagccgctcagggctccgggatcaagccgatctgtggcgtcgatctgtggctggctggccgcgatgaagacgccgcgctcagtcgcatcagcctgctggccatgaacgcccaaggctatcgcaacctcaccgagctgatttcccgtggtttcatcgagggtcagcgtaatggccagatcgtcattcagcgccagtgggtcgcgcaagccagcgagggcgtgattgcgctgtccgcagccaaggaaggcgagatcggcatggcgctgctcggtggcaatccaggagaagcggacgagttgctgcgcgaatggctgaccgtgtttcctgaccgcttctacatagaagtgcagcgtaccaatcgcgccaatgatgaagagcatctgcacgccgcggttgccctggccgagcgccacggtgcaccgctggtcgcgaccaacgatgtgcgctttatcaaccaggctgatttcgaggcgcacgagacccgcgtgtgcatcggcgaaggccgggcgctggacgatcctcggcgctcgcacaactacagcgaccagcagtacctgaaaagcccggaagaaatggccgaactgttcagcgatctgcccgaggcgctggaaaactccgtcgagattgccaagcgttgcaacatcgacgtcaagctgggcactcacttcctgcccaacttcccgatccccgatggcatgaccatcgatgagtatttccgcaaggtgtctttcgacggtctggaggagcggcttgccgtcctgatgcccagggacaccactgaagattacgaaaccaaacgtcaggtgtatgtcgatcggctgaatttcgagctggatatcatcatccagatggggtttcccggttacttcctgatcgtgatggacttcattcagtgggccaagagcaacggcgtcccggtggggccaggccgtggatcgggtgccgggtcgctggtggcttatgtgcagaagatcaccgaccttgatccactggaatacgacctgctgttcgaacgtttccttaacccggaacgggtttccatgcccgacttcgacgtcgacttctgcatggacggtcgtgatcgggtcatcgaatacgtggccgaaaagtacgggcgcaatgcggtcagccagatcatcacgttcggttccatggcggccaaggcggtggtgcgcgacgtggcgcgggtgcagggcaagtcctatgggctggcggatcgtctgtcgaagatgatcccgttcgaggtcggtatgaccctcgaaaaagcgtacgagcaggaagagattcttcgcgactttctcaaggtcgatgaagaggccgccgaaatctgggaaatggcgcgcaagcttgaaggcattgtgcgtaacgtgggcaagcacgccgggggcgtggtaatcgccccgaccaagctgaccgacttctcgccgatctattgcgacgaggccggtgacggtctggtaacccagttcgacaaggacgatgtcgaggcagcggggctggtgaagttcgacttcctcggtctgcgcaccctgaccatcatcgactgggcactcaagactatcaatcgcgatcgcgccaaggtcgacgaagcgccgctggacatcgcgtttatcccgctcgacgacctgccgacctaccagttgttgcagcgcgccgaaaccacggcggtgttccagcttgagtcgcgcggcatgaaagagctgatcaaaaagctcaagcccgactgcctggaagaccttatcgcactggtggcgctgtttcgccccggcccgctgcaatcgggcatggtagacgacttcatcaaccgcaaacacggtcgcgccgagttgtcctacccgcacgtcgactaccagtacgaaggcctcaagccagtactggcgccgacctacggcatcattctgtatcaggaacaggtgatgcagatcgctcaggtcatggccggttacaccctcggtggtgcggacatgctgcgccgtgcgatgggcaagaaaaagcccgaggaaatggccaagcagcgtggcggtttcattgacggctgcaagtcgaacaacatcgagcctgatctggccggtaacattttcgacctggtggaaaaattcgccggttacggtttcaacaagtctcactcggcagcctacgggctggtgtcgtaccagacggcctggctgaaaacccactacccggcgccgttcatggccgccgtgttgtcggcggacatgcacaacaccgacaaggtcgtaaccttgatcgaagaagtgcgcacgatgaagctgcgcctcgacgcaccggacgtgaacacctcggagttcaagttcaccgtaagcgacgacggccgtattctctacgggctgggtgcaatcaagggggtgggtgaggggccggtcgaagccattaccgatgcgcgtcaaaaggggccgttcaaggacctcttcgatttctgtgcgcgtgtcgacctcaaaagaatcaacaagcgaacgctggacggcctgattcgcagtggcgcgctggaccgtctcggcccgtacttcgaactggagcccaaggcctatcaggccagtatcgaccgtaaccgttcggtattgctggccgcgctggaagaggccattcaagcggccgagcagactgcccgaagccacgacagcggccattcggacctgtttggcggcctgttcgtcgaagcggatgccgacgtttacgccaatcatcgcaagacccgcgagctgagcctcaaggatcgtctgcgcggcgagaaggaaaccctggggctgtacctgaccgggcacccgatcgatgaatacgaaggcgagatccgccgctttgcccggcagcgaatcatcgacctcaagcccgccagggacacccagacggttgcgggtctgatcattgccctgcgcgtgatgaaaaacaagaagggcgacaagatggggttcatcaccctggacgatcgctcggcgcgtattgaagcgtctttgttcgccgaagcgtttcactccgcccagtcactgttgcagaccgatgctatggtagtggtcgagggcgaagtcagtaacgatgacttttccggtggcctgcggttgcgcgccaaacgggtgatgagcatcgaagatgcgcgcaccaacctggccgagagcctgcgcgtgacggtgcatgccgacgcgctcaagggcgagcgactgcgctggctcggcgatttgtgcaagcgccatcgcggtgcttgtccgatcaccgtggattacaccgggcaggacgcccgggcattgctgcaattgggagaagcctggcgtattgatcccgcagacagcttgattcaagctctgcgtgaccagttcggacgtgagaacgtctttctccagtatcgt

SEQ ID NO: 33602 - DNA, 1140 bp, Pseudomonas syringae
atgaccagtcccttacgtatcgcactggtcgctggcgaggcctccggcgatatcctcggatccggcctgatgcgtgccctgaaagcacgtcatcccgatgttcgtttcatcggtgtgggcggcccgctgatggaagccgagggcatgcagtcctatttcccgatggagcgtctgtcggtgatggggttggtggaggtgctggggcggctgcgcgagctgctggcccgacgcaaattgctggttcagaccctgatcgatgaaaagcccgatgtgttcatcggcatcgatgcaccggatttcacgctcaacatcgagctacagctacgtcgcgccggtatcaagaccgtgcactacgtcagcccgtcggtctgggcctggcgtcaaaagcgcgtgctgaagatccgcgaaggctgcgacctgatgctcacgctactacctttcgaggcgcgtttttacgaagagaagggcgtgccggtgcgttttgtcggccatccgctggcagacaccattccacttgaatccgatcgtggcgccacccgcgccgagctgggcctgtcggtcgacggtccggttgttgcgttgatgccgggcagccggggaggcgaggtcggtcgtctgggcgcattgttttttgatgccgccgagcgccttctggtcgagcgtcctggcttgcgcttcgtgctgccatgcgccagcccgcagcgccgggctcaggtggagcaactgctgcaaggtcgcgatctgccgatcactttgctcgacgggcgctcgcatgtggcgctggccgcctgcgatgcggtgctgatcgcctctggcactgccacgctggaagccctgctttacaagcgtccgatggtggtcgcctaccgcatggcaccgttgacgttctgggtgctcaagcggctggtcaaaagcccttacgtgtctctgcccaatctgctggcccaacgcttgctggtgcctgaactgctgcaggatgatgcaacccccgaagcgcttgcacggacgctattgccgctgatcgaagacggccacgcgcagactgaaggttttgatgccattcaccgcatcctgcgccgtgatgcctccaatcaggccgccgatgcagtgttgagcctgctcggcctgccactttcactg

SEQ ID NO: 33603 - DNA, 438 bp, Pseudomonas syringae
atgatggacatcaacgaaattcgcgaatacctgcctcatcgttacccgttcctgctggtggaccgcgtgaccgagctggatatcgagaacaagaacattcgcgcctacaagaatgtcagcgtcaacgagcctttcttcaacggtcacttcccccagcatccaatcatgccgggcgttctgatcattgaggccatggctcaggctgcgggtattcttgcgttcaagatgctcgactccaagccatccgacggcacgctctattatttcgtaggttcggacaagctgcgcttccgccaaccggtttttccgggtgacaaactggttcttgaagcaacgtttctgagcagcaaacgccagatctggaagtttgagtgcaaggccaccgttgatggtaaagcggtatgctctgccgaaatcatctgtgcggaacgcaagcta

SEQ ID NO: 33604 - DNA, 1053 bp, Pseudomonas syringae
atgagcataaccatcaagctcggccagttggccgagttccttggcgctacgctacgtggcgacaaggacaaggacattaccgggctggccactctggaagaggccggccctggtcaaatcagtttcctggcaaaacctcaataccgtaaatacctggtcgatacccaggccgctgctgtgctgctcaagcctgcagatgccgacggttacaccggtgatgcgctattggtcccggatccttatctggcctacgcgcgcatttcgcatttttttgaccccaagcctaaaagcagtgcaggtgttcatccaacagccgtgattgccgaggatgcgcaggttgatcctgcggccagcatcggcgcgtttgctgtgatcgagagcggtgcccgtatcgcggccaatgtcaccatcggtgcgcattgcttcatcggcgcccgtagcgagatcggtgaaggtggctggctggctccgcgtgtgacgctttaccacgacgtgcgcattggcaaacgtgtggtcattcagtcgggtgcggtgctgggcggcgaaggctttggctttgtcaacgacaagggtgtctggcagaagtttgcacaaatcggtggcgtcaccttgggtgacgacgtcgagatcggcgtcaataccgcgattgatcgtggcgcgctgtctgatacgcgaattggcaatggtgtgaaactggataaccagattcacattgcccacaacgtgcagatcggcgatcacacggcaatggctgcgtgtgtgggcatctccggaagcgccaaaatcggcaagcactgtatgctggccggcggtgtcgggctggtggggcatatcgacatctgtgatggcgtttacatcaccggcatgaccatggtgacccattccatcaccgagccgggttcctactcgtcgggtacggcaatgcagccatctgcagaatggcgcaagagtgcagctcgtctgcgcaagatcgatgacatggcgcgacgtctgcaaaagctcgaaaaggctgtcgagacggtgacctgcgccgataatcgctcatctgatggc

SEQ ID NO: 33605 - DNA, 1788 bp, Pseudomonas syringae
atgtgcggattagcaggtgaacttcgtttcgaccatcaaccagcggacctcgccgcagttgagcgtattacccatgagctggcgcctcgcggcccggatgcgtgggggtttcatagccaggggccgattgcccttggtcaccgccgtctgaaaatcatggacctgtcggatggctcggcgcagccgatgatcgacagcaaccttggcctgtcgatggccttcaacggtgcgatctacaacttccccgaattgcgtgccgagttggaaagccttggctatcagttccattccggtggcgacaccgaggtattgctcaagggctaccacgcgtggggcgcagagatgctgcccaagctcaatggcatgtttgcctttgccatctgggagcgcgacagcaagcagctgttcattgcccgtgaccgcctcggtgtaaagccgttgtacctgtcgaaaaccgataagcgcctgcgcttcgcgtcctcgctgcctgccctgctcaagggcggtgatatcagcgggatgcttgatccggtggcgctcaatcattacctcaacttccatgctgtggtgcctgcaccgcgtacgctgctggccggcgtcgagaagttgccgcctgccagctggatgcgcattgacgccagcggcaaggtcgagcagaaagtctggtggaccctgccttatggtccccacgaggacgagaaaaatctcactctggaagactggcgcgaccgtgtactggacagcacccgcgaagcggtggccattcgtcagcgtgctgcggtagacgtaggcgtgctgctttcgggcggtgtcgattcgagcatgctggtcggcctgctacgcgaagtgggtgtcgaggacctgtcaaccttctccatcggcttccaggatgctggcggcgaacgtggcgatgaatttcaatattcggacctgatcgccaagcattacggtacgcgtcaccatcagttgcgcattcaggaaagcgagatcatcgagcagttgcctgcggcgttccgcgccatgagcgaaccaatggtcagccacgactgcatcgccttttatctgctgtcgcgcgaagtggccaagcactgcaaggtcgtgcagagcggccagggcgctgacgagctgtttgccggttatcactggtacccgcaagtcgatggcgcaagcgacccggtcgcggcctaccgttacgcctttgtggaccgcagctacgccgaatacgcggacactgttcagccaaaatggcgcaccgccaacgatgcagccggtgacttcgttcgcgatcacttcgcccagccgggtgccagcgctgcggttgacaaggcgctgcgtctggacagcacagtgatgctggtcgatgacccggtcaaacgtgtcgacaacatgaccatggcctggggcctggaagcgcgcacgccgtttctcgactatcgtctggtcgagctgtcggcgcgtattccgggcaagttcaagctgcccgatggcggcaagcaagtgctgaaagaagcggcgcggctggtcattccatcagaagtgatcgaccgcaagaagggctatttccctgtgcccggcctcaagcatttgcagggcgatacactcaattgggtacgtgaactgctgaccgatccgagccaggaccgcggcctgttcaacccgaccatggtcgacaagctgctgaccaatcccgaaggccagctcacgccgctgcgcggctccaagttgtggcagttggccgcgctgaacctgtggctcagcgaacaaggactgtgattgatgaaacagaac

SEQ ID NO: 33606 - DNA, 1134 bp, Pseudomonas syringae
atgctcgcgatcccaagccccacgggcttcaccgacaccatcgtgcgctacgtggccgagcgtctggaagaactgggtatcccgtttgaattgacccgtcgcggcacgattcgcgcaaccctcaagggtaaacagaacagccccgaccgcgcagtatccgcgcacctggacaccattggtgccagcgttcgggaggtcaaagacaatggccgtctggcgcttgccgccgtcggctgctggtccagccggtttgccgaaggcagccgggtcagcgtgttcacggacaccggcgtgatccgtggcagcgtgctgccgttgatggcgtccgggcatgccttcaataccgctgtggatgaaatgccgatcagctgggaccacatcgagctgcgcctggatgcctactgcaccacccgcgctgattgtgaatcactgggcatcggcattggcgacttcgtggcattcgacccgctgccagagttcaccgagagcggccacatcagtgcccgccatctggacgacaaggccggtgttgccgcgctgctggcggcgctcaagtcgatcgtcgaaagcggtgccgagccgctgatcgactgccatccgctgttcaccatcaccgaagaaaccggcaccggtgcagcgggcgtgctgccctgggacgtgagcgagttcgtcggtatcgacatcgcaccggtcgcacccggccagcactccagcgagcacgcggtgagcgtggcgatgcaggactcgggcggtccttatgattaccacctgtctcgtcatttgctgcgtctgggcgtggaaaacgagctgccggtccgccgcgacctgttccgctactactacagcgatgcgcattctgcggtgacgtcggggcacgatattcgtaccgccctgctggcttttggctgcgacgccacccacggctacgagcgcacccatatcgacagcctggccgcgctcagcaagctgcttggcgcgtacatcctcagcccgccagtgttcgccagcgatgccaaaccggcgcagagttcgctggagcggttcagtcatcagattgaacatgacgcgcagatggagtccgacacccgcgtgccgccggtagacagcctgatcgggctgaatcgcgaggagagt

SEQ ID NO: 33607 - DNA, 189 bp, Pseudomonas syringae
atgagcagcaccagcgataaagtcaaaggcatggccaacgaagcagtgggcaacgtcaagcaagctgttggcaaggctaccgataacactaagttgcaggctgaaggcaaggcgcaagagctcaaaggcgaaggccagcaggctaaaggcgaagtgaaagacgccgtcaagaaaggcgtcgacaaggtg

SEQ ID NO: 33608 - DNA, 813 bp, Pseudomonas syringae
atgctgaaacaacggatcatcacggcactcattctgttgccgattgccctgtgtggctttttcctgctgaccggcatgtactttgctctttttatcggcgtagtggtcgtactgggtgcctgggaatgggcgcggttggcgggctttgctgcccagtcgatgcgtgtggggtacgcggccctggtcgctgtgctgctgtttttcatgtacctgctgccgggtcttgaaccctgggtactggtcgcggcggtcatctggtggagcgttgcgaccttccttgttctgacttatcccgattccagcagtcactgggccagtgctgcctgcaagctggtgatcggtctgctgatcctgctgcccgcgtggcaggggctggtgctcatcaagcaatggccgctgggcaactggctgatcctgtcggtgatggtgctggtgtgggcggctgacatcggcgcgtatttctccggcaaggctttcggcaggcgcaagctggctcccaaggtcagtcccggtaaaagctgggagggcgtatacggcggtctggtggtcagtctgggtatcaccgcggcagtcggtgtttggcgtgactggactgtcgttcagttcatcgccgcactgttgggtgccgctgtgatcgtgttcatttccgtgatcggtgacctcaccgaaagcatgttcaagcgccagtccggggtcaaggacagcagtaatctgctgcctgggcacggcggcgttctggaccgcatcgacagcctgacggccgccattccggtatttgccgtgctgttgtgggccgctgactggggtgtcatg

SEQ ID NO: 33609 - DNA, 753 bp, Pseudomonas syringae
atggaaaaaataaaatcggccggaccgtcctcggtaccgcgccacgtcgcgattatcatggatggcaataatcgctgggccagaaaacgcctgttaccgggtgtggctggccacaaggcgggtgtcgacgctgtgcgggctgttatcgaggtctgcgccgaagccaaggttgaagtgctgacattgttcgcgttctccagcgagaactggcagcgcccggccgaagaggktggtgcgttgatggagctttttttcacggcattgcgccgtgaaaccaagcgcctgaacgagaacgacatcagcctgcggattatcggtgaccgttcgcgctttcaccctgagcttcaggctgcgatgcgtgaagcggaagtgcgtacgtccggcaacagccgctttgtgctacagatcgctgccaactacggcgggcagtgggacatcgcgcaagcggcccagcggctggcgcgcgaggttcaggcagggcatctgcagccggaggacatcactccccagttgctgcagacctgtctggcaacgggcgatctgccgttgcctgacctgtgcattcgcaccggtggcgagcaccgcatcagcaattttctgctttggcagctggcttacgccgagctgtacttctccgacctgttctggccggacttcaaacacgatgccatgcgcgccgcgctggcagatttcgcttctcgccaacgtcgcttcggtaagaccagcgaacaggtagaagctggagcccgggct

SEQ ID NO: 33610 - DNA, 741 bp, Pseudomonas syringae
atggctcagcagggcagtggttatcaggctcgctataaacgcattctactcaagctcagcggtgaggccctgatgggctcggaagagttcggcattgatcccaaggtgctggaccgcatggcgctggaagtcggccaactggtcggtatcggtgttcaggtcggtctggtcatcggcggcggtaacctgttccgtggtgcggcactgagtgctgcgggcatggatcgggtaacgggcgatcacatgggcatgctggccactgtgatgaacgccctggcaatgcgcgatgcgctggagcgcgctaatatcaccgctatcgtgatgtcggccatttcgatgctgggtgtgacggatcattatgatcgtcgcaaggccatgcgccacctcagtgccaaggaagtggtgatctttgctgccggtactggcaacccgtttttcaccaccgattcggctgcctgcctgcgcgcgattgaaatcgacgccgatgtcgtgctcaaggccaccaaggtagatggtgtgtataccgcagatccgttcaaggacccgaatgccgagaagttcgatcatctgacgtacgatgaagtgctggatcgcaagctgggtgtgatggatctgactgcaatctgcctgtgtcgcgatcacaagatgccattgcgcgtcttcaacatgaacaagccgggtgcccttctgaatatcgtccatggcggcgctgaaggaaccctgatcgaggaagcccaacaa

SEQ ID NO: 33611 - DNA, 861 bp, Pseudomonas syringae
atggcagagattactgcagcgttggtcaaagaactgcgcgagcgtaccggcgaaggcatgatggattgcaaaaaggccttgaccaaggctggcggcgacatcgaaaaagcaatcgacgacatgcgtgcttccggcgcgatcaaggccgctaaaaaagcaggcaacgttgctgctgaaggcgcgatcgccatcaaggacgacggcaaagctgctgtcatcatcgaagtcaactcgcagaccgacttcctggccctgcaggacgatttcaagaatttcgttgctgcaagcgtcgaaaaagctttcgctgacaagctgactgatgtggctccgttgatcgaagctcaggaaactgcacgtctggtactggtcggcaaggttggcgaaaacgtcaacattcgtcgcctgaagcgcatcgagggtgatgttgtcggcagctacctgcatggcaacaagatcggtgtggttgttaccctcaaaggcggcaacgtcgagctggctaaagatatcgccatgcacgtcgcggcaagcaaccctgagttcctgttcccttcggaagtttcggccgaagcgatcgagcgcgagaagagtgtcttcctgcaactgaacgaagacaagatcaaaggcaagccagctgaaatcgtcgagaagatggttggcggccgtatcaccaagttcctggctgaagccagccttgtcgagcaagcgttcgtcaagaacccggaaatcaaggtcggtgatctggccaagaaagccggcgctgaaatcgtttctttcacctacttcaaagtaggcgaaggcatcgagaagccagttgacaacttcgctgacgaagttgctgctcaactggctgctgccaagcag

SEQ ID NO: 33612 - DNA, 861 bp, Pseudomonas syringae
atgccgtctctgttgaaagccttcatcaccctgttgatgaccgtatcgctgcttgccggatgcaatcaggtcgggctggcgtatcgcaatctggatgtgatcattccgtggacgctcagcgactacctggacatgaactcggagcagaaaagctggctggatgtgcgcctcaagcaacacctgagctggcattgcagcacgcaactcccggaatacctggcctggctggacaagctggaggacatggtcaagaacgaccgtgtgacctatgaagggcttgaggcccgcaccagcgaggccaaagacgcgatagcaaagatctcccgggaaatcaccccgtcagctgtggaactgctgtcgcgctttgacgacaagcaagtacaggaaatgcaggagtcgttcgccaaggatcagcgcaagcgcgagaacaaatacctcgaccagccgctggaacgccagattgccgagcgcgccgaccgcatgcaaaaacgcctgaccccatggatcggcaaattgaatcaggtgcagaaggatcgaattcaggcctggtccgcctcgctcggcgagcagaacaaggcctggatcgacaaccgcacacgctggcagaacctgtttctggcgaccgtgcaacagcgtcaggcgagcgacttcccacagcgcatcgctgccctgctacaggaccgcgagacgttctggacgcctgagtaccgcaaggcctatgaccagaccgagaaggctgccatctcattgctggtagacatcactgcccagagcacgccggagcaacgaacccgcctgctgagccgcatcgctgacatgcgcaaggacttcaccgacctggattgtctgaagtcgcagcag

SEQ ID NO: 33613 - DNA, 2694 bp, Pseudomonas syringae
atgccgcaagtagatccagacctgttcgatcgcggccagtttcaggccgaactggccttgaaggccagccccatcgctgcgttcaagaaagcgatccgcagagcaagagacgtcctcgataaccggttcaggtcgggccgtgacatccgccgcctgatcgaggatcgtgcctggttcgtggacaacatcctgcaacaggcctgggatcagttcgaatggagcgaagacgccgacatcgccctgctggcagtcggcggctacggtcgcggcgagctgcacccgtactcggacatcgacctgctgattttgctggaaagcgatgatcacgaagttttccgcgaacctatcgagcgttttctgacgctgctgtgggatatcggcctggaagtgggacaaagcgtacgctccgtcgatgagtgcgcgcaggaaggccgagccgatctgacggtgatcaccaacctgatggaaagccgcaccatcgccggccccgagcatctgcgtcagcgcatgctggaagtcaccagcacgcagcacatgtggccgagcaaggaatttttcctggccaagcacgcagagcagaaaaagcgtcaccacaagtacaacgacaccgagtacaacctcgaacccaacgtcaaaggctcgcccggtggcctgcgcgatattcagaccattctctgggtggcgcggcgccagtacggcaccctcaacctgcacgcgctggcaggcgaaggctttctgctgggcagcgaaaacgcactgctggcctcctctcaggagtttctctggaaagtgcgctacgccctgcacatgctggccggacgatccgaagaccggttgttgttcgattatcaggttcgcatcgccgggctgctgggctatgaagacaacgatgccaaactggccatcgagcgcttcatgcagaagtactaccgcgtggtcatgagcatcgcggagctgagcgatctgatcattcagcattttgaagaagtgattctctccgacgacgacggcaccccccagccgatcaactcgcgcttccagttgcacgacggctatatagaagcaacgaacccgaacgtcttcaggcgcacgccgttcgccatgctcgagatcttcgtgctgatggcccagcacccggagataaagggcgtgcgtgccgacacgattcggctgctgcgtgagcaccggcacctgatcaacgatgactttcgcaacgatattcgcaacaccagcctgttcatcgagctgttcaagtgcgaaatcggtatccatcgcaacctgcgccgcatgaaccgctatggcattctcggcctgtacctgccggagttcggccacatcgtcgggcagatgcagcatgacctgttccacatctataccgtcgatgcgcacacgctgaatctcatcaagcacctgcgcaagctgcagtacaccgaggtctccgagaaattcccactggccagcaaaatcatggcccgcctgccgaaaccggaattaatctatctggccgggctgtaccacgacatcggcaagggccgtggcggcgaccactcggagcttggtgccgtcgacgcacaggcctttggcacgcgccatcacctgccagcctgggacaaccggcttatcgtctggctggtgagcaaccacctggtgatgtccacgaccgcgcagcgcaaggacctttccgatccgcaggtcatccacgatttcgcccagttcgtgggcgatgaagtacatctggactacctgtatgtgctgaccgtcgccgacatcaacgcgaccaacccgaccctctggaattcatggcgcgccagcctgttgcgccagttgtacaccgagaccaagcgcgccttgcgtcgcggcctcgaaaacccggttgaccgtgaagagcagattcgccgtacccagactgccgcgctggacattctggtgcgcagcggtaccgaccctgatgacgtcgagcaactctggtcagcgttgggcgatgactactttctgcgccacaccgccggcgatgtggcctggcacagtgacgcgatcctgcagcagcctgccgatggcggcccgctggtgctgatcaaggaaaccacgcagcgtgaattcgagggcggcacccagatattcatctatgcgccggaccagcacgacttcttcgccgtgaccgtggccgcgatggaccaactgaacctgaacattcatgacgcgcgcatcatcacgtccagcagccagttcacactcgacacctacatcgtactggatcacgagggcggctcgatcggcaacaatccggaacgcattcaggacatccgcgacggcctgaccgaagcgctgcgcaacccggacgattacccgacgatcatcaagcgtcgcgtgccccgccagctcaagcactttgccttcgctccgcaggtcaccattcacaacgacgcccagcgcccggtaacggtgctcgaactgctggcacccgaccggccgggcctgctggcacgcattggcaagattttcctggagttcgacctgtcattgcagaacgccaagattgcaaccttgggcgaacgtgtggaagacgttttcttcatcaccgacgccaacaatcagccgctgtccgatccgcaattgtgcagccagctgcaggaggccatcgtcaagcaactgagcgtcaactcagagcccggcggcgacctgcggatcagcata

SEQ ID NO: 33614 - DNA, 1026 bp, Pseudomonas syringae
atgaaaaagtttcttttgatgcttgggctgttaataagctcatattctgcgataggagcagacatgtctcacggtgccgataatttctacacaagcgacacagtcactgcgcaaaaagtgttgttcactaatcagtacaagatgaaagtcggcggcagcctgttcatccccaaaggctctgacccgaatacaaaagcaccggcaatcatcgtcggccatccgatgggtgccgtgaaagagcaaagcgccaacctctatgcgcagaaactggccgagcagggcttcgtgacgctgtcgctggacctgtcgttctggggcgaaagtgaaggcctgccgcgcaacgctgtttcaccggacatctatgccgaagacttcagtgccgctgtggactttcttggcacccagacgtttgtggacaagaaccgcatcggtgtattgggcatctgcggcagcggcagttttgtcatcagtgctgcgaagatcgacccgcgcatgaaagccatcgccaccgtcagcatgtacgacatgggcgccgccaatcgcaatggcctgaaacatgcgcagaccctggcgcagcgcaagaaaaccatcgagcaggcggcactgcagcgcgatgtggaattcagcggcggcgacactgcatacaccagcggcaccgtgcacaagctgactgaaaagtccggccctatcgaacgtgagttctatgacttctatcgcacgccgcggggcgagttcacgcctgaaggccagtcgcctgaactgaccacccacccgacgctgaccagcaacgtcaagttcatgaacttctacccgtttaacgacatcgcgacgatctcgccacggcccatgctgttcatcgcgggttcggctgcacactcgctggagttcagcgaagaagcctacaaactggccggccagcccaagcaactgattatcgtgccgggtgctgggcatgtggatctgtatgatcgggtcgatctcatcccgttcgacacactgggtgagttcttcaagaagaacctgaag

SEQ ID NO: 33615 - DNA, 3666 bp, Pseudomonas syringae
atggccctcacttcacgacttgccattgaggtcgatagccgcagtgctgagcagaaagtgcaggaccttcgtcgctcgcttgaggctctgaataatgctggcgtccggacaggccccgtcatgtcgggggcaggtggagctatcaacgacaccggtcgaagctcacgctcagccgccactcaggtacaaggcctggataggactgttcgttcgttagcatctgctgcggctgggcttgcagggcctttgctggcagctttcgccacaaagtcgctgtatgacgccagtgaggcctatagcacgctgacaaaccgcatgaagctggtcacaagcaacgccactgagcttgccgcggcgcaaaaggctgttttctcgatcgcccagagcgcataccagccactgacggcaaccgccgagctctatcaacgcatcgcgacgaaccaaaaggaattgaagctaacgggcgagggtgtagctggtgtcgttggaacgatcagtaagaccttggccatctctggcgcgtcagctgcatctgccaacgcagccctgatccagctgggccaggcattcgcgtccggagtgctgcgaggcgaagagctgaacagcgtaatggagcaggccccggcgctggctcaagctatcgcagccggtatgggcaagacagtcggcgagcttcggtcgctcggcgcggcaggcctcctaactgctgatgcggttgtaaaggctttgcaggcgcagcgtggggctgtggacgctctgtttgcgaggacatcggccaccatcggtaacagcctcacagcgctgggcaactcgactacctcgttcataggtcagcttgatcaggcaacaggatctagcgcgtcacttgcgaagagcatcctgtcactttctagcgcgatcgacggcgggctgccggccgcaatcaaattggccactgacaattccgaggagttgggccaggtgctcaccaccggtctctatgttgctcttgcgcgggttgctggtggatttgctcaacaggctgcgcaggctggttacgcagcggtggccaaccaaaaggcgctgaccgtttcagcagccacggctacgcaggatctcgctgccgctaagtcgaaacaggtagacgccaaagctgcagtagaccgcgccaacgcgcaggtagcctcagcgcaacggcaagttgctgccgacaaggaagtgatggcttctgagctgaacaggaccagggctgttcaggcggcgatggttgccgagagggagatagaggttcagcgtctaaaagcgcaaatttcagatcagggccgggctgcatctcttaataggctggcagagctgagccgcgcacatgttgtggtaacaaaccaagttgctgccgccgagaaagcgcttgcagcaaccacagtttctgcgtcggcgaccatcaccgcagcatacggcacaaggacagcggcggttgcggcttacggggaagcgactgcagtcgtcaatgcgttaacggtcgcatccaataacgcagcggcggcggcaagcttgacgtccagagcacttggagcgttaaccgcagcaggcaccggcctcctgggaatgctcggcggtccgctcgggctgctcttcattgcaggcgctgtcgctgtgtccttcatggatttccgcagcagcagcgacaaggtgaatgaggggctgcagaatctgaaggggccgctcgacgatgttattgccagattcaagcagctcaccaaagatcagcaagcagcagcgctggtcaagtggggagaaacccaggccgaggcggcaaaggcagcaaacgaagagtttcaaaatctcaacaaaagcctgcaggccggcctggtcggaccaagatcaagtgctgcaggcacaaagatattcagcgactactcggcacagatcgcctcagcaagagaagcgggcgagagcctgacgccgattttcgagaagctgcgcagtgagcccggagttccggaaagcctgataaatagccttgtcaaatcggcgggcgcttattctggcttatcggcttcagcaaaagaggcgaaggacagaatcgcagcgctaaaaacggaatcggcaaacgccgccaccaccgctgcgctctccactggcgcaaccaacgtaatgaccggcgcagggaagaaatacaacgaagagcttcaaaagcagctcggcaagctccaggacaacaacgatgcggtaaaggaggccaaccgctatatcgcggagcacaaagaccttaccgaggctgacaaggtcgccattctgtccacggcaaatgcgctgaaatctcaggaggcggcaaacaaggctgcagccaaagcgacccgagaggccggcaaggcgtacacagaaagcgctggcacgaaggctcttgacgatgctcggaagcagtacgccgttctcggcgagcagtcggcgatcatcaaagcccaaaggggcgacactgaaaagcttggagcagccgcaaccgagctcatcaagtgggagcagcagctcgccaacatcaagagcaagcaaaccctgaccgccgaccagaagtcattggtggcgaatcaggacttggtcacggctcaattgcgccgcaacgctgccctggaaaaagagaaccagctcagcatcacccgactggaaaacgagtcgaagctcaaagcttttcgggaaaacctcgactcacagcttggtcttgcaaaagatggactggacagcgacctggctggtgccggtctcggggatcaggcccggcagcgcctccaagacgacctcaagatacgccagtcgtatcaaaaggacctggacaagctcagtcgcgactacaacaagatcacgaacccaacctcagctgatacgtcgctttaccagaacgagacgaacgcgctcaacgccgcgttgcagacccgcctggcgatgcagcgccagtactacacggatgtagatcgggcccagtcggactgggctttgggtgctaattcggcgcttgagaactacctcgagcagtcgcgcgacgtggccgggcagaccaagcagctgttcaccaacgctttcagcagcatggaagacgcggtggtgaacttcgtgaaaaccgggaaactgtccttcaaggactttgccaacggcgtgattgaggatctgatccgcattcaggtgcggcaggcggcggcggggttcctcagcacagcattcagcttcctgagtggcggtagtgcggcgcttggccaaggcaccatgacgggctcaagccagaccatttccaaaaccggattctcgggtggcggatttactggcatcggtggcaagtacgaagaaaaaggcgtggtgcatggcggcgagtttgtcgtgaaaaaagaagtagtcagccagcccggcgcgcgtgagttcctggagcgcatgaatgccaataccaagggttacgccgacggaggttatgtaggcagcgccgcatcaacatccagggtttctagctcttcagcatcggtaagcttgccaacgatcgagcagaacttttactttcaaggaagcgctgacgagaacacggctcagcaactgaagcaggctgctgacgacggtgcatcccgaggcatgaggggtggctacgagatgatgttgcgcgatctgcagagaaacggaccggcaatgcaaattattaggggtaaacga

SEQ ID NO: 33616 - DNA, 1239 bp, Pseudomonas syringae
atggaaggttacgaagtcgttgcgacctacgaggacgccgacgtggttgtggtcaatacctgcggcttcatcgacacggccaaggccgagtcgctggaagtgatcggcgaagcgatcaaggaaaacggcaaggtcatcgtcaccggctgcatgggcgtcgatgcgagcgtgattcgcgccgtacacccgagtgtgctgtcggtgaccggcccgcagcagtacgagcaggtggtcaatgccgtgcacgatgtcgtgccgccccgcaaggatcacaacccgctgatcgacctggtgccgccgcaaggcgtcaagctgaccccgcgccattacgcgtacctgaagatttccgaaggctgcaaccacagttgcagcttctgcatcatcccgtcgatgcgcggcaagctggtgagccgtccggttggcgatgtgctggatgaggccaagcgtctggtcaaatccggcgtgaaggaattgctggtgatttcccaggacaccagcgcctacggcgtcgatgtcaaataccgcaccggtttctgggacggtcagccggtcaagacccgcatgaccgagctgtgtcaggctctgggctcgatgggggtctgggttcgtttgcactatgtctacccgtacccgcacgtcgatgagctgatcccgctgatggcggcaggcaagattctgccgtacctggacatccccttccagcacgccagcccgaaaatcctcaagctgatgaagcgcccggcctttgaagacaagactctggcgcgtatcaagaactggcgcgagcagtgccctgatctgatcatccgttcgacgttcatcgtcggcttccctggtgaaaccgaagaggacttccagtacctgctggactggctgaccgaagcccagctggaccgcgttggctgcttccagtactcgccggtagaaggtgctcctgccaacctgctggacgccgccattgtgccggatgacgtcaagcaggatcgctgggatcgcttcatggctcatcagcaggccatcagcgccgcccgcctgcagatgaagatcggcaaggaaatcgaagtgctgatcgacgaagtcgatgatcgcggcgcggtaggccgttgtttcttcgacgcgccggaaatcgatggcaacgtgtttatcggccttgaagacggtagcaccgtccagccgggcgacaagatcatgtgtcgcgtcaccgacgccgacgaatatgacctgtgggccgagatgctc

SEQ ID NO: 33617 - DNA, 507 bp, Pseudomonas syringae
gtgaccggcctttacgccagggtcggcggtgtgctgctgattctgctggccgtggcaggtgcgctgtacggcgcataccggcacggcgtgagcgtgactgacagccagtggcaggcgaagtggtccgaacaggtcagcgcccagtcgcaggccgtggccacaaccaccgccgaatatcggaccgaagagcaacgccgccagaaagcggccaaccaggtggcaaacgatgcgagacaagaacagaccgctgcgcttactgatgctgctgtcgctgacgctgctggcggccggttgcgcatcgaagcaggaaagctggcagccacagcaggttgtgtgcccggcgataccggagctaccgagcgaggcaaggcagccacccgcgccgccatggtgctctccgacttgctcggccgggctgacgcgcgagcgggagaactggcaaaggcttatgacggcgcccgaatagccggaaaggcgtgcgaggcggcctcctataccttgacgcgc

SEQ ID NO: 33618 - DNA, 1107 bp, Pseudomonas syringae
gtggccatcaaggccctaattgaatttgattacgtgaggacttcaatggacgacaacaagaagaaagccttggctgcggccctgggtcagatcgagcgtcagttcggtaaaggtgccgtgatgcgcatgggcgaccatgatcgccaggcaattcctgccatctctaccggttcgcttggtctggatatcgcactcggtatcggcggtctgccaaaaggccggatcgtggaaatctacggtcctgaatcttccggtaaaaccacgctgaccctgtcggtcatcgcgcaagcccagaaaatgggcgctacctgtgcgttcgtcgacgccgagcacgcacttgatcctgaatatgccggcaagctgggcgtcaatgtagacgacctgctggtctcgcagccggacaccggtgagcaggcactggaaatcaccgacatgctggtgcgctccaatgccatcgacgtcatcgttgtcgactccgttgcggccctggtgcccaaggcagagatcgaaggcgaaatgggtgacatgcacgtgggtctgcaggcccgcctgatgtcgcaggcgctgcgcaagatcaccggtaacatcaagaacgccaactgcctggttatcttcatcaaccagatccgcatgaagatcggtgtcatgttcggcagcccggaaaccaccaccggtggtaacgcgctgaagttctacgcttcggtacgtctggatatccgtcgcaccggtgcggtgaaggaaggcgacgaagtggtcggtagcgaaacccgcgtcaaggtcgtgaagaacaaagtggcgccgccgttccgtcaggccgagttccagattctctacggcaagggtatctacctcaacggcgaaatcgtcgacctggccgttctgcacggttttgtcgagaagtcgggtgcctggtacagctatcagggcagcaagatcggtcagggtaaagccaactcggccaagttcctggcagataacccggaaatctgcaaagcgctcgagaagcagattcgcgataagctgctcacgcctggcgtcgacaccaaggctgtcggttcccgtgaagctgttgttgccgatgacgtggccgaagcagacgctgatagc

SEQ ID NO: 33619 - DNA, 987 bp, Pseudomonas syringae
atgctcacggtgctgcgtatggcccaagacaaccgcaaccgctgggacgtcaagattacgctgcagaccctgcgcgaactggacaaagcctttcgggtactggaacgcttcaagggccgccgcaaagtcaccgtgttcggctctgcccgtacgcccatggagcatccgctttacgcacaggcaagagaactgggcgaaaaactggcccagtccgacatgatggtcatcactggcgcaggcggcggcatcatggcagcagcccacgcgggcgccggtctcaaacacagcctgggtttcaacatcacgctgccattcgagcagcacgccaatccgaccgtggaaggcactgaaaacctgctgcctttccacttcttctttactcgcaagctgttcttcgtcaaggaagccgacgcactggtactttgcccgggcgggttcgggacactggatgaagcgctggaagtattgacgctgatacagacgggcaaaagcccgctggtgcctgtcgttttgctggacacccctggcggaagcttctggcaaggcgcgctggacttcatcaagaatcagctacaggacaaccactacatcctgccagccgacatgaaactgatgagactggtttatagccccgacgaggcagtggaagagatcaaccagttttaccgcaacttccactccagccgctggctgaagaataaattcgtgatccgcatgcaccatgcactcagtgagcaggcgcttgaacatatgcaggcagcgttcgccgacctgtgcatcaatgaaaacttccaccagcacggttatcagggtgaagagcacgatgaggcgcaattcagccacctgacgcgacttgcgtttaccttcacagggcgcaatcagggcaggcttcgtgaattggtggactacatcaacgtgcaggaacactgggcagatgcctcagcagtaagagatgccgcgcaggagcaagcgccacaacagacgctc

SEQ ID NO: 33620 - DNA, 363 bp, Pseudomonas syringae
atgtcgcccttcaaaggccaaaccggtctgaaacgtatcctcaatgccgcaggttattccctggacggcctgtccgctgccttcaaaggcgaagccgcattccgtcagttggtactgcttaacgtggtactgattccgctgtcgtttttcctgcacgtcagcaaggcggagcacgcgttgctggttgccgtgtgcctgctggcgctgatcgtggagttgctcaactccgccgtcgaggcggccatcgaccgcatttctctggacctgcatccgttgtccaagaacgccaaggacatgggcagtgcggcgcagtttattgcgctgagcatgatcggtctggtgtgggcgatcgttctgctgggc

SEQ ID NO: 33621 - DNA, 924 bp, Pseudomonas syringae
atgcgatttactctccgccagcttcaagtgttcgtcgccgtagcgcgacaggaaagcgtctccaaagcggcggtgctgctttcgctgtcgcagtcggctgccagcacctccatcaccgaactggagcgccagtcgagctgccagctatttgatcgtgccggtaaacggctgagcctcaacgccaccggcaggcaactgttgcctcaggccgttgcgctgctggatcaggccaaggaaatcgaagacctgctcaatggcaaatcaggctttggctcgctggccgtgggggccacgctgaccatcggcaactacctggcgaccctgctcatcggcggctacatgcagcgtcacccggaaagccaggtcaagctgcacgtccagaacacagcgcatatcgtccagcaggttgctcactacgagattgacctgggcctgatcgaaggcgattgcagtcacccggacatcgaagtgcaatcctgggtcgaggatgagcttgtggtgttttgtgcgccccagcatccgctggccaagcgcgcgcaggtgacactggaagaactgacccgcgaggcctggatcctgcgagaacaaggctccggcacgcgcctgacgttcgatcaggccatgcgtcatcatcgcaacggcctgaatgtgcggctggagctggagcacaccgaagccatcaagcgagcggtcgagtcgggactgggcattggctgcatttccagactggcgctgcgcgatgcgtttcgtcgcggcaatctggtcgaactggccacgcctgagctggatctgtcgcgtcagttctatttcatctggcacaagcagaaataccagacctctgccatgcgcgagtttcttgaactgtgccgcgcctttaccgctggcgtacagcgcagcgacgagatcgtattgccgagcctgtac

SEQ ID NO: 33622 - DNA, 690 bp, Pseudomonas syringae
atgagttacaacgtctcccctgtcggcttcgtgcgctcctgcttcaaggagaagttcgccatcccgcgccagccacagctggctccggccgctcgcggagtgctcgagctggtcgcgccgttcgatcagggtgaagccgtacaggggctggaacaggtcagtcatgtctggctgctgtttctgttccatctggcgctggaagacaaaccgcgtttgaaggtgcgcccgccacgcctgggcggcaatcaatcgatgggcgtatttgccactcgggcaacgcatcgccccaatggcatcggccagtccgtggtcaagctggacaaggtcgaagcaggccggctgtggttgtcgggcatcgatttgctggatggcacgccggtgctggatatcaagccttatgtgccctacgccgatgtcattgctgaggcgaccaaccaaattgccagttctgcgccggccctgataccggtgcaatggcaggacgcggcccttctacaggcccgtgaacacgcgctacgcctgagtgagcctctggtcgagctgatcgaacagtgcctggcgcaggacccgcgtccagcttatcagctgcctgcgccggaacgccgctacggtgcccggttctgggatgtggatgtgcgctggcactacccgcaagcgggcgttatttgtgtgcttgaagtgctgcgcgcc

SEQ ID NO: 33623 - DNA, 2565 bp, Pseudomonas syringae
atgaccgacctttcccaacatacacccatgatgcagcagtactggaaactcaaaaaccagcacctggatcaactgatgttttatcgcatgggcgatttctatgaaatcttctacgaagacgccaaaaaagccgccaagctgctggacatcactctgaccgcccgcggccagtcggccgggcaaagcatccccatgtgcgggattccctatcacgcggccgagggctacctggccaagctggtgaagctgggcgagtcggtggtcatctgcgaacagatcggcgacccggccaccagcaaaggcccggtggatcgtcaggtcgtacgcatcattacgcccggcaccatcagcgatgaagccttgctggatgagcgtcgagacaacctgatcgctgccgtcctcggtgacgaacgcctgttcggcctggctgtgctggacatcaccagcggcaacttcagcgtgctggagatcaaaggctgggagaacctgctggccgagcttgagcgcatcaatccggtcgagctgttgatcccggatgactggccgcaaggtttgcccgctgaaaaacgtcgcggtgcacggcgtcgcgcgccatgggatttcgagcgtgattcggcccataaaagtctgtgtcagcaattttcaacccaagacctgaaaggctttggctgcgaaaccctgacgctggccattggcgctgccggctgcctgctcggttacgccaaagaaacccagcgcactgccctgccgcatttgcgcagcctgcgtcacgagcgtctcgacgacacggtgatccttgatgctgccagccgtcgcaacctggagctagacaccaacctgtccggtggccgcgataacacgctgcaatcggtcatggaccgttgccagaccgcgatgggcacgcgactgctgacccgctggctgaatcgtccgctgcgcgacctgagcattcttcaggctcgtcagacgtccatcacttgctttctggaacgctatcgcttcgagaacctgcaaccgcaactcaaggaaataggcgatatcgagcggattctggcgcggatcggtctacgcaacgctcggccacgggatcttgcccgtctgcgcgacgccctgagtgcactgcctgagttgcaacaggcgatgactgaccttgatgcgccgcacttgcagcaacttgcacagaccgccagtacctacccggaactggctgacctgctgcaacgcgcgatcaacgataacccgcctgccgtgattcgtgacggcggcgtgctgaagaccggctatgacgccgagctggacgagctgcaatcgctgagcgaaaacgccggtcagttcctgattgatctggaagcccgggaaaaagcccggaccggactgagccatctgaaagtcggctacaaccgcgtgcatggctacttcatcgagctgccgagcaaacaggccgaacaggcgcccgccgactacattcgccgccagaccctcaagggggccgagcgctttattacgccggaactcaaagagttcgaggacaaggcgctgtcagcaaaaagtcgcgcactggctcgcgagaagatgctttacgagacgttgctcgaagacctgatcggccaccttgcgccgctgcaggacaccgcggctgcactggccgagctggacgtactgagcaaccttgcagagcgcgcgctgaatctggacctcaactgcccgcgcttcgtcgccgagccgtgcatgcgcatcgaacagggccgccaccctgtcgtcgagcaggtgctgagcacgcctttcgtggccaacgatctggcactggacgacagcacgcgcatgctgatcatcaccggcccgaacatgggcggtaaatccacttacatgcgccagacggcgctgatcgtcctgctggcccatataggcagcttcgtgcccgccgccagctgcgagctgtcgctggttgaccggatcttcacccgcatcggctccagtgacgatctggccggcggacgctcgacgttcatggtggaaatgagcgaaacagccaacatcctgcacaacgccaccgataaaagcctggtgctgatggatgaagtcgggcgcggcaccagcaccttcgacggtctgtcgctggcctgggcggcggcggaatgcctggcgcaactgcgtgcctacacgctgttcgcgacgcactatttcgagctgacggttttgccggaaagcgagccgctggtgaacaacgtgcacctcaatgccaccgagcataacgagcgaatcgtgttcctgcacagagtactgccggggccggccagccagagctacggcctggcggttgcgcagcttgcgggcgttccggggaaagtcatcacgcgcgccaaagagcacttgcagcgcctggaaaccaccagcctgccgcacgaacaaccgcgcgcgaaacccggcaaacctgcgatcccgcaacagagcgatatgttcgcaagcctgccgcacccggtactcgatgaactgtcgaagatcaaggtcgacgacatgaccccgcgacaagcgctggatttgctctatacattgcaaactcgcctg

SEQ ID NO: 33624 - DNA, 2001 bp, Pseudomonas syringae
atgggcattcctcataaccctgcgctcggctatcgccccgagatcgacggcctgcgcgcgttggcggtgattcccgtcattctgtttcacgccggcctgccgctgttcagcggtggattcgtcggggtcgatatcttttttgtgatttcgggctatctgatcacctcaatcattctcgcggaaaagatcaacgggaagttctcgctgatcaatttctatgagcgacgtgcaaggcgcatcctgccagcgctgttcgtggtcatgctggtgtgcgtgccggtcgcctggttgacgcttgacccaccggacctcaagtacttcgccaagagcctggtggccgtgccgatgttttcgtcaaacgtgctgttctggctcgaaagcggctatttcgatgcgacggctgaactcaaaccactgctgcacacctggacgcttgcggtggaggaacagtactacctgttctttccgctgctgctgatgctcggctggcgcatgggccgcactagactggtgatattgctgaccctcatcgcgctgggcagcctgacgctttcgcaactgggtgcacgtaacgacgccagtagcagtttttacctgctgcacgcacgcgcatgggaattactgaccggctcgtttatcgcgctctactgtgtctggcgaacgcgccacgcgcccagcgtcagccttctcgatcaggcggctgcggcgctgggcgtgttattgattggctacgccgtcgtgcagttcgacggcagcacgccgttccctggcctaaatgcgctggtgccggtgctcggtgcagcgctgatcatcgtctttgcgcaaggcaagacttgggttggtcgagcgctgagttcaccggcgctggtgctcatcggcatgatcagctacagcgcgtacctgtggcaccagccgcttttcgcctttgctcgtcagcgcagcctgaatgagcccggcctgccgttgatgctgagcctgaccctactgtcgctgatagtggcctggctgagttggcgctatgtcgagcagccttttcgcaaacagggcgcattcaatcgccaacaggtgttcacctcggcaggcgtcgcgtcggcgctgtttatcgcgctggggctgaccggttacctcaacaacggcttcagccaacgcttcaacgtcgatccggccatttatgaggaatttgccgacccgcagattcgtgacaaatgcactcagaccaccgtcgacttttgcctgttcggcgcagccaacccagacgccacaccggctctggcggtatttggcgacagccattcggaagccctgttatcaaccttcgatagcgttgcccgccagcagggcaaaaccattgttcatatcggcctgggtggctgtctgccgttgttgggcgtggacgtcgccagcggcaattacggccccggcgtctgcgaggcgctggccagccgcgagtttgagtacgtgaaaaagcaccgcattgcaaaagtggtgctggtcgcgcgctggacgctttataccgacggcgattacggtaaaaaaccgatgagcaagtatttcctgatttccgccgacagtcaggaaagaagccgtgcagcctcacgcgccgtgttcaagcaggcgctcgaagccaccgttcgggcgtaccgcgacatcggcagcgaagtggtcatcattgcgcaggtgccgcagcagttgatcaacccggaaaacctttattaccggctggctcgcgacacatcggacagccagacgcagaagttgcagcggatcagcgaattgtcagtgccggtcgcaacgcatgaacatttgcagcgcttcacgcgcgaagtgttcgggcaggccagcgagtcgaagcagatcgggctgatcacgccggatgcagcgttctgcaaggacagccagtgcctgataggcgacatgaactcgtactacaaggacttcaaccacctcaacgccaaaggcgccgggctgcttgccggtcagatcagccaaattgttgcgcag

SEQ ID NO: 33625 - DNA, 1221 bp, Pseudomonas syringae
ttgatcacttcacctcccaatgaacaaaccggtgagcacaccggcagctggctgggcgttttcgcgctggccctggcggcctttattttcaacaccaccgagtttgtgccgatcggcttgctgagcaacatcggccagagcttcgacatgacgccggcacaagtcggtttgatgctgacgatctacgcctgggtcgtctcgctgatgtcgctgcccatgatgctggcgacgcgcaacattgagcgccgcaaactgttgatgtttgtgttcggcctgtttgtggtcagccacgtcatctctgcgatggcgtccagcttcgcgattctgctggtgagccgtgtcggcattgcgtttgcgcatgcggtgttctggtcggtcacggcctcccttgccgtgcgcatcgcaccgccgggcaagcaggttcaagcccttggtttgctggcgaccggcacttcgctggcgatggttctgggtattccgctgggacgtgtgctgggtgaagccctgggttggcgcaccacattcctcggtatcgccggggtcgctgcgctggtggtctttctgctggcgcgcgcgctgccgttgctgccgagccagaactccggctcgctgcgcagcctgcctatcctgttcaaacgcccgcgcctgatggccatctacctgttgactgccatcgtggtgactgcgcacttcaccgcctacagctacatcgagccgttcacgcaaaccgtgtcgcgcctcagcggtgaaatgaccaccatcttgctgctggtcttcggcggtgccggaatcatgggctcgattgtgttcagcctgttcagcgaccggtttccaaacggtctgttgatcactgccattggcaccctggcggtctgcttgctgatgctgttgccactgtctggcgacgcaacaatgctcggcacgctgaccgtggtctgggggatggcgatcatgtgcttcgggctgttgctgcaggcgcgcgtgctgtcgctggcaccggatgcgaccgacgtggcgatggcgctgttttccgggatattcaacatcggcattggcggcggtgccttgctgggcagcgtcgtcagcagccacctgggcgtggcgaatgtcggcattgtaggcggcctgttggcccttggcgggttggggctgatttgctatacgacgtttctattcggcaagacgcagccccatgcagagatgcaggctgacgctaaacac

SEQ ID NO: 33626 - DNA, 2244 bp, Pseudomonas syringae
ttgaagctcggtattgtcggcctggttctgctgggcggcctggccatctaccttgatgcgattgttcaggagaaattctccggcaagcgctggaccattccggccaaggtttatgcgcggccgctggagctgttcgtcgggcagaagctgagccgcgatgacttcctcattgagctcgacgcgctgggttatcgccgcgaaagcgtggccaatggcccaggtgctgcggcggttaatggcaataccgtcgatcttaatacgcgtggcttccagttctacgagggcacggacgcagcacagcaggtgcgcgtacgtttcgctggcgattcggttgccgacctatcttccggcaacggtgccaagcttgccgtggcgcggctcgagccgttgctgatcggtggcttgtacccgaaaaatctggaagaccgaatcctcatcaagcttgatcaggcaccgccgtatctgctcgacgggctggtggcagtagaggaccgggatttttatcaccacttcggtgtgtcacccaagtccattgcccgtgcgatctgggtcaatacctcgcagggccagatgcgccagggcggcagtacgctgactcaacagttggtgaagaacttctacctgaccaacgagcgcagcctgagccgcaagctgactgaggcgatgatggcggtcttgctggaaattcattacagcaagcaggaaatcctcgaggcttatctcaatgaagtgttcgttggccaggatggtcagcgcgcagttcatggctttggtctggccagtcagtatttcttcagtcaaccgctatccgagctgaaaattcaccaggtagcgatgctggtcgggctggtcaaagggccgtccttctacaatccacgtcgcaaccctgaacgtgcgatggagcgccgcaaccttgtactcgatctgtttgagcagcaaggcgttgccacgcccgaagtggtggcggcggccaagaaattgccactgggtgtgaccaaaaccggcacgctggctgacagctcgttcccggccttcctcgatctggtcaagcgccagctacgcgaagactaccgcgacgaagacttgaccgaagaagggctgcggatcttcaccagcttcgatccgattctgcagatgaaatcccaggctgccatggacgatacgttcaaaaagctggccgggcgcaagggtgtcgatgaggtagaagcggggatggtcgtcaccaacccggagaccggcgaagtgcaggcgctgatcggtggtcgcgaggcgggtttctccggtttcaaccgggcgatcgatgcggtgcggccgattggttcgctggtcaagccggctatttacctgacggcgctggagcgtccaagccaatacacgctgaccagctggattgccgacgaactctttcaggtcaagggcgctgatggccagatctggaagccgcagaactacgatcacaagtcccatggcaatatctttctgtatcaggggctggcgcactcttacaacctgtcgactgccaagctgggtcttgagctaggcattccgacggtcttcaagacactggccaaactgggcgtgacccgtgagtggcctgcctacccgtcgatgctgctgggcgcgggcggcttgagcccgatggaagtcgccactatgtatcagaccatcgccagtggcgggttcaatacgccgatgcgtggcatccgcagtgtgctgactgccgaaggtgagccgctcaagcgttatccgttcaagatcgagcagcgtttcgatccgggtgccatttatctggtgcagaacgcgatgcagcgggtcatgcgtgaaggcacgggcaaatctgtttacagcgtattgccgagctcgctgaacctggcgggcaagaccggcaccagtaatgactcgcgcgacagctggttcgcaggtttcagtcaggatctgcttgccgtggtgtggatgggccgtgacgataacggtaagactccgtttaccggcgctaccggtgccttgcaggtctggaccagcttcatgcgcaaggccaacccgctgccgctcgacatggcgatgcccgacaacgtcgttcaggcgtgggtcgatgcacagaccggtcagggttcggacgccagctgcccgaatgcagtgcagatgccgtatattcgcggcagtgaaccccagcccggcgcaacatgcggcggcgctccggcacctgccactgaggtgatggactgggtcaagggttggttgaac

SEQ ID NO: 33627 - DNA, 1554 bp, Pseudomonas syringae
atggccgacggctatgcgcgcgccaccggcaaggcgggtgtggtgctggtgacgtccggccctggtgcaaccaatgccattaccggtatcgccacggcgtatatggactccattccgatggtggttctgtccggtcaggtagcgagcaccctggtgggcaccgacgcattccaggagaccgacatgatcggtatctcccggccgatcgtgaagcacagcttcatgatcaagcacccgtcggaaattccggaaattctgaagaaggctttctacctggcgcagtccggtcgtcccggccctgtggtcgtggatattccgaaagacatgaccaacccggccgagaaattcgaatacgtctttccgaaaaaagccaagctgcgctcctacagccctgcggtccgcggtcattccggccagatccgcaaggctgtggaaatgctcctggccgccaagcgtcctatcatctatgccggtggcggcgtgatcatgggcaacgcttcggcgcaactgaccgagctggctcaactgctcaatgccccagtgaccaatacgctgatgggcctgggttgctatcccggcaccgatcgccagttcgtcggtatgctcgggatgcacggcagctataccgccaaccttgcgatgcaccacaccgacgtgattctggctgtcggcgcgcgtttcgatgaccgggtgatcaatggcgcgagcaagttctgcccgaacgccaagatcatccacatcgatattgaccctgcgtcgatctccaagaccatcaaggctgacgtgcctatcgtcggccctgtcgaaagcgtgctgaccgaaatggtcgccaccctgaaagaaatcggcgaaacgcctgacaaggcgtcggtcgctgcatggtggaagcagattgacgagtggcgcggtagcggcgatctgttcccgtacaaccgtggcgatggcactgtcatcaagccgcaggcggtgatcgaaacactgtgcgaagtcaccaagggcgatgcctatgtgacctccgacgtgggtcagcatcagatgtttgctgcgcagtactaccgtttcaacaagccgaaccgctggatcaactccggcggtctgggcaccatgggctttggcttcccggcggcgatgggcgtcaagctgagctttccggacgagcacgttgcctgtgtgaccggtgaaggcagcatccagatgaacattcaggagctttcgacctgtctgcaatatggcctgccggtgaagatcattctgctcaataacggtgtgctgggcatggttcgccagtggcaggacatgagctacggcgcgcgtcactcgcattcctacatggaatcgctgcctgacttcgtcaagctggtcgaggcttatggccacgtcggcatgcgcatcaccgatttgaaagatctcaagccgaagatggaagaagcgtttgccatgactgaccggctggtgttccttgatattcaggtcgatgtgagcgagcacgtctatccgatgcagatcaaggacggctccatgcgcgatatgtggttgagcaagacggagcggaca

SEQ ID NO: 33628 - DNA, 489 bp, Pseudomonas syringae
atgcgccatatcatttcgctactgctggaaaacgaaccgggcgcgttgtctcgtgtagtcggtctgttctcgcagcgtaactacaacatcgagagcctgacggttgcgccaaccgaagacccgaccctgtcgcgtctgacgctgaccaccgtgggccatgatgaggtgatcgagcagatcaccaagaacctcaacaaactcatcgaggtggtcaagctggtcgacctgtcggagagcgctcacatcgagcgtgaactgatgctggtcaaggtcaaggccaccggcgcgcagcgtgccgagatcaaacgcaccacggatatcttccgcgggcagatcgtcgacgtgaccgccagcgtctacaccgtgcagctgagcggcacgagcgacaaactggacagcttcattcaggccatcggcaccgccgctatcctggaaacagtacgcagtggcgtaacgggcattgcccgtggcgacaaagtgctgagcatt

SEQ ID NO: 33629 - DNA, 1014 bp, Pseudomonas syringae
atgaaagttttctacgacaaagactgtgacctttcgatcatccagggcaagaaagtcgccatcatcggttacggttcgcagggccacgctcaagcgtgcaacctgaaagactccggtgttgacgtgactgtcggcctgcgcaagggttcggccactgtcgccaaggctgaagcccacggcctgaaagtgactgacgtcgcttccgccgttgctgctgccgacctggtcatgatcctgaccccggacgagttccagtcccagttgtacaagaacgaagtcgagccgaacctgaaaaaaggcgcaacactggcgttctcccacggtttcgcgattcactacaaccaggttgtgccgcgcgctgacctcgacgtgatcatgatcgcgccgaaggctccaggccacaccgtgcgtaccgagttcgtcaaaggtggcggtattcctgacctgatcgctgtttatcaggatgcttccggcaacgccaagaacgttgctctgtcctacgcttcgggtgttggtggtggccgtaccggcatcatcgaaaccaccttcaaggacgagactgaaaccgacctgttcggcgagcaggctgttctgtgtggcggtactgtcgagctggtcaaagccggtttcgaaacactggttgaagcgggctacgcgccagaaatggcttacttcgagtgcctgcacgagctgaagctgatcgttgacctcatgtacgaaggcggcatcgccaacatgaactactcgatctccaacaatgccgagtacggcgagtacgtgactggccctgaggtcatcaacgctgaatcccgtcaggccatgcgcaacgctctgaagcgcatccaggacggtgaatacgcgaagatgttcatcaccgaaggcgctaccggctacccatcgatgaccgccaagcgtcgtaacaacgctgagcacggcatcgaagtcatcggcgagaaactgcgttcgatgatgccttggatcgcagcgaacaaaatcgtcgacaaagacaagaac

SEQ ID NO: 33630 - DNA, 1245 bp, Pseudomonas syringae
atgctgagctgggacgaattcgataaggaagacggcgaagtagtcgccaaagcgaccaacgccggtcacgccaacgaagccaacatggaccgcctcgacagcgctggcggcctcgcagcccaagaagcccgcgccgtgaccgccgccgactccgctgccctgatccgcgccaagaaagcgctggacgcactggacgtcgccgaaggcctggccgaactcgaaggcgccagcgcccgcgtcgccgttgacgaaaaaatgatgatcaactgccgcgccgacctcaaccagcttgtgccgttcaagtacgactgggcctggcagaaatacctggacggttgcgcaaaccactggatgccgcaagaagtcaacatgaccgccgacatcgccctctggaaagacccggaaggcctgaccgacgacgagcgccgcatcgtcatgcgtaacctgggcttcttctccaccgctgactcactggttgccaacaacctggtactggccgtgtaccgcctgatcaccaacccggagtgccgccagtacatcctgcgccaggccttcgaagaagcgatccacacccacgcctaccagtactgcatcgaatcgctggccatggatgaaggcgagatcttcaacatgtaccacgagatcccgtcggtcgctaaaaaagcagcctggggcctgaaatacacccgttcgatctccgatccgaagttcgaaaccggcaccgtcgacaccgacaaagagttgctgcgcaacctcatcgcctactactgcgtactggaaggcatcttcttctattgcggcttcacccagatcctctccatgggccgccgcaacaaaatgaccggcgtcgccgagcagttccagtacatcctgcgcgacgagtccatgcacctgaacttcggcatcgacgtgatcaaccagatcaaaatcgaaaacccgcacctgtgggatgccgaaatgaaagaagaagccacgcagatgatcctgcaaggcacccagctggaaatcgaatacgcccgcgacaccatgcctcgcggcgtgttggggatgaacgcggcgatgatggaggactacctgaaattcatcgctaaccgtcgtctgagccagattggcttgaaggaagagtacccagggacgacgaacccgtttccttggatgagcgagattatggacttgaagaaagagaagaatttctttgagactagggttattgagtatcagactggtggggcgttgagctgggat

SEQ ID NO: 33631 - DNA, 1458 bp, Pseudomonas syringae
atgaccacgctgatggtgcaaggcaccacttccgatgccggtaagagcacgctggtgacggcactgtgccgctggctgacccgccagggcgtcaaggtcgtgcccttcaagccgcagaacatggcgctcaacagtgcggtgacggcggatggcggcgagatcggtcgtgcgcaggcggtacaggcgcaggcgtgcttcctggcgccgcacaccgacatgaacccggtgctgctcaagcccaacagcgacaccggcgcgcaggtcattattcatggccgcgccgtcaccaccatgaatgcggtggcctaccacggctataaagagatcgccatgcaggcggtgctggagtcgcatcgtcggttgagcgaaagctacccggtgatcatggtcgaaggcgcggggtcgcctgctgaaatcaacctgcgtgccaatgacatcgccaacatgggctttgccgaggccgtggactgcccggtgctgttgattgccgacatcaatcgtggcggcgtgtttgctcatctggtcggcacgctggagctgctgtcgcccagcgaacaggcgcgggtcaaaggcttcatcatcaaccgttttcgcggcgacattgccttgctgcaaccggggctggactggcttgaagcgcgcaccggcaaaccggtggtcggcgtgctgccctacgtgatggacctgcacctggaggccgaagacggccttgatcagcgccagaccgacaaggtcgagcaggtcctgaatgtggtcgtgccggtgctgccgcgcatcagtaatcacaccgattttgacccgctgcgcctgcatccgcaggtcaacctgcaattcatcggcccgggccaacccattccgcctgccgacctgatcattctgcccggctcgaaaagcgtgcgcagcgacctgaattacctgcgcgccaacggctgggaaacggccatcgaccggcatttgcgttacggcggcaagctgatgggcatctgcggcggtctgcaaatgctcggcgagcacctgcacgacccgctggggctggaaggcgcggcgggttccagtgccggtctgggcctgctggcgatgagcacggtgctggaaaccgaaaagcaattgcgcaacgtgcgcggacgcctgacgctggaagacgcagaagtcagcggctatgaaattcatgccggcgtgaccacgggcgcggcgctggagcaggctgccgttcaactggacgatggccgttgcgacggcgcgcagagtgccgacggacagattctcggcacttacctgcacggcctgttcgagtcgcctgccgcctgcagcgcgctgttgcgctgggcggggctggaaaacgtccagtcggtggattatcacgcgttgcgcgagcgcgacatcgagcggctggcggacctggtggaaaagcatctggacggcaccttgctccgtgagctgtgcggcctggaggcgacc

SEQ ID NO: 33632 - DNA, 2133 bp, Pseudomonas syringae
atgaagcaggcctgtgaatttgcccggcaagccgagcagaatgacaaggctcacaagaatcattgggcagaaggcacctccagtttccagaccggtctggaaatcgcggagatcctcgctgacctcaagctggatcaggattcgctggtcgcggcggtcatgtaccgtggcgtgcgcgaaggcgtgattccgttgccggacgtcgagcagcgctttggtgccacggtcgccaagctgatcgacggcgtgctgcgcatggcggcgatcagcgccagcctcagcccgcgacaatcgctggtgctgggcagccaggcgcaggtcgaaaacctgcgcaagatgcttgtggcgatggtcgatgacgtgcgcgttgcactcatcaagctggccgagcgcacctgtgcgatccgtgcggtgaagaacgccgacgacgaaaagcgcaaccgcgtggcccgcgaggtgttcgacatctatgcgccgctggcccaccgtctgggcatcggccatatcaaatgggagctggaagacctttctttccgctacctggagcccgaccaatacaagcagatcgccaagctgctgcacgagcgcaggctcgatcgcgagcgcttcatcagcgacgtcatgtcccagctcgacaatgagctgcaagccaccggcgtgacggcggacatcagtggccgtgccaagcacatctattccatctggcgcaaaatgcagcgcaagggcttggcgttcagccagatctacgacgtgcgtgcattgcgcgtgctggtcccggaaatgcgtgattgctacaccgcgctgggtatcgtgcacacgctgtggcggcatattcccaaggagttcgacgactacatcgccaaccccaaggaaaacggctatcgctcgctgcacaccgccgtcatcgggccggaaggcaaggtgctggaagtgcagatccgcacccacgccatgcacgaagaggccgagctcggcgtttgcgcgcactggcgctataaaggcaccgacgtcaaatccagctccaatcattacgaagaaaagatttcctggctgcgtcaggtccttgaatggcatgaagaactgggtgacatcggtggtctggccgagcagttgcgggtcgatatcgagccggaccgtgtctacgtcttcacccccgacggccacgccatcgacctgcccaagaacgcgacgccgctggacttcgcctatcgggtgcacaccgagatcggccataactgccgtggtgcgaagatcaacggccgcatcgtaccgctcaactacagcctgcaaaccggcgagcaggtcgagatcatcaccagcaagcacggcacgccgagccgcgactggctgaactccaacctgggctacatcaccacgtcccgggcgcgggcgaagattgttcactggttcaaattgcaggcccgtgaccagaacgtcgcggccggtaaaaccctgatcgaacgtgagctggcgcgtctggcgttgccgcaggtcgatttcgacaagctggcagacaaagccaatcacaagaccgccgacgatatgtttgccgcactgggcgcgggggatctgcgcctggcgcaactggtcaacctggcgcaacagcaggtcgagccggatcgggttaatgaacaactggaactgatcccgcgcaaggccaccggctacaagcctggcaagcgcggcgatatccagattcagggcgtcggcaacctgatgacgcaaatggccggctgctgccagccattaccgggcgacgcgattgtcgggtacatcacgcaggggcgtggcgtcagcattcaccgtcaggattgcgcctcggtgctgcaactgggcggtcgcgaacccgagcggatcatccaggtcagttggggcccggtgccggtgctcacctacccggtggacatcatcatccgtgcctacgaccgttccggcctgctgcgtgacgtcacccaggtgctgctcaacgagcgcatcaacgtactggcggtcaacacccgctcgaacaaggaagacaacaccgcgctgatgtcgctgaccatcgagattccggggctggacgcgctgggccggttgctggggcggatatcccagttgccgaacattattgaaacacgccgaaacaggacgcct

SEQ ID NO: 33633 - DNA, 831 bp, Pseudomonas syringae
atgtacacagttcaggacctgctgcatctcatgacccggctgcgtgatccgcagttcggatgcccgtgggatttgaagcagacgtacgccagtatcgtgccgcatacgctggaagaagcctacgaagtggcggatgccatcgagcagggcgaccttgatcatctaaagggtgagctgggtgacctgttgtttcaggtggtcttctacgcgcagttggccaaggaagaagggcgcttcgagttcgatggcgtggtggacggcattacccgcaagctgctgcgtcgtcatccgcatgtgttcccgaccggcgagctgtacgcgacgccggaaactccgcgtctgaccgacgagcaggtcaatcttcgctgggacgagatcaaggctgaggagcgcgctgaaaagtctggcgtgcccgagcaattgtcgctgcttgacgacgtgccggctgccttgccggcgctgagtcgggcaagcaaactgcagaagcgtgcctcacaggtgggctttgactggcccgcggcgttgccggttatcgacaaggtgcgcgaagaactcgatgaaattcttgaggccatggccgacaatgacgccgagggcattgccgaggaagtcggtgatctgctgttcagcgtggtgaatctggcccgacaccttaaagttgacccggaaactgcgttacgctcggccaatagcaaattcgacagacgctttcgattcattgaacaggccttgcgccacctccagcgtcccattgaagagtgcacgctcgaagagatggacgcgttgtggggcgaagccaaacgtcaggaaaagagcacgcccggctgcggc

SEQ ID NO: 33634 - DNA, 570 bp, Pseudomonas syringae
atgagcgtgcgtctggacctgctgcgccacggtgaaaccgaactgggcggcggcctgcgcggtagcctggatgatgcgctgactgatctcggctggcagcaaatgcgttcggctgttattgacggcggcccctgggaccggattgtcagctcgccgttgcagcgctgcgcacggttttccgaagaactggcgcaacgcctgtcgttgcccttgcaactggagccgggtttgcaggagctgcatttcggtgactgggaaggccacagccctgcgcaactgatggacaccgatgctgaaggtctggggttgttctgggctgacccgtatacgttcacgccgcccaatggcgagccggtgatcgatttttcagcgcgggtgcgcaatgctgtgcagcgcttgcatcaggcgtatgacggtgagcgcgttctggtggtcagtcacggtggcgtcatgcgcctgttgctggctcaggcgcgcggcttgccgcgtgagcagttgttgcaggtggtggtcggtcacggcgcgctgctgtcgattcaggtcgccgctggcggtctgctcacggaggtc

SEQ ID NO: 33635 - DNA, 2922 bp, Pseudomonas syringae
gtggagtcacacatgcaaacagacacaactcgcgagaactcgccgaccggcgcgccgcaggcaagccaggcccaacaggatctgtctgccacggcccccggtcaactgcgcgtgatcaagcgtaacggtactgtcgtcccttacacggatgacaagatcaccgtcgccatcaccaaggcgtttcttgcagttgagggcggcaatgctgctgcctcgtcgcgcatccacgacaccgttgcccgcctgaccgaacaggtcagcgccacgttcaagcgtcgcatgccttcgggcggcaccatccacatcgaagaaatccaggatcaggtcgaactggccctgatgcgtgccggcgaacagaaagtcgctcgcgactacgtgatttaccgtgattcgcgtgccaaggagcgtgccggtcgcgcccccgaagatcaggttcaggctcacccgtcgatccgcatcaccctcgccgacggcagctttgcgccgctggacatgggtcgcctgaacaccatcgtcaccgaagcgtgtgaaggcctggctgaagtcgacgccgacctgatccagaccgaaaccctgaaaaacctgtacgacggcgtggcgctgaaagacgtcaacaccgcactggtcatgaccgcgcgtaccctggtcgagcgcgagccgaactactcgttcgtcaccgcccgcctgctgatggacaccctgcgcgccgaaggcctgggcttcctcggtgtcgccgacagcgccacccaccacgaaatggccgacctgtacgccaaggcgctgcctgcctacgtcgccaccggtatcaagttcgaactgctcaaccctgtgctggctgaattcgacctcgaaaaactcggcaaggccatcaaccacgagcgcgatcagcagttcacctacctgggcctgcaaaccctgtacgaccgttacttcatccacaaggatggcgtgcgtttcgaactgccgcagatcttcttcatgcgcgtggccatgggcctggcaatcgaagagaaagcccgtgaagaccgcgccatcgagttctacaatctgctgtcgtcgttcgactacatgtcgtcgaccccgacactgttcaacgccggcaccctgcgtccacagctgtccagctgctacctgaccaccgtgccggatgacctgtcgggcatctaccacgcgatccacgacaacgccatgctgtccaaattcgcaggcggcctgggcaacgactggacaccggttcgtgcgctgggctcgtacatcaagggcaccaacggcaagtcgcaaggcgtcgtgccgttcctcaaagtggtcaacgacaccgccgttgcggtcaaccagggcggcaagcgcaagggcgctgtctgtgcctacctggaaacctggcacatggacatcgaagagttcatcgagctgcgcaagaacaccggtgatgatcgtcgtcgtacccacgacatgaacaccgccaactggatccctgacctgttcatgaagcgcgtcttcgacgacggcccgtggaccctgttctcgccttccgaagtgccggacctgcacgacctgaccggcaaggccttccaggagcgttacgagtactacgaagcgctgaccgaatacccgggcaaggtgaaactgttcaagaccatccaggccaaggatctgtggcgcaagatgctctcgatgctgttcgaaaccggccacccctggctgaccttcaaggacccgtgcaacctgcgcagcccgcagcagcacgtgggcgtggttcacagctcgaacctgtgcaccgagatcaccctgaacaccaacaaggacgagatcgcggtctgcaacctgggctcgatcaacctgccgaaccacatcgtcaacggcaagctggacaccgacaagctcaagcgcaccatcgatgtagccgttcgcatgctcgataacgtcatcgacatcaactactactccgtgccgcaggcccgcaactccaacctgcgccaccgtccggtcggcctgggcatcatgggcttccaggacgcgctgtacctgcagcacattccttatggttccgatgctgccgtgcagtttgccgacagctcgatggaagcggtcagctactacgccattcaggcgtcctgcgacctggctgacgagcgcggcgcctacgagacgttccagggttcgttgtggtcccagggcattctgccgctggactcgcaacagatcctcatcgagcagcgtggccagaagtacatcgatgtcgacctgaaagaatccctggactgggcgccggttcgtgcccgtgtgcagaaaggcattcgtaactcgaacatcatggccatcgcaccgaccgccaccattgccaacatcacgggtgtgtcgcagtcgatcgagccgacctaccagaacctgtacgtgaaatcgaacctgtccggcgaattcaccgtgatcaacccgtacctggttcgcgacctcaaggcccgcgacctgtgggactcggtcatgatcaacgacctcaagtactacgacggttcggtgcaacagatcgagcgcatcccgcaggagctcaaagagctctacgcgaccgccttcgaagtggacaccaagtggatcgtcgacgcggcaagccgtcgtcagaagtggatcgaccaggctcagtcgctgaacctgtacatcgctggcgcttcgggcaagaagctggacgtgacctaccgcatggcctggtaccgtggtctgaaaaccacttactacctccgtgccctggccgcgaccagcaccgagaagtccaccgtcaacaccggcaagctcaacgccgtatcgagcggcggccacggcccggacgactcggcgatcaccgcccctcgcccgaccgaagccgcacctgccggcccggccccggtgccaaaggcttgcgcgattgacgagccggattgtgaggcttgccag

SEQ ID NO: 33636 - DNA, 1344 bp, Pseudomonas syringae
gtgattcgttcgcttcgcctgcgtctgatgttgggcgccgccacgttggcggtgatcttcatgttactgatgctgcctgcgctgcagggcgcattcagcctggcgctgcgcggggcgatcgaacaaaggctggcttccgatgtgaccaccatgatttcggcggcgcgcgtcgaagacgaccatctgttgatgccgtcggtgctgccgggcgaacagttcaacctgcccggcagtcgcctgctgggctacatctataaccgtcaggggcagatggtctggcgttcgctgtctaccgagtccgagaacatcgactaccacccgcactatgacgggcagggcagcgaattcaccaagatcaaggaaatcaacggcgacgagttcttcgtctatgacgtcgagattcgcctgctcggcggtcgcaacgccgcctacagtatcgtcgccgtgcagccattgcgcggctaccaggaaaccatcgacggtttgcgccgcaaactctacctaggctttggcgctgcgttggcggtgctgctcgggctgctgtggatgggcctgacctgggggttgcgtgcactgcgcggcctgagtcaggagctcgatcaggtggaatcgggcgtgcgcgacagcttgagtgaagagcatcccagcgaactcctgcgcctgaccgactcgctcaaccgcctgctgcgcagcgagcgtgagcaacggattcgttaccgcgattcactcgacgacctggctcacagcctgaaaacaccactggcggtgttgcagggcgtcagtgaaaacatcgccaaacgccccgaggacgttgagcaggcctgggtgctgcaatcgcagatcgagcgcatgagccagcagatcggctatcaactgcaacgcgccagcctgcgcaagagcggtctggtgcgccaccacgtgatgctgcggccagtggtcgaaagcctgtgcaacacgctggacaaggtctaccgcgacaagcaggtcaaggccacgctcgacctgccggagctttgtcaggtgcacatggaagagggcgcgctgctggaaatgctcggcaacctgctggaaaacgcctatcggctgtgcctgagcgaagtacgcgtcagcttcacccgctcagcggacggcgatgagctgtgcatcgaagacgacggccccggcgtcccgcacagccagcgcgcgcgtatccttgagcgtggcgaacgactggaccgccagaaccccgggcagggcattggcctggcggtggtcaaggacatcatcgaaagctatggcgcacaactgacgctgggggactcaccgctgggaggcgcggcgttcaggattcattttctggcgcag

SEQ ID NO: 33637 - DNA, 1272 bp, Pseudomonas syringae
atgaaaataatgacaaaagcacttaaccggacaactcttggactcgccctgggtctggcttcttctcaactgctcgctgccggcttcgccctcaacgaacaaagcatcagcggcatgggcaccggctttgcaggtcgctcctcctccgccgacgatgccagcaccgtgttcggcaaccctgccggcatgtcgcgtatcaaacgcgaacaaatcagcgtaggcgccgcagccgtgatcgccaagaccgacatcgacaatggtcgtggcacgttcggcggcagcaacgacggtgacatggttcccgtggttggtgtgccaatgggctactacgtcaaacctatcgatgatcactgggcatttggtctgggcgtgtacgttccgttcggcctggtcactgattacgagaaaggctttgccggccgttactggggtgacaagagccacgtacagatcgtgacctttcagccgaccgtcagctacgcattcaatgacaaggtttctatcggttttggcccgaccatcaaccgtatcgacggtgaattgacatcggctgtccctaaccgagcgtccctcggcaccaacgatggcaaggtgaagatcaagggcgatgacactgcaatcggcttcaatgccggtattctggtgcaggctactgacaccacgcgcctgggtctgacttaccattccaaagtcgattacaagctcgaaggcaagaccaaggtagaaggctctggttttggtcctttcggcggtcagaagtatgacgcctcgctggatatctccacgcctgagtcggtggacttctccatcactcagcagcttgatgaaaactggaccgtttatgcaggcagcacctggactcgctggagccgcctgaaagacatcacggtcgaaaacagcggcgtgcccacagcattggcctcaagcattggcaccattacggaagaacaggactggcacgacacttgggcacacgccatcggtgcttcgtacaaggtcaataaggagtggacgctgcgcactggtttctctgttgatcagtcgccgaccaacaacgttaatcgatcccctcgcatcccgactggcgatcgcaagatcatcagcttcggtgctggctggagcccgaccgacgacctgaccattgacgtggcgtactcgtacctgcgtgaagatgaaaccaagatccgcgacagcagcgcgaccaaaggctcgtacagcgccgattaccgcaatacggcgcatggccttggcacttcagttacctatcgtttc

SEQ ID NO: 33638 - DNA, 1350 bp, Pseudomonas syringae
atgacgactcgtcagcccatctacaaatccctctattttcaggtaatcgtagcgattgtcatcggtatcctgatcggtcacttctacccggaaaccggcaaggctttaaagccactgggtgacgggttcatcaaactgatcaagatggttatcgctccgatcatcttctgtacggttgtcagcggtatcgccggcatgcagaacatgaagtcggtcggcaagaccggtggttatgcgctgctgtacttcgagatcgtttcgaccatcgccctgctgatcggtctgatcgtggtcaacgtggttcagccgggtgccggcatgaacatcgacgtcagcacgcttgatgcctccaagatcgcggcttatgtgactgccggtaaagaccagagcatcgtcggctttatcctcaacgtgattccgaacaccatcgtcggcgcgttcgccaacggcgatatcctgcaagtcctgatgttctcggtgatcttcggtttcgccctgcatcgtctgggttcgtatggcaagccggttctggacttcatcgatcgcttcgcccacgtgatgttcaacatcatcaacatgatcatgaagctggcgcctatcggtgcgttcggtgccatggccttcaccatcggtgcctacggcgtaagttcgctggtgcagttgggtcagttgatgatctgcttctacattacctgcgtgctgttcgtggtgctggtgctgggctccatctgccgcgctcacggtttcagcatcttcaagctggttcgttacatccgtgaagaactgttgatcgtactgggtacttcctcttcggaatcggccctgccacgcatgctgatcaagatggagcgtctgggtgcgcagaagtctgtcgtaggtctggttatcccgaccggttactcgttcaacctggacggtacctcgatctacctgaccatggctgccgtgttcatcgctcaggcgaccaacacgcacatggacatcactcaccagatcaccctgttgctggtgttgctgctgtcgtccaaaggtgctgccggcgtaaccggtagcggcttcatcgtactggctgccaccctgtcggctgttggccacctgccggtcgccggtctggcgctgattctgggtatcgaccgcttcatgtccgaagcccgcgccctgaccaacctggtcggtaacgctgttgcgactgtcgtggttgccaagtgggttggcgagctggacaccgacaagctgcagtccgagctggcttccggtggcagtgccatcctggaaacccgtcctgaagacgacctcggcgttgccgaaggcccgactccggccaacgcggtgaacaccaccaagaccgtc

SEQ ID NO: 33639 - DNA, 822 bp, Pseudomonas syringae
atgggcaccctctcagtcaatcagaacaaactgcagaaacgtctgcgtcggctggccggcgaggcggttgccgacttcaatatgatcgaggagggcgacaaggtcatggtctgcctgtccggcggcaaggacagctacaccttgcttgatgtactgatgcattttcagaaggttgcgccgatcaggttcgacatcgtggccgtcaacatggaccagaagcagccgggttttcccgaacacgtgctgccggcgtatctgaaagagctgggtgtggagtaccacatcgttgaaaaggacacccattcggtggtcaaggagttgatccccgaaggcaagactacctgttcgctgtgttcaaggctgcggcgcggcacgctgtacaccttcgccgaccagatcggcgctaccaagatggcgctggggcatcatcgcgacgacattatcgagacgtttttcctcaacatgtttttcaacggcgcgctcaaggccatgccgcccaagctgcgtgccgatgatggccgcaacgtggtgattcgcccgttggcctactgccacgagaaggacatccaggcttactcggacctcaagcagtttccgatcatcccgtgcaacctgtgcggctcgcaggaaaacctgcagcgtcaggtggtcaaggacatgctgctggactgggagcgcaagacgccgggccgcactgaaagcatcttccgcgccctgcagaacgtgcagccttcacagttggctgaccgcaagctgttcgatttcagccagttgcgcatcgacgaaaccgcagcctcgcggttcgtcaatgtggtcaatatc

SEQ ID NO: 33640 - DNA, 2019 bp, Pseudomonas syringae
gtgctgatgccgaccggtggcggcaagtccctgtgttttcaggtgcccgggctgttgcgggacggtctctgcgtggtcgtttcgccgcttatcgcgctgatggacgatcaggttgccaccctcgatgagctgggcgtttctgccgcagcgctcaattccactctcaatgccgagcaacagcgcgaactggccaaccgtatccgtctgggcgaagtgaaaatgctttacctcgccccggagcgcctggttcagccgcgcatgctgtcattcctgcaaaacctgaaaatcgccctgtttgccatcgacgaagcgcattgcgtgtcgcaatgggggcatgacttccgccctgaatacctgcaattggggcaattggccgaactgtttccggatgtgccgcgcatcgccctgaccgccacggcagacaagcgtacccgtgaagaaatcgtcacgcgcctgcacctgcagaacgccgaacgcttcttgtccagcttcgaccggccaaacatcttttaccgcatcgtgcccaaggaacagccgcgcaaacagctcctggcgttcctgtccgagcggcgcagcgatgccggtatcgtctactgcctgtcgcgcaagaaagtcgatgaagtggctgtgttcctcagtgaaaacggttatcccgcgttgccgtatcacgccggcttgccatcggaaacccgcgccgccaaccagaaacgcttccttaacgaggaaggcctgatcatggtcgcgaccatcgcgttcggcatgggcatcgacaaacccaacgtgcgcttcgttgcgcacatggacctgcccaaatcgctggaagcctactatcaggaaaccggccgggcagggcgcgacggcttgcccgccgatgcatggatggcctacggcctgcaagacgtgctgatgctcaagcagatgttgcagaactccgaaggcgacgagcgccacaagcgcctggagcagcacaagctcgatgccatgctggccctttgcgaagaaacccgctgccgccgtcagaccctgctggcctatttcgacgaagacatgcccaacccctgcgggcattgcgacaactgtgtcgatggcgtgcaaacctgggacgccaccgagcccgcgcgtcaggcgttgtcggccatctaccgcaccggtcagcgctatggcgtcggtcatctggtcgatgtactgctcggcaaatccaacgacaaggtccaaagcttcggtcatcagcacctgtcggtgttcggtgtcggcaaggcgcgcaccgaagccgagtggcgttcgctgttccgccaactggtcgcgcgcggcctcgccgacatcgaccttgaaggctacggcggcctgcgcctgagcgacacctgccgcccgttgctgcgtggcgaggtttcgctggaactgcgccgcgacctcaaaccacaaacaacttcaagaagcagctccggcagcccggccagccaactggtgcgtggcgaagagcgcgagcagtgggaagccctgcgtgccctgcgccgcaagctggccgaagagcacggcgtgccgccttatgtcattttcccggactcgaccctgctggaaatgctgcgcagcaaaccgggttcgatggccgagatggccaaagtgagtggcgtgggtgcgcgcaaactggagcgttacggcgaggctttccttgaagtgctcagcggcaagaccgaggcgccgcaagtggttgccgacattcgccatgagctgatcagcctggcgcgtgcgggcatgaccccgacacagatcgccggccagttgcagtgctcggaaaagaatgtctacaccctgttggccgaggccatcggcaagcagcagttgtccatcgagcaggcgctcgatttgccggaagacctgttgggcgaggtgcaggatgcctttctcgacggcgaaggtgagctgccgccggtctcggcgattgccgagcaatttgccggtcgcgtgccggagggcgtgctgtattgcgtacgtgcggcgctgcaatctgaatttgaggta

SEQ ID NO: 33641 - DNA, 567 bp, Pseudomonas syringae
ttgctcgtgacccagatgaagaaccagaacccgctggacccgcaggacaacacgcagttcgtggcccaattggcgcagttcagcagccttgaaagcatgcagaacctgaccaagacagttgacacgattgcctccagttatcaatcgtcgcaggccttgcaggcatcgtcgctggtcggccgctcggtcatcatcgattcgagctccaccaccgtggataccaccaagggcatgaccggttcgattgtcctgccgagcgccacttcggcgacgagtgtgaaggtgtatgacgcgcaatcgaacctggtcgacaccgtcgaactgggtgcgcagaaagccggcaccatcagcttcgcctgggacggtaccgacggcgacggtgccgcggttgcgtcgggcaactacaccttcaaggctgaaggttcggttgacggcaagaacacacagctttcgacttacctgcctgccacggtcaacagcgtcacgttgggtgtgaatggtgcagaaacaatgctcaatctggccagcggcagtgttgccttgtccaaagttcaaaccatcggattg

SEQ ID NO: 33642 - DNA, 681 bp, Pseudomonas syringae
atgtttgagctggcgccggtgttgctgtccgcgcttgttctcggcctgctgggcggcggtcattgcctgggaatgtgtggcggcctgatgggtgcactgacgctggctatccccaaagagcagcgcaaccgtcgctttcgcctgctgctggcctataaccttgggcgcattctcagctacgccgtggcaggcttttgttccgggctggttggctgggcggtcgcgcaaagcccgctggcaacgggtttgcgggtcatggcggcggtattgctgattgtcatgggcctgtatctggccggttggtggagcgggctcacacacatcgagcgcctgggccgagggctgtggcgctacgtgcagccgctggccagtcgcttgctgccagtgtccagcctgccgcgcgccttgttgctcggcgccctgtggggctggctgccctgcgggctggtctacagcgccctgctctgggccgcaagccagggcaacccggtcgacagcgcactgctgatgctggccttcgggctgggtacctggccggttctgctggccaccgggcttgccgctgaacgcaccactgcgctgctgcgcaagcgtggcgttcgtgtggcgggcgggctgctggtgatcgtgtttggtgtgtggaccctaccggggcctcatcagcactggctgatggggcat

SEQ ID NO: 33643 - DNA, 639 bp, Pseudomonas syringae
atgaacgtgaacagattgctcatcgtcggtgccggcgctttcgggcgtgaagtgcatgcgtggctgctggactgggtgaagctgaacccaggctgggtcatcgccggcttcatcaatgacggccccggttccatcgccagattcgatcattacccggcggttgtttcgtcggtggagggctacgagccggggcctgaggattacctcgtctgcgccatcgccaagccggccgacaagcgtctggtcgtggaaaaactactcggcaaaggagcccggtttttcacgcttatccatccctcggtcatcatgggcgagaacgttgttatcgggcagggtgcggttatctgtccttcaaccgttctttcggtggacctgcgcattggcgcattcgtgaccctcaacatcggctgcctggtggggcacgatgcagacatcggtgacttctcgacattgagcgggcactgcgatattaccggcggcgtggtgctggaggaggaagtgttcatgggcacccatgccagcgtcctgccgaacgtcaaagtcggcaaacaggctgtagtcggagccggcagcgttgcgatacgcaatgtggccgcaggcattacagtattcggtgtacctgccaaacgcatatcgggg

SEQ ID NO: 33644 - DNA, 477 bp, Pseudomonas syringae
atgaataagtcgtctgcacaaggttccgaagatcctatcctgcaatgggttacgttccgcctggacaatgagtcctatggcatcaacgtgatgcaggtgcaggaagtgctgcgctacaccgagatcgctccggtgccgggtgcgccaagctacgtgctgggcatcatcaacctgcgcggtaacgttgtgaccgtgatcgacacccgtcagcgttttggcctggcacctgttgaagtcagcgacaacacgcgtattgtgatcatcgaagccgacaagcaagtagtcggtattctggtcgacagcgtggcggaagtggtttacttgcgtcagtccgaagtcgaaactgcgccaaacgtgggtaacgacgaatcggccaagttcattcagggcgtttgcaacaagaacggcgaactgttgattctggtcgaactggacaaaatgatgtccgaagaagagtggtccgaactggagagcatc

SEQ ID NO: 33645 - DNA, 786 bp, Pseudomonas syringae
atgagagtctgggcagtagccaaccagaaaggtggagtcggaaagaccaccacgaccattgccctggccggtttgctggccgatgcaggcaagcgcgtggtcgttgtcgatctggacccccacggctccatgaccagttatttcgggcacaacccggacgagctggaacacagtgccttcgatcttttcctgcacaagggtgcggtgccggatggtctgcccggccagttactgttgcccaccagtgacaaacgtatttcgctgatcccctcgagcaccgcgctggccacccttgagcgtcaatcgcccggccagagcggtctcggtctggtgatcgcgaaaagccttgctcagttgtggcaggattttgactatgcgctgatcgacagcccgcctctgctgggtgtgctcatggtcaatgcgctggccgccagtcagcagttggcgattccggtgcagaccgagtttctcgcggtgaagggcctggagcgcatggtcaataccctgaccatgatcaatcgctcgcgcaaagtgccgttgccttacaccatcgtgccgaccctgttcgatcgtcgtacccaggcatcgatgggtacattgaagctgttgcgtgacagttttcccgagcacgtctggcaagcttacgtaccggtcgacacgcgcttgcgtgatgcgagccgcctaggcctgacgccgtcgcagaatgacagcaagagccgtggcgtgattgcgtatcgggcattgctcaagcacatgctcgccgagcagctcaatgctcaggtggcc

SEQ ID NO: 33646 - DNA, 783 bp, Pseudomonas syringae
atggataacaatgattcgatggccgactttgagtcgaccttaaaaagacacgcacaggaactcgtcaccagccttgaaaaaggccgtttcggcgaagctgtgcagctgatccatgagctcaatcagacccgtgaccgcggcctttatcaggaagtgggcaagctgacgcgtgagttgcacagtgcaatcgtcaatttccacattgatccgcatatgcctcaggccgaagaggtgtcgcagatcacggacgcgacggagcgtctttcctacgtcgtcaggctgaccgagaacgcggccaaccgtacgatggatctggtcgaggaaagcacgccgatcatgaatggtctgagttccgacgccaaggcgttgagcgaagactggggacgcttcatgcgtcgcgaaatcggtgccgaagagtttcgtgaactggccaagcgcgtcgatggttttctgacgcgtaccgagaaggaaagccatacggtttccgcgcacctcaacgatattctgcttgctcaggattaccaggacctcaccggtcaggtgatcaagcgcgtcacgcaactggtgaccgaagtagagggcaatttgctcaagctggtgctcatggccagccatgtcgatcgcttcgctggcatcgaacatgacgaagaatccatccttgctgaaaaagatcctaaaaaacatctcgacaagggtgaaggtccgcagattcatgccgataaacgtgaagacgtcgtatccggacaggatgatgtagacgatctgctatcgagcctcggcttc

SEQ ID NO: 33647 - DNA, 1134 bp, Pseudomonas syringae
atggcagaaaacgagaatggccaggacaagacagaagaccccacggaaaaaaaggtcaaggactccagagccgagggccagattgcacgctccaaggagctgaccactttggtggtcatgttgatgggggcgggcgggttgctgatgttcggcgcaggcatcgcgcagatgatgtccgacctgatgcgcgacaacttcacgatcagccgtgaaacgatcatggatcagtcgtacatgggcaaggccttgctcagttccggcctgcacgcgctggtggtcatgctgccgtttctgattgccatgctggcggcggcgctggtcggtccgatcctgctcggtggctggctgttctcgaccaagtcgctgatgcccaagttcagccgaatgaacccggcagcggggctcaagcggatgttttcgccccatgcgctggtcgaattgctgaagtcctttggcaagttcctgatcatcctggccgttgcactggtggtcttgagcaaggaacgtaacgacctggtggccatcgcccacgagccgctcgaacaggcgatgatccacagcctgctggtggtgggctggagcagcttctggatggcctgtggcctgatgttcattgctgctgccgacgtaccctttgtgctgtatgaggcgcacaagaaactgctgatgaccaagcaggaagtgcgcgacgagcacaagaacagcgagggcagccccgaggtcaaacagcgtattcgccagttgcagcgcgaaatgtcccagcgacgcatgatggcgtcgattcccgaagcggatgtcatcatcaccaacccgacacacttcgccgttgccctgaaatacgatcccgagcagggcggagcgccaatgctgctggccaagggtacggaccttgttgccctgaaaattcgagaaatcggcgcgcacaaccagattctgatccttgaatcggccgcgctggcacgctccatctattacagcaccgagctggaccaggaaattcccgcaggcctgtatctggccgttgcccaggtattggcttacgtctaccagatccgccaattccactcaggccagggcaagcgccccgacccccttggcgacgtcaaaatccctccggatttgcagcgcgatgct

SEQ ID NO: 33648 - DNA, 2085 bp, Pseudomonas syringae
atggccaaaacggacgcccagcttcatcggcaagcccgcctgcaaaacccgactgtcaaatcgcatctggcttacatcctgctcagcggtttcgctctgatggtgatgtacaccctgttgcgtatcggtctgctggtctacaaccgcgagatgattggcgatacgccagcctcgaccttcctcgaagcgctgttcaatggcacgcgtttcgacctgcgcctgaccgtgtacctgctcattccgctggtgctgtcgctgttcagcgcccgggccatggcggcgcgcgggttcttccggttctggctgacgctggtcggcagcatcacgctgttcttcggcctgatggaaatggacttctaccgtgagttccaccagcgccttaacggtctggtgttccagtacgtcaaggaagacccgaagaccgttctgagcatgctctggtacggctttccggtggtgcgttacctgctcgcctgggccattgtgacctggctgttgagcctggtgttcaagggcatcgaccgccttacacggccccgccacgttacgaccacgggcacccaccatgtcagcagcgttgcgccgtggtacctgcgcattggtgttttcgttctggtcttgctggtcatggtcgtgtgcatccgtggcaccctgcgtcagggcccgccgctgcgctggggtgatgcgtacaccaccgattccaatttcgccaaccagttgggcctcaatggcacgttgaccctgatcactgcggccaagagccgtatgtccgaagatcgcgacaacatctggaaagccaccctgccgcaggcggatgcgcagcagactgtacgcgacatgctgctgacgcctcacgacaagctggtcgagtctgacattgctgcggtgcgccgtgacttcacgccgccagtggaaaacacgctgccgattcgcaacgtggtcgtgatcctgatggaaagcttcgccggccactcggtcggtgcgctgggcaacgatgccaacatcacgccgtatttcgacaagctgtccaaagaaggtctgctgttcgaccacttcttctccaacggcacgcacacccaccagggcatgtttgccaccatggcatgcttcccgaacctgccgggtttcgaatacctgatgcagacgccggagggtagccacaagctgtcgggcctgccacagctgctgagcaccggtcgtaactacgatgacgtctacgtctataacggcaactttgcctgggacaaccagtcgggtttcttcagcaaccagggcatgaccaactttgtcggtcgcgaagacttcgtcaatccggtgttctcggacccgacctggggtgtttccgaccaggacatgttcgaccgtggcgcgcaggaactcaaagcccggcaggacggcaagccgttctatgcgctgctgcaaaccctgtccaaccacacaccgtacgcactgccggaccctctgccggtcgaacgtgtgacagggcacggttcgctggatgagcatttgaccgcaatgcgttacgccgactgggcgctgggccagttcttcgagaaggccaaaaaagagccttacttcaaaaacaccctgtttgtggtgttgggcgatcatggcttcggcaacaacaagcaactgaccgaaatggacctggggcgcttcaacgtgccgttgctgctgatcggtcctggtgtacaggagaagttcggacagcgcagcagcatcgtcggtacgcaggtcgatgtcgtgcccaccatcatgggccgcctgggcggtctgaaccgcaaccagtgctggggacgcgacctgttgaacctgccggaaggcgacaagggctttggtgtgatcaagccgtcgggcagtgagcaggtggtcgccatcatcagtggcaaccgcattctcatcgaaccgacggagatgcccgccaagctgctgacctatacgctgggtgccaaaccgtctgccgaagaagtgcccgatgcgccggacacacaggagctcaagcgcaagctcgaaagcttcctgcagacggcgacaaagagccttctggacaacacggccggtgtcgaggccagcaagaaccgcaac

SEQ ID NO: 33649 - DNA, 1014 bp, Pseudomonas syringae
atgaatgatcgagccatggtagccaaactctccaaagtcgagaaagctgcggtattgctgctttctctgggtgaaaccgacgcggcccaggtgctccggcacatgggccccaaggaagtccagaaagtgggcgtcgcgatggctcagatgcgcaacgtgcatcgcgagcaggtcgaagaggtgatgagcgaatttgtcgacatcgtcggcgatcagaccagcctcggggttggttcggacggctacatccgcaaaatgctcacccaggcactgggcgaagacaaggccaacggcctgatcgaccgcatcctgctgggtggtaacaccagcggtctggacagcctcaaatggatggagccacgcgccgtcgccgacgtgatccgtttcgagcacccacagattcaagccatcgtggtggcctatctggacgccgaccaggccggtgaagtgctcggccatttcgaccataaagtgcgactggatatcatcctgcgtgtgtcctcgctcaataccgtacagccagccgcgctcaaagagctgaaccagattctcgagaagcagttctccggcaacgccaacacgtcgcgtactaccctgggtggtatcaagcgtgcggccgacatcatgaacttcctcgacagctccatcgaaggcgcgctcatggattcgattcgcgaggtcgacgaagacctttcggtgcagatcgaagacctcatgttcgtcttcaacaacctctccgacgtggacgaccgcggtatacaggcgctgttgcgcgaagtgtcttcggacgtgctggtactggcgctcaaaggctcggacgaggcaatcaaggaaaaaatcttcaagaacatgtccaagcgtgccgccgaactgttgcgcgacgacctggaagcaaaaggtccggtgcgtgtcagcgatgtggaaaccgcccagaaagaaatcctcaccattgcgcgtcgtatggccgaggccggcgagatcgtactcggtggcaagggtggcgaggaaatgatc

SEQ ID NO: 33650 - DNA, 1326 bp, Pseudomonas syringae
atgcaaaactcacacgctgcagcgtcgggcgacaatcaggccgtctcatcgatggtgaaactgtatgtctgggccgccgttatcctcatcattgccgaaatgatcggcgcgatcagcattccgctgggccccggcaaagtggtgttgctgcccatggtctgggcgctgctgatcggtgcgatggtcggcatcgccagccgccgcctgccgggcagtatcgggatcgatcacggcatccagctgcgtgcagcctcgatcctgcaacccgccctgctgattttcatcgccaaactcggcctggtggtcggtggttcgctgcccgtggtgttcgcttccggatgggcgctggtgtttcaggagtttgggcactttgtcggcaccgtggtcctgggcctgccggtggcactgatgctcggtatcaagcgcgaagcgattggtgcgacattctcggtcggccgcgagccaagcctggcaatcatcggcgaacgttacggcatggactccccggaaggtcgcggggtgctcgccgagtacctgaccggcacgctgttcggtgcgctgtttattgccatcgtcgccggttacatcgccagcctggggattttccaccccaactcgctggcgatgggttcgggcatcggttcgggcagcatgatggcggccgcagcaggtgcaatcgccgcgcaacaaacgccggaagtcgccaaggaagtcatgaccctggccgctgcgtccaacctgatcaccaccaccatcggcacctacttcaccctgtttatctccctgccgctggcggtgtggggctatcgcgtgctcgagccgctgatcggccgcactaccaaagcgtccatgagcgaggaaggcatacgccacagcgacgtgtcgctggacgtgccggagctgggctggtcgggcaagatcagcgcgtggctggcagccggcgcgctggcattgattgccaactatgtcggctacaagaccttgtcggcggatgcgtttaccggcatgggcatcatgattttctgtgcctttgtcggcgaggcgctgtgcagcctgatcggccgcaagatcccggcagtgtgcatggtttcgctggtggcgatgttcctcacctcccccgcttgcccgtgggccgccgagattgcgcggctgaccagttcgatcaatatgctggcggtcatcacgccgatgctgaccttcgccggcctgtcgattgccaaggacctgccagccttccgccgcctgggctggcgcatcgtgctggtgtcgttcctggccaacttcggcaccttcatcggcgcggtgttgattgccgagatgtttcac

SEQ ID NO: 33651 - DNA, 1374 bp, Pseudomonas syringae
atggccatcagcgtcttcgacatgttcaaaatcggcatcgggccgtccagttcccatactgtcgggccgatgcgtgccggggcactgttcgtgaccgagctgcgcaaccagaaccggttgcatagcgtagaacgtatcgaggtgcgattgtacggttctctgtcggccacgggcatcggtcatggcagcgaccgtgcgaccgtcatgggcctgatgggcgaatggccagaccagatcgaccccagccaggtcaaccaacgcatcgacgccttgcgcgccgacaaccagctgatgctggcgggcgaacaggccatcaccttcgtttgggagcgggacatgtgcctgctcgacgaaagcctgccctaccaccccaacggcatgaccctgtgcgcctacggcaagaccggtgaagtgcacgagcagacctactattcagtgggcggcggttttgtgatcgatgccgaacaggccgccagcggcgtgctggacaatgacaccaccgtgctgccctacgattttttcagcggcgcgcagttgctgaaactgtgcaagacccacggcatgagcatttccgaactgatgatggccaacgagaaggtctggcgcagcgaggcagaaattcgcgagaagatcatggtcatctggacggcaatgcgcgcctgtgtggacaagggcctgctggaaaccggcattctgccgggcggtttgaacgtgcgtcgtcgcgcttatcgcctgcaccagagcctgcaaaacctcgacaacccgaacgtgatcggctcgaccctgagtgccatggaatgggtcaacctgttcgccctggcggtcaacgaagaaaacgccgcaggcgggcgcatggtcaccgcgcccaccaacggcgcggccggtatcgtgcctgcggtgctgcattacttcatgaagttcaagcccacggccaatgacgacgatgtggtgcgcttcttcctgagcgccgcagcggtcggcattctgtgcaagaaaaatgcgtcgatctcgggtgccgaagtgggttgtcagggtgaagtcggctcggcctgcgccatggccgccgccgggctggcggaaattctcggtgcgacccccgagcaagtcgaaaacgccgccgaaattggcctggaacataacctggggctgacctgcgacccggtcggcgggctggtgcaaatcccctgcatcgaacgtaacgcgattgctgccgtgaaggccatcaatgccgcacaaatggccctgcgcggcgacggcgagcaccacatctcgctggaccacgccatccgcaccatgcgcgacaccggtgcggatatgcacgacaaatacaaggaaacctcacgcggcgggctggcggtgaacctgatcgagtgc

SEQ ID NO: 33652 - DNA, 612 bp, Pseudomonas syringae
atgagccgcgaacaactgagtcaggagatcatcgaagcagggcggttcctgtatggtcgtggctggtcgcctgccaccagcagcaattactccgtgcgcctgtcggccagcgaggcgttgctgaccgtgtccggcaagcacaaaggccagctggggccggatgatgtgctggcgacagacctcgctggcaacagcctggagcccggcaaaaagccgtctgcggaaaccttgctgcacacccagctttacctgtgcaggccgcaggtcggcgcagtgctgcacacccactcggtgaatgcgacggtgctgtccaggctgacggcctcagaccatctggtgttcgaggactacgagctgcaaaaagccttcaacggcgtgctgacccacgagtcgcaggttgtcgtgccgattttcgacaatgatcaggacatcgcccggcttgccgcaaacgtgcagccttggctggacgctcatcccgagtgcgccggctacctgattcgcggccacgggctctacacctggggcgcaagaatgagcgacgcactgcgccagatcgaagcgttcgagtttctgttcgagtgcgagctgaagatgcgtacggtcatgaaccgt

SEQ ID NO: 33653 - DNA, 1089 bp, Pseudomonas syringae
atgtccggcaacactttcggcaagctgttcactgtcaccaccgccggcgaaagccacggcccggcgctggtcgctatcgtcgacggctgcccgccgggcctggagctggacctgcaagacctgcagcgtgatctggaccggcgcaagccgggtactagccgccataccacgcagcgtcaggaagccgatgaggtcgagatcctctcgggcgtcttcgagggcaagaccaccggtgcatcgattggcttgctgatccgtaacaccgaccagaagtccaaggactactcggccatcaaggacctgtttcggccggcccatgccgattacacctaccaccacaaatacggcattcgcgactaccgcggtgggggtcgcagctcggcgcgggaaaccgccatgcgcgtggcggccggggccatcgccaagaagtacctggcgacccaaggcattgtgattcgcggttacatgagccagctcggcccgatccagatcccgttcaagacctgggattcggttgaggacaacgcttttttctgcccagaccccgacaaggtgccagaactggaagcctacatggaccagctgcgtcgcgatcaggactcggtcggcgcgaaaatcacggtggtggctgaaggtgtcatgcccggccttggcgagccgatcttcgatcgcctggacgccgagctggcccacgcgctgatgagcatcaatgcggtcaagggcgtggaaatcggtgccggtttcgactgcgtcgcgcagcgcggcaccgagcatcgcgacgagatgacaccgcagggttttctgtccaatcaggcgggcggcattctcggcggtatctcctccggccagccgatcattgcgcacctggcgctcaagccgacgtcgagcatcacgacgccggggcgctcgatcgatgtcgatggcaacgctgccgacgtgatcaccaaagggcgacatgacccgtgtgtcggcattcgtgccacgccgatcgccgaagcgatgatggccatcgtgctgctggatcacctgctgcgtcatcgcgggcaaaacgccgatgtcagcgtcgccacacctgtgctggcccagctg

SEQ ID NO: 33654 - DNA, 840 bp, Pseudomonas syringae
atgaatgacggcaagtcctatattccggcggtgcaactgggcgaggtgatgcgcgcgctgggtgtgggcgaagtgcttgaatcgaagaacccgaaatttgccgcaggcgatcacgtccagggtgcgcttggcactcaggattactttgcaggcgagccgaagggtttctataaggtcgataccagccttgcaccgttgccgctgtacctgtcggcactgggcatgaccggcatgaccgcctacctggcgctgctggatgtcggtcagccgaaaagcggtgacaccgtattgatttccggcgcagcaggcgcggtcggcagcattgccgggcagattgccaagctcaagggctgccgagtggtcggcatcgccggcggcaaggacaaatgcagcctgctgaccagcgagctggggttcgatgcggccatcgattacaagtccgaagatgtcatggacgcgatcaagcgtcattgcccggacggcgtgaacgtgtacttcgataacgtcggcggcgatattctcgatgcagcactcagccagttggcagtcggtgcgcgcgtggtgatttgcggtgccatcagccagtacaacaacaccacagccatcaaaggcccggccaattacatgtcattgctggtcaaccgcgctcgcatggagggcttcattgtgctggaccacgccgaccgctttgccgaagcaggtcaggtcatggccggctggatcaaggaaggcaagctcaagagcaaggagcatatcgtagaaggcctggagacattcccggagaccttccagatgctgttcaatggtgaaaaccagggcaagctgatattgaaagttgaa

SEQ ID NO: 33655 - DNA, 1140 bp, Pseudomonas syringae
atgcgcattgttgctgacgaaaacattcccctgctcgacgccttttttgccggtttcggcgaaattcgccgcctgccaggccgctccatcgaccgcgctgcagtagccgacgccgatgtattgctggtgcgttccgtgacgccggtgacccgcgagatgcttgagggcagcccggtgcgtttcgtcggcacctgcaccattggtactgatcatctggacctggcctactttcaggacgccgcgatccaatggtccagcgcaccgggctgcaatgcgcgtggtgtggtggattatgtactgggcagcctgctgaccctggcggaaatcgaaggcgtcgatctgcgccagcgcacctacggcgtggtcggtgcggggcaggtgggggggcggctgattgcggtgctcaaagcactgggctggaaggttttggtctgcgacccgccacgccagtctgccgaaggcggtgacttcgtcagccttgatgagattctgcagcgctgtgacgtgatcagcctgcacacgccgttggacaagagcggccagtcacccacctggcacctgctcgacgaagcgcgtctgcgtcagctcaggcaaggcgcctggctgatcaatgccagccgtggcgcggtggtggataaccgcgcactgcacgatgtcatgcttgaacgtgaagacctgcaagccgtgctcgatgtgtgggaaggcgaaccgcaggtcaacgtggcgctggctgacctttgcgtcatcggcacgccgcacatcgcgggttacagtctcgacggcaggcagcgcggcactgcgcagatctatcaggcactgtgcacctttctcgatcagccggcggcgatcagcctcgctgacctgctgccaaccccttggctggcgcaagtcagcctcgacgctgccactgacccgcagtgggccttgaacatgctgtgccgcggcgtatacgacccgcgccgtgacgatgcggatttccgtcgcagcctgaccggcgacaccgccagccagcgactggccttcgatgcgctgcgcaaacattacccgccccgtcgggaaatcgaagggctgaaggttcacctggaaggcgagtccgacacgctgacgcaactgatccgggcgctgggggcggtgcgggtt

SEQ ID NO: 33656 - DNA, 3219 bp, Pseudomonas syringae
atgccaaaacgtacagatattaaaagcatcctgattctcggcgccggccccatcgtgatcggccaggcctgtgaattcgactactccggcgcccaggcttgcaaagccctgcgcgaagagggctatcgagttatcctggtgaactccaacccggcgaccatcatgaccgacccggccatggccgacgccacctacatcgagccgatcaaatggcagaccgttgccaagatcatcgagaaagagcgcccggacgcgttgctgccaaccatgggcggccagaccgcactgaactgcgcactggatctggagcgtgaaggcgttctggagaagttcggcgtagagatgatcggtgccaacgccgacaccatcgacaaggctgaagaccgttcgcgtttcgacaaggccatgaagtccatcggcctggcgtgcccgcgttccggcatcgcgcacagcatggaagaagccaacgcggttcttgaaaagctcggtttcccttgcatcatccgtccgtcgttcaccatgggtggcacgggcggcggtattgcttacaatcgtgaagagttcgaagaaatctgcgctcgtggtctggacctgtctccgaccaaggaactgctgatcgacgaatcgctgatcggctggaaagagtacgaaatggaagttgtccgcgacaaaaaggacaactgcatcatcgtctgctccatcgaaaacttcgatccgatgggtgtgcacaccggtgactccatcaccgttgccccggcacagaccctgaccgacaaggaatatcagatcctgcgtaacgcctcgctggcggtactgcgcgagattggcgttgaaacgggtggttccaacgttcagttcggcatctgcccggacaccggccgtatggtcgtcatcgagatgaacccgcgcgtgtcgcgttcctcggcgctggcttccaaggcgaccggcttcccgattgcccgggttgcggccaagcttgcagtgggttacaccctcgacgagctgtccaacgaaatcaccggcggcaagaccccggcgtccttcgagccatccatcgactacgtcgttaccaagctgccgcgcttcgcgtttgagaagttcgccaaggccgatgcacgcctgaccacgcagatgaagtcggtgggtgaagtcatggccatcggccgtactttccaggaatccctgcagaaagcgctgcgcggcctggaagttggtgtgtgtggccttgatccgaagctggacctcagccatccggaaagcatgagcacgctcaagcgcgagctgaccgtgccgggcgccgagcgtatctggtacgtcgccgatgcgttccgcgcaggcatgactgtcgaagaaatcttcgccatgaacatgatcgacccctggtttctggtccagatcgaagatctggtcaaggacgaggagaagatcaagacgcttggcctgtcggcaattgatcgcgacctgatgtaccgtctcaagcgcaagggcttctccgatgcacgcctggccaaactggtcggcgttaccgagaaaaacctgcgcacgcaccgtcacaagctggatgtgttcccggtctacaagcgcgtcgatacctgcgcggccgagtttgcaaccgacaccgcgtacctttactcgacgtacgaagaagagtgcgaagccaacccttcgacgcgcgacaagatcatgatcctcggcggtggccctaaccgtatcggccagggtatcgagttcgactactgctgcgtgcacgcagccctggcgctgcgtgaagacgggtacgagaccatcatggtcaactgcaacccggaaaccgtctccaccgactacgacacctctgatcgtctgtacttcgagccggtcaccctggaagacgtgctggaaatcgtacgcgtcgagaagcccaagggcgtgatcgtgcagtacggcggccagaccccgctgaaactcgcccgtgccctggaagccgccggcgtcccgatcatcggcaccagcccggacgccatcgaccgcgcagaagaccgcgagcgcttccagcagatggtcgagcgtctcaacctgcgtcagccgccaaacgccaccgtgcgcagcgaagacgaagcgattcgtgccgccgcgaaaatcggttacccgctggtcgtgcgtccgtcctatgtactgggcggccgggcgatggaaatcgtttaccaggaagacgagctcaagcgttacctgcgtgaagcggttcaggtgtccaacgacagcccggtgctgctcgaccacttcctgaactgcgccatcgaaatggacgtcgatgcagtttgcgacggtactgacgtggtgatcggcgcgatcatgcagcacatcgaacaggcgggcgttcactccggcgactccgcctgctcgctgccgccgtactcgctgcctgctcacatccaggacgagatgcgcgaacaggtcaagaagatggccctggaactgggcgtggtgggcctgatgaacgtacagctggcacttcagggcgaagacatctacgtgatcgaagtgaacccgcgtgcatcgcgtaccgtgccgttcgtttccaagtgcatcggtgtttccctggccatgatcgctgcgcgcgtgatggcgggtaaaaccctgaaagagctgaatttcaccaaggaaatcattcctaatttctatagtgtgaaagaggccgtgttcccgttcgccaaattccctggcgttgacccgatccttggcccggaaatgaagtcgaccggcgaagtgatgggcgtgggcgacaccttcggtgaagcgttcgccaaggctcagatgggcgccagcgaagtgctgccgaccggcggtactgcgtttatcagcgtacgtgatgacgacaagccgctggttgaagcggttgctcgtgacctgatcaacctgggtttcgaaattgtcgcaacagccggaacggccaagctgatcgaagcggccggcctgaaagtgcgtcgcgtcaacaaggtgaccgaaggtcgcccgcacgtggtcgacatgatcaagaatgacgaagtcaccctgatcatcaacaccaccgaaggccgtcagtctatcgctgattcctactccatccgtcgcaacgccttgcagcacaagatttactgcaccactaccattgcagcaggcgaagcgatctgcgaagcgctcaagttcggcccagagaagaccgtgcgtcgcttgcaggacctccatgcaggattgaaggca

SEQ ID NO: 33657 - DNA, 765 bp, Pseudomonas syringae
atgggcaagactttgatcgaagcggttcagcaggcgcctggcgccgggctgaccgctgccgtcgatcgtcccgacagcacgctggtgggtgctgatgcgggcgaactggcggcgctgggccgtatcggtgtgccgttgtcagatgatctggcgaaggtgatggatgagttcgatgtgttgatcgacttcactcacccgtcggtcacgctgaaaaacctggcgttctgccgcaaggcaggcaaggccatgattatcgggacgaccggtttcagtgccgaagagaagcagcgtctggtcgaagcggggaaagacatcccgatcgttttcgcggccaatttcagcatcggtgtgaatctgtgcctgaagctgctcgacaccgctgctcgcgtgctgggtgatgaagtcgatatcgaaatcaccgaagcgcaccatcggcacaaagtcgatgcgccgtctggtaccgcgctgcgcatgggcgaagtagtcgccaatgcactgggccgtgatctggaaaaagtcgcggtctacgggcgcgaaggtcagaccggcgcgcgtgatcgtcagaccatcggctttgcgactattcgagccggtgatgtggtcggtgaccatactgtgctgttcgcagcggacggcgagcgggttgaaatcacccacaaggcgtccagccgcatgaccttcgccaagggcgcggtcagggctgcaatgtggctcgacggcaaggcaccaggcttgtacgacatgcaggatgtactgggtctgcat

SEQ ID NO: 33658 - DNA, 855 bp, Pseudomonas syringae
atgcgcatgatcatcgtcagcggccgctccggctcaggcaagagtacggcgctcgatgtgctggaagacaacggtttctattgcgtcgacaacctgccagccggcctgctgccggaactggccgagcgcgcgctgatcaacaccgaactggctgaaccgctgctggcagtttccatcgatgcacgcaatctgcccagccacctcacacgcttcccgcagatgctggatgaagtgcgctcacgcaatatccaatgcgacgtgctttacctggacgccgacgaagccaccctgctcaagcgtttctcggaaacccgacgtcgccacccgctgagcacagcggaccgctcgctggctgaggcgatacgggacgagaccaccctgctcggcccgatcatcgacctggccgatctgaaaatcaacaccactcacctgaacctgtaccagctgcgtgacgctctgaaactgcgcctgctgaacaagcccgagccgggtacggctttcctgatcgagtcgttcggcttcaagcgtggcatgcctgtcgatgcagacctggtatttgacgtgcgttgcctgcccaacccttattggaagcctgagctgcgcgaccattcgggcctggaacaaccggttatcgactacctgtccgcgcaggccgatgtagaagagatgttccaggatatcttctcctacctcaataaatggctgccgcgctttgcagccagcaaccgctcttacgttaccattgccatcggttgcaccggcgggcatcaccgctccgtctacctgaccgaacggcttggccaggtcttgcaacaatcactcaagaacgttcaggtccgccaccgcgaccttagc

SEQ ID NO: 33659 - DNA, 270 bp, Pseudomonas syringae
atgcccgttcgtcaaatcaccatcatcaacaaactgggcctgcacgcccgcgccgccgccaaattcgtaggcgtcgccggcaagttcccttgcaaaatcagggtcggccgcacgccagacagcatggtcgacggcaaaagcatcatggctgtgatgatgctggccgcaggcaaaggtaccgacatccacctgcacaccgaaggcgaattcgaacaggaagcgctggacgggctggttgagctgattgataacaagtttgatgagggcgag

SEQ ID NO: 33660 - DNA, 1914 bp, Pseudomonas syringae
atgggcagaattatcggtatcgacctggggactaccaactcctgcgtctccattctggaaaacggtaacgtcaaggttatcgataacgccgaaggtacgcgtaccacgccttcgatcattgcttatgccaacgatggcgagatcctggtcggtcagtccgccaagcgtcaggctgttaccaacccgcacaacaccctgtacgcggtaaagcgtctgatcggtcgcaagttcgacgagcaagtcgttcagaaagacatccagatggtcccttacaagatcgtcaaggctgacaacggtgatgcctgggttgaagtgaatggccagaaaatggcgcctcctcagatttccgctgaaatcctgaaaaagatgaagaagactgccgaagactacctcggtgaagcggttaccgaagcggtcatcaccgttccagcctacttcaacgacagtcagcgtcaggcgaccaaggacgctggccgtatcgccggtctggacgtcaagcgcatcatcaacgagcctaccgcagccgctctggcatacggtatggacaaggccaagggcgaccacactgtcatcgtttatgacctgggtggcggtactttcgacgtttcggttatcgaaattgccgaagtcgatggcgagcatcagttcgaagtgctggccaccaatggcgacacgttcctgggcggtgaagacttcgatattcgtctgatcgactacttcgttgacgaattcaagaaagaaagcggcatgagcctcaaaggcgacccgctggccatgcagcgtctgaaagaagcggctgaaaaagccaagatcgagctgtcttccagcacccagaccgaagtcaacctgccgtacatcactgcagatgccaccggtccaaagcacctggttgttaaaatctcgcgctccaagctggaatcgctggttgaagacctggttcagcgcaccatcgagccttgccgtatcgcattgaaagatgccggcatcgacatcggcaagatcaacgacgtgattctggtcggtggccagacgcgtatgccgctggtacagaagctggtaaccgagttcttcggtaaagaagcgcgtaaagacgtcaatccggacgaagctgttgcaatgggtgcagctattcagggcgcggtattggccggtgatgtaaaagacgttctgctgctggacgtcagcccgctgacgctgggtatcgaaaccatgggcggcgtgatgactgcgctgatcgagaaaaacaccacgattcctaccaagaaatcccaggtgttttcgactgccgatgacaaccagaacgctgtgaccattcacgtactgcagggtgagcgcaagcaggccggtcagaacaagtcgctgggcaagttcgacctggccgagattccacccgctccacgtggcgtgccgcagatcgaagtgaccttcgacatcgacgcaaacggcatcctgcacgttggcgcgaaagacaaggctaccggcaagcagcagtccatcgtgatcaaggccaactccggtctgtccgaggaagaaattcagcagatggttcgcgatgctgaagtcaactccgaagaagatcgcaagttcgaagagctggcctctgcccgtaaccagggtgatgcgttggtccactcgactcgcaagatgattgctgacgcaggcgacaaggtcactgctgaagagaagacggctgttgaagcggcgctggttgctctggaagcggccatcaagggcgacgacaaggctgtcattgaagccaaggtcgaagaactgtctaaggtttccgcgccgatcgctcagaagatgtacgccgagcaggccgagaatccggaagcagcagccaagccggctgaagaaactgccaaggctgacgacgtcgttgacgccgagtttgaagaagtgaaagaccacaag

SEQ ID NO: 33661 - DNA, 1611 bp, Pseudomonas syringae
ttgctggtctcggtgattgccctgtcgctgttcagcgtgcaggtttcggtcctgttcaacagttggtaccgggacttttacaacgccctgcaaaacaaggatctggcggcgttcacgcacctgatcctgtacttcagcggcattgccgccatcgctattctggctgcggtgtatcgcctgtacctgactcaactactgaccattcgctggcgccgctggctgaccgagcagcatttcgcccgctggctcgaacacaagaattactaccacctggagcagggcggctataccgataaccctgaccagcgtctgtccgaagacctcaacgagttcaccaccagtaccctgagcctggggcttggcctgatgagctcggtcgtcagcctggtgtcgttctcggtcattctctggggcgtgtcgggcagcatcgaactgttcggtatcacgatccctggctacatgttctgggcggccatgctctacgcgatcgtcggcagtctgctgacgcactggatcggcaagcgcctgatcccgctgaacaaccagcaggaacgttacgaggcggacctgcgttttgcgctggtacgtgtgcgggaaaacgccgaaagcatcgccttgtgcgagggcgagcgcaacgaaaaccagcgcctcagcgggcggttttcgatgatctggaacaactttcgggcctcgatgaaagtccagaagcggctgaccttttttacctccggctattcgcagatcgccctgatctttccctttatcgtcgctgcaccgcggtatttcgcgggcaagatcgagctgggtgatctgatgcagatcaactcggcattcggcaatgtgcaggagaacttcagctggttcatcagcgcctacagcacgctggcgtcgtggcgcgccacctgtgaccgtctgctcagtttccgccaggccctgaccgaccatgaagcgcagcagcccgccatcgaacgggttcacgccgacgatgcgctggacctgcgcaatctgggcctgagcattgcgggcggtcgacaactgcttagcgaggctgacttgcacatcgccgcaggtgagcgggtcatgctcagtggtcgttcgggcagcggcaaaagctcgttgctgagggcgctgggcggattgtggccacacggctcagggcagattcgcttgccggcagagcctgcgttgtttttgccgcaacggccttatctgccgattggcacgttgcgtgaggcgatgagttatccacagtcagcagatcactattcgccggagcgctttgccgacgcgctgaaaaagtgtcggctggagcatttgattccgcgtctggatgaaagcaatcactggcagcgctttctgtcgccaggcgagcagcaacggatggcgttcgctcgagccctgttggtggcgccgcgctggctgtacatggatgaagccacctcggccatggacgaagaagacgaggccgccatgcaccgagtgatcatcgacgggctgcccggcctgacattgttcagcatcggacaccgcagcagcctcaagcgcttccatagccggcatgtgcgcgtcgaggacggcaaattgatcgaacaggcggcgtctggagcggtt

SEQ ID NO: 33662 - DNA, 1641 bp, Pseudomonas syringae
atgacaacaactgaggcaaccatgctcaaacacgcggtcattccgtttctggtcggcgccagcttgctcgccagtgcacctttcgctcacgcagcatcgaacctggtgttctgctccgagggcagccctgccggcttcgatccgggtcaatacaccacaggtaccgatttcgacgcctcggccgagaccatcttcaaccgtttgagccagtttgagcgtggcggcaccgccgttgtgccaggcctggcaacaaaatgggacatctcggaagacggcctgacgtacaccttccatttgcgtgaaggcgtcaagttccacaccacgtcctatttcaagccgacccgcgaattcaacgccgatgacgtgctgttcaccttcaatcgcatgatcgacaaggacatgccttaccgcaaagcgtatccgaccgaattcccgtacttcaccgacatggcgatggacaccaacatcaccaagatcgaaaaagtcgacgaccacaccgtcaagttcgttctgggcaaggtcgacgccgcgttcatccagaacatggcgatgagcttcgcgtccatccagtccgcagagtacgccgccaagctgctcaaggaaggcaagccggaactgatcaaccagcagccgatcggcactggtccgttcgtgttcaagagctaccagaaagactccaacatccgctacaccggcaacaaggattactggaagcctgaggacgtcaaagtcgacaacctgatcttcgccatcaccaccgacgcatcggtgcgcatgcagaagctcaagaaaaacgaatgccagatcaccgcttatccgcgtcctgccgacctcgcccccctcaaggccgacaagaatctgaagatgccggatcaggctggcttcaacctgggttacatcgcctacaacgtgatgcctcagatcaaaggcgaagaccatccaaacccgctggctcagctgaaagtgcgtcaggcactggacatggcagtcaacaagcagcagatcatcgactcggtttaccagggtgcaggtcaattggcggtcaacgccatgccgccgacccagtggtcttacgacaccaccatcaaggatgccaagtatgatcccgagaaggctcgccaactgctcaaggaagcgggcatcaaggaaggcaccgaaattaccctttgggcaatgccggttcagcgtccttacaaccccaacgccaaactgatggccgaaatgctccaggccgactggaagaagatcggtatcagcgccaagatcgtcagctatgaatggggcgagtacatcaagcgcgccaagaatggtgaaaacggcgccatgctgattggctggagcggtgacaatggtgatccggacaactggctcggcaccctgtttggctgcgacgcactcaatggcaacaactttgccaagtggtgcgacaagcctttcgacacgctgatccatcaggcaaaacagacgcctgatcaggccaagcgcaccgaactgtacaaacaggcgcaacacctcctgaaagacgccgtgccgatgacgcctatcgcgcactcaactgtctaccaacccatgcgcaccagcgtacaggacttcaagatcagcccgtttggcttgaattccttctacggtgtcagcgtgaag

SEQ ID NO: 33663 - DNA, 3813 bp, Pseudomonas syringae
atggggcgtctttcgcgtgccgttgcaaccctgacgcgctggagcctgagcctctgcgcgctgattctggtgctcgcggcgctgtacgtcagcctcggccgtcaactggcgccgctggttgccgaataccgcgtcgatgtagaaacccgagccagcagcgcattgggcataccgctgagcattggcagcctggaaggcagctggagccgctttgccccggtattgctggcccacgacgtcatggtcggtgagggcgccaatgccctgcgtctggatcgtgtgcgggttgttcctgatctctgggcaagcctgttggcgcgtcaagtgcgcatcgcgcaccttgaagtagacggtctgcagttcacgatcaagcaggatcaagaaggcggctgggccgtgcagggcttgccgctgcgtaacgacaccccgttagacccggggcaattgctcaatcagatgcaaatggtgtcgcacctttcgctgctcgacagccaggtgacggtgcaaccgctcgacgccgcgccactgaccctgacctacgtcaacctcagtctgaccaccggcagctatcaccagcgtctggacgcgcgcctgaccctgccggatggccagccgtttgcgctgaatgtgcgctcgcgtatccaggccagtcagtggaaagacggcgaagcggatttctacgccagcctgccgcaaagcgactgggccaaatggctgccgaaaagcgccacacgtgaatggacgctgtccaggctgcaagccggtggcgacctgtggatgagctggggcaagggcaccgtgcaaagcgcaactgcacgcctgaatgccccgcagatcaaaggcgtctacgccgatcgcaagccgtccacaatcgataatctggcgctcaacgcctggttcgcgcgcacggcgacaggctttgacctgaaccttgattcactggcgatgaacctgggcagcgaccgctgggaaagccgcctgcaactgacccagaccgctgcaacgcctgatagcgaagagctttggcatgtgcaggctgaccgcctggacctgacaccgctcacgccactgatcgactccctcgcgccactgcctgagaaggcaatggcggtggtcgacgggctcaaggtgacgggcgggcttcgcaacgtattgctcgattaccgcccgcaggccaccggcgacaagcgcttgggttttgccgccaatctggacaaggtcggtttcaatgcctatcgcggcgcaccggcggccgggaatgtcagcggcgcgatcagcggcgatctggggcagggcgagctgaggctcgctactgacgatttcatgctgcacctggacccgatcttcgccaagccgtggcgctatcagaaagccaatgcccgcctgacctggaagctggatgatcaggcgttcaccctgatcgcgccgtatatcaaggtgcttggcgatgaaggcaagatcgcggcagacttcctgatcagaattcacctcagccacgatcaggaagactacatggacctgcgggttggcatggtcgatggcgatggtcgctacaccagcaaatacctgcctgccgcgctcagcccggaactcgatcactggctgcgcactgccgtggtgagtggcgcggtcaagcaaggctttttccagtaccagggttcgttgaacaagaattcgcccgacactgcgcatgtcatcagtctgtttttcgatgtcagcaatgcaacgctggcgttccagccgggctggccttcgctgaccggcgtggacggcaaggtgtacgttgaaaacagcggcgtgcgggtcaaggcaagcaaggggcagctgttcgacaccaaagtcagcaatgtgctggtcaacattccccacgtgccgtcgggtcaggacagccacctgctggtggacggtaacttttccggaagcctggtcgatgggctgaagattcttcagcaagcgcccatcggcacgggcagcacgtttgccggctggcagggcgaaggcccgctggacggcaagctcaagctggatattccgctggcaaagggcgtcgagccaaaggtcgtggtggatttcagcaccgacaatgcacgtctgaagctggcagatccggtgctggaactgacccggctcaagggtgacttccgttttgacagcaacagtgggttaagcggcaaaggcatcaaggcacaagcgttcgatcgtccggtgacggctgaaattgcggccgagggcaagccgggtgccaatgtcacgcgcatcacggcaaacgggcaaatcaccgttaagaaactgacggactggctgagcgtcacccagccggtaccagcgtcgggtgacttgccttatcaactgcaactgattctggacagcaaagacagcccgttgctgatcaactccacgctcaagggtgtggcaatcgatctgcccgcgccgtttggcaaagccgccgatcaggagcgcccgagcgaatttcgcatgaccctgcaagggccagagcgcaggctgggtgtggcttacgacaacctggcgaacttcgctttcgcagcgccgggtggcaagtttgccgacggtcgcggcgaactgtatctggggcgcggcggggccgtcgtgccagacgccaagggcttgcggatccgcggtgagttgtccgaactggacatcgccccgtggcaggcgctggcagggcgatactccagcaatgatccgggtgacagtgcaaaacagctgctcaacagcgtggacctgcagattggcaagctgaccgcgatgggcacaacgctcaatgaggtgcgtgttcaattgcagcgcagcgctgcggcctgggccttgtcgctggacagtgcgctggccaagggcacggcaacgctgccagacgccaaagctgcgccaatcggtatcaacatggcgtatgtgcgactgcctgcgcccgatccgaatgccgccgtagtcgaaaacgcgcctgacccgctggctgacgttgatccgcgcaagatcccggcgctggatatcaagatctcgcaactgtttcagggcgaccagttattgggtgcctgggcgttgaagattcgtccgacgcccaccggaatgcgcatgtctgacctgagcctggggctcaaaggcatcctgctggaaggcgacggtgcctgggaaggtgcgccgggtgccagcagcagctggttcaaagggcgtctggccggcaagaatctggaggacgtactcaaagcctggaacttcgctccgaccgtcaccagcgaaagctttgaaatgaacgtcgacgggcgctggcccggctcacccgcgtgggtagggctcaagcgttattccggcagcctcgatgccacgttgaacagaggtcagtttgtcgaagtggagggcggcgcccaggcactgcgtgtattcgggctgctcaacttcaactccattggtcgccgtttacgtctggacttctctgacctgctcggtaaaggcctcagctatgaccgggtcaaagggctgctggtggccagcgacggcgtttacgtgacgcgcaacccgatcacgctgaccgggccgtccagtaatctggaactcaacggtacgctggacatggttcgcgaccgggtcgatgccaagctgctggtgaccttgccggtgaccaacaacctgcctatcgcggcgttgattgtcggcgcgccggccattggcggcgcgctgtttctggtcgacaagctgctgggcgaccgggttgcccgcttcgccagcgtgcagtacaaggtcgaaggcccgtggaaagagccgaagatcaccttcgacaagccatttgaaaagccccag

SEQ ID NO: 33664 - DNA, 480 bp, Pseudomonas syringae
atggctaagctcaagaaacaccctacagggaccatcgcgcagaacaaaaaggcgcgccacgattacttcatcgaacacaagttcgaggccggtctggtcctgtctggctgggaagtaaaaagcctgcgtgccaccaaggtacagctggttgacagttacgtgctgctcaaggacggcgaggcctggttgatgggttgccacatcacgcctctcaagactgccagcacgcacgtcatcgctgacccgacacgcacccgtaaactgctcctgaaccagcgcgagctcgaaaagctcaccagctcggttcagcaaaaaggctacgcctgtgtcgccctttccatttactggaagcagcacttgatcaagtgcgaaattgctttgggtaaagggaaaaaggaatacgacaagcgccacaccgagcgcgaacgcgattcggaccgtgagctgcagcgtgccgtgcgcaccaagggcaaggacgac

SEQ ID NO: 33665 - DNA, 10296 bp, Pseudomonas syringae
atgcgctgcatcaagaaccggacctcttggacagagaaccagaagagatttcgagtcatgtcagccgatcaattcagcacctcctttgctcaacagcgtctttggtttctcgagcaatatgaacccggcactggcctgtacaacatcccggccgcctgccggatcaacggtgtgctgcggctcgatatccttgagcgcagccttaatgccatcatcgagcggcatgaagcgctacgcacctcattttccgtggataaagatctacccgtgcaagtgatcatgcgcgaggcgccggtgctgatcaggcctgtaaaactggcggcgctccttgaacggaacctcaccctgcaacagttcatggatgatgaggcggccagccccttcgacctgacgcaggcaccactgatccgcgccacagccatcgaagtcagggccgatgagcatgtcctgctgctgaccctgcatcatatcgttgcagatggctggtccatgagcgtgttgctggacgaactcagtcggctctacaacgccgagctgaacggcgtagccgctgaccttcaagcgcttgaaatacactatgccgactacgccgtctggcaaagggaatggctgcaggaagaggtcgtgcaaccacagctggattattgggagactcagctcaaggatgcgccaagcgttcttgaactgccgaccgaccggccccgccctgcacgactcgactatgcgggtaaccgggttcacttcacacttcccgccgaactcggagcgcaactccaggaactcagccaacgccaccatgtgacgctgttcacgacgctgatatgtgccttcaatacgctgctgctgcgcttgagcaatcagcccgatatctgtatcgggtatccggtcgccaatcgcggtcgtgccgaaatccagccgctgatcggcttcttcgtcaacaccctcgtgctgcgcagtcagatgagcacgcaacagacgtttgccgcttatctgcaacagacccaatcgacactgctcgactcggacttgaatcaggacatcccgttcgaaagactggtcgaggcgttacgccctgccagggagctgaaccactcgccgctctttcaagtcctgttttctttcttcaaccaggacctggccggaggactgacgctcagtgggacaacgtccggcacactggagcagaactgccgcttctcgaagtttgacctgtctctggaaatgaacactcggcagaacaccctgggaggcttcttcgagtaccggaccgcgctttatgaccaggccaccattgaacgtatgagtggctactatcgtgtattactggaatccattgtcgtcgacaccactgcccgtatcggcgacctcgaaattttgcccctgcaggaacggctgtcccgactggcgaccgcacccacgcctgcccacacgctcagtgcagatcaatgcgtgcacgatctggttctgacccaggcgcgggccacccctgacgcgactgcgattctctgcgccgggcaggaggtgagctatcgccaactggagcagcaggcaacggccatcgctgaccgattgattgcgctgggcgcgggtccggaaacctgcgtagcgatctgtctggatcgttcggtcaccatggtggcagcgttgctcggcacctggatggcgggcgcacattatgtaccgatggacccaggctaccctcatgcccgcctgctgcacatgctgcaggattccaaggctcggatcctgctcagcgagcgaccgcacgtgcaggcgttcagcgcagcagcggtacagattgtcctgctcgatgaagtgcaatcgaaccctcgtccctctgatatccggcatcccgtcgccgctctgaacacggcctatgtgatttacacctcaggctccaccggcttaccgaaaggcgttcaggtgccgcaccgggcggtcgttaactttctgctgtcgatgacgaaccagcctggcataaacgctggggaccgattgttggcggtcacctcgatctcattcgacatcagtgtcctcgagcttttcctgccattgatcagtggcgcaagccttgtgctggcagactcggaagcggcggcggatggacaggcgttgatcaagctggccatgcaccaggatgtcaccttcatccaggccacaccttcaaactactggctgatgctggaggcaggctggccaagcacgctcaagctcaaagtactttgcggcggcgaagcgctgccacctgttctggcgcaaaaactgctgcaacgcagcgactcggtatggaacatgtatggcccgaccgaaaccaccatctggtcagccatcagccgtgtaacgggcagcgctagcactctgggtcgcccgattgccaacaccgtgctgcgtgtccttgatgagaacgcgcgcctgtgtgcgaccggcagtcccggcgaactgcacatcggtggcgagggtgtcgcccgtggctatctcgaccgtgcggatctgactgcgcagaaattcgtgcccgatccttatgcgtcagggtcaggagcacgtatttataaaaccggcgacctggtcaggtggctgcccaacggcgaaatcgaatttctggggcgcatcgatcatcaagtcaaggtccgcgggttccgcatcgaactgggtgaaatcgaaacccgtctggtcagcttccccagcgtacgccaaggggcagtgatcgttcgggaagatcagccgggcgaccagcagatcgtggcttacctgttggtcggtgagcaatacgccgcagagccggaacaactgcgccatcacctcgcgcagacgttgcccggctacatgatcccgaaccactttgtggttcttgagcaattcccgctgacacccaatggcaaacttgatcgcaagcgcctcccggcacccaacaccacaccgccgggtgcgaatcgtgttcttcctggcacaccgatggaaaaggccgtagccgatatctggcagcacgtactcaatctggaaggcgtcggcattaccgataacttcttcgagctgggcggacactcgatcctcgccactcaggttgtttcccgactacgcaataccctgcagatcgaactctcggtgcgcacattgttcgaagcgccgaccatcgcgcaactgatcgcaagcctcggctcgccaaccgttcggcaggcccaatccatcatcccgcgctcaccgtcgcagcaccgtcagccgctgtcgtacgctcaagagcgactgtattttctggatcagttcgagcctgccagcgcggcctacaccatcgcgttggcccttgagctgaacggcccgctggaggcatcgctgctgcacaggtgtctgaatgagctgatccgtcgccacgagcccttgcgcacaacgttcgtcctggacgcagacggaaagcctcaggcacaggttcaccccgaggcgcttagccaactggtctatcgcgatctgcgtcatcactcgacgccttacctgctcgctcaaacgcaggccaatgccgaagcacaacacctgttttctctggaaaaaggcccattgtttcgcgcctcgctgttacagactggcgagcagcaacatatcctgctgttgaccctgcaccacatcgtcagtgatggctggtcggtggccgtactcgcccgtgaggtcatggccctttatcaagcctttgcacagggccaaccctcgcccctggcacctcttgatattcagtacggtgactatgctgcctggcaacgcgagtggcaggcccccatcgagttcgcgtcgaaaaccgattactggtcctgccatctggcccaggccccgaccactctggaactgcctaccgaccggccgcgcccggcgattcagacctaccgtggcagggtcatcagtcgctcactgggcaaaacgctgtccgcacggatcgatgccctgagccaggctcaggaaggcacgccgttcatgacgctgctggccctgttcaatgtcttactcaaccgctacagcggccagcaagacattgtgatcggaaccccgatcgccaaccgcaccagacccgagatcgagccgctgatcggcttgttcgtcaatacccttgccatgcggatacgcctggaaggcaacccgacctttagcgaactgctaggacaggttcgcgacaccacgttaaacgcctatgcccatcaagaactgcctttcgaaaaagtagtcgagtctttggccatcccgcgtgacatgagtcgctcgcccttgttccaggtgctgttcgtcctgcagaacactgcgcttgaagcaatgaacctgccagggctggagatcggaaatttcgcgcttgagtcgaccacagccaagttcgatctgaccctggaactgacgccctcatccgagggttatcagatgcgctgggaatacaacagcgacctttttgacgctgacactatcgaacgcatgacccgccattttgaaacactggcccgctcggcgatcagcgatccgagccaacccgcccagcgcctgtcgatgatcaccgcgcaagaaaaacaacacatcctccacgaatggaacgcgactcagcaggtttatcgcccattggcggtgcatcagttgttcaccgaaatgagcgagccgtgcgccgacttgcccgcagtcatgttcggcacagcgtcgatgagctatcgacagctggaagcacgttccaaccaattcgcccattacttgcaacgctcgggcgtcctccccggcacgctggtgggcatatgcctcgagcgctctatgcatgtgcctgtggcgattctggctgtactaaaagcgggggcagtgtgcgtgcccatggacccgagctatccgaccgagcgcctgcgcttcatggcccaggatgcccgtgccgacctgatcatcaccctgactactttgcgcccgcgtgtcgaaggctgcagccataccatcatctgcatggaccaatgcgccgatgcctggcatgagccatcgtcaaatccggccagaccgcaaaacctgcttgacctgtgttacgtcatctacacctcgggctccaccgggctgcccaaaggcgcggccctgactcacgaaatgctgaccaacctcgtgcagtggcaactcactgaatcgcgcctgagccgaggcgacaatacgctgcaattctcgccattgagcttcgatgtgagtttcgacgaattcttctccacctgggccagcggcggcacgctggtcatggtcagcgaagatacgcgccgggaccccgttctgctgcttgaactcattcagcgacagaacattgcccgccttttcattcccttcgttgccctgcaaggcattgctgacgctgcccgggatgtagataaactggcctgcctgaaggaagtcgtctgcggcggcgagcaactgcaggtcactcaggaagtcgtcgacctgtttcaaaaactgccagatgccttattgcacaaccagtacggaccgacggagtcacacttcgtcaccggctatcggctcagcggcgatgccacgcaatggccggccctcccgcccattggcaagccgttgttcaactcgcagatgtacgttctcgacgccagtctggaaccggttccggtcggcgtacgaggtgatctttacattgctggcgttcacttggcgcgctgttactgggagcgtcccgatatcactgccgaacgtttcgttcccaatccccacagcctctcgccgggcgctcgtatgtacaagaccggtgatgttgcgcgctatcttcctgatggaaatatcgagtatctggggcgctcggaccatcaggtcaagattcgcggcttcaggatcgagctggccgaggtcgaacaggcactgatggcccaggaaacggtggcaagcgccgccgcgatggtccgggaagaccgtccagggctgaaaaagctggtgggttatctggtcgccaaaagcgactgcacgctgaacatcgtggacatcaaggaacatctgcgacgaacgctgcccgattacatggtgccgaccaccttcgtcatcctgccgaccctgcccctgaccccaagtggcaaagtcgacaaacgctcgttgccgcagccggaaaacgacaaccacgaaaatcaatatgttgcccccaggagcgacgctgaacgacaactcgctgccatctgggcgagtgtcctgaatctgtcgcaggtcggtatcaccgatgacttcttcgaacttggtgggcactctttgctcgccactcaggtggtttcgcgtattcgcaaacagctgaatgtcgatatggcgctgcgcaccctgtttgaagcgccgaccatcgaacaattgctgccgcgcctgagcacaagcccggtagtgaccctgtcagcaatcactgccaccaacaccggctccggcatgaaagtcgcttcctatgcccaagagcgtctgttcttcctgaatcgtctggatcgctccagtaccgcttacaacattgcattggcgctggaactgaacggcccgctgaaaaagccggtgttgcagcaatgcctggacgagctgattcgacgtcacgaacccctgcgcacgacattcgccttgcaggaagacggccaggtggtgagcctcgttcatcccccgcagctcgatacgctgatctctctcgatttgcgccataccgctcagccgctgtcggtggctgaaaaacaggtacgcgaccatgcctcacagttgttctccctggaaaccggtccactgctgagagtcctcctgctgcaggtcgccgacgagcaccatattctgctgtttaccgtgcatcacatcattgctgacggctggtcgatcgcggtgcttacccgcgagatcatggcgctctaccaagcgttttcgacagaccaggcatcaccgttgccgcctctggaaatccagtacagcgactacgccttctggcagcgttcgttacaggccccaagcgtttttgcagcgcaggtcggctactggcgccagcagctggatcaggcacctgcccgcctcgagctgccgacggaccgaccgcgtcccgcgattcagacctatcgaggtcaggccgttacccatacatggcccccaaccctgtccaagaagatcgatacgttgagccaaagcctgggggtgacaccgttcatgaccctgctcaccctgttcagtctgctgctgagccggcacagcggccagcgcgatatcgtcgtcggcacgcccatcgccaaccggacccgaaccgaggtcgaacccttgatcggcctgttcgtcaacacgctggcactgcgcacacgcattgaaggcaacccgacatttcgccaattattgcaacaggtcaggaacaccaccctcggcgcttatgcccaccaagacctgccgttcgaaaaagtcgtcgaagcgctggatacgcctcggaacatgagccattcgccactgttccaggtgatgtttgtgctacagaacacggcgcccgagccattgaaaattccggacgtcgaggtccgcatcttcgacatcgggaccaccacggccaaattcgacttgagcctggagctgacgcccacggtccagggctatcaagtacgctgggaatacaactgcgacctgttcgacgccacgaccattgaacggctggccgcacagttccagaccctcgctgaatcggccgtccttgatgcacagaaaacggtcgcaagccttgacctgctttcggcctctgaaaaaaacaggatgcttgagcagtggaatgcgaccaaggtcagtcatcgtccggttgcagcccttcatcatctgtttgaacagcaggtggaacagacgccggacgccatcgcagtcagtttcgaaggccaacacctcagctatggggcactcaacgaggccgccaatcagttggcccactacctgatttcgcgggggacccgggcggatgatctgatcgcaatctgcatggagcgcagcgtcgagatggtcgtcagtcttctgggagtcctgaaggccggcggcgcctatgtgccaatcgaccctcattatcccgaagagcgtatcgcgtacatgctcgcagacgccgcaccgatcctgaccatgacacaacgcagcctgctgaaacttaccgcgctgcaacggaccgacagcctgtgtctggacgagcacgcaacctcgttggcacacctgcccaagaccaatcctcagcgcctgatagacccggcctgtctggcgtattgcatctacacctccggatcgacaggtgcgccgaaaggctcgttgaacagccatgaggcaatcatcaaccgtatcctttggatgcaggacacctacttgctggatgcgacagatcgggtgctgcaaaaaacgccattttcgttcgacgtctcggtctgggaatttttctggccactcagtgtgggcgcgcggatgctgctggccaaacccgaggggcacaaagatccgcgctacctggagacgcttatcgaacgcgagggggtgaccacggcgcactttgtgccctccatgctcagcgcctacatggccttgacccaggccagtcacacccgcgccctgcgccgggtcttcagcagcggcgaggcactgtccacctcagtgcaaaacgagttcttcaaacgatacccggccacacaactgcataatctgtatggaccgacagaggctgcgattgatgtcacccattggcattgccaggccggtgacgtcggtcatgcggtcccgattggccgccccgtcgccaatacgcgtacgtacattcttgacgagacgctgcaaccggtccccattggcgtgaccggcaatctctacctggccggtgtgcaactgtcccgtggctatctgaaacgcgtcgacttgacggccgaacgcttcatcccagacccgcacggcacgccgggcagtcgcatgtacatgaccggggataccgctcgttatcgtgcccacggtgaaatcgagtatctgggacgcaacgaccagcagatcaaattgcgcggtttcaggatagaactgggcgagatcgaaatgcagttgtgcgcccatccgcaggtcagccaggccgtcgtcagtgtcaataccagcgatgcggataaccccacccttaccgcctaccttgtgtgcaacgcggatacacagccaagtgtcgacgaactcagagaatgcctggcccgcaccctgcccgattacatggcagacgtctgctttcagtttcttgaccacttgccattgacgtcaaacggcaaggtcgatcggcgcgcgctcccgcagcctgtaagcgcggttcgggaccaggccattcaactgctggcgccgagaactgcgttggagaaaagcgtggctgcggtctggaagaacacgctgaatcttgagttcatcagcctgaacgacaacttctttcacgaaggcggtcactcattgctggcaatgaaaatgatcgatcaggtcaaccgggagctggggctggcggcccgcgttcgtgacattttcgagtcagccactctgggcgccttcatcgaaaagatcagccagggcatcggcgaacgtggttcaaaccgtatcaggctcaagcagggaacgcgcaggcacctcttcctggtgcatgccgttggcggcgtggtctcgccctacatcaagctttcgcagttgatgcccgatgacgtgagcgtacacgccttccaggccggaggtcttgaacacggcaccgacgtcgtcgataccctggaaaaaatggccgcgatctacatcgagcagatgcttgaaattcaacccgaggggccgtactggttgggcggatggtcaatgggaggagtgattgccttcgagatggcccgtcagctggaagcactggacagggaagtacgccaactgctgctgatcgacgcgcccgcgccgggccacgcggcacaggagcagacctggccgctgggtgcttacctgatggacatggcccgttcgctttcggtcgacctgccactttcggccagcgaaatgaaccaactgatcgagcatccggaccgggacgttctggccattgcaaccatgcggcgcatcggcgtgatccccgacagcatggacgatcagcaggtatcacgacgactgcagatcttctgcacccatcagcaggcgctggaagcctatcgcccaaaaaccggcatcaacagcaatctgacgttactgcacacagaagaaagtgcagagctgcgggacaagtggcggccactctgtgggcagtccttcaacgccaccgggttcacggccgaccactacagcattctcgaagctgccacgccatgtatcagcaagctcttcaat

SEQ ID NO: 33666 - DNA, 1281 bp, Pseudomonas syringae
atgtccgcgcccaaccgcgtttctgaaaaggtgcccgtttccgacgaccgagccactcttctgctcttgctcatcgcattcgtcgatgcggctggtcgcgggctttttctcgccggggcaacgtttttctacactcaggttgttggcctgagcaatgtcgaagttggcatcggtctggccttggccggcctttgtggccttgtctgcgcagttccgattggccgactggcggatcgtctgggtgccgcgcgcgtcttggcctttcttcaggtctggcgaatggcaggctttctgatctatcccttcgtggatgagttctattccttcctgctgattgcctgcttcatcggctgtgtcgagcaggcggtctggccaatcatccagacgctggtaggttcagcggtaacagcggatgcctacgtgaagaccatgtccaaggtcgcgatcgtcagaaacgtggcctacatgttggccgccggaatattttccattgtggtcagcttcacgaccggccccggcggcgtgattggcatgctgatcgccaatgccatggcgtttctggtttccgccatcctgctggtcagcgtaaaactgccccatgttgtcaccaaggcgtctgaccagagccaacctgtgaccccgcccgctcagccgttgaaaaacctgaacttcctgtcgctgtccttgtgcaacggtattctgtcactgcatcaggccgtgatgaccatcgccattcccctgtggctgctgaccaagacacaggcgcccaagtctctgatcggcatcattctggtcatcaacggcatcatggcgattaccctgcaactgtcgttcagcaagcgtggcaatgaggtgctttttgccgcccgcaaacacttgtacgcagggataacactggctctttcgtgcgcattggttgccttcaccacggcggaacaaccctcctacctggtggcaggtatcctgttgttcgcctgtgtggtcatgacgtttggagagctgtggcaatgcgcaggtgcgtggggtatctcgtactatttgtctccagtcgaaaatcgcgcttattacctgagcatctatgccttgggagccaacctgatgaccgtgatttttccggggatcctgcccatcgctgtcgtcgaggcaggttcaaccggctggataggccttgctgttgtcttcgccctggccggtgtcgcaactccccttctcgtccgatctgcgaatcgcaaggctattgcagtcaggtctgaagatattagcgtccacagcacgcaggct

SEQ ID NO: 33667 - DNA, 633 bp, Pseudomonas syringae
atgttgaccatcgcactgtccaagggccgcattcttgatgacaccctgccgcttctcgccgaagcgggcatcgtgccgaccgagaatccggacaagagccgcaagctcatcattcctacgacccaggccgatgtgcgcctgctgatcgtgcgcgccaccgatgtgccgacgtacgtcgagcatggcgcagccgatctcggcgttgcgggcaaggatgtgttgatggagtacaccggccagggcctgtatgagcctctcgacctgcagattgccaagtgccggctgatgaccgcaggtgctatcggcgctgtcgagcccaagggccgtctgcgtgtggccaccaagttcgtcaacgttgccaagcgttattacgccgagcagggtcgtcaggtcgatatcatcaagctgtacggctccatggagctggcaccgttgattggcctggcagacaagatcatcgacgtggtcgataccggcaacaccttgcgcgccaacggtctggagccacaggaactgattgcaaccatcagctcaaggctggtggtcaacaaggcgtccatgaagatgcagcacgcacgcatccaggcccttatcgacaccctgcgcaaggcagtggagtcgcgacaccgctgt

SEQ ID NO: 33668 - DNA, 1167 bp, Pseudomonas syringae
ttgctggccgatgggcccgtcaccgttcagaacctgccacacctgcacgacatcaccaccatgatcgagctgttcggtcgtatgggcatcgagcctgtgatcgacgaaaagctcagcgtcgagatcgacccgcgcaccatcaagaccctgatcgctccgtacgaactggtgaaaaccatgcgtgcgtcgattctggtactgggcccgatggtcgctcgtttcggcgaggccgaagtggcgctgccgggtggctgtgccatcggttcgcgtccggttgacctgcacatccgtggccttgaagctatgggcgcgatcatcgatgtcgaaggcggctacatcaaagccaaggcgcctgaaggcggcttgcgtggtgcgcacttcttcttcgataccgtgagcgtgaccggtactgaaaacatcatgatggccgccagcctggcaaacggtcgcagcgtgctggagaacgccgctcgcgagcctgaggttgtcgacctggccaatttcctgatcgccatgggtgcaaaaatccacggtgcaggcaccgacaccatcaccattgatggcgtcaagcgtctggggtcggccacctacaaggtcatgcctgaccgcatcgagaccggcacctatctggtcgctgccgccgttaccggtggccgtgtgaaggtcaaggacaccgatccgaccatccttgaggcggtgttgctcaagcttcaggaagccggtgccgaagtcaccaccggtgaagactggatcgagctgaacatgcacggcaagcgtcccaaggccgtcaatgtgcgtactgcgccgtatcctgcgtttccgaccgacatgcaggcgcagttcatctcgctcaacgcgattgccgaaggcacgggcgcggtcatcgagaccatcttcgaaaaccgcttcatgcacgtgtatgaaatgcaccgcatgggcgctcagatccaggtcgaaggtaacactgcgatcgtcacgggcaccgaggtgctcaagggcgcgccagtcatggccaccgacctgcgtgcatcggccagtctggtgatttcggcgctggtcgctcagggcgatacgctgatcgaccgcatctaccacatcgaccgtggttacgagtgcatcgaagagaagctgcaaatgctgggcgccaagatccgccgcgttccgggc

SEQ ID NO: 33669 - DNA, 630 bp, Pseudomonas syringae
gtgttcctgatcgaagagcctatggctgctgcgatcggtgccggtctgccggtcgaagaagcgcgcggctcgatggtcgtcgacatcggcggcggcaccaccgagatcgcgctgatctccctcaacggtgtggtgtatgccgaatccgtacgtgtgggcggcgaccgtttcgacgaagcgatcatcacttacgtgcgtcgcaactacggcagcctgatcggcgaatccaccgccgagcgcatcaaacaggaaatcggcaccgcctacccgggcggtgaagtacgtgaagtcgacgtgcgtggccgcaacttggccgaaggcgtcccgcgcgccttcaccctgaactccaatgaagtgctcgaagcactgcaggagtcgctggcgaccatcgttcaggcggtcaagagcgctctggagcaatcgcctccggagctggcttcggacatcgccgagcgtggcctggtactgaccggtggcggcgctctgctgcgtgacctcgacaaactgctggctcaggaaacaggtctgccggtgatcgtcgccgaagacccgctgacctgtgtggcgcgtggcggtggccgtgcgctggaaatgatggataagcacaccatggatctgctctccagcgag

SEQ ID NO: 33670 - DNA, 1515 bp, Pseudomonas syringae
atgtggcgcatcagtatcagcaagtcactgactggcacactcgcgcacctgaaggcttctgaggagaaacacatgcaatgggaagtcgtcatcgggcttgagattcacactcagctttcgacccaatcaaagattttttccggcagcgccaccacgttcggctccgagcccaacacccaggcctgccttgtcgatctgggcatgccgggcgtgctgccagtgctgaacaaggaagccgtgcgcatggccgtcaagttcggcctggcggtagatgccgaaatcggtcagcacaacgtgttcgcccgcaaaaactatttttacccggacctgcccaagggctatcagatcagccagatggagctgccgattgtcggcaagggccacctggacattcccctggaggacggcacggtcaaacgcgtcggcatcactcgcgcgcaccttgaagaagacgctggcaaaagtctgcatgaagacttccagggcatgaccgggatcgacctgaaccgtgccggcacgccgctgctggagatcgtttccgagccggacatgcgcagcgcaaaagaagccgtggcctacgtcaaggccatccacgcgatcgttcgctacctgggtatctgcgacggcaacatggccgagggctcgctgcgttgcgactgcaacgtgtcgatccgccccaagggccaggtcgagttcggtactcgctgcgagatcaagaacgtcaactcgtttcgcttcatcgaaaaagcgatcaacagcgagattcagcgccagatcgacctgatcgaagacggcggcaaggttatccagcagacacgtctgtacgacccgaacaccaacgaaacccgcgccatgcgcagcaaggaagaagccaacgactaccgttacttccctgacccagacctgttgccggtgatcatcgaagactcgttcatcgaagaaacccgcgccacactgccggaactgccaccgcagaaacgcgaacgcttccagagccagttcggcctgtcgacgtacgacgccagcgtgctggcctccagccgcgagcaggccgactactttgaaaaagtggtcagcatcagcggcgacgccaagctggccgccaactgggtcatggtcgaactgggcagcctgttgaacaaacagggggtcgaaatcgaccagtcgccggtcagcgccgaacaactgggcggcatgctcaagcgcatcactgacaacaccatttcgggcaagatcgccaaaatggtttttgaagcgatggccaatggtgaaggcagcgccgatgaagtgatcgagaagcgcggcctgaaacaggtgaccgacagcggtgccatcgaatcgatgctcgacgaagtactggctgccaacgcagaacaggtcgaacagtaccgtgcagctgatgaagccaagcgcggcaagatgttcggtttcttcgtcggccaggccatgaaagcctccaaaggcaaggccaacccacagcaggtcaacgaactgctgaaggccaaactggagggt

SEQ ID NO: 33671 - DNA, 2268 bp, Pseudomonas syringae
atgtcaactgaatcgaaatgccccttcaaccacgctgccggcggcggcaccaccaaccgtgactggtggcccaagcagctgaatctgaagattttgcaccagcattcttcgctctccgacccgatgggcgaggactttgactatgccaaggagttcaagagcctggacttcgaagcggtcaagcaagacctgcgcgacgtaatgacccggtcgcaggactggtggccggcggattttggccactacggcccgctgttcattcgtatggcctggcacagcgccggtacttaccgcaccggtgatggtcgtggcggcgcgggcgccggtcagcagcggtttgcgccgctcaatagctggcctgacaacgtcagcctggacaaggcgcgtcgcctgatctggccggtcaagcagaagtacggccgcaagatttcctgggccgacctgatcgtgctcaccggtaacgtggcgctggagtccatgggcttcaagaccttcggtttttccggtggtcgcccggatgtctgggaaccggaagaagacgtgtactggggttccgaaaccacctggctgggtggcgaagagcgctacggcgcgcagaagaaaatgcagcagccgggcgacggcaccctggtggccgagcctgagaaccacgcgaacgaagaaagccgcaccgccagtggcgaacgtaatctggaaaacccgctggccgccgtgcagatgggcttgatctatgtgaacccggaaggccctgaaggcgtgccggaccctgtcgcttcggcgagggatatccgcgaaaccttcggccgcatggccatgaatgacgaagagaccgtggcgctgatcgccggtggtcacgccttcggcaagactcacggtgccggcccggccgacaacgtgggtccagagccggaagcagcgggtcttgagcaacagggctttggctggagcaacaaatttggcaccggtaaaggtggcgacaccatcaccagtggcctggaagtgacctggacctcgacgcctacccaatggagcaacgagtacctggaaaacctctttgccttcgattgggaactgaccaagagcccggccggcgcgcatcagtggacgcctaaaaacggcgctggcgctggcaagattccggatgcccacgacccgagcaaacgccatgcaccgagcatgctgacctctgacctggcgctgcgtttcgacccggcctacgagcagatttctcgccgcttcctggccaaccccgagcaactggccgacgcgttcgcacgtgcctggttcaagctgactcaccgcgacatgggcccactggcccgctacctcggcccggaaacaccgaccgaagagctgttgtggcaggacccgattccagacgtcactcatccgctggtggatgatcaggatgttgccgcgctcaagggcaagattctcgactcggggctttcggtgtcacaactggtttcaaccgcatgggcggcagcttccaccttccgcggctctgacaagcgcggcggtgccaatggcgggcgtctgcgtcttgcgccgcagaaggactgggcggtcaaccagcctgcacaactggcgaacgtgctgagtacgcttgaaagtattcagagcgagttcaacgcagctcaatcgaacggcaagaaagtgtccattgccgacctgatcgtgctggccggtagtgcaggcgtcgagcaggcggcgaagaacgcaggtcagcaggtaacggttccgttcacagcgggccgggccgatgcgtctcaagagcagacagatgtcgagtcgttcagcttccttgagccgatcgccgatggcttccgcaactatcagaaagggcgttacaaggtatcggccgagtcgctgctggtcgacaaggcgcaactgctgaccttgactgcgccagagatgactgtgctgctgggcggcttgcgggtcttgaatatcaacgtcgggcagagcaagcacggtgtgttcaccgacaagccggaaaccctgaccaacgacttcttcaagaacctgttggacatggctgtcgagtggaaagcgacttcgggtgccaacgacacctttgaagcacgtgaccgcaagaccggcgaagtgaagtggaccggctctcgtgtcgatctggtgttcggttcacacgctcaactgcgtgcgatttccgaggtgtacggcagcgcggatgcgcaagaaaggtttgtcaaagacttcgtggccgtctggaccaaggtaatgaacctggaccgtttcgacctcgct

SEQ ID NO: 33672 - DNA, 1008 bp, Pseudomonas syringae
atgtttagttttatcgcccgccgagtggggttgctgatacccactttcttcggcatcaccttgttgacgttcgcgctgattcgtctgattccgggcgacccggtcgaagtcatgatgggtgaacgccgggtcgatccggaaatgcacgctcaggccatggaacgtcttggcctgaacaaaccgctgtatgcccagtacatcgattacatcggcaagctcgcccagggcgatctcggtgaatcgctgcgtacgcgcaccagcgtctggagcgaattcacctcgctgttcccggcaaccctggagttgtcgctggcagcactgattttcgcaggcatcctcggcttgctggccggcgtcatcgccgcactcaagcgagggtccctgttcgatcatggggtcatggggatttccctggccggctattccatgccgatcttctggtggggcctgatcctcatcatgttcttctcggtaaccctgggctggaccccggtttccgggcgcatcgacctgttgtacgacatcccgccagtcaccggtttcatgctgatcgacaccctgctcagtgacgagcaaggcgcgtttctcgatgcactgcatcacctgattcttccggccatcgtgctgggcaccatcccgctggcggtaatcgcccggatgacccgctcctcgatgcttgaagtgctgcgtgaagactacgtgcgtaccgcccgggccaaaggcctgtcacctgctcgtgtagtgttcgtgcacggcctgcgcaacgcgctgattccagtgctgaccgtgttcggcctgcaagtcggtgctctgctggccggtgcggtcctgaccgaaacgatcttctcctggccgggtatcggcaagtggctgatcgaagccatcggcgcacgggactatccggtcgtgcaaaacggcattctgctgatcgcctgtctggtgatcctggtcaacttcgtggtggatatcctctacggctttgccaacccacgcattcgtcaccagcgc

SEQ ID NO: 33673 - DNA, 1782 bp, Pseudomonas syringae
atgaacgaagtgcaggttgtctgcacagtcgtttccaccagcaagaagatcgatccggacatcgctgcgatgatcggtacttcggctgctctggccatctccggtatcccgtttgacggtccggttggcgctgcgcgcgttgctttccacgaaagcaccggctacctgctgaacccgacttacgagcaactgcaggcttcgagcctggacatggtcgtagctggtacttccgaagccgttctgatggttgagtctgaagccaaagagctgaccgaagaccagatgctgggcgctgtgctgtttgcccacgacgagttccaggtggtcatcaacgccatcaaggaactggctgccgaagccgccaagcctacctgggactggcagccaaagcctgaagcgactgcactgctgggcgctatccgtgccgagttcggcgacgcgatctcccaggcgtacaccatcaccgtcaaagccgaccgctatgcgcgtctgggcgagctgaaagaccaggtcgttgccaagctggctgtcgaagaaggcagcccgtctgccggcgaagtcaaagcggctttcggtgaaatcgaataccgcaccgttcgcgaaaacatcgtcaacggcaagccgcgtatcgatggccgtgacactcgcactgtccgcccgctgaacatcgaagtcggcgttctgccaaagactcacggttcggcactgttcacccgtggcgaaactcaggcgctggttgttgccaccctgggtactgcacgcgacgcacagctgctcgacacccttgaaggcgagaaaaaagacccgttcatgctgcactacaacttccctccgttctcggtgggcgagtgtggtcgtatgggcggcgcaggtcgtcgcgagatcggtcacggccgtctggcacgccgcagcgtacaggctatgctgccgggcgctgatgtgttcccctacaccatccgtgttgtgtcggaaatcaccgagtccaacggttccagctccatggcttcggtctgcggcgcttctctggcactgatggacgctggtgttccgatgaaggcaccggttgccggtatcgccatgggtctggtcaaggaaggcgagaagttcgccattctgaccgacatcctgggtgacgaagatcacctgggcgacatggacttcaaagtagccggtacctccaaaggtgttaccgcgctgcagatggacatcaagatcaaaggcatcaccgaagaaatcatggagatcgctctgggccaagccctggaagctcgcctgaacatcctcggtcagatgaaccagatcatcggtcagtcgcgtaacgaattgtcggccaacgctccgaccatgatcgcgatgaagatcgataccgacaagatccgtgacgtgatcggcaagggtggcgcgaccatccgtgcaatctgcgaagagaccaaggcttcgatcgacatcgaagatgacggctcgatcaagatcttcggcgagtccaaggaagcggctgaagcagcacgtcagcgcgttctgggtatcaccgcagaagcagagatcggcaagatctacctgggcaaggttgagcgcatcgtcgatttcggcgcattcgtgaacatcctgcctggcaaggatggcctggtacacatctccatgttgagcgacgctcgcgtagagaaagtgaccgacatcctgaaagaaggtgaagaggtcgaagtactggtattggacgtggacaaccgcggtcgtatcaagctgtcgatcaaagacgtcgccgcagcgaaagcgtcgggcgtc

SEQ ID NO: 33674 - DNA, 189 bp, Pseudomonas syringae
gtgcaggttgcactgcttaccgccaacatcaacaaactgcaaggccacttcaaggccaacggtaaggaccaccactcccgtcgtggtctgatccgtatggtaaaccagcgccgcaagctgctggattacctgaaaggtaaggacgttagccgttacagcgccctgatcggtcgtctgggtctgcgtcgc

SEQ ID NO: 33675 - DNA, 915 bp, Pseudomonas syringae
gtggctcaggtcaagcgtatacgtcgcaatgtcagcgggatcatcctgctcgacaagccactgggcttcacgtccaacgccgctctgcaaaaggttcgctggctgctcaatgccgagaaggcggggcacacgggcagccttgatcctttggccaccggcgttctgccgttgtgctttggcgaggcgaccaagttctctcagtatctgctcgattcggacaagtcctacgagacgctggcccaactgggcaagaccacgaccactggcgactccgagggcgatgttttgctcacgcgtccggtgaccgttggtcgcgacgatatcgaagcggttctgcccgactttcgcgggaaaatcagccagatacctcccatgtactcggccctcaagcgtgacgggcagccactttacaaactggcgcgtgcaggggaagtagtggagcgcgagccccgttctgttactattgcgcgcctggaattacttgcttgcgaaggcgagacagcacgtctgtcggtggattgcagtaaaggcacctatatccgcacgctggtcgaggatatcggtgaaaaactcggttgtggtgcctacgtcgcagaactgcgccgtacccaggccgggcctttcacgctggctcagacggttacgctggaagagctcgagcaagtgcacgccgacggtggcaacgaagcggttgaccgcttcctgatgccttcggacagcggcctgctggactggccgttgctgaagttttccgagcacagttcgttttactggttgcatggtcagccggtacgcgccccggacgcaccgaaattcggtatggtgcgggtgcaggatcacgaaggtcgcttcatcggtatcggtgaagtcagcgaagacgggcgtattgcgccgcgtcgattgattcggtcagag

SEQ ID NO: 33676 - DNA, 1662 bp, Pseudomonas syringae
atgttcaagatgggcaccccggtgaccatcaaccaggtactggatcaggaaactgcccagttgatcgccgaagagctgggccacaaggtcacgctggtcagcgacaatgccctggaagattccctggcggaatcgctgaagttcgaaggcgagtcgttctctcgtgcgccggttgtgaccgtaatgggccacgtcgaccacggcaagacttcgctgctcgactacatccgtcgcgccaaggtagcggctggtgaagccggtggtatcacccagcacatcggtgcctaccacgttgaaaccgaacgcggcatggtgacgttcctcgacacccctggtcacgctgcgtttaccgcaatgcgcgcccgtggtgccaaggcgaccgacatcgtgattctggtggttgctgccgacgacggcgtgatgccacagaccatcgaagccgttcagcatgctgttgctgctggcgttccgctggtggttgcggtgaacaagatcgacaagccgggtgcggatctcgaccgcattcgcagcgagttgtcagtccatggcgtgacgtccgaagagtggggtggtgatacgcctttcgtttcggtctccgcgaaaatgggtactggcgtcgacgagctgctggaagctgtcttgctgcaagccgaagtcctggaactcaaggcaacgccttcggctcctggccgtggtgttgttgtcgagtcccgtctggacaagggccgcggtccggttgctactgttctggttcaggacggtacgctgcgtcagggcgacatggttctggtcggttcgaacttcggccgcatccgcgccatgcttgacgagaacggcaagccggtcaaggaagcgggtccttccatccctgtcgagattctcggcctggacggtaccccggacgctggcgacgagatgagcgtgctgtccgacgagaagaaagcccgtgaagtggctctgttccgtcaaggcaagttccgtgaagtcaaactggcccgtgcccacgctggcaagctggaaaacatcttcgagaacatgggtcaggcagagaagaagacgctcaatatcgtcctcaaatctgacgttcgtggttccctcgaagcgttgaacggcgccttgaacggcctgggtaacgacgaagtgcaagtgcgcgtagtgggtggcggtgtcggtggtatcaccgagagcgacgccaacctggcactggcgtccaacgctgtactgttcggcttcaacgtgcgtgccgatgctggcgcacgcaagattgtcgagcaggaaggtctggatatgcgttactacaacgtgatctacgacatcatcgaagacgtcaagaaagcccttaccggtatgcttggcagcgacgttcgggagaatatcctgggtattgccgaagtccgcgatgtgttccgttcgccgaaattcggcgcgatcgcaggttgtatggttctggaaggtactgtttaccgcaaccgtccaatccgtgttctgcgtgaagacatcgttatcttcgaaggcgagctggaatccctgcgccgcttcaaggatgacgctgccgatgtacgtgccggcatggaatgcggtatcggcgtcaagagctacaacgacgtcaaggttggtgacaagatcgaagtcttcgagaaggtccaagtggctcgcagcctc

SEQ ID NO: 33677 - DNA, 1479 bp, Pseudomonas syringae
atgagcaaagaagtactgctggttgttgagtcggtgtccaatgaaaagggcgttccggcaagtgtaatttttgaagcgctggagctggctctggccactgctaccaagaaacgttttgaagacgaagttgaactgcgtgtagagatcaaccgccaaacaggcaactacgagactttccgtcgctggacagtcgtcgaagacgaagatctggacgatcctgcttacgagctggccgtcgatcaggctcaggctaaaaagcctggtgccgttgcaggcgacctgatcgaagagaaaatcgattccatcgaatttggtcgtattgctgcacagaccgcaaaacaggtcatcgtgcagaaagttcgtgaagccgagcgtgctcaggtagtcgatgcctaccgtgagcgtctgggtgaaatcatttctggtactgttaaaaaggttacacgtgacaatgtcatcgttgatctgggtaacaatgccgaagccttgcttgctcgtgaagacatcatttcccgggaaactttccgggtcggtgttcgcgtccgtgctctgctgaaggaaattcgtactgaaaaccgtggccctcagctgattctgtcgcgtactgcgccagagatgctgatcgagcttttccgcattgaagtgccggaaattgccgaaggtctcatcgaggtgatggctgcctctcgtgacccgggctctcgtgcgaaaatcgctgttcgctccaaggacaaacgaatcgatccgcaaggtgcctgtatcggcatgcgcggttcgcgagttcaggctgtttccggcgagctgggtggcgagcgtgtggatatcgtgctttgggacgataaccctgcgcagttcgtgatcaacgcaatgtcccctgcagaagtagctgcaatcatcgtagatgaagacgctcatgcaatggacatcgcggtaggcgcggacaacctggcccaggctattggtcgtggcggtcagaacgttcgtctggccagtcagttgactggctggaccctgaacgtaatgaccgaatcggacatccaggccaagcagcaagctgaaaccggtgacatcctgcgcaacttcatcgaagagctcgaagtcgatgaagaactggctcaggtgctggttgatgaaggcttcaccagcctggaagagattgcctacgtaccgttggaagaaatgctcaacatcgacggctttgacgaagatatcgtcaacgagcttcgcgctcgtgccaaggatcgtttgttgactaaagccatcgctacagaggaaaagctggcagacgcccatccggccgaagacctgctctcgcttgagggtatggacaaggatttggcgatggaactggcggtgcgcggcgtagttacccgcgaagacctggccgagcagtctatagatgacctgctcgacatcgacggcattgacgatgatcgtgccggcaagttgatcatggccgcccgagcccactggttcgag

SEQ ID NO: 33678 - DNA, 1341 bp, Pseudomonas syringae
atgactaccagaaaatatttcggaaccgacggcattcgtggtcgtgtagggcaattcccgattacacccgagttcatgctgaaactgggctgggctgcaggcatggcctttcgcaagatgggcgcctgccgcattcttgttggcaaggacacgcgtatttccggctacatgttcgaatctgcactggaagcagggctttctgcggcgggcgctgacgtgctgctgctggggccgatgcctacacctgccatcgcgtatctgacgcgcacttttcatgccgaagcaggcatcgtcatcagtgcttcgcacaatccgcactacgacaacggcatcaagttcttctccggccagggcaccaagctgcctgacgagatcgaaatgatgatcgaggagttgctcgacgcaccgatgaccgtggccgagtccgaaaacctcggcaaggtctcgcggatcaacgatgctgccgggcgttacatcgaattctgcaagagcagcgtgccgaccagtaccgattttgccgggctcaaggtggtgatcgattgcgcgcacggcgcgacttacaaggtggcgcccaacgtcttccgtgagttgggggcgcaggttgtggtgctctcggcgcagcctgacgggctcaacatcaacaaggactgcggctctactcacatggaggccttgcaggccgctgtggttgcggagcacgcggacatgggcatcggttttgatggtgacggcgaccgagtgctgatggtcgaccacaccgggaccatcgttgatggcgatgagctgctttacatcattgcgcgcgatctgcacgagcgtggccgcttgcagggaggtgttgtcggcacgctgatgagtaacctgggtcttgagctcgctcttgccgaacagaatattcccttcgtgcgggccaacgttggcgaccgttatgtgattgccgagctgcttgagcgcaattggcagatcggtggtgaaaactccgggcacatcgtgtgtttccagcatgccaccaccggtgacgccattatcgcctcgctgcaggtgatacttgccttgcgtcgcagcggcatcagccttgccgaggcgcgcctgaaattgcgcaagtgcccgcaaatcctgatcaatgtgcgtttcgagggttccagtgtcgacccggttacccacccgtcggtgcaggaagcctgtgcgcgcgtcaccgaacagatggcggggcgtggcagggtgctattgcgcaaatccggcacagagcctctggtgcgggtgatggttgaaggtgaggacgaagcgcaggtcagggcgtacgccgaagagctcgcaaaactggttgctgaagtttgcgcc

SEQ ID NO: 33679 - DNA, 1911 bp, Pseudomonas syringae
ttgaacgatatggcaaagaatttgatcctgtggttgatcatcgcggctgtccttgtgacggtgatgaacaacttctcaagccctaacgagccgcagaacttcaactattccgagttcatccagcaggtcaaggatggcaaggtcgagaaggtttctgtcgatggctacgtgatcacgggcaagcgcagtgacggtgacaccttcaagaccattcgtccgaacattccggacaatggcctgatcggcgatctggtcagcaacaacgttgtggtcgaaggcaagcagcccgaacagcagagcatctggacccagttgctggtcgccagcttcccgattctggtgatcatcgcggtcttcatgttcttcatgcgccagatgcagggcggagcgggcggcaaaggcggcccgatgagctttggcaaaagcaaggcgcgtctgttgtctgaagatcaggtcaagaccaccctggcggatgttgcagggtgtgacgaagccaaggaagaagtcggcgagctcgtcgagttcctccgtgatcctggcaagttccagcgtctgggtggtcgaattccgcgcggcgtgctgatggttggtcctccgggtaccggcaagacgttgattgccaaggcgattgccggcgaagccaaagtgccgttcttcacgatttccggttccgacttcgtcgaaatgtttgtgggtgtcggtgcaagccgcgtccgtgacatgttcgaacaagccaagaaacacgcgccctgcatcatcttcatcgacgaaatcgatgcggtcggtcgtcatcgtggtgccggcatgggtggtggtcacgacgagcgcgagcagaccctcaaccagttgctggtagagatggacggctttgaaatgaatgacggcatcatcgtcattgccgcgaccaaccgtcctgacgtactggaccctgcattgctgcgtccaggccgtttcgaccgtcaggttgtggtgggtctgccggacattcgtggtcgcgagcagattctcaaggtccacatgcgcaaagtgcctatgggtgaggacgtcaatccaggcgttatcgctcgcggtactccgggtttctccggtgccgatctggccaacctggtcaacgaagcgtcgctgttcgctgcgcgctccggcaagcgtgtcgtcgaaatgaaggaattcgaactggccaaggacaagatcatgatgggcgccgagcgcaaatcgatggtcatgtccgacaaggaaaaacgcaacacggcttaccacgaggcgggtcacgccatcgtcggtcgtctggtgcccgagcatgatccggtctacaaggtgtcgatcattcctcgcggccgcgctttgggtgtgaccatgttcctgcccgaagaagaccgttacagcctgtccaagcgtgcgttgatcagccagatatgctcgttgtacggcggtcgtatcgctgaagaaatgaccctgggctttgatggcgtcacgacgggtgcgtccaacgacatcatgcgtgccagccagattgcccggaacatggtcaccaaatggggcctgtctgaaaagctgggtccattgatgtactctgaagacgaagatggtggttacctggggcgcggcggcagccagaattccagtgtttccggcgacaccgccaagctgatcgactcggaagtacgcagcatcatcgaccactgctacggcaccgccaagcagctgctgacggacaatcgcgacaagcttgaagcgatggccgacgcgttgatgaagtacgagaccatcgatgctgatcagatcgatgacatcatgaccggtcgcccaccgcgcgagccgcgtgactgggatggcggttcaggtaccaacggtactccgatcacacctgatcctcgtccggaaacgcctattggcggtcctgctgctgagcat

SEQ ID NO: 33680 - DNA, 1146 bp, Pseudomonas syringae
atgaaaatcaccaaactcaccacgttcatcgttccgccacgctggtgcttcctcaaggtcgagactgacgagggcgttgtcggctggggcgagccggtggtcgaaggtcgcgcacacaccgtggccgctgctgtggaggaactgtccgattacctgatcggcaaggacccgcgcaacatcgaagacatctggaccgtgctgtatcgcggcggtttttaccggggcggcgcgatccacatgagcgcactggccggcattgatcaggcgttgtgggacatcaagggcaaggcgctgggtgtttcggtgagtgatttgctgggtggccaggtgcgcgacaagatccgtgtgtactcgtggatcggcggcgaccgtcctgccgacacggcgcgtgcagccaaagaagccgtcgagcgcggctttacggcggtgaaaatgaacggcaccgaggagctgcaatttctcgacaccttcgacaaggtcgatctggcgctggccaatgtggctgccgtgcgtgatgcggtggggccgaatgtcggcattggtgtggacttccatggccgcgtccacaagccgatggccaaggtgctgatgaaagagctggatgcgtacaagctgatgttcatcgaagaaccggtgctcagcgaaaactacgaagccctgaaagaactggcaccgctgaccagcacgccgattgccttgggcgaacggctgttctcgcgctgggatttcaagcgggtgttgagtgagggctatgtcgacattattcagccggatgcgtcgcatgcgggcggtatcaccgaaacccgcaagatcgccaacatggccgaagcctacgacgtcgcgctggcgctgcattgcccgctggggccgattgcgctggcggcgtgcctgcaactggatgcggtttgttacaacgcctttatccaggaacaaagcctgggcattcactacaacgaaagcaacgacctgctcgattacgtcaagcatccggaagtgttcgactacgacaaaggcatggtcaagatccccaacgggccgggcctgggcatcgaaatcaacgaagaatacgtcatcgaacgcgccgccatcggccaccgctggcgcaacccgatctggcgtcatgccgatggcagttttgcggagtgg

SEQ ID NO: 33681 - DNA, 2544 bp, Pseudomonas syringae
gtgctgcgactgatccaggcgtatcggatgcgtggccatcaggctgctcagctcgatccgctgggcctttggcagcgtcctgcacccgcagatctgtcgatcaatcactacggcttgaccaatgccgatctggacacgactttccgcgctggcgacttgttcatcggcaaagaggaagcgagcctacgcgaaattcacgaagcgttgcagcagacatattgtcgcaccataggctccgagttcacccacatcgtggattccgagcagcgcaactggttcatgcagcgtctcgaaagtgttcgtggtcgtccggcgttttcggctgacatccagagccacttgcttgagcgtgtcactgcggcggaaggtctcgagaaatacctgggcaccaaatacccaggcaccaagcgtttcggtctggaaggcggcgaaagtctgattccgatgctcgacgagctgattcagcgttccgggtcctatggcaccaaggaagtcgtgatcggcatggcccaccgtggtcgtctgaacgtactggtcaacaccttcggcaagaacccgcgcgacctgttcgacgagttcgaaggcaagaaaaaagtggaactgggttccggtgacgtcaaataccaccagggcttctcttccaacgtcatgaccgcaggcggtgaagttcacctggccatggcattcaacccgtctcacctggagatcgtttctccggtggtcgagggttcagtgcgcgcgcgtcaggatcgtcgcaacgatccgaacggtgacaaggttctgccgatttccctccacggcgatgcggcttttgccggtcagggcgtggtcatggaaaccttccagatgtcgcagactcgcggcttcaagacgggcggcacgatccacatcgttatcaacaaccaggtcggtttcaccatcagcaacccgctggactcgcgttccaccgagtacgccaccgacgttgccaagatgattcaggcgccgatcctccatgtaaatggtgatgatccggaagccgtgatgttcgtcacccagttggcgatcgactaccgcatgcagttcaagcgggacatcgtcatcgatctggtctgctaccgccgtcgcggtcacaacgaagctgacgagcccagcggcacccagcctctgatgtatcagcagatcaccaagcagcgcaccacccgtgagctgtacgccgagcatctgatcaagaccggcgtcctcgatgaagcccgcgttcaggccaaggtcgatgactaccgcagcgcgctggacaacggcctgcacgtggtgaaaagcctggtcaaggagccgaacaaggaattgttcgtcgactggcgtccgtatctgggccatgcctggactgcgcgtcacgacacccgattcgatctcaagaccctgcaggaactgtccgccaagctgatggagttgccagaaggcttcgtcgtgcagcgtcaggtgcagaagatctacgaagatcgccagaagatgcaggccggtggcttgccgatcaactggggctacgccgaaaccatggcatacgccacgctggcgttcgaaggccacccgatccgcatgacaggccaggacatcggtcgcggtacgttctcgcaccgtcacgctgtgctgcacaaccagaaagacgccgggacttacattccgctacagaatctgtacgccggtcagccgcgtttcgacctgtacgactcgttcctgtcggaagaggccgtgctggcatttgaatacggttactcgactacccagccggatgcactggttatctgggaagcgcagttcggcgactttgccaacggcgcccaagtggttgtcgaccagttcatcaccagtggtgaacacaagtggggccgtctgtgcggtctgaccatgctgttgcctcacggctacgaaggccaagggccggagcactcttcggcacgtcttgagcgctacctgcaattgtgcgcagagcacaacattcaggtgtgcgtaccgacgactccggcgcagatctaccacctgttgcgtcgtcaggtcatccgtccgctgcgcaaaccgttgatcgtgctgactccgaaatcgctgctgcgtcacaagctggctgtttcgacgctggaagatctggccgaaggctcgttccagaccgtcattccggaaatcgataccctcgatccggccaaggtcacgcgtctggtgctgtgcagcggcaaggtctactacgacctgctggaaaaacgccgtgccgaaggtcgtgaagacatcgctatcgttcgtctcgagcagctgtacccgtttcctgaagacgacctgatggaaaccatcgcgccgtacaccaacctgcagcatgtggtctggtgtcaggaagagccgatgaaccagggtgcctggtacagcagccaacaccatttgcgtcgcagcatgggcaaccacaaacgcgaactcgttctcgagtacgccggtcgtgatgcttctgccgcaccagcctgtggttacgcttcgatgcacgctgagcagcaggaaaaactcctgcgcgatgccttcactgtt

SEQ ID NO: 33682 - DNA, 1434 bp, Pseudomonas syringae
atgtcccagaaattcgacgtggtagtgattggcgcaggccctggcggctatgttgccgccatcaaggcagcgcaacttggtctcaagactgcctgcatcgagaaataccaggacaaggagggcaaactggccctcggtggtacctgcctgaacgtaggttgcattccatccaaggcgctgctcgacagctcctggaaattctacgaagccaagaacggtttcgcagtgcacggcatttcgacatctgaagtggccatcgacgtgcccgccatgatcggtcgcaagtcgaccatcgtcaaaggcctgaccggcggcgtcgccagcctgttcaaagccaacggcgtgaccaccctgcaaggccacggcaaattgctggccggcaagaaagtcgagctgacagcggccgacggcactgttgaaatcatcgaagcggaccacgtgatccttgcttcgggctcgcgtcctatcgacattccgccagctccggttgatcagaaagtcatcgttgattccaccggtgcgctggaatttcaacaggttccacagcgtctgggcgttatcggcgcaggcgtaatcggtctggagctgggttcggtctgggctcgcctcggcgctcaggtcactgttctggaagcgctggacaagttcatcccggccgctgacgaagccgtttccaaggaagcgctgaaaaccttcaccaagcagggcctggacatcaaactgggcgctcgcgtgaccggctccaaggtcaacggcgaagaagtggtggtcagctacaccgacgcagcaggcgagcagtcgatcacgttcgaccgtctgatcgttgctgtcggacgtcgtcctgtgaccaccgacctgttggcctccgacagcggtgtcgacctcgacgagcgcggtttcatctacgtcgatgactactgcaccaccagcgttccgggcgtctatgccatcggtgacgtggttcgcggcctgatgctggcgcacaaggcctcggaagagggcatcatggttgtcgagcgcatcaagggtcacaaggcccagatgaactacaacctgatcccgtcggttatctacacccacccggaaatcgcgtgggtaggcaagaccgaacagaccctcaaggccgaaggcgttgaagtcaatgtcggtacgttcccgttcgcagccagcggccgtgccatggcagccaacgacaccggtggtttcgtcaagatcattgccgatgccaagaccgaccgcgttctgggtgttcacgttattggcccgagcgctgccgaactggtacagcagggcgccatcgcgatggaattcggcagcagcgcagaggacatcggcatgatggtcttctcgcacccgactctgtccgaggcattgcatgaagctgcactggctgtgaatggcggcgccatccacattcagaatcgcaagaaacgc

SEQ ID NO: 33683 - DNA, 1062 bp, Pseudomonas syringae
gtgaggtcaacaatgtacacagctatcggctacgccgctcaatcagctaccgcccccctcgccccgatgaccttcgaacgtcgcgctccgcgtgccgacgacgtggccatcgaaatcctgttctgcggcgtctgccactccgacattcaccaggcgcgcaacgagtggggcatcgctgtctacccgctgatgcccggccacgagatcgtcggtcgcgtcaccgccactggcgccaacgccaccaagtacaaggtcggtgatctggtcggtgtcggttgcatggtcgactcgtgccgcgagtgctcggcctgtaaatcggatctcgaacagtattgcctggaaggcccgaccatgacttacgccacgccagaccgcgtggacggcagcaacaccatgggcggttactcgaacagcatcgtggtcgccgagcacttcgtcgttcgcgttccggaaaagctcgacccggccgcagccgctccgattctttgcgcaggcatcaccacttattcgccactcaagcactacggcgtcaaggccggtgacaaggtcggtattctgggcatgggcggtctgggccacatgggcatcaagttcgccaaggcaatgggtgctgaagtcaccctgtttacccgctccgcagccaaggctcaggaagcacgtcgccagggcgccgaccatgtgatcgtttccaccgatgccgaacagatgaaggccgcggccgggcatttcgacttcctgctcgacaccattccggtgcaacacgacctgaacccctacctggaaacgctgcgctttgacggcgtgcatattctggtcggtctgatcgaacctatcgagccgcccgtccatgcagcccatctggtgatgagccgtcgcgtgttggccggttcgttgatcggcggcattgccgaaacccaggaagtgctggatttctgcgccgagaacggcatcacctgcgacatcgaaatgctcgatatccgcaacatcaacgaagcctacgagcgcatgctggccggtgacgtgaaataccgcttcgtgatcgacatggccacattgcaggcc

SEQ ID NO: 33684 - DNA, 879 bp, Pseudomonas syringae
atgagcgtcctgatcaataaagacaccaaggttatctgccagggtttcactggttcgcaaggtactttccactccgagcaagccattgcctacggcactaaaatggttggcggcgtgacgccaggcaagggtggcactacgcacctgaacctgccagtgttcaacactgtgaaagaagcggtagacaccactggcgctaccgccagcgttatctacgttccagctcctttctgcaaggattccatccttgaagcagcgttcggcggcatcaagctgatcgtctgcatcaccgaaggcatcccgaccatcgacatgctcgaagccaaggtcaagtgtgacgaactgggtgtgatcctgatcggtcctaactgcccaggcgtcatcactccgggcgagtgcaagatcggcatcatgccaggtcacattcacttgccaggcaaagtcggcatcgtgtcgcgctccggcaccctgacttacgaagctgtgaagcagaccactgacgccggtttcggtcagtccacctgcgtcggcatcggcggtgacccgatccctggctcgaacttcatcgacatcctgaaactgttccaggaagacccgcagaccgaggcgatcgtcatgatcggcgagatcggcggttcggctgaagaagaagcggctgcctacatcaaggcacacgtgaccaagccggttgtttcctacatcgctggtgtgactgctcctccgggcaagcgcatgggccatgccggtgcaatcatctcgggtggtaaaggtactgcagacgagaaattcgctgcactgcaggacgctggcgtaaaaaccgtgcgctccctggcagacatcggcaaggccttggccgagctgaccggttggccgaccaag

SEQ ID NO: 33685 - DNA, 1653 bp, Pseudomonas syringae
gtggaacgcgaatacatggaattcgacgtcgtcatcgtcggagccggcccttccgggctttctgccgcttgccgccttaaacagaaggccgctgaagccgggcaggaaatcagcgtctgcgtggtggaaaaaggctccgaagtcggcgcgcacattctgtccggtgccgtgttcgaaccgcgcgcactgaacgagttgtttccgaactggcaggaattgggcgcgccactcaatacgccggtcaagcgcgatgacatctacgtgctgcgcgacgccgaaaaagcccagaaaatccccgactttttcgtgccaaagaccatgcacaatcatggtaactacattatctcactgggcaatctgtgccgctggctcgcccagcaggctgaaaacctgggcgtggaaatctacccgggctttgcggcccaggaagcgttattcgacgaaaacggcgtggtgcgcggcatcgtcaccggtgatctcggcgtcgaccgcgaaggcaacccgaaagaaggcctgtacacccccggcatggaactgcgcgccaagtacacgctgttcgccgaaggctgccgtggccacatcggcaagcagttgctcaagcgcttcgacctcgacaacgaagccgacgtgcagcactacgccatcggcttgaaggaaatctgggaagtcgatccggccaaacacgaacaaggcctggtggtgcataccgcaggctggccactggatgatgccaatccgggcggctctttcctgtatcacctggaaaacaatcaggtggtggtcggcctgatcgtcgacttgtcctacaccaacccgtacctgtcaccgttcgacgaattccagcgctacaagcatcacccggtcatcaagcagtacctggaaggcggcaaacgcatcagctacggcgcacgcgccattgccaagggcggcctgaactcgcttccgaaaatggtcttccctggcggcgcgctgatcggttgcgacctcggcaccctgaacttcgccaagatcaagggcagccacactgccatgaagtccggcatgctggctgcagaatcggtagcggacgccctgttcgccggcaaggaaggcggcgacgtgttaaccgcctacgtcgatgccttcaaagccagctggctgcatgcggagctgttcgccagccgcaactttggcgtggcgatccacaagtacggcgcgatcaagggcggcgcattcaacttcatcgatcagaacatcttcggtggcaagctgccgtttaccctgcacgacactaagccggattacgcctgcctcaagctggcggcggactcaaagaaaatcgattaccccaaacccgacggcaagctcagtttcgacaaactcagctcggtattcctctccagcaccaaccatgaagaggaacaaccctgccacctgaagctgaccgatccgagcatcccgataagcaaaaacctgccgctgtacgacgaaccggcccagcgctactgcccggcaggcgtgtacgaagtcattaccagggaagatggcgagaaacgcttccagatcaacgcgcagaactgcgtgcactgcaagacctgcgacatcaaggacccttcgcagaacatcacttgggttgcaccggaaggctctggcggaccgacctacccgaatatg

SEQ ID NO: 33686 - DNA, 1710 bp, Pseudomonas syringae
atgcgcgctgccctgcagctcgcccagggcggtcacaagactgccgtggtcaccaaggtgttcccgacccgctcgcacaccgtttccgcacagggtggcatcacctgcgcaatcgcctctgccgatcctaacgatgactggcgctggcacatgtacgataccgtcaagggttccgactacatcggcgaccaggacgctatcgaatacatgtgttccgtaggcccggaagccgttttcgaactcgagcacatgggtctgccgttctctcgtaccgagcagggtcgcatctatcagcgtccgttcggtggtcagtccaaggacttcggcaagggtggtcaggctgcacgtacctgtgctgctgccgaccgtaccggtcacgcactgctgcataccctgtatcaggccaacctcaaggccggcaccgtattcctcaacgaatactacggtgtggatctggtcaagaatcaggatggcgcctttgtcggcatcatcgccatctgcattgaaaccggcgaaacctcttacatccgtgccaacgccaccgtgctggcaaccggcggtgcagggcgtatctactcgtccaccaccaacgccctgatcaataccggtgacggtatcggcatggcactgcgtgccggtgtcccggttcaggacatcgagatgtggcagttccacccgaccggcattgccggcgcaggtgtactggttaccgaaggctgccgtggtgaaggcggttacctgatcaacaagcacggcgagcgtttcatggagcgttatgctccgaacgccaaggaccttgccggtcgtgacgtggtcgcgcgttccatggtcaaggaaatcattgccggtaacggctgtggtccggatggcgaccatgtaatgctcaagctcgatcacctgggtgaagaagtgttgcacagccgcctgccaggcatcatggagctgtccaagacgtttgcccacgtagaccctgcaacagcgccgattccggtagttccaacctgccactacatgatgggcggcgttgccaccaacattcatggtcaggcgatcactcaggacgctgatggcgtcgatcacatcatcccgggtctgtttgcggtgggcgaagtggcttgcgtatcggtgcacggtgccaaccgtctgggcggcaactcgctgctcgacctggtggtgttcggtcgtgctgcgggtatccatctggagaaggcgctgagcgagggtatcgactacacccgcgcttccgagtccgacatcgatgctgctctcgcacgccttgccggcctgaacgagcgcaccaccggcgaagacgtcgccacgctgcgtaaagagctgcaaagctgcatgcagaactatttcggtgtgttccgtaccggcgaatacatgcagaagggtattgcccaactggctgacctgcgcgttcgtatcgccaacgtcaagatcaacgacaagagccaggctttcaacactgcccgtatcgaagcgcttgaactgcaaaacctgctggaagttgccgaagccacggcgatcgccgcagagcatcgtaaagagtcccgcggcgctcacgcccgtgaagacttcgaagatcgcgatgacgagaactggttgtgccacaccctgtatttcccgggtgacaagcgcgtgaccaagcgtgccgtgaacttctcaccgaagactgtcccgacgtttgaacccaagattcggacttat

SEQ ID NO: 33687 - DNA, 1425 bp, Pseudomonas syringae
atggccgggaaaacgctctacgacaagctctgggattcacatttggtcaaacagcgcgacgacgggtcggcgctgatctacattgaccgtcatatcatccacgaagtgacctcgccgcaagcgttcgaaggcctgcgccttgccagacgcaaaccgtggcggatcgattcgatcatcgccacacccgaccacaacgtgccgaccacgtcggaacgcaagggcgggatcgaggctatcgaagaccaggtgtcgcgcctgcaagtgcagactctggacgacaactgcgacgaatacggcatcaccgaattcaagatgaatgacccgcgtcagggcatcgtccacgtcatcggcccggagcagggcgcaaccctgccgggcatgagcgtggtctgcggcgactcgcacacctcgacccacggcgcattcggcgcgctggcccatggtatcggcacctccgaggtcgagcatgtgctggcgacccagtgcctggtggccaagaagatgaagaacatgctggtgtcggtcgaagggcaattgccgttcggcgtgactgccaaagacatcgtgctggctgttatcggcaagatcggcaccgcaggcggtaacggttacgccatcgagttcgctggcagcgcgattcgtgacctgtcgatcgaaggccgcatgaccatttgcaacatgtccattgaggccggtgcgcgggtcggcatggtcgccactgacgagaagaccatcgaatacgtcaaaggccgtccgtttgcaccgaagggcgctgaatgggaccttgccgtcgaggcctggcaggatctggtgtccgacgctgatgcggtgttcgacaccgtggtcaagctggatgccgcacagatcaagccacaggtcagttggggcacttcgccggaaatggtcctggccgtcgatcagaacgtgccggaccctgcgcaggagccggacctggtcaagcgtggctccattgagcgcgccttgaaatacatgggcctgaaagccaatcagccgatcaccgatatccagctggacagggtgttcatcggctcctgcaccaactcgcgcatcgaagatttgcgcgccgcggcggacgttgccaagggccgtaaggtggctgcaaccatcaagcaggccatcgtggtgccaggctcggggctgatcaaggcgcaggctgagaaagaagggctggacaaggtcttcattgacgccggttttgaatggcgcgagccgggctgttcgatgtgcctggccatgaacccggatcgcctcggctccggcgagcattgcgcgtcaacttccaaccgtaactttgaaggccgtcagggcgcaggtggtcgtacgcatctggtgagcccggcgatggctgctgctgcagcggttactggccgtttcatcgatgttcgcgaattgaggaatccagca

SEQ ID NO: 33688 - DNA, 651 bp, Pseudomonas syringae
atgagtttcttgagcgccttctcccatctggactgggcacaagtcctgcaactgacctggcagcacatcacgctggtcggcatcgcggtgaccctggccatcgtcgtcggtgtcccgctgggcgtgttgatgacccgctttccggcgctggccggcccgctgcaagccagcgccaccgtgctgctgaccgtgccgtccattgcgttgttcggcctgttgctgccgttctactcaaagttcggtcagggccttggcccgatgcctgccatcactgcagtgtttctctattcgctgctgccgatcatgcgtaatacctacctggccctgactggcgtcgagccgggcattcgtgaagccgccaaaggcattggcatgaccttcggccaacgcctgcgcatggttgaactgcccattgccgtgccggtcattctcgccggtgtgcgcaccgccgtggtgatgaacatcggtgtcatgaccatcgccgcgaccatcggtgccggtggcctgggtgtacttattcttgcttctatcagccgcagcgatatgtcgatgctgatcgtcggcgcggtcctggtcagtattctggccatcatcgccgacctgcttctgcaatggctgcaacgcacgctgactccaaaaggattactgaaa

SEQ ID NO: 33689 - DNA, 2241 bp, Pseudomonas syringae
atgggcgagcccggcactggccgcttttcgttcgtcaaacgctacctcaaggccgaaggcaagcgcatgcaggcgccttcggactgggtgtacgtcaataatttcgatgagccccgtgagcccaaagccctggaattgccgcccggcaccgcccatgagtttatggccgatatcggcggtttgatcgacaacctgctggtgaccttcccggcagtgttcgagcacccgtcctatcagcaaaagaaaagctcgatcgaccgtgcgttcaatcagcgctatgaccgcgcactggatgtgatcgagcgcctgtcgctggaaaaggacattgcgctgtatcgcgacaattccaacatcgcgttcacaccgatggccgatggcaaggcgctggacgaagccgagttctcgcagttgcccgaggccgaccgtgatcgttttcacgaagatatttcctcccttgaggaacgtcttaacgaagagctggccagcctgccgcagtggaaacgcgagtccaataaccagctgcgtcaactcaatgaagaaaccattactctgaccttgcagccgttgctggcgccgctttcggaaaaatacgccgaaaacgccgctgtctgcgcgtacctgcaagcgatgcaggtgtacctgctcaagacgctggtcgagcaactggtcgacgacgccaagaccgatgcccaggcgcgcaagttgctggaagagcagtacagcccgagcctggtggtcggaaacacccgtgacggcggcgcgccggtggtgttcgagcagcatcccacgtacgacaacctgttcgggcgcattgaatacagcaccgatcagggcgcgctgtacaccacctaccgccagttgcgccccggcgcgctgcaccgtgccaacggtggcttcctgattctggaagcggaaaaaatgctcagcgagccgtttgtctgggatgcactcaaacgtaccctgcaatcacgcaagctgaaaatggagtcgccgctgggtgaactgggccgtgtggcaaccgtgacgctgacgccgcaggtgatcccgtggaacgtcaagatcatcatcattggctcccgttcgctgtattacaccctgcaagacctcgatcctgactttcaggagatgttccgggtgctggtcgatttcgacgaagaaatcccgatggtcgacgagacgctggagcagttcgcgcaattgctgaaaacccgtacctctgaggagggcatggcgcccctgaccgccgatgcggtggcacgtctggcgacctacagtgcccgactggccgagcatcagggccgtttgtcggcgcgcatcggggacctgtttcaactggtcagcgaagccgactttatccgccaactggccaacgatgacaagaccgacgccgggcacatcgaacgtgcgctcaaggccaaggccacgcgcaccggaagggtttctgcgcggattctcgatgacatgatggccggcgtgatcctcatcgataccgacggcgcagcggtcggcaagtgcaacggcctgacggttctggaggtcggtgattcggcgtttggtgtgccggcgcgtatttccgcgacggtctatccgggtggcagcggcatcgtcgatatcgagcgtgaagtcaatctgggccagccgatccactccaagggcgtgatgatcctcaccggttacctgggtagccgttacgcccaagagttcccgctggcgatctccgccagtatcgcgcttgaacagtcctacggttacgtggacggcgacagtgcgtcgctgggcgaggcctgcacgttgatctcggcgctgtcgcgcacgccgctcaagcagtgttttgcgattaccggttccatcaaccagttcggtgaagtgcaggcggtgggcggggtcaacgagaagatcgaaggtttcttccgcctttgcgaagcgcgtggcctgacgggtgagcagggcgcaatcatcccgcatgccaacgtcactaccctgatgcttgatgaacgcgtggttcaagccgtgcgtgacgggcagttccacatctacgcagtgcgtcaggctgacgaggccttgagcctgctggtcggtgagcccgccggtgcgcctgacgagaacggcgagtttccgcaaggcagcgtcaatgcgcgcgtggtggagcgcttgcgtgatatcgccgaaatgctcagcgacgaagacctcaaggaagagctggaaaaggagcctgcgcaactgcaacccgagctgaaaatc

SEQ ID NO: 33690 - DNA, 567 bp, Pseudomonas syringae
atgatggctcaggtcggtttgcgccccgagcactaccagcgctatccgcacatgttttccggtggtcagcgtcagcgtatcgccctggcgcgggcgatgatgctgcagcccaaagtgctggtggcggacgagcctacatcggcactggacgtgtcgattcaggcccaggtgctgaacctgttcatggacctgcaacaggaattcaacaccgcctacgtgttcatctcccacaacctgtcggtggtgcgtcatgtcgccgacacggtattggtgatgtacctggggcgacctgcggaaatgggtcccaaggaagagatctacaaccgcccgttgcatccttacacccaggccctgctgtcggcgaccccgaccattcacccggacccgctcaaaccgaagatcaagatcgtcggcgagctgcccaacccactcaacccgccaagcggctgcgccttccacaagcgctgcccctacgcgaccgagcgttgcgcaacagacgtcccggaactgcgtctggtcgataaccgccaggtggcatgccactacgccgagcagtttgtggcggct

SEQ ID NO: 33691 - DNA, 1003 bp, Pseudomonas syringae
aagattgccattgtcaacgacatgcctatggccatcgaggcgttacgtcgtgcgctggctttcgagcctgcacaccaggttcatctgggtggcggccaatggtgccgacgctgtgcagcgcagcatcgagcagacgccggatctgatcctgatggacttgatcatgcccgtgatggacggtgtagaggcgacacggcgcatcatggccgagacgccatgcgctattgtcattgtgaccgtcgaccgcgagcagaacatgcgccgcgtgttcgaagccatggggcacggcgcgctggatgtggtagacacgccggccatcggcggccccaaccccagagaagccgcagcgccgttgctgcgcaagatacttaatatcgattggctcatgggccagcgtgtcggccgtgagcgcgtggtgaccacgtccaggtcagaggtctcaagacgcgacaggctggtcgccattggttcatcggcgggtggcccggcggcgctggagatcctgctcaaggggcttccggaaaatttcccggcagccattgtgctggtgcagcatgtggatcaggtgtttgctgcaggcatggccgagtggctgtgctcagcgtcgggcatgccggtacgcttggcaaaagagggcgaaacgccgcaagtcggtgttgtactgctggccgggaccaaccatcatattcgcttgttgaaggacggcacgctggcgtacaccgcagagccggtcaacgaagtttacaggccctcaatcgatgtgtttttcgagagcgtgactcgttattggactggtgaggctgtgggcgttttattgactggcatggggcgcgatggcgcgcaggggctcaaggccatgcgtgagcggggctttctgaccatcgctcaggatcaggccagttctgcggtgtatggcatgcccaaggctgccgccgccattgatgcggccgtcgaaatccgcccgctgcacacgattgcgccgcgcttgatggaggtatttact

SEQ ID NO: 33692 - DNA, 546 bp, Pseudomonas syringae
atgctgcgcgctgcggtcaaggccggcactgagctgggcctgaaagccaaaagcgtcatggacgcaggcaatctggtttccgatgacctgatcatcggcctgatcaaggaccgcctggccgagcccgattgcgcgaacggcgtactgttcgacggcttcccgcgcaccattcctcaggcagaagccctgttgaaggccggtctggaaatcgaccacgtgctcgaaatcgccgtggatgacgaagaaatcgtcaagcgcatgtcgggccgtcgtgttcacgaaggttccggccgcatctatcacacgatcttcaacccgccgaaggtcgaaggtgtcgatgacgtgactggcgaatcgctggtgcagcgcaaggacgatgtcgaagaaaccgtgcgcctgcgcctgaaggtctatcacgaccagaccaagccgctggttgagttctacagcaagcttgaagcgcagaatggcaagcccaagtgcagccacattccaggcgttggttcggttgaagagattacggccaaggtgctggtagcgctgagc

SEQ ID NO: 33693 - DNA, 1707 bp, Pseudomonas syringae
atgcgcattgaacctcgtccgttgcccgacactttgccgtttcttggcgacctgccgcccttgctcacacgtctgtacgcggccagaggtgtggcatgcgaggccgagctggacaaaagcctggcgcgactgatcccctatcagcagctcaaaggtatagatgcagctgtagacctgctggtgaccgccctgcgtgaaggtcagcgcatgctgatcgtctgcgacttcgatgccgacggcgcgaccgcctgtacggtcggagtgctgggcctgcgtttgctgggtgcggcgcacgttgattatctggtgcccaaccgctttgaatacggctacggcctgaccccggaaatcgtcgaagtagctctgcagcgcgagccgcagctgctgatcaccgtggataacggcatttcaagtgtcgagggcgtggcggcggccaaggcggcaggcttgcaagtgctggtcaccgaccaccacttgcccggtcacgagcttccggcggcagacgccatcgtcaacccaaatcagccagggtgcacctttcccagtaaatcgctggcgggcgtgggggtgatcttttacgtgttgatggccctgcgagcacgcttgcgtgacaccggctggttcgatcagcgtgcccagcccaatctgggcgaactgctcgatctggtggcgctgggcagcgtcgctgacgtcgtgccgctggacgccaataaccgcattctggtgcaccaggggctgatgcgtatccgtgcgggccgcgcccgccccgggctgcgcgcgattctggaagtcgcacggcgtgagcctgcgcgcatcacttcaacggacctggggttcattctgggcccgcgcctgaacgcggcggggcgtctggatgacatgagcctgggcatcgaatgcctgctctgcgacgatccgacacgggcgcgggaaatggccgtgcaactggacgaactgaatcaggaccgcaagtccatcgagcagggcatgcagcgcgaagcacttgcgcagctcaaggacctgccgatggagtccatgccgttcgggctgtgcctgttcgatgcggagtggcatcagggcgtcatcggtattctcgcctcgcggctcaaggagcgttaccaccggcccaccatcgcgtttgccagtgccggggagggcgtgctcaagggctcggcacgctcggtgccgggttttcacatccgtgacgcgctggacgccgtggccgcgggtcaccctcacttgatcagcaagtttggcgggcacgccatggcggcaggcctctcgctgcccgaagataactttccggcgtttgccgaggcgttcgacctggaagtgcgccgccagctggatgaacaggaccttaccgggcgcctgctgtctgacggctcgctggcggtcgaagagtttcacctggagctggcccgcgccctgcgcaatgcaggcccttggggtcagcatttccctgagccgctgtttcatggtgtatttcagctggtcgagcaacgcgtcgtgggcgaacgacatttgaagatggtgctcaagaccgaatgtggcagcgtgaggctggacggtatcgcgttcagcgtcgaccgcgacatctggcccaaccccaatattcgctgggtcgagctggcttataaactcgacctcaacgagtttcgcggcaacgaaaccgtgcaattgatggtggtgcacatcgcgccacgc

SEQ ID NO: 33694 - DNA, 636 bp, Pseudomonas syringae
ttgcgcgtcatcgtggctgacgaccaccctattttcctgattggcctgcgcgcggtactggaacaggacgacctggcgcacgtggttgccgaagccggcaatccggacgcactgctgcaggcactcgcaagcctcgcctgcgatgtgctggtgactgacttcatgatgcccgtcgagcgtcagaatgacggcctgcgcctgctgcagcgtgtgcgccgggattttccggtactgccggtgattgtcgtgacgacgttgagcaatgccgggctttttcagtccatgctcgacctcggtgtgcgtggcctgttgagcaaggccagcctggccggagaactgcctgctgcggtcaggggcgcgttgcgcggggaagtttttgtcgccgattccgtgcgtcgggttttgcgcgaggcacagcaatacgggcctgatgcgctgctggcggccgaacgcttgtccccaagagagctggaagtgttacgcctgttctcggcaggccatacggttggccagatcgcggcgcaactcaatcgcagcaaacagactgtcagcgcgcagaaagtcggtgccatgcgcaagctcggcctggccaacgacgccgcgctgtttatctatttgcaggaaagcggcatgtcc

SEQ ID NO: 33695 - DNA, 1500 bp, Pseudomonas syringae
atgagcgaccaacaactcgacccgcaagccctgcaacaggaagaaaacaccctgatcgccctgcgcaaggaaaagcttgctgccggccgtgccaagggtcaggccttccccaacgacttccgccgcgacagctactgcaatgacctgcagaaacagtacgtcgacaagaccaaggaagaactggcagaggcagcgatcccggtcaaggttgccggtcgcatcatgcttaaccgtggttcgttcatggtcatccaggacatgaccgggcgcatccaggtctatgtcaatcgcaaaaccctgcctgaagaaaccctggccgaggtgaaaacctgggacctgggcgacatcatcgcggccgaaggtacgctggcacgctccggcaagggcgacctgtacgtcgaaatgaccagcgtgcgcctgctgaccaagtcgctgcgcccgctgcccgacaagcaccacggcctgaccgataccgagcagcgctaccgccagcgttacgttgacctgatcgtcaacgaagacgtgcgcgaaaccttccgtgtgcgctcgcaggtcatcgctcacatccgcagcttcctgatgcagcgtgacttccttgaagttgaaacgccgatgttgcagaccattcctggcggtgcggcagccaagccgtttgaaacccaccacaatgcactggacctggaaatgttcctgcgtattgcaccggagctgtacctcaagcgtctggtggtcggcggtttcgagaaagtcttcgagatcaaccgcaacttccgtaacgaaggtgtttcgacccggcataaccccgagttcaccatgctcgagttctaccaggcctacgctgactacgaagacaacatggacctcaccgaagaactgttccgcgagctggcgcagctggtgctgggcagcaccgacgtgccttacggcgacaaggtgttccacttcggcgaaccgttcgtgcgcctgtcggtgttcgattcgatcctcaagtacaaccctgagctgaccgctgccgatctgcaggatgtggacaaagcgcgcgccatcgccaagaaggcgggtgcgaaagtgctcggcttcgaaggattgggcaaactgcaggtgatgattttcgaagaactggtcgagcacaagctggaacagccccacttcatcacccagtacccgttcgaagtgtcgccgctggcccgtcgcaacgatgacaacccgaacgtcaccgaccgtttcgagctgttcatcggcggccgcgagatcgccaacgcctactccgagctcaatgacgctgaagatcaggccgaacgcttccaggcccaggtggccgacaaggacgccggtgacgacgaagccatgcactacgacgccgactttgttcgtgcgctggaatacggcatgccgcccacggcgggtgaggggatcggtatcgaccggttggtgatgctgctcaccgactcgccgtcgatccgggacgtgatcctgttcccgcacatgcgcccccaggcg

SEQ ID NO: 33696 - DNA, 528 bp, Pseudomonas syringae
atgggcagcaacctgaaagtatccggcctgcgcgagcaatggctgcgcggcgacgtagtggtcatgattcgtcacgccgaacgctgcgaccgctcgacaaatccctgcatggccgacgctgacggcatcacctccaacggccgggaggcggcgctggcggtgggcgcaggcctgcagaagatgggcatgcagcacgttcaaatgatcgccagcccgaaaacccgcacgcaacagacggcgcaattgctggcagggcatgcggtaaccgggcaggaatggatcaacgactgcgatggcgacttcatgaaggtcgtccaggcgcacaaggtcagcggtgaaaacctggtgctggtgacgcacagcggttgcatcgaccagttcgaacgcaagctcggcgtaccgggtggcgagcgctccagtgaatatgcccaggcatttttcgtgcagatggacggcagtcatcggccgaaggttctaggctccctgaacgccggacaatgggtcaacctcagccgcgagcaattcaat

SEQ ID NO: 33697 - DNA, 777 bp, Pseudomonas syringae
atgaacaacctttccctggccaacgaaaaaaccaagatccaagtgcgcggtctggagtttttctacaacaaccagaagtcgttgaagtccatcgacatgaccattcccgagaagcgcatcactgcgatcatcggcccgtcgggttgcggtaaatcgaccctgctgcgcgtattcaaccgtatctacgcgatgtacccgaaacaggaagcgcgcggcgaagtgctgctcaatggcgagaacatcctggcgccgggctattcgatgaaccgcctgcgcagtcatgtgggcatggtgttccagaagcctgtgccgttcccgatgtcgatctacgacaacatttcctacgccatcaagcaccacgaaaaactgtcgcgccgcgaaatggaagatcgcgtcgaacaagctctgcgtggtgccgcattgtgggatgaggtcaaggacaagcttaaacagagcgcgaccggtctgtccggcggtcagcagcagcgtctgtgtatcgcccgtaccatcgcgctgcgcccgcaggtgttgctgctggatgagccgacttccgcgctcgatccgatttcgaccggtcgtatcgaacaactgatcaccgagctcaaagagcagttcaccgtgatcatcgtgacccacaacatgcaacaggcggcgcgctgctcggactacacggcgttcatgttcatgggcgaactgatcgagcatggcgacactgacaccatcttcaccaaaccctccaagacccagaccgaagattacatcaccggtcgtttcggc

SEQ ID NO: 33698 - DNA, 870 bp, Pseudomonas syringae
atgctggtgcttgctttgctgggttgtatcgccctgtcgaccctgtggggcggcagtctggcatttcagaccttcgggtttgagtttctgaccagcaccgagtgggacgtgaacgccggcaagtttggcgcgctggttccgatctacggtaccctggtgacctcttttctggctttgctgatcgccgttccggtgagtttcggcattgcgatctttctgaccgaagtggctccgccttggctgcggatgccgattgcctctgcaatcgaattgctggcagggataccttcgatcatctacggcatgtgggggctgttcgtgttcggcccgttcatggctgagcacttgtcaccctggatcaccgaaaacctcggcgcactgccgctgatcggcccgatgttccaaggcccgccattgggcatcggcatgctgaccgccggtatcgtactggcgatcatgattaccccgttcattacctcggtcatgcaggaagttttccgcaccgtgcccgttgcgctcaaggagtctgcttacgcactgggtggcaccacctgggaagttgtctgggacatcgtgctgccttacacccgttcggcagtggtcggtggcattttcctcggtttgggacgcgcgctgggcgaaaccatggcagtgaccttcgtactgggtaacgcccaccagttctctgcatcgctgatgatgccgagcagttccattgcctcggtgatcgccaacgagttcaacgaggcctacaccgacttgcaccgttcggcattgattgcactgggcttcctgctgtttatcgtcaccttcatcgtgctggcccttgcacgtctgatgctgtcgcgcctttcgcgtaaggaggggtta

SEQ ID NO: 33699 - DNA, 2004 bp, Pseudomonas syringae
atgtcgttacccaagcaccacctggaattgctcagccctgcccgggatgtgaccatcgcccgcgaagccatcctgcatggcgccgacgcggtatacatcggcgggccgagctttggtgcgcgacacaacgcctgcaacgaggtcagcgatatcgccgaactggtgaaatttgcccatcgctaccacgcgcgaatcttcaccacgatcaacaccatcctgcatgacgacgagctggaaccggcgcgcaagctgatccatcagctctacgatgcaggtgtcgatgcgctgatcgtccaagacctcggggtcatggagctggacattccgcccatcgagttgcacgccagcacgcagaccgatattcgcaccctgggccgggcgaagtttcttgatcaggccggtttctcgcaactggtgctggcccgcgagctgaacctgcaggaaattcgtgacatcgcccgtgaaaccgacgcggccatcgagttcttcatccacggcgcactgtgtgtggcgttctccgggcagtgcaacatttcccatgcgcaaaatggccgcagcgccaaccgtggcgactgctcgcaagcctgccgcctgccgtacacgctcaaggatgatcagggccgcgtcgtcgctttcgaaaaacacctgctgtcgatgaaagacaacaaccagagcgccaacctgggcgatctggtggacgctggcgtgcgctcgttcaagatcgaaggtcgctataaagacgcaggctacgtcaaaaacattaccgcctattaccgtcagcgtctggacgagattcttgaagaccgcccggacctggcgcgcgcctccagcggccgcaccgcgcattttttcgtgcccgacccggagaagacctttcaccgtggcagcaccgattactttgtcagcgaccgcaagatcgacatcggcgcattcgatacgccgacgtttaccggcttggcagtcggcaccgtcgagaaacttggcaagcgtgacctgatcgctgtcacccatgagccgctgtccaatggcgacggcctcaatgtgcagatcaagcgtgaagtggtgggcttccgggccaatatctgcgagctcaaaggcgagtttgaagaagaaggcgagaagcgctggcgctaccgagtagagcccaacgagatgccggcggccctctcccgcctgcgccccaaccatccgctgaaccgtaacctggatcacaactggcagcaggcgttgctcaagacttccgccgagcgccgcatcggcattcagtggcaggttgcgttgcgtgaagatcacttgagccttaacgcgaccagtgaagaaggcgtgagcgtgatggtcggcctggacggcccgttcggtgcagccaacaagcccgagcaggcgctggatcagttgcgtgatctgctcatccagctaggcaccacgatctaccatgctcaggacgtggaactggatgcgcctcaagcgtttttcgtgcccaattcgcaactcaaggcactgcgccgcgatgccatcgaggcgctgaccgaggcgcgcatacaggctcacccgcgcggtggacgcaaggcagaaaccaccccgccaccggtttaccctgattcgcacctgtcgtttctggccaacgtttacaaccagaaagctcgcgatttctaccaccgccacggcgtgcagttgatcgatgcggcttacgaagcgcatgaggaaaccggcgaggtgccggtgatgatcaccaagcattgtctgcgcttctcgttcaacctgtgcccgaaacaggcaaaaggcgtgaccggcgtgcgcaccaaggtcgcgcccatgcagttggtgcagggtgacgaagtgctgaccctgaagttcgactgcaagccgtgtgaaatgcacgtgatcggcaagatgaagggccacatcctcgacctgccattgcccggcagcgctgcggccaaatcggtggtcggccacatcaccccggaagacctgctcaagactgcccgccagcgtcatccgcgc

SEQ ID NO: 33700 - DNA, 2873 bp, Pseudomonas syringae
ccttggccgggactcgctatgaacaccacagtcttcccccgcactgatgtaaaaaccctgatcgtcgtcggtaatggcatggtcggtcatcattgcgtcgagcagttgatcgaaggcggcgcgcttgagcattatcgtattcacgttttcggcgaggagtctcagcgtgcctatgatcgtgtgcacctgtccgagtatttcaccgggcgcgatgccgaatcgctggccatgagtgaaatggccttgtacgagcaagccggcctcaccttgcacctgggcgtaccggtgctggagatcgaccgtggccgtcacgagatcattaccgcagaaggctgtttctgttacgacaaactgatcctggccaccggttcctatccgttcgtgccgcctatcgaaggcgcgcagggtaattcccggctggtctaccgcaccctcgaagacctggacaccattcgttacgccgcctctaaagcaaaacgcggcgtggtggttggtggtggcttgctggggctggaggcggccaatgcgttgaagtcactcggccttgaagcccatgtcgtcgaatttgccccgcgcctgatgccggtgcagctggacgagcacggcggtgccgcgctgaaagcgcgcatcgaagcgttgggggtcggtgtgcatctgtcccgcgccacgcaatcgatcagcgacggcaagcaatatcgctatcggatgaattttgccaacgacgaatttctggaaaccgatctgatcgtgttttccgccggtattcgtccgcaggattcgctggcccggcagtgcgcgctggaactcggcccgcgcggcggtgttgccatcgacgaacactgccgcaccagcgacgccgatatctatgcaattggcgaatgcgcggcctggaacggcagtgtgttcggtctggttgcccccggctatcagatggcccgtggcgtggcagcgcagttgtgcggaaaagaaaccgacgcgttcttcggcgccgacatgtccaccaagctcaaactgctgggcgtagacgtgggctctatcggtgatgcgcacggtgcgctggccggggccgtaagctatcgctttatcgacgaggccagcggcagttacaggcgcctggtggtgtcggccgacggcaagcaggtgctcggcgctgtgctggtcggcgacaacagttattacgacacactgctgcagtacgcgcagaacggcatcaccctgccagccgacccgtccagcctgatcctgccgcgtggcgaaggtgcgccgacgctgggcgccgatgccctgcccgccacagcgaccatctgttcctgtcataacgtcagcaaaggctcgatctgttcagccatcgacaatggctgcaccgacctggccgggatcaaggcctgcaccaaggccgccaccggttgcggcggctgtacggcgctgctcaagcaggtgttcgaacatgaactgattgcccgtggcgtggcggtggacaagagcctctgcgaacacttcgcctacacccgccaggagttgtactcgatcgtgcgcgtcgaaggcatcgaaagcttcgatgaactgctggatcggcacggcaagggcgcgcatggctgcgacatctgcaagcctgcggtcggctcgattctcgcctcatgctggaaccgtccgatcaccgagccttcgctggtgccattgcaggacaccaacgacacgttcatggccaacatgcagaaaaacggcacttactcggtcgtgccgcgcattccaggtggcgaaatcacccccgacgggttgatcgcgattggcgcggtggccaagaaatacgacctgtacaccaagatcaccggcggccagcgtatcgatctgtttggcgcgcaattgcacgagttgccagacatctggagcgagttgatcgccgccggtttcgagaccgggcatgcctacggtaaatcgacccgcacggtgaagtcctgcgtcggcagcacctggtgccgctatggcgtgcaggacagcgtcgccatggcgttacgcatcgaagatcgttacaagggcctgcgttcgccacacaaactcaagttcgcagtgtccggctgcacccgcgaatgcgccgaagcacagagcaaggacgttggtgtgatcgccaccgagaatggctggaacctgtacctgtgcggcaacggcggcatgcgcccgcgccacgccgagctgttcgccactgatctggatgacgagaccctgatccgttacatcgaccgcttcctgatgctctacatccgcaccgccgacaagctgcagcgcacctcggtgtggcgaaaaacactggaaggtggcctggactacctcaaagcggtgattctcgatgacagcctgggcctggcagccgagcttgaatcgcagatgcaactggtggtggatcgctacgagtgcgagtgggccaatgccctcaaggacccggaaaaactcaagcgcttccgcaccttcgtcaacgacgggcgcagcgaccccgacgtgcacttcgtcaaggaacgcgctcagcgtcgcccggcaaaacctgaagaactggcgcttattccgttgttcaaggaggtggtgtaatgaattcgcctgaaacaacgtggactgaagaaaacagctcttgcgcgctgcatctgcactggtatgccctgtgtgagcgcaaggacctggtcgccaattccggcgtggtggcctggctggacgggaaacagttagcgctgttctatctacctgacacagcgcaaggagagcaattgtttgccatcgacaaccgcgacccgaaatccggtgcgaatgtgatcggacgtgggctgactggccagattgcgggtgagctggttattgcctcgccgctgtacaagcagcattttcgc

SEQ ID NO: 33701 - DNA, 1409 bp, Pseudomonas syringae
atgaaacgctacgaaaaattcgccgctgacatctcggaaatgattcgtagcggcgtattgcccgccggtgaaaaagtcccgtctgtcagggtcgccagtcgcacttattcggtcagccccgccaccgtcttcaaggcgtattacctcttggaagacaaagggctgatccaggcccgtgcgcgctctggctactacgtgcgcgagcatgccgccaatgcgctgaccgagcctgagctggtccggcacagcagcgagggcacggaacttggggtcagcgacctgatcttttcggtcctcggttcactcaagaaccccgacaccgttccgtttggctcggcatttcccagcccgcatctgtacccactgccgagcctggccaaatcaatggcctcagcggtaaggacgatgacgcccgcagacattgtcagtgacatgaccaccggcaattccgagctgcgtcggcaaatagccctgcgttacatgatcggcggcacacgcttgcccgcccacgaactggtgatcaccaacggtgcgatggaagcactcaacctgtgcctgcaatgcgtcaccgagcctggcgatctggtcgccatcgaagccctgcgttctacgcctgccttcaagtgctggagcgactcaagctcaaagcggtcgaaatccccgtgcacccgcgtgacggcgtagacctggactccttgcaggacagcctgcaacgcctgccgatcaaagcctgctggttcatgagcagctttcagaacccgctcggcgcgagcatgacggaagagaacaaagccaggctttacgacgtgctggaacagcaacagatcccgctgatcgaagacgatgtgtacgccgaactgtactacggcgccaaagcaccccagccgatcaaaagcctggatcgcagcgggctggtgatgcattgcagctcgttctccaaaaccctggcacccggctatcgcgttggctgggtggccggtggacgctttaccgagcagatcgatcgcctgaaactcatgaccacgatttcaccctctgtccccgcccaggcagcgattgccgactacctcaaacacggcggctatgaccgacacttgcgcaaactgcgcgacaccctcgaacttcaacaaggtgcaatgctggcggctgccgcacgttatttcccgaccggaacgcgcgtgaccaaaccggtgggcggttattttttatggttcgaattccccgagcaggtggattcgctgcaactgttccagctagcgctggcccagggcatcagcctggcacccggcccgatcttctcggcctcgcaacgcttcaagcactgcgcacgcctgaactacggcacgccgtgggatgaacgcagcgagcaagcgatggccatgctggggcgcatcattgcgtcgttttga

SEQ ID NO: 33702 - DNA, 564 bp, Pseudomonas syringae
gtgccgatgaatatccctaatctgatcaccgtactacgcgttttactgattccgatcttcattttgctgttctatatgccttatcactggagctacatggcagccagtgcagtctttgcgttcgctgcggcgaccgactggctcgacgggtatttggctcgccgtcttgagcaaagcacgccattcggtgcgtttcttgatccggtagcagacaaactgatggtggccgtggccctggtgctgctggttcaggcgcacgccaacctgtggctgaccctgccggcagcggtgatcatcggccgtgaaatcgtgatttccgcgctccgcgaatggatggcggaaataggcgcgcgtgcacaagtcgccgtttccaacatgggcaaatggaaaaccgccgcgcaaatgctggcgctggtcattctgctcggcaacccgccggcagtcaccttctgggtgattttcggttacgcattgctgctcgtcgcagcggggctgaccctgtggtcgatggtgcaatacctcagagccgcatggccgcatctcaagaccacagcagaaaaaaaa

SEQ ID NO: 33703 - DNA, 1860 bp, Pseudomonas syringae
ttgctcgaaaccgctccgcccgatgcctacgatgcgcgctacaaacgctgggtgctggaagacctgcccatcgtgcccgagaagtggaagatgctggtcaaacccagaacggccagccagttcaaggccgtcaagcggttgctgggcgaagcgaacgagctggtaatcgccaccgacgctgaccgtgaaggcgaaatgatcgcccgcgaactggtcgagcattgccgctatcgcggaccgattcagcgtttgtggctgtcggcgctggatgacgcctccattcgcaaggcgctggcagcgctcaagcccggcgccgacaccttcagcctgtatcactcggcattgggccggtcccgcgcagactggctgatcggcatgaacatgagtcgtctgttcacgttgctgggtcgccaatcgggctaccagggcgtattgccagtcggccgcgtgcaaaccccgaccctgcgcctggtagtggaccgggatcgcagcatcgcagatttcgtgcccgcgcccttctgggccatcgacgtcaaactgctgcacgaaaatcaggcgttcatcgctcaatggcgcgctccgtcggacgcctgtgacgatcaggatcgctgcctgaatcagccacttgcgcaacaggctgccgacgccatgcgccatgctgccagcgcacggttggtcaagctgcgcaccgagcggatgcgcgaagccgcacccttgcctttcgacctaggcaccctgcaggaaatatgctcgaaaaaactcggcctcggcgcgcaggaaacccttgatatcgcccagtcgctgtatgaaacccacaaggtcatcacgtatccgcgcagcgattgcggctacctgccgaacagtcagcatggcgaagcggcgggtatcatcactgcgctgggcaagaccgatcccgcgctggccggcctgctgccgcacctagacccgcaacgccgctcccgcgcctggaacgacgcaaaagtcactgctcaccacggcattatccccaccgcggcggtgcgcggcgtcgagcgcctgatcggcaagccgcgcgcggtctacaccctgatcagggcgcgctatctggcgcagtttctgcccaaccacgaatatgaccgcacccaggctgacttcgactgcgcaggccaggcgctgcgagcggtgggcaaacagatcgtcgagcccggctggaaacgcgccatgcccgaagccctggccccggccaaaggtcgcgaagcgcctgcgccgcagcccttgcctgcgttgtttcagggctgcgaatgcgccgtcgccgacgtcatcctcaaagatctctggacccagccacccaagcccttcaccgaaggcgacctgatcaaggccatgaaaaacgtcgccaagctggtagaagacccgctgctcaagcaaaaactcaaggacaccaccggcatcggcaccgaagccactcgagcggggatcattcaggggctgctggaccgcggctatctgaccaaacaaggcaaggcgttgtgcgccacgccggcagccttcagcctgatcgacgccgtcccgcgcgctattgccgaccccggcaccacggccatatgggagcaggcactggacatggtccagagcggcgaaatgagccttgaagagttcgtcgccaagcaggcagcgtggatgagcaagcaggtcagccgctgtgtcggcatgcgcatgaccatcagcggcccggccagcccggcaggcgttgcgccgccgtggaagaaaaaacgcaagaccgccaagcgcggggctgcgacctcgaccaaggcagcgaacgctgccacaggcaccgcagcgaaaaagcctcggcgcgccgccaaaccgacggtcaagggc

SEQ ID NO: 33704 - DNA, 819 bp, Pseudomonas syringae
atgggcaatgtccagaccgcagccagcgcacatgatgtgctctggcgccagacgccaggtggcgacctggtcgatctggggcgtcctttccgtgggcctttggcgttgtcgaggttgcacagcacccccaaaccgatcctcgggcggcgcgaagccattctgctcggtgcgctggcgctggtgttccacggcgcggtcgtttactggctgagccagaacccgacgcctgcactgccggtcgtgccgccggaaatcccgccgatgaccatcgagttctctcagcccgcgccacctgtggttgaaactccgccgccaccgccagagccggttgtacagccggtggtcgagccgccgcctcctgtcgaggacgagttggccgtcaagccgccaccgcccaaaccgattcccaaacccaagccgcagccgcctaagccggtggtcaagcctgtcgccaagccggtagagcaaccaccggcgccacctgtgcctgcgccacccgttgctgcgcccgcgccacctgcgccacctgcgccgaaaccggtgaccccggcctcggccagcgcgggctacctgcgcaatccggcaccggaatatccgtcgctggccatgcgtcgcggctgggaaggcaccgtgctgttgcgcgtccatgtactggccagcggcaagcccggcgagattcagatacagaaaagcagtggccgcgatcaactggatgacgcagcgctggccgcggtgaaacgctggagtttcgtacccgccaaacagggcgacgtcgcccaggatggctgggtcagcgtgccgattgatttcaagatcaaa

SEQ ID NO: 33705 - DNA, 1173 bp, Pseudomonas syringae
ttgggtccttacctggcgatctacctgctggcggtccatcaatgggacccggccagtatcggcgtggtcatgaccatcgcgggtatcgccgggctgctgacccagacgcccgcaggtgctctgatcgaccgcacaccctacaagcgcgggatcatcggtgtggcggcgctgctggtgacgttgagctgtctgattctgcctttcacctcttcatttaccctggttgccatcacccaggcgctgagcagcgtcgccgcttcggtgttcgcaccagccattgctgcgatttcgctgggcattaccggaccgaaagcgttcacccgacgcaccgggcgcaatgaaaccttcaatcatgcgggcaacgcctgtgcggccctgctggcaggcggcttcgcttacctgttcggcccgattgcggtgttctatctgatggccgcaatggccttggcgagcgttgtcgcgatcagttttgtgtctgccgatgccattgatcatgacgtggccagaggctttgatgcatcgcatacctcacatggcagtcagccttccggtctgtccgcattactgaacaacagaaccctgctgctgttcgggatttgctgcgcactctttcatctggccaacgcagcgatgctgccactggtgagtcagaagctttcgcaaatcaacatgcagatggcgactccgctgacctcggcctgcatcgtcgcggcgcaactggtgatggtgccggcggcgctgctggtgggtatgaaggccgatgtctggggacgcaaaccgctgctgctggccggtttcctgattcttccgatccgcggcgtgctgtatacgctgtccgatgatccgtactggctggtggccgtgcagatgctcgacggcatcggcgcgggcctgtttggcgcactgttcccgttgatggtcaaagacctgactcagggcagcggccgtttcaatgtgagccttggggcgctgtcgaccctgtttggcctgggcgcggcgctgagcaacagcctggccggtttcgtggtgcatgcggccgggtacagcgcagcatttctgacccttgcggcggtggcggcagtggcgttctgtttgctgctggtggcggtgccggagacgctttcgcggtcggatcatgcgcctgagctcaagccggatcatgccgtgaatacg

SEQ ID NO: 33706 - DNA, 2319 bp, Pseudomonas syringae
atgatgctccgccccccctgcgccctgcatcttttgcccgttgccataaagtgcctggcacttgttcctgcgctattgatcagcaatcaagtgtttgccgctactgtcccggtaaaagacgaggtgatggacatcgatcaatccagccccgtcaataattacgtgttgtccagcgacgcaacgctgaatgtgaatggcggaagccagcacggcagggttgactctacgggctccatgctgaatatctcggccgggtcggcccttgtggctgccacgttgcgtggcggttccgagctcaccatgaatggcgctgcgatcagcaatggccttagcatcactaacagtctcgggactgtttccaacagcaccatcgccaatgccagcggtatcggtctgagcgtcaatcgattacgggacctgacaaccggctccagcgtgaacctgaccaacagctccagcagcggcgcattggcgggtacagtggtcacgcatttcagtcagctcggtctgacgggctcgcaattggcaggcaccggcgtcgacggggtaggtttgcgccttaatgccggtgcagcgcaggccagtgccagcagtatcgtgggcacggtgaatggcgttgcgatcagctccgaggaagtctacacagaggcgtcactgaagctggacagcacgcaggtggtcgggcagacgggggccgctatccggattgccccattgatatcaaggttgccaggctccgttgtggcgttagatgtcagtaatggttccagcctgacgggtggcaacggcaatatgctggaagtcaccggcggctcctcggccgtgatgaatgtgtcggcaagcagcctgagtggcaacgtgcaggtcgagtccgcgagcgccgtcacactcaatctcgacaacagcagcatgacgggggatgtacttgccgagtcgggtgcgctcgccgatgtactgctcgacaacaactcagtgctgaccgggcacctggaaaacacccgcagcgtcgccatcaacaatggcgcgcagtgggccatgatcggcaacggcaaccttgctgagttgaccctgaacggtggctcggtccggtttggcgacgctgccggtttttacacactgtcggtcgccaatctgtccggcaatggcacgttcatcatggatgtggattttgccgcgggtcgcacagactttctcgatatcaccggcagtgcgaccggcagtcactcgctgctgatcggcagcaccggcactgaaccgtctgccgacaccagcctgcatgtggtgcgcgctgccgccggcgatgcggatttttccttggttggcggggcggtcgacctcggtgcctggtcctacgatctggtcaagcagggtgccaatgactggtaccttgacgcgcagacccgcaaggtcagccctgctgccgccactgtagtcgcgttgttcaatacggcacccaccgtatggtatggcgagctgacctcactgcgcacgcgcatgggcgaattgcgtcataacggtgggcagtcgggcgcgtggatgcgcacctacggcaacaagttcaacgtctccgatgcgtcaggtttcggctatcagcaaactcagcagggcttttcgctgggcgcggacggcaaagtcccgatgggtgacgggcaatggctggcgggtgtgatggcagggcaaagcagttcagacctgagtctggaccgtggtgccagtggcaaagtcgacagctactacgtcggtgcctacagcacatggctggacagcgatacgggctactacttcgacggcgtgctcaagttcaaccgtttcaataacaaagcccgcgtcaatctgagcgatggcacccgtacaaaaggcgattacagcaactcgggtgtcggtgcgtcgctggagttcggacgccatatcaagctggacaatggttactttgtcgagccctacagccagttggccggcgtggtcgtcgaaggcaaggattatgagctggacaacggcatgcgtgccgaaaacgacctgacgcgttcgctggtgggcaaactcggtgcgacgaccgggcgcaacttcgatcttgggcaaggcaggacggtccagccttatgtgcgtacggcctgggttcacgagtttgcaaaaaacaacgaggttcaggtgaacgacaacgtcttcaacaacgacttgtcgggttcgcgtggcgagttgggcattggtatagccgcctccctgtcggagcgctttcaggtgcatgccgatttcgagcacagcaatggcgataaagtcgagcaaccctggggtgccagcgtaggtattcgttacagctgg

SEQ ID NO: 33707 - DNA, 2463 bp, Pseudomonas syringae
atgcagttgctgattgtctgcggcagcggagccctgccactggagctgattcaggccgcagacctcgtcaatttccagtccggttttctgcgccagggccagggctacgatatcgacgctgcaaacaaagcgctgaataacctcgcagaggtcgaagacctggcacccggcaaccactgggtcgaaattcacatcaacacgcgttacttcggtcagcgggaactgcgcttcgatgccgacccgcaaggcaacggtctgctgccatgcctgtcaaaagagctacttgagcaaatgggcgtacgcatcgagagcctggccgagcagacattattgcaggcctcctgcgtcgacctgtcccggctgattccccaggcaaccaccaaactggacggcggcaggctgcaactgtcgatctccataccgcagatcgccatgcgcctggatgccatcggcagggttgatccggcgctctgggattacggcatcaatgccgcattcgtcagttaccaggcgtccgcgcagcaaaccacgcgtaccgacaccggcacaggcaacagcgcgaatctgtaccttaatagcggtatcaaccttggcgcatggcgactgcgcagcaatcaaagcgtgcgtcacgacgaagagggtcgtcgtgaatggacaagggcctatgcatacgcccaacgtgacctgcccggcactcacgcgaatctgaccatcggcgagacgtccaccgacagcaatgttttccgcagcgtaccgatcaaaggcgcactgatcaaaaccgatcaggaaatgctccccgacaccgcacaggggtacgccccggtgattcgcggtgtggcgcagagtcgggcgaagcttgaagtgctgcagaacggctacccgatctattccacctatgtcagcgccggcccctacgaaatcgacgatctggcggctacgggcagcggcgaactggaagtggtactgactgaggcggacggtcaggtgcggcgcttcagccagccctacgcaaccatcggcaacctgttgcgtgagggcgtctggaaatacagcaccgcactgggccgctataacggtgccagcgcaatcgagcagccctggatttggcaaagcacgctggccattggcaccggctggaacgccaccctttacggcggcttgatggccagcgacatgtaccgcgccaccgcgctgggcatctcgcgggacctgggcgctttgggggccgtggcattggacgcaacgcagtcggacgcggacattgatcgcgccggaacgaccagcgtgcaaggcatgagttacgccctcaagtacggcaagatgtttaccaccaataccaacctgcgcttcgccggttaccgctactccactcaaggctatcgtgatttcgacgagaccatgcgtcaacgcgataacaacagacccttcaccggcagccgccgtagcaggctggaggcctccgttcaccaaaaggtcggaagccgcagcagcgtcagtctgacaatgtcccggcagaattattggggcagcgctgccgaacagcagcagtatcaattcaacttcaatactcagcatgccggggtcacctacaacctgtatgcctcacaatcgctgaccgacacacgcaaccagaaaaatgaccggcagttggggctcagcatctcgctgcctctggatatcgggcattcgagcagcgcagccttcgacctgcagaacagtggtgatcactacagccagcgggccagtctgagcggcagcctcgacgataaccgcctcaattaccgaaccagcctgagcaacgatgacggccgccagcaaagcgcaggtctcgcggtcggctatcaggcgccttttgcaagtttcggagcgggcctgacccaaggcaacgattatcgcagcacgtcaatcaatgtcagtggcgccctgttgatgcacgcagggggtatcgaacccggtccgagtctgggcgataccattgcgctgatcgaagtgcccgacacaccgggcgtcggtgtacagaatgcaatcggggtcgagaccaatagtcgagggtatgcactggtgccctacctgcggccttaccgttacaaccacatcgagctgcaaacggatcagctcggtccggagatcgaaatcgataacggcagcgctcgagtagtgccggctcgcggggccgtggtcaagaccacttttgccgcacgcaccgtcacacgcctggttatcacggcgcttaccgacagtggcaagccgctgccgttcggtgctcaggtcagcgacgccgaaggaaacatcatgggcattgcaggccagggcggattgattttgctgtccaccggcatgcaggcacaaaccctcgacgtaagctggggtgaacagacggaatcccgatgccgactgcacatagacccgaccaatatgccgctgaccaaaggctaccgaatacagtcattgacgtgcagccaa

SEQ ID NO: 33708 - DNA, 807 bp, Pseudomonas syringae
ttgtcaacgcatccaggcccttttacgggcctggatgttcaaggtaaaacaaccatgatcggcactatctgccaacaggccgttgcgaagtccgcgctcggcttaggcatggctctcgccgtgctcagcattcacatcccggttgctgaagctgcgctcaccgtcaatgccacccgcgtggtgttcgccagcgaaaaacgcagtacttcggtggtcatttccaacccgagcgatcgcccgttcgcggttcagacctgggtcaacacgacagtcgacgacacagtgaccgcagtgccttttgcaccctctccaccgttgtttcgcctgaaccccggcaaacagcagcaagtgcagatcaatggcctgcccaacgacctgcccgcagatcgcgaatcgctgttcttcttcaatgtgcaggaaatcccccaggccgaaagttcgcaaggcaatgtgctgaatatcgctctgcggacccgactcaaactgttctaccgcccggccgggctgactgacaacccaattgcacgcctcaaggacctgcaatggtcaatcgagcagtccaacggtaaaacccggctggtggggatcaacccaacccctttccacgtgtcgttcatacgccttgaagtcacggccaacggcaagaccgaaaagatcgcgcaggcagccatgctggcaccttttgcctcgcaggcctatgagcttggcgaaacgaaagcagagccgggcgttcaggtggttttttcagcgataaacgattacggcggctacagcgttccgctgaccgttccggtcacgctggctcat

SEQ ID NO: 33709 - DNA, 1047 bp, Pseudomonas syringae
atgttcaacaatgatcgtttgctggtgcagattctgctgctggcgctattcggcgcctgtctctgggtaatggcaccgttctggtcggcgctggtctggggcgcggtgctggcgtttgccagttggccgttgatgcgtttgctgacgcgctggttcaagggccgtgagtcgctggctgcgctggtgatgtgcttgtgctggatgttgctggtcgcggcaccactcgtctggctgggcttcaatctcgccgaccatgtgcgtgacgccacggcgttgatcaaggatatacaggtcgacgggctgcctgatccgccgcaatggctggcgggtattccgctggtgggcgagcgcctggtggggttgtggaccaccattgaccagcagggcgcggcgttcatgaccacggtcaagccgtacctgggcgaggtcggcaactggttgctggcgcgcagcgcgcagatcggtggcggcatcctcgagctgactctgagtatcgttttcgcctttttcttctatcgcgacggtccgcgtctggcggcgttcgtgttgagcctgctggaacgcttgatcggtgacagggcgcagtattatctggacctggttgcaggcacggtgcagcgggtagtcaacggtgtgattggcaccgcagcggcgcaggcgttgctcgcgctgatcggttttctgatcgcaggcattcctggagcgctggtgctgggcattctgactttcctgttcagcctcatcccgatgggcccgccgttggtctggttgcctgcaaccgcctggctggtttggcagggcgagtatggtatggcgatatttctcggcatctggggcatgttcgtcatcagtggcgtggacaacgtgctcaagccttacctgatcagtcggggcggcaatctgccgctggtgattgtgttactgggggtgtttggcgggctgctggcgttcggcttcatcggcctgttcatcggcccgaccctgctggcggtggcgtacagcctgttgacggactgggttggcagtgaacgggcgcgtaacccgcgc

SEQ ID NO: 33710 - DNA, 1326 bp, Pseudomonas syringae
gtgtggtccctcgtaatgaaagtcttgaaaggccaggacatcctggcactcggttttatgacatttgccctgtttgtcggggctggcaacatcatctttccgcccatcgtaggcctgcaggccgggccgcatgtatggatggcggcgctcggttttctggtcacggcggtcggtctgccggtgatcaccgtgatcgccctggccaaggttggcggcgcgatggatgctttgagcagcccgatcggcaagattgccggcggggcacttgcggcggtctgctatctggcggtcggtccgctgttcgcgaccccgcgcacagccaccgtttcgtttgaagtcggtctggccccgctgaccggcgacagcccgatggcgctgctcctctacagcctggtgtatttcctggtggtgttctgggtctcgctgtatccggggcgcttgctggatacggtcgggcgctttctggcaccactcaagatcttcgccctggcggtgttgggggttgcggcgttcgccttgccagcaggcggcataggcgaggccgagccggcttatgcgatcgcgccgttttctcagggtttcatcaatggctatctgaccatggacacgctgggtgcgctggtcttcggcattgtcatcgtcaatgccatccgctctcgcggtgtcgagtcgccgcgtctgatcactcgctacgcgatcatcgccgggctgattgccggtgtcgggctggcgctggtgtatgtcagcctgtttcgtctgggctccggcagtcatgcggtcgcagcaggcgcgagtaacggcgctgcggtcctgcatgcctacgtgcagcacaccttcggttcgctgggcagcggctttcttgccgtgctgatttctcttgcctgtctggtcacggcggtgggcctgacctgcgcctgtgcggaatacttcgccaaggtgctgccgttgtcctatcgaacgctggtgatcattttggcggtgttttcgttactggtgtccaatctggggctgaccaggctgatccagttttcgattccggtgctgacagcgatctatccgccgtgcatcgtgctggtcgcgctgagcttctgcaaaggcctctggcagagtcagggcagggtggtcgcgccagtcatgctggtgtcgttcgttttcggccttgtcgacgcgctcaagggggcaggttttggtgagtacctgccgggtgcgctgaccagtatgccgctgagtgatcaggggcttgcgtggctggtgccatcggtcatcaccctggcgggcgcagtggtgatcgaccgggtcatgggcaagcgtagcgaggcgctggct

SEQ ID NO: 33711 - DNA, 1899 bp, Pseudomonas syringae
gtggaaactcaaaaggaaaccctgggcttccagaccgaggtaaagcagctgctgcacctcatgatccattcgctgtattccaacaaggaaattttccttcgcgaattgatctcgaacgcgtctgacgcggtcgacaaattgcgttttgaagcgttgtccaggcctgagctgctggaaggcggcgccgagctgaagatccgcgtgagcttcgacaaggacgcgaagaccgttacccttgaagacaacggcatcggtatgagccgkgaagatgttatcacccacctggggaccatcgccaaatccggcaccgctgatttcatgaaaaacctgtcgggcgatcagaagaaggattcgcacctgatcggtcagttcggcgtgggcttctactcggcattcatcgttgctgaccaggtcgaagtgttcagccgtcgcgccggttcgccctccagcgaaggcgtgcactggtcctccaaaggcgaaggcgagtttgaagtcgccaacgtcgacaaggccgagcgcggtacgcgtatcgtgctgcacctgaaaaacggtgaagaagagttcgcggacggttaccgtctgcgcaacatcatcaagaagtactccgaccacatcgccttgccgatcgagctgcccaaagagcaggctcctgccgcagaaggcgaagaagcaccggcgcaggaatgggaaaccgtcaaccgcgccagcgcactctggacacgccctcgcaccgaggtgaaggacgaggagtatcaggagttctacaagcacgtcgcccacgactacgagaacccgctgagctggagccataacaaggtcgaaggcaagctggaatacacctcgctgctgtacgtgcctgcgcgtgcgccgttcgatctgtatcagcgcgaagcaccgcgcggcctgaagctctatgtgcagcgcgtgtttgtcatggatcaggccgaatcgttcctgccgctgtacatgcgcttcgtcaagggcgtggtcgattccaatgacctgtcgctgaacgtgtcccgcgaaatcctgcagaaagacccgatcatcgattcgatgaaatcggcgctgaccaagcgtgtgctggacatgctcgagaagctggcgaagaacgaacccgagcagtacaagggcttctggaagaacttcggtcaggtgctgaaagaaggcccggcggaagactttgccaacaaagaaaaaatcgcgggtctgctacgttttgcatcgacttccgacgacagcggcgagcaaagcgtttctctggccgattacctggcgcgcggcaaagaaggtcaggacaagatctactaccttactggcgaatcctacgcgcaggtcagaaacagcccgcaccttgaagtcttccgcaagaagggcatcgaagtgttgctgctgaccgaccgtatcgacgagtggctgatgagctacctcagcgatttcgacggcaagaacttcgtcgatgtggcgcgcggcgaccttgatctgggcaaccttgattccgaagaggacaagaaagcgcaggaagagattgccaaggacaaagaaggcctgatcgaacgtctgaaggctgcactgggcgagtctgtgagtgaggtgcgagtctcccatcgcctgaccgattctccagcgattctggccataggtgagcaggacatgggcttgcagatgcgtcagattctggaagccagcgggcagaaggttccggactccaagccaatcttcgaattcaacccggctcacccgctgatcggcaagctcgacgccgagcagagcgaagagcgctttggcgacctgtcgcacatcctgttcgaccaggcggcgctggctgccggcgacagcctgaaagacccggccgcttatgtgcgccggttgaacaagctgttggtagaactgtcggtt

SEQ ID NO: 33712 - DNA, 1449 bp, Pseudomonas syringae
atgaccgttcgccgcaccaaaatcgtcgccacacttggccctgccagcaactcgccggaagtcatcgaacaactgatcctctcgggtctggacgttgctcgtctgaacttctctcacggtactccggatgagcacaaggcacgcgccaaactcatccgcgaaatcgccgccagacacgggcgcttcgtcgctctgctgggcgacctgcagggtcctaaaatccgtatcgcaaagttcaccgacaagcgaatcgagctgaaggtcggtgacaagttcaccttctcgactgctcacccgctgaccagtggcaaccagcagatcgtgggtatcgactacccggatctggtcaaggattgcggcgtaggcgacgagctgttgctcgacgacggtcgcgtggtcatgcgcgtcgacacccagaccgcacacgaactgcactgcaccgtgctgatcggcggtccgctgtccgaccacaaaggcatcaaccgtcgtggtggtggccttaccgctccggcgttgaccgaaaaagacaagcaggacatcaagctcgctgccgaaatggacctggattacctggccgtttccttcccgcgcgatgccgccgacatggaatatgctcgccagctgcgtgacgaatccggtggcactgcctggctggttgccaagatcgaacgcgctgaagcggtcgccaacgacgaagtgctcgatgcactgatccgtgccagtgacgctgtgatggttgcccgtggcgacctgggcgttgaaatcggcgacgccgaactggtcggtgttcaaaaacgcatcattctgcacgcacgtcgccacaacaaggcggtgatcgtcgccacgcagatgatggagtcgatgatctcaagccccatgccgacccgcgccgaagtgtccgatgtggccaacgccgtgctcgattacaccgacgccgtcatgctctcggcagaaagtgcggcaggttcctacccggtcgaagccgtacaggccatggcacgtatctgcgtaggcgctgaaaagcacccgaccggcaaaacgtccagccaccgtatcggtcactcgttcacgcgttgcgacgaaagcatcgcgctggccgccatgtacaccgccaaccacttccctggcgtgaaggcgatcatcgcactgaccgaaagcggctacaccccgctgatcatgtcgcgcatccgctcctcggtgccgatctacgcgttctctccgcaccgtggcactcaagcgcgcgctgcgatgttccgtggtgtctacaccgtgccgttcgacccgggagccctgccgccaggtcaggtcagccaggccgccgtcgacgaactgctcaagcgtggcctggtcgagcaaggtgactgggtcatcctgaccaagggcgacagctaccacaccatcggtggcaccaacggcatgaagatcctgcacgttggcgacccattggtc

SEQ ID NO: 33713 - DNA, 1521 bp, Pseudomonas syringae
atgaccgtgatcaagcaagacgacctgattcagagcgttgcagatgcactgcagttcatttcctattaccaccccgtggacttcatccaggccatgcacgaggcgtatctgcgtgaagaatcgcctgccgcccgcgactccatcgcccagatcctgatcaactcgcgcatgtgcgcgaccggtcatcgcccgatctgccaggacaccggcatcgtcacggtttttgtgcgcgtgggtatggatgttcgctgggacggcgccaccatgggcctggacgacatgatcaacgaaggcgtgcgtcgcgcttacaacctgcctgaaaacgtcttgcgtgcctcgatccttgccgacccggcaggcgctcgcaaaaacaccaaggacaacaccccggccgttatccactactccatcgtcccgggtaacaccgtggaagtggacgtcgcggcaaaaggcggcggttcggaaaacaaatcgaagatggcgatgctcaacccgtccgactcgatcgtcgactgggttctgaaaaccgttccgaccatgggcgcaggctggtgccccccgggcatgctcggcatcggcatcggcggcaccgcagaaaaggccgcggtcatggccaaggaagtgttgatggagtccatcgacattcacgaactgaaagcccgcggcccgcaaagccgtatcgaagagatgcgtctggagctgttcgagaaggtcaaccagctgggcattggcgctcagggcctgggcggcctgaccaccgtgctcgacgtcaagatcatggattacccgacccacgccgcgtcgctgccggtgtgcatgatccccaactgcgccgccacccgccacgcgcacttcgtgctcgacggcagcggccctgcctcgctggaggctccatcgctggacgcctatccggaaatcgtctgggaagccggcccatcggcccgccgcgtcaacctcgataccctgaccccggaagaagtacaaagctggaaaccgggcgaaaccgttttgctcaatggcaagatgctcaccggccgcgacgcagcgcacaagcgcatggtcgaaatgctcaacaggggtgaaaccctgccggtagacctcaagggtcgcttcatctactacgtcggcccggttgatccggtacgcgaagaagtcgtcggcccggccggcccgaccacggccacccggatggacaagttcacccggcagatcctcgatcagaccgggttgctgggcatgatcggcaagtccgaacgcggcccgaccgccatagaagcgatccgtgaccacaaggccgtgtacctgatggccgttggtggtgctgcctatctggtggctcaggcgatcaagaaatcccgcgtcgtggccttcgccgagctgggcatggaagcgatctacgagttcgaggttaaggacatgccggtgaccgttgccgtcgacagcaccggtgaatccgttcacatcaccggcccgcagatctggcagaagaagatcagcgacagtctggcggtggaagtgcag

SEQ ID NO: 33714 - DNA, 903 bp, Pseudomonas syringae
gtgatccgcgacggcgaagtagtctatgagcgctatgctggcgtcaccaatgcccagaccccgcacctgacctggtcaatcagcaaaagcatcatggccactgtgcttggcgtggccttcacagaagggcgctttcaactgagtgatccggtcgcgaagttctatgcgccattccagagccatcccgatatcaccctcacggatctgatgcactgggcctcaggtctcgactggcaggaagactacgaatacgcaccgctcaactcctctgtcgtcgccatgctctacacacgggggcgtaacgacatggcgcgctttaccgccgagcatgccgcagccggaccgccgggcaaggcgtacctgtactccagcggcgacagcacggtgctggctgctgcattgaaaaacatggtcgggccacaggcgtacccggattatccgtggaccgcgctgttcgacccgctcggcattcgcagtgcggtgtgggaaaccgacgccagtggcacatttgtcggttcgtcctatgcctacatgaccgcgcgcgatctggcacgcattggcctgttgatgcagcgtggcggggaatggcaggggcggcaattactcaacaaggaatggatcgattttgtgctcaggcccttcgcaggcgagcaagtggacgcgggcgttgaagtgcccggcggccaatggtggcttaatcgtagtgccgatggcggcaaagggccgtggccggatgcgccccccgatacgtttgccgcattggggcattgggggcaggcgctgtatgtcattcccagccagaaactggtgatcgtgcgctacgccgatgaccgtgacggcacctacaaccacaaccaaatgctcaagctgacacacgctgcattcggcaaggaggctggccaa

SEQ ID NO: 33715 - DNA, 1263 bp, Pseudomonas syringae
atgactgagtccgttcttgactacatgacccgcctgggtcgcgccgcccgcgaagcttcgcgagtgatcggtcgtgccagcaccgcgcagaagaaccgcgccctgcaggccaccgccgccgctctggacgaagcccgcgacgagctgtctgccgccaatgcactggacctggcctacggtcaggccaacggccttgagccggcaatgctggaacgactggccctgacccccgcacgcatcgacagcatgatcgtcgggttgcgtcaggtcgccagcctggcagaccccgtaggtgcgatccgcgacatgagttatcggccgtcgggtattcaggttggcaagatgcgtgtgccgctgggcgttgtaggcatcatctacgaatcacgtccgaatgtgaccatcgatgcagccagcctgtgcctgaagtccggtaacgcgaccattctgcgcggtggctccgaagccattcactccaatcgcgcgattgccgcctgtatcgcgcgcggtctggctgaagccggtctgcccgctgctgtggtgcaggtggtcgagaccaccgaccgtgcggcggttggcgcgctgatcaccatgcctgaatatgtggacgtcatcgttccgcgtggcggcaagggcctgatcgagcgggtcagtcgcgacgcccgtgtgccggtcatcaagcatctggacggcatctgccacgtttacgtcagtgcccatgccgatctgcccaaggcgcaaaagatcgctttcaacgccaagacctaccgttacggtatctgcggcgcgatggaaaccctgctggtcgatcagaccatcgcagccgattttctgcctgccatggcggcgcagtttcgcgagaagggcgtcgagttgcgcggttgtgagcgcacccgcgagctgatcgacgttatgccggccaccgaagacgactggcacaccgagtacctggcggcgatcctctcgattcgtgtcgtgtccgggctggacgaagccatcgagcacatcaatcattacggctcgcatcacagcgatgccatcgtgtccgatcaccagagccagattcgccggttcatggccgaggtcgattccagttcggtcatggtcaatgccccgacgagcttcgctgacggctttgaatacggattgggtgccgagatcggcatttctactgataagctgcacgcccgtggtcctgtcgggctggaagggctgacctgcgagaagtacatcgtgatcggtgatggccaattgcgcgggcacgcc

SEQ ID NO: 33716 - DNA, 1314 bp, Pseudomonas syringae
atgggcgacctgctcaatggcatgaccggctggctgacggcgaacccttcctgggtggctgtcgcgatctttttagtcgcattcaccgaatgcgtcgcgattgtcgggatcgttgtgccgggcaccgtgatcatgtttgcgattgccgcgctggcgggtagcggcattctgccgttgagcgaagtgctgttactgggctttctgggcgggctgctgggggacgcggtgtcttacttcatcggcaggcgctttcatcagaacattcgccagttgccgggcctgcgcacccacccggaatggatggccggcgccgagagctacttccatcgctatggcattgccagcctgctggtggggcgcttcatcggccctttgcggccgatgctgccgatgattgccggcatgtgcgacatgccgctgccgcgctttatcgccgtcagcgtgctcgccgccgctggctggtcgattgcctacctgatgccgggctgggctgcgggcgctgccattcgcctgccgttgccagagggcttctggccagaggcggcagtggtcggcaccgggctggcggtgctgttcgggctgagcattcaaagcagcgtgcgccagaaacgctacgcaaccaagctgatttccgtgctcagcctgacgctggtcgccgcgctgttcatcggctggccttacctggctgatttcgacaacggcctgatgacgctcatccaggaacaccgcagcgaagccgcgcagaacatcgtgctgttcgtcaccagcatcggcgacttcaaggcccagttgctcgcggcctccctgctgatcattgtcctggcggttgcgaggcagtggcgccacgcgaccttcgccctggctgccacgctgggcaccgctgtcgccaacggcctcctgaaaaccttcttcgcccgcgcccgtccggacgtgctggtcgaccccttgaccacctacagcatgcccagcgggcacagctccgcagcctttgcgctgttcatgacgcttgccgtgctggccgggcgtggccagccagtgcgcctgcgtctgagctggatgttgctgtgtggcattccggccttggcgattgccttgtcgagggtgtatctgggagtgcactggccaaccgacgtgctggccgggatgctgctggcgttctgcgtttgcgccgccagcctcgcattcattcagcgcaaggaacccctgccagccatgtcggtacgggtctggtggctgatcgtcccggcgatgaccgcactgctcggtatatttgcggtgcgcgccctgtcgcatgcggtgctgcgctatcagtac

SEQ ID NO: 33717 - DNA, 840 bp, Pseudomonas syringae
atgagcgaagaccgatcgagcaacgggcaaaagtcatggttgggtaaactgacccaggcctttgtccatgagccgaaaaaccgccaggagctgcttgagctgctgcgcgaagcccaccagaacaaactgctggacagcgaagcgctggccatcgtcgagggcgccattcaggtggctgacctgcaagtgcgcgacatcatggtgccgcgttcgcagatgatcagcatcaaggcgacccagacccctcgcgagttcctgcccgcggtcatcgatgcagcgcactcgcgctacccggtgatcggcgagagccacgatgacgtgctcggcgtgctgctggccaaggacctgctgccactgatcctcaaggctgacggcgacagcgacgacgtcaagaagctgctgcgcccggcgaccttcgtccccgagtccaagcgcctcaacgtgctgctgcgtgaattccgcgccaaccataaccacatggccatcgtcattgacgaatacggcggcgtggcgggcctggtgaccatcgaagacgtgcttgaacagatcgtcggcgacatcgaggatgagcatgacgtcgaggaagacagctacatcaaaccgctgcccagcggcgacttcctggtcaaggcgctgaccccgatcgagaatttcaacgaattcttcgacagcgtgttttcggatgacgagttcgacacagtgggcggcctggtgatgaatgccttcggtcatttgcccaagcgtaacgagatcaccgaaatcggtgcctatcgcttccgcattctgagcgctgacagccgccgcatccatttgctgcgcgtgagcccgatttctcgcccg

SEQ ID NO: 33718 - DNA, 1518 bp, Pseudomonas syringae
atgcgctggataacccgccccggctggcccggtaacctgctggccctggcggctggcgggctcacgaccctggccctggcgcctttcgacttctggccgttggtgctggtatcggtggcgatgttctatctggggctgcgcgagttgagtccgcgtcaggcactggctcgcggctggtgttacggcttcggtctgtacggcgcaggcaccagttggatctacgtcagcatccacacctacggcggtgcttccgcgctgctggcaggtttgctgatgctgctgttcatcgcagccatcgcgctgttctttgccctgcccgcctgggtctgggcgcgctggctgagacgcaacgaagcgccactggcagattcgctggcgtttgccgccctgtggctgtggcaagaggcgtttcgcggctggtttcttaccggctttccgtggctctattccggttacagccagctcgacgccccgcttgccggcctcgcgccggttggcggcgtctggctgatttcatttgcgctgggcctgaccgctgcactgttgtgcaacctgcaccgcttgcgggcacgcaaatcgtttctggccatgggcgtgctgctgttgctggcaccgtgggtcgcaggtctggcgctcaaggatcacgcctggacctcgccttccggcccgccgctgaaagtggcggccatgcagggcaacatcgaacaaagcatgaaatgggacccgcaaaagctcaacgatcaactggcgctgtatcgggacatgacctttcgctcacagcaggccgacctgattgtctggccggaaacggctgtgccggtcctcaaggaaagcgcagaaggctacctgtcgatgatgggcaagtttgctgcggaccgtggcgcggcgctgatcacgggcgtgccggtgcgtgagccgaccgggcgtggcgaatacagctattacaacggcatcaccgtcaccggccagggcgacggcacttatttcaagcagaagctcgttccgttcggtgaatacgtgccgttgcaggacctgttgcgcgggctgatctccttcttcgacctgccgatgtccgacttcgcacgcggcccgaacgatcaggctctattgcaggccaagggttatcacatcgcgccgttcatctgctatgaagtggtttatccggagttcgccgcaggcctgtcggcgcagagcgatctgctgttgacggtcagcaatgacacctggttcggcacctcgatcggtcctctgcaacatttgcagatggcccagatgcgcgcccttgaagcgggacgctggatgatccgcgcgaccaacaatggtgttactgcgctgatcgacccgttcggcaggatcaccgtgcagattccgcagttcgagcgtggcgtgctgtacggcgaggtggtgccgatgcacgaactcacgccgtatctgcactggcgctcgtggccactggcgattgtctgcctgctgttatttggctgggcgttgctggcggcccggatctccaagactgtc

SEQ ID NO: 33719 - DNA, 2604 bp, Pseudomonas syringae
atgcacgaactctatcagccccgcgaaatcgaagccgccgcccaaacgttctgggatgagcaaaagtcttttgaagtcagtgaacagccaggcaaggaaaccttctattgcctgtcgatgtttccttaccccagcggcaagctgcacatgggccatgtgcgcaactacaccatcggtgacgtgatttcccgctaccagcgcatgctcggcaagaacgtcctgcagccactgggctgggacgcgttcggcatgccggctgaaaacgccgcgatcgacaacaacgtcgcgccggccaagtggacctacgaaaacatcgcctacatgaagaaccagctaaagagcctgggtctggcggtggactggtctcgcgaagtcaccacctgcaagcctgattactatcgctgggaacaatggctgttcactcgcctgttcgagaaaggcgtgatctaccgcaagaacggcaccgtgaactgggacccgatcgaccagaccgtactggccaacgagcaggtcatcgacggtcgcggctggcgttccggcgcgcttatcgaaaagcgcgaaatcccgatgtactacttcaagatcaccgcctacgccgacgagctgctggaaagcctcgacgaactgccgggctggcctgaacaggtcaagaccatgcagcgcaactggatcggcagatcgcgcggcatggaagtgcagttcccgtacgaccaggcgtcgatcggcgaagcgggcgcattgaaagtcttcaccacacgccctgacaccctgatgggggcaacctacgttgccgtcgccgctgaacacccgctggcgacccttgcagcgcaaggcaacccagcgctgcaagcctttatcgatgagtgcaagggcggcagcgtcgccgaagcagacgttgccacccaggaaaagaaaggccagccgacctcgttgttcgtcgagcacccgctgaccggcgaaaaactgccggtgtgggtcgccaactatgtattgatgcattacggcgatggcgctgtcatggcagtcccggcgcacgatgagcgcgatttcgaatttgccagcaaatacgacttgccgatcaaacccgtagtacgcaccagcgctggcgacgaaacgcctgcgccgtggcaagccgagtacaacgaacaaggcccgctgatcaattccggcgagttcaccggcctgcattttcaggacgcgttcgatgccatcgaagccgctctggtgaaaaaagcgctgggtcagtcgcgcactcagttccgcctgcgcgactggggcatcagccgtcagcgttattggggctgcccgatcccgatcgtgcattgcgacacctgcggcgacgtgccggtccctgaagaccagttaccggttatcctgccggaagacgtggtgcccgacggtgctggctcgccgctggcgcgcatgccgcaattctacgagtgcagctgcccgaaatgcggtgcaccggccaagcgtgaaaccgacaccatggacaccttcgtcgagtcctcctggtactacgcgcgctacgcctctccgcattacgaaggtggcctggtcgagccaaacgcagccaaccactggctgccggtcgaccagtacatcggcggcatcgaacacgccattttgcacctgctttacgcgcgcttcttccacaagctgatgcgtgacgaaggcctggtgacgtcgaacgagccgttcaagaacctgctgacccagggcatggtcaacgccgaaacctacttccgcatggaaaccagcggcaagaaaacctggatcaacccggccgacgtgaccctcgaaagagacgccaaggccaaggtgatcagcgccacgttgaccagcgatggcttgccggtagaaatcggcggcaccgagaagatgtcgaagtcgaagaaaaacggcatcgacccacagaccatgatcgatcagtacggcgcggatacctgccgtttgttcatgatgttcgcctcgccgcctgacatgagcctggaatggtcggactcgggtgtcgaaggctcgcatcgcttcctgcgccgtgtatggcgtctggctcaggcgcacgttggtcagggtgcatcgggcagcctggacatcgccgccctgaccgatgagcagaaggccgtgcgccgttcgatccatcaggccatcaagcaggcgagccaggatattggccagaatcagaaattcaacaccgctgtcgcgcaagtgatgacgctgatgaacgtgctggaaaaagcccctcaggccacgccacaggatcgcgcactgctgcaggaaggcctggaaacagtcaccctgctgctggcaccgatcacgccgcacatcagccacgaactgtggacgcaattgggccacaatgagccggtcatcgacgctggctggcctgtgtttgatgcccatgcgctggtgcaggacagcctgcaactggtgattcaggtcaacggcaagctgcgcggccacatcgaaatgcccgccagtgccagccgcgaagaagtcgaagcggcggcacgcatcaacgagaacgtcttgcgcttcactgatggcctgaccattcgcaaggtgatcgtcgtgcctggcaagctggtcaacatcgtcgcaagc

SEQ ID NO: 33720 - DNA, 792 bp, Pseudomonas syringae
atggagtcgcatgtgaataactacccggtcccaaaaattctggtggtcgatgaccaacctttgatcgttgaagaactcggcgagtttctggaaggctgcggctatgcgtgtgtgcgctgtcattcaagccttgaagccatcgagcactttgccaacgacagcgccatcggcatcgtgctgtgcgatctggaaatgcccggcatgaatggcatcgaaatggtcgaagccatgaagatggcgggcggcaagacgcatttgttcgaagccatcatgctgaccgggcaagccgagaaaaaggatgtcatcaaggcgctgcgggccggcattgccgattactaccagaagccggtcaatcttgatgagctgctggaaggcgttcagtcgcaggtagaagcgctggccgagcgccagaaaaaccgccagcaattgggcctgctgaacgagaaactccagtttctggcggcgtccattgacgatctttatcagaatctggacagcgctcagaacacgccgcaggccgggcgcaaaccacggctcaatgctgaaaatgactcacagatgccggtggctctggccaaactgtcacgtcgccagctcgatgtggcgcggctggtcagtaccgggttgaccaattatcagattgcctgcgaactgggcattaccgaaaacaccgtaaaactttacgtgtcgcaggttctgcgcctgacccatatgcataaccgcactcaactggcgctggcattttcacccggtaaaagcggggagcggcagcggcttatcgaaagccagggg

SEQ ID NO: 33721 - DNA, 1005 bp, Pseudomonas syringae
atgactgacaccgtgcaaaccctgatcccgacgcttgacgtttccgagcgtgtggcccgtccgaaagtcgaagccggcgtcaagctgcgcggagcggaaaaggttgcgcgcatcccggtcaagatcatcccgactgtagacctgccgaagaagcctgactggattcgcgtgcgcatcccggtttctccggaggtcgaccgtatcaagcaactgctgcgcaagcacaagctgcacagcgtctgcgaagaggcatcctgccccaacctgggcgaatgtttctccggcggcaccgcgacgttcatgatcatgggcgacatctgcacccgtcgctgcccgttctgcgacgtgggccacggccgtccgaaggcgctcgacgccgacgaaccgaagagccttgccatcgcgattgccgatttgcgcttgaaatacgtggtgatcacctcggtagaccgtgatgacctgcgtgacggcggcgctcagcactttgccgactgcatccgcgagatccgcctgctgtcgccgggcattcagctcgaaacactggtgcccgattaccgtgggcgcatggacgtagcgctggaaatcactgcagccgagccgccggatgtgttcaaccacaacctggaaaccgtgccgcgtctgtacaaggccgcgcgtcctggctcggattaccagtggtcgctgaccctgctgcaacgcttcaagcagatggtcccgcacgtaccgaccaaatccggcctgatgctgggtctgggcgagactgacgaagaagtcatcgaagtcatgaagcgcatgcgcgagcacgacatcgacatgctgaccctgggtcagtacctgcagccatcgcgcaatcacctggcggtgcagcgtttcgtccatccggacaccttcgcctggttcgccgaggaaggttacaagatgggcttcaagaacgtcgcttcaggcccgctggtgcgctcgtcgtaccacgccgacgagcaagccaagatcgccaaagcgatgctc

SEQ ID NO: 33722 - DNA, 969 bp, Pseudomonas syringae
gtggtcggcctggtgggcatccttgggtcggtgcaagaggcactggccggtgattacgaaggttcgccccaggtggccgagttcgtcggtgaactgacccgcgactacggttttgccggcgagcagttgatgggcctgtttcgtgaggtcgagcgcaagcaggccattctggatgccatttcgcgcccggctgaacgggtcaagcagtggaaagagtatcggccgatgttcatcactgacacgcgcatagcccgcggtgtcgatttctggcgtcagcacgaggccgcattggcccgcgccgagcaggaatatggcgtaccggcgcagatcatcgtttcgatcatcggcgtcgaaacctttttcggccgcaacaccggtaattaccgggtgatcgacgccttgtcgacgctcggtttcgattacccgccgcgcgccccgttcttccgcaaggaactgcgtgagttcctgctgctggcccgcgagcaacaggtcgatccgctgaccctgaaaggctcgtatgccggcgcaatgggcctgccgcaattcatgccgagcagcttccgcgcttatgcagtggactttgacggcgacggtcacatcaacatctggaccgacccggacgacgccatcggcagcgtggccagctatttcaagcgtcatggctgggtggccggccagcaggtcgtcagccgcgcaacggcgcgtggcgaccgggttgatgaaggcttgagccctgcacttgatccggtaatgtcggtcggggagttgcgacagctgggttgggcaagtcatgatgcgctgcgcgacgacatgccggtgacggcattccgtcttgaaggcgacaatggtcccgaatactggctgggtctgaacaatttttatgcaatcacccgttataaccgcagtgtgatgtacgccatggccgtgtatcagctgtctgaatcgttggttcaagctcgaggcgtcaag

SEQ ID NO: 33723 - DNA, 465 bp, Pseudomonas syringae
gtgcgtttgcgtctgatcgctgtgggttcacgcatgcccaagtgggtggaagaaggttggcacgagtacgccaagcggatgccttccgagcttgcgcttgaactggtggaaatcccgctcaatacccgtggcaagaacgccgatgtcgcgcgctttatccgtcaggaaggcgaagcgatgctggccaaagtgcagccgggtgagcggattgtcacgctggaagtgcagggcaaaccgtggagcactgagcagttggcggtcgaactcgatcgctggcgccttgatgcgcgcacggtcaacctgatggtaggcggtcccgaagggttggcaccggaggtctgtgcccgcagtgagcagcgctggtcgctgtcaccgctgaccttgccgcacccgctggtacgcattctgatcggcgagcagatgtatcgcgcctggacagttctgtccgggcacccttatcacaag

SEQ ID NO: 33724 - DNA, 1461 bp, Pseudomonas syringae
gtgacccaagcctttgttgtcgtagacaccgccgagcaagccgtcgagcggcttgccgagctgcacgagcgcgccaccagcgcgttgagccaggcgctcaagcgctacctgaaagaccgcgtcgagcccaccgccgaagagcgagcgcagttcagctacccgcaactgcgcctagtctacaaatgccacggtgaagtgccgctgaccacccgcgcctacgccaaggtccagctgcccggcacttacagcgtcacggtcacgcagcccaaagccttcaaaaaatatctgctggagcagcttgtcccgctgatgagcgactttaccgtcacggtcgaagtcggcatgagcgagcagagcattccttatccttacgtggtcgagcagggcgatgagctggcgggcaccggcgtgaccgctgcggcgctggcccgcgtgttcccgagcaccgacctgtcggccgccaccgacggcattgccgacggtctttatgactgggccaacgttgacccgctgccactggcgctgttcgatgccgcacgagtggatttctcgctgcgtcgtctggtgcactacaccggcagcgactggcgtcatgtacagccgtggattctgttgaccaactaccaccggtacgttgaccagttcatcttgcatggcctggaaaaactccgcgaagacccgcgtttcgtgcgcatggttttgccgggcaacgtggtggtcgacaagagcatgggcgtcgacgaggcccaggcgattgtcgccagcgtggtctggcaccgttaccagatgccggcttatcacctgattgccgaagacggtcacggcgtgacgctggtcaacatcggcgtcggcccgtcgaacgccaagaacatcaccgaccatctggcggtgctgcgtccgcattgctggctgatgatcggccactgtggcggcctgcgtcagtcgcagaccatcggcgattacgttctggcgcacgcttacatgcgtcgcgacgggattctcgaccgcgtactgccgccgcatatcccgattccagcgctggccgaagtgcaactggccttgcaggagtctgccgcgcagatcaccggcgagcgtggcgaagagctcaagaagcgtctgcgcaccggcacggttctgacgtacgacgaccgcaactgggagctgcgctgggctcaggagcgtccgctgatcaacctgtcgcgcgccgtagcggtggacatggaaagcggcactattgccgctcagggttatcgcctgcgtgtgccgtacggcacgctgctctgcgtctccgacaagccgctgcacagtgaaatcaagctgccggggtcggccaatgcgttctacgaacgtgcggtcagtcagcacttgaagatcggcattgccgcgctggacctgatgcgcacccaactgaactcgctgcactcacgcaagctgcgcagcttcgatgagccaccgttccgt

SEQ ID NO: 33725 - DNA, 615 bp, Pseudomonas syringae
atgaaactacgtggcctgtatgccatcaccgacagccagttgctgaccggcaaatttctgtcttatgtcgaggctgcgctggacggcggcgtgacgctgctgcaataccgcgacaaaaccggtgacgactcccgccgtctgcgcgaagcgaccgaactgctcaaactttgcgaacgctacaagacgcggctgattatcaacgacgacgccgagctggcggctcgtctgggggttggtgtgcatttggggcagaccgacggttctttgccggatgcccgcgccctgctggggcacaaggcgatcgtcggtgctacgtgccacggccagcttgagctggcggaacaagccaaggctgacggcgcgacctacgtggcgtttggcaggttcttcaattcgcagaccaagcccggcgcaccggccgtgccgctggacctgatcgcccaggtccgcgccagggttcatttgccgattgcggtgatcggcggcatcaccctggaaaacgccccgcaactggtcgagcacggcgctgacctgctggccgtggtgcatggcctgttcggcgccgaaaccccacaggaagtcacccgtcgggcgaaagcgtttatggcgttgttg

SEQ ID NO: 33726 - DNA, 720 bp, Pseudomonas syringae
atgctgaagtttttcgctgccttgttgtttgccgtcgccacaatggcgcaggcgcaggacaacaccttgcataccgacctgccgctggactacctggcgcaggccaatgtcgaaacgccagaccggccgctggtgattttcattcatggctatggcagtaatgcggctgatctgttcgggctcaaggaacatttgcctgcgggcttcaactacctgtcggtgcaggctccggtggagttgcaggcagacagctacaagtggtttacccagaagaaaggcggtaccgattacgatggcgtgaccgaagacctgaaaagcagcggtaagcgactgaccgatttcatcacccaggccaccgagaaattccgcacgcagccaggcaaggtgtttctggtcgggttcagccagggcgccatgatgagctacgaagtcgctttgcgtcagccgacgctggtcggtggctttgcggcgttgagcgggcggttgttgccggtggttaaatccgaagttaacgcgtctgatgacctcaaggcgctgaaggttttcatcggtcacggcgtgcaggatcgccaggtggcctacgccagcggcccgcaagccgaagcaaccctcaagtcgctcggcctgacgccgcagtttcatgggtatgaaggcctggggcacagcatcaacgaggctgaagtggtggacctggcgaactggctgcagcagtcaagtcgg

SEQ ID NO: 33727 - DNA, 1089 bp, Pseudomonas syringae
atgttcgcccttgatcgagcgctggctcaggacatcgtcgaccgggcgatggccattctgccgtacaacgtcaatgtcatggactacttgggcatcattatcggcagcggcgatccagagcgtttgtgcatccgccacgagggggcacaacgggtgttggccaatggtcaggtggtcgagatcgattcgctggcggcgatgcgcctgggcggtgtaaaaccgggcgtcaatctgcccttgatgctcgaccatcaattggtgggcgtgcttggcatcaccggcgagccggacgaggtccgggtctatggcgaattggtgaagatgacggctgaaatgctcatggagcaacgtcgccagcaagccgacctgcaatggcgcgcgcaacgcagtgaagacctgctggctcggctgctgttggctgattgcccagaaagtctggtggacgaagcgcggcaattgggcctgcaaccgcatttgccgcgtcaggcggtgctcatccagctggacgcaccaggggcgttcgccagtcagattgcaacctggcttggctcgcgttacgccgacagttggtgcgtgctgcgtgagcccacgttgctgtattggtgccgcgcggtgggcaaggaacgtgacgacggcgtgctgctcaagcaattggatgagcacggctggccagtcctgcgcatggccacagtgggtcaatctccggatttgcccacattgcgcaatgcctgcgcggcggcgcgcgatctgctggactacgccactcaggccagaccggggcaacgcattctgcgtctggaggcgcaccgtctgccggtgctgttctggcgctaccgccatgactggctggccgaagaagtggccgagccgattggccgtttgcacaatcatgtgcaactgctcgacaccctgtgcaaatggttcgagtacagcggcgaaagccaggcctgcgccgaggccctgggcattcatcgcaacagcctgcgctaccgactggagaaaatagccgaactgacgggctgcgatccctacaagaccgatgacctgctgcgcctgtatctgggcgcgcagatgatggctcgtcatgaa

SEQ ID NO: 33728 - DNA, 2865 bp, Pseudomonas syringae
atgctcgaactcactctggggcaaatatccatggcccagtcggctgtggataaaactgccgcactgaaactgcttgccgaccacctggtcgctgatggcctggtcgccgagggctacctcaccgggctgatgaaccgcgagcagcaaggctcgacctttctcggtcagggcatcgccattccccacggcacccccgaaacccgcgacctggtattcaccaccggcgtgcgcctcatgcagttccccgaaggagtggattggggggacgggcaaatggtctacctggcgattggcattgcggccaagtccgacgagcacttgcgcctgctgcaactgctgacccgcgcgctgggcgaagaggatctgggccaggcgctgcgtgaagcgaagagcccggaagacctgctcaagctgttgcagggcgcgccgcaagagctggcactcgatgcgcagatgatcagcctcggcgtatcggccgacgattttgaagaactggtctggcgtggcgcgcgtttgctgcgcaaggccgactgtgtgagcaacggttttgccgcagtgctgcaacaggtcgaagccctttcactgggtgacggcctgtggtggctgcacagtgagcagaccgtcaagcgtccgggcctggcgtttgtgacgccagacaaaccgattcgttatctgggtcagccgctgaccggcctgttctgccttgccagcctgggtgaagcgcatcaggcgttgctcgagcgcttgtgtctgctgctgatcgaagggcgtggccatgaactgggccatgcaaccaacagccgtgtcgtccttgaagcgctgggcggcgaagtgcctgctgaatggccgacccaacagattcaactggccaacgcgcacggcctgcatgcccgtccagccaagatactggcgcaactggccaaggaattcgaaggcgaagttcgtgtgcgcgtgctggaaaccggcgagtctgcggtgtcggccaagagtttgagcaagctgctcagcctgggcgtgcgtcgtggtcagacactggagttcattgccgagccgagcatcgctgccgatgcgctgcctgcgctgatcgccgccgtagagcaggggcttggcgaagaagtcgagccattgcctgctgccagcgagcctgaggctgcgccgacgcctgttgctgtcgccaaaccgattaacgcaccggctgcgggcagtgtgctgtcggctgtgccggcctcgcctggtatcgccatcggccctgcgcacgtgcaagtgttgcagaccttcgattacccgcaaaagggcgaatcggttgcggccgagcgcgagcgtctgcagacggccatcggcgaagtgcgccgcgacatcgaaaacctgattcaacgcagcaagtccaaggccatccgtgaaatcttcatcacccaccaggagatgcttgatgacccggaactgatccgcgaagtcgagcagcgtctgaacgacaacgaaagtgcggccgctgcctgggccacggtcatcgaagcggcggctgtccagcaggagcagctcaaagatgcgctgctggccgagcgcgccgccgacctgcgtgatgtgggtcggcgcgtactggcgcagatctgcggcgttgaaaccgttgcggcgcccgacgaaccctacattttggtgatggacgaagtcggcccgtccgacgttgcccgtctggacccggcgcaggtcgccggtattctgaccgctcgcggcggcgcgaccgcacacagcgccattgttgcccgtgcgctgggcattcccgcgctggtcggtgccggtgacgaagtgctgctgctcaagcccggcactgtgctgttgctcgacagccagcgtggacgccttaccgtagcgcctgaccaagccaccttgcagcgcgcggttgaggatcgtgatgcccgcgagcagcgactcaaggccgcagcggcagcgcgtatggaacctgctgtgacccgtgacggccacgctgtcgaagtcttcgccaacatcggcgacagcaccggcacacccgctgcggtggagcagggcgccgaaggcgttggtctgctgcgcaccgagttgctattcatggcccattcccaagcgccggacgaagccacgcaggaagctgaataccgccgcgtgctgaccgacctcggcggtcgtccgctggtggtgcgcacgctggacgtcggcggcgacaagccgttgccttactggccgatcgccaaggaagaaaacccgttcctgggggtgcgcggcattcgtctgaccctgcagcgtcccgatgtcatggaaagccagcttcgcgctttgttgcgcgcggccgacagcggcccgctgcgcatcatgttcccgatgatcggcacccttgaagagtggcgtgaggcgcgtgccatgaccgagcgactgcgcgcggaaattccggtcagcgacctgcagctggggatcatgatcgaagtgccgtcggccgcgttgatcgctccggtgctggccagggaagtggatttcttcagcatcggcaccaatgacctgacgcaatacaccatggccatcgaccgcggccatccgaccctgtcggctcaggctgatggcctgcacccttcggtgctgcaactgatcgacatgaccgtgcgtgccgcgcatgccaatggcaaatgggtgggcgtgtgtggcgaactggccgccgacccgctggcggttccggtgctggttggcctgggcgtggacgaactgagtgtgtcggcgcgcagcattggcgaggtcaaggcctgtgtccgtgaattgacccttagcagcgctcaacaactggcgcaaaaagcgctgacggcgggcagcgctgcagaagtccgtgcgcttgtggaggctgtg

SEQ ID NO: 33729 - DNA, 1752 bp, Pseudomonas syringae
atgaagttagccatagttacggcctgcccgaacggcaaggtcagcagcgtactcagcgcacgattgctcgaagcggcggcactgcgccaaggctgggaaaccagcgtcgaaatcatcgaccccaacaaggccgatcagcagctgtcgcctgaggatatccaggccgctgatctggtgctggtggtcaataccggcccggtagacctgagccgctttgtcggcaagcgtctgtttcaggactcgcctgcccatgcgttacaggatgtagacgggtttctgcaacgcgtcgcgaaagaggcacaggtgtatgtggcgtctcaggcagccgcgcctcaagccactggaacttccgttggcaacgccggggcaaaaccgcgcatcgttgcgatcacggcctgcccgaccggtgttgcgcacacattcatggccgccgaggcgatccagcaggcggccaagcgtctggattatgacctgcaggtcgaaacccaggggtcggtcggcgcgcgcaatccactcagtgctcaagccattgctgatgccgacgtggtgttgctggctgccgatatcgaggtcaacaccgaccgttttgcgggcaagaaaatctaccgttgcggcaccgggattgcgctgaagcaatccgaagcgacgctgaaaaagtccttggcagaaggtcaggtcgaatctgacgaggcgaccgccaagtcgcccgccaagcaagagaagaccggggtctacaagcacctgctgaccggcgtgtcgttcatgctgccgatggtggtggcgggtggtttgttgattgcgctgtcgttcgtgttcggcattaccgcgttcaaggagcagggcacgctggcggcggccttgatgcagattggcggggaagctgcgttcaaactgatggtgccgttgctggccggttacattgcttattcgattgctgaccgtccgggtctggcaccggggatgatcggtggtttgctggcgacaacgctgggtgccgggttcatcggcggtatcatcgccggttttctggccgggtacagcgcggcggcgatcaaccgttatgcacgcctgcctgccagcgtcgaagcgctcaagccgatcctgatcattccgttgctgtcgagcctgttcaccggtctggtgatgatctacgtggtcggcaagccggtggcgggcatgctcgaagcgctgacgcacttcctcgacagcatgggcaccaccaacgcgattctgctgggcgtgttgctgggcgcgatgatgtgtgtcgatctgggcgggccgatcaacaaggcctcctatgcgttctcggtcggcctgctggcgtcacagagctacgcgccgatggccgctgcgatggctgctggcatggtgccgccgatcggtatgggcatcgccaccctcctggcgcgccgcaagttcgcgcaaagcgagcgtgaggcaggcaaggcggccttcgtgctggggttgtgcttcatttcggaaggtgccattccattcgccgccaaggacccgttgcgggtgattccggccagtgtagttggcggtgcgctgaccggtgcattgtcgatgtattttggctgcaagctgatggcaccgcacggcgggctgttcgtgatgctgatccctaacgccatcaaccatgcgctgctttatctgctggcgattgttgccggtagcgtactgaccggtgtggtctacgcgctgatcaagcggcctgagcctgtcgagctggaagcggcgcccgccggcgcc

SEQ ID NO: 33730 - DNA, 1176 bp, Pseudomonas syringae
atgcaagacgtcgttatcgtcgccgccacccgcaccgccgtgggcagtttccagggttcactggccgccgtcccagctgtcgatctgggcgcagcggtcattcgccaactgttggcccagaccggtgtggacggcgcgctggtcgatgaagtcatcatgggccaggtgctgaccgctggcgctggccagaatccggcacgccaggccgctatcaaggcgggcctgcccttctccgtgccggccatgaccctcaacaaggtctgcggctcgggcctcaagacgctgcacctggcgacccaggccattcgctgcggtgatgccgacatagtcatcgctggcggacaggaaaacatgagcctgtccaattacgtcctgccgggcgcacgcaccggtttgcgcatgggccatgccagcatgatcgacacgatgataaccgacggcctgtgggatgccttcaacgattaccacatgggcatcactgccgaaaacctggcgcagaagtacgagatcagtcgtgaagcccaggatgccttcgcggccttgtctcagcaaaaagccatcgccgctatcgaagccgggcgctttgtcgatgaaatcaccccgatcctgatcccgcagcgcaaaggcgagccgttgtccttcgccactgacgaacagccgcgggcgggcaccacggctgaaacactcggcaaactcaaacccgccttcaagaaggacggcaccgtcacggcgggcaatgcatcgtcgctcaacgacggcgctgccgcagtgatgttgatgagcgcgaccaaggcagagcagttgggcttgccggtactcgcgcacatcgcgggatacgccaacgcaggtgtcgacccggccatcatgggcatcggcccggtcagcgcgacccgccgctgcctggacaaggccggttggtcactggacgaactagacctgatcgaagccaacgaagcgttcgccgcgcagtcgctgtcagtcggcaaagaattggggctggacccgcagaagctcaacgtcaacggcggcgcaatcgccattggccaccccattggcgcatcaggctgccgcgtgctggtgacgctactgcacgagatgatcaggcgtgatgcgaaaaaaggcctggccacgctgtgtatcggcggtggccagggtgttgccctcgcgctggcacgc

SEQ ID NO: 33731 - DNA, 780 bp, Pseudomonas syringae
gtgggcggtcagtggctgttgcgcatggaagacctcgaccctccgcgcgaggtggctggcgcgcaagtggcgattcttgaaacactcgagcgctatggctttgaatgggacggcgagatggtccggcaaagcgagcgccatgacgcctacgccgatattcttcaacgctggttcaatcatggcctggcctatgcctgcacctgctcgcgcaagcagctcgaggcctttgaaggcgtgtaccccggtttctgccgcgatgcagggcatgcggcggagaacgctgctatccgcattcgcgtgccggagctggagtatcgtttcgaggaccgggttcagggcacattccacatgcaccttgggcgcgaaagcggcgactttgtgatccgcaggcgcgacggtctgtatgcctatcaactcgccgtcgtcatcgatgacgcctggcaaggtgtcactgatattgtgcgcggtgccgatctgctcgactccaccccccgccacttgtatctgcaggaattgctgggcctgccccagccgcgctacctgcatgtaccgttgattacccagccggacggtcacaagctcggtaaatcctatcgctccccgcctttgcctgccgatcaggcgacaccgctcctgctgcgggcgctgcgagcactggggcaaccggtcgacgcgcacatggccgatggcaccgcgcaagaagtgcttgcctggggtatccggcactggaatgcttcgctcataccgcgacagcgcactattgaagaagcccggatagcc

SEQ ID NO: 33732 - DNA, 798 bp, Pseudomonas syringae
atgccgaacataaccgttacgtcgctgctggccatgaagcacaagggtgagaaaatcaccatgctgacctgttacgacgcaaccttcgcccacacggcctgccaggcgggtgtcgaagtgctgctgataggcgactcgctgggcatggttttacaggggcacgacagcaccttgccggtcaccaccgccgagaccgcctatcacgtggcctgtgtgaaacgcggcaatcagggcgcgctgattcttgccgacctgccgttcatggccaacgccacgctggaacagaccttcatcaacagcaccacgctgatgcaggccggtgcgcacatgatcaaggtcgagggcgctgcgtggctgggcgaatcgatccgcctgctggcagagcgcgggatcccggtgtgcgcgcacatgggcctgacaccgcagtcagtcaatgtgctgggcggttacaaggttcagggccgactggaagcgcaggcgcggcagatgcgcgccgacgccatcgccctggaacaggcaggcgccgccatgatcctgctggagtgcgtgccgagcgagctggccgaagaaatcacccacgcggtaaagattccggtcatcggcattggcgcaggcagcgccaccgacggccaggtgctggtgttgcacgacatgctgggcctgtccatcaccggacgcgtacccaagttcgtgaaaaacttcatgatcggtcagcccgacattcagtcggccattcaggcctacgtcagcgccgtcaaagacgtcagttttccggctattgaacacggattctcggca

SEQ ID NO: 33733 - DNA, 489 bp, Pseudomonas syringae
ttgaccaccgaacgcgtttacattggcctgggcagcaaccttgctgacccggccgagcaattgcgcagcgccctcaaggcgctggcgcaactgccagacagcacgctgattggcgtgtcttcgttctatgtcagcgactcgctgctgcccggtcaaccgcgctttaccaatgccgtcgccgcgctggacaccaccctgccaccgctggcactgcttgatgcgttacaggccatcgagctggatcagggccgtgaacgtcacgaacgctgggggccgcgcaccctggacctcgatattctgctgttcggcgaacgagtcatggacgagccacgcctcaaggtgccgcactatcacatgcaggcacgcgcattcgtgttgtacccgctggctgagctggcaccagagctgaccctggccgacgggcgtgagctgacccacctgttgagtgaatgcccgtttacaggtcttgagcgcctgcccgccagcgta

SEQ ID NO: 33734 - DNA, 1401 bp, Pseudomonas syringae
atgctgaagaagttgttccagtcatttcgttccccactgcgcaaaccgcagcaacacacgcgcaccacgcctgaagtgctcaatagcagccagcattcgctgcaacgcagccagttcagccgttatgccgtcaatattgtcgagcgtctgcaaaatgcaggctatcaggcctatctggtcggtggctgcgtacgcgacatgatgctcaatatcacgcccaaggattttgacgtcgccaccagtgccacgcctgaacaagtgcgtgccgagttccgcaatgcgcggatcattggccgccggttcaagctggtgcacatccacttcggtcgtgaaatcatcgaagtggcgacgttccgcgccaatcatccacaggatgatgaagaagaggacagcaaccagtcctcgcgcaatgaaagcggacgcatcctgcgtgacaacgtttacggcacgcttgaagaagacgctcagcgtcgcgacttcacgatcaatgcgctgtattacgacccggtcagcgagcgtgttctggattacgccaacggcgtgcatgacatccgcaatcgtctgatccgcctgatcggcgaccccgagcagcgttacaaggaagacccggtgcgcatgctgcgtgccgtgcgcttcgcggccaaactggatttcggcatcgagaagcacagcgctcagccgatccgcgcactggcaccgatgctgcgcgatattccttcggcgcgcctgttcgaagaggtgctcaagctgttcctctccggctacgccgcgccgacgttcgagatgctggttgacctggagctgttcgagcccctgttcccggccagttcaaaagcgctggaatacaacccgacctacacccacacgctgatcagcaatgcgctgatcaacactgacctgcgcatcaagcagaacaaaccggtcaccccggcgttcctgtttgccgccctgctctggcctgcgctgccagccaaggtgctgcgtgcccaggaacgtggcatgccgccgattgcagccatgcaggacgccgctcacgagctgatcatcgagcagtgccagcgcatcgcgattcccaagcgctttaccctgccgatccgcgaaatctgggacatgcaggagcgcctgccgcgtcgttcgggcaaacgtgccgacctgttgctggacaactcgcgcttccgtgccggctacgacttcctgctgctacgcgaaagcgcgggcgagcagactgacggtctgggccaatggtggaccgattatcaggactgcaacgacagcgaacgtcgcgacatgattcgtgacctgagcaacaagccagaagccgccggcgctgctccgcgcaagcgtcgtcgcaacagtggcgccaaacgcaagcgcagcagtggcgaggcgcaaagcggtgag

SEQ ID NO: 33735 - DNA, 948 bp, Pseudomonas syringae
atggccttattctcgccttacgcgctgggggcaacgttgtacatgcccgctacccgggacgacatcgtcgatgtggtgttcggcgaaaagattcccgagctgcgttcgctggttgtctgcctggaagatgcggtcgcgctgatcgatgtcgacaccgcattgctcaacctgcgccaggtgctgacccgcatccacgatcggggcggtcgtccggccaatggcccgctgctgttcgttcgcccgcgtgatgcggcgatggcgcgtattctcaacgactggccgttgatggcccacgttgacgggttcgttgtccccaagctgtcgctgaaaagtctgacgagctgggaggaggcggttaccaaccctgcgctggcattgatgcctacactggaaaccccggaagtgttcaacccgacggctatggtcgagctggggcaggcgctcaaagccagcctgcacgagcggatcatcgctctgcgcatcggtggcaatgacctgatgggctgcctgggcttgcgccgcaatccggccatgaccctgtattcaaccccgatgggttatgtgatcccgatgctggcgggggtgatgggcgcgcagggctttgcgctcaccgcgccggtgttcgaacagctcgccacaccagacattctggaacaggaactggcgctcgatattactaatgggttggtcggcaagacggcaattcacccctcgcaggtcaatatcattcagaatgcactacgcgtcagtctggaggacatgaactccgcccggatgattttgaactctgtggcgcccgccgtgttcaagtacaacgatgcgatgtgtgaaccggccacccactataagtgggcaacccacatcatggagcgcgccaaatggcacggagtgttacccacacccgcttcgatcatggatgccagcattcgactcgctgaggcagttagc

SEQ ID NO: 33736 - DNA, 1032 bp, Pseudomonas syringae
atggaaagcacctctctaggcttccctccactcacgatggcggttttcgtcggtctggccattacggccatggctatcgatatgttttcccatcgcggaaacaagccgatcaccctcgcgcaagcttcggcgtggtcgattttctgggtcgccatttcgctggctttcgccggtttcctgtatgtgcagcacggctccgaagttgccacgctgttcgtgaccggttatgcgctggaaaaagtactgagcgtcgacaacctgttcgtgttcatggccttgttctcctggttcaagattccggatggcctgcgccaccgcgttctgtactggggaatcatcggtgccatcgttttccgcggcatcttcgtcgccatcggtacaggcctgctggcgctgggcccgtgggtcgaagtggtgtttgcggtcatcgttgcctggacagccatcatgatgctcagagcgggtgatgacgacgatgaagaagtcgactactcgcaacacatggcttatcgcttcgccaagaaactgttcccggtgtggccaaaactgcacggcagcaacttcttcgtgcgtcgctcggtgctggaagaagaagtcaagaaaccggaaaacgccggtatcacactggccgccaaaggcgctctgttcgcgaccccgctgttcctgtgtctggtcgtggcagagatctccgacgtactgttcgccttcgactccgtgcctgcaatcatcgccgtgagccgtgagcctctgatcgtgttctcggccatgctgttcgcgattctgggtctgcgtaccttgtatttcgtacttgaagccctaaaacgttatctggtgcatctggaaaaggcagttatcgccttgctgttcttcatcgccatcaagctgggcctgaacgcgaccaaccatctgttccatcacggttacgaaatcagcgccaacgccagcttgctggtcgtggttgtcgtgctgatcatcggtatcgttgcaagcctgctcttcccgggtaaagaagaacctgccgaagaaaaagcg

SEQ ID NO: 33737 - DNA, 1326 bp, Pseudomonas syringae
atgagcatcaacagcgaactcactgtcctgatcgtcgaagacgacccgcacgtattgctgggctgccagcaggcgctggcgctggaagacattgccagcgaaggcgtatcaagcgccgaggatgccctcaagcgcatcggcgacaatttcgccggcattgtcatcagcgacatccgcttgccgggcatcgacgggctggagctgctgagccgtctcaaggcacgcgacagcagcctgccggtggtgctgattaccgggcacggcgacatcaccatggccgtcaacgcgatgcgcgacggcgcctacgatttcatggaaaaacccttctctcccgagcgactggtcgaggtcacgcggcgcgctctggagcaacgcgggctggcgcgggaggtctggtcgctgcgcaagcaactggctgagcgtgactcgctggaaggccggatcatcggtcgctcgccagtcatgcaaaacctgcgcgcattgattgccaacgtcgccgacacttcagccaacgtgctgattgaaggcgaaaccggcaccggcaaggaactggtcgcgcgctgcctgcatgatttcagtcggcgcaaggacagccagttcgtggccctcaactgtggcggtctggcggaaagcctgttcgaatcggaaatcttcggtcacgaagccaacgcgttcaccggcgcaggcaagcggcgcatcggcaagatcgagcacgcccacgagggcacgctgtttctcgacgaagtggaaagcatgccgatcaatctgcagatcaagttgttgcgcgtgctgcaggagcgaacccttgagcggctgggctcgaaccagagcgttgcggtagattgccgggtaattgcagcgaccaagtctgatctcaatgcactgggcaagaccaatcagttccgtagcgacctgtattaccgcctcaacgtggtcactctggaattgccgccgctgcgcgagcgtcgcgaggacattctgcaattgttcgaacattttctgcagttgtcatcattgcgcttcgaccgcgagccgccggcgctggatcggcagaccagctcaagcctgttaagccacgactggccgggtaacgtgcgcgaactgcgcaacgttgcagagcgctttgcgctgggtctgccggcgttcaagcaggcaggcacggtcagtgaaaaccagagcctggggtttgccgaggcggttgaagcctttgaacgatcactgctcagcgaagccctgcaacgcagcggcggcaacctcagccaggccagtcaggaactgggcatggccaagaccacactgtttgacaaggtcaagaaatatgggctt

SEQ ID NO: 33738 - DNA, 855 bp, Pseudomonas syringae
atgactatcgcactaaaacaaccgacactcaccgggcaatgtgtggccgagtttcttggcaccgccctgatgattttttttggcacagggtgcgttgcagcgctcaaggtcgcgggggccactttcggcttgtgggaaatctgcatcatctggggcatggccgtcagcatggggatctacctcagcgcgggcatttccggcgcccacctcaacccggccgtcagcattgcgctaagcctgtttgccggtttcgaaaaacgtaaactgccgttttacatctctgcacagatcgccggcgcgttctgcggagcgggccttgtgtacctgttgtacatcagcctctttttcgacttcgaacatgcgcatcacatcatccgcggcagcgagcagagccttgaactcgcctcggtgttctcgacttaccctaacccggccatttccgtgggtcaggcgtttctggtcgaagtggtcatcaccaccattctgatgggcgtgatcatggccttgggcgatgacaacaatggcttgccgcgcggtgcattggcacctttgctgatcggcctgctggttgccgttatcggcagcgcaatgggcccgctgaccggttttgccatgaacccggcacgtgactttggtccaaagctgatgacgttcttcgctggctggggtgaaatagccttcaccggtggtcgcgacattccttattttctggttccgatttttgcgcccattctgggtgcctgcctgggtgctgccggctatcgcgcgctgattgcgcgtcatctgccgagcaccgttactgttgaaaacgaaaaagaagctccagtggttcgcggcaaagttcaggcttcatct

SEQ ID NO: 33739 - DNA, 1503 bp, Pseudomonas syringae
atgactgacacacagaacaagaactacatcattgctcttgaccagggcaccaccagctcgcgcgccatcatcttcgaccgcgacgccaatgtggtgagcacggcccaaagcgaattcgtgcagcattatccgcaggcaggctgggtcgagcatgacccgatggaaatcttcgccacgcagacagcgtgcatgaccaaggcgctggcgcaggctgatctgcaccacgatcagatcgccgccatcggtatcaccaaccagcgtgaaaccaccgtcatctgggaacgcgacaccggccgccctatctacaatgcgatcgtctggcagtgccgccgcagcaccgaaatctgtcagcagctcaagcgtgacggccttgaggagtacatcaaggacaccacaggcctggtgcttgatccgtacttctccggctccaaggtcaagtggattctggaccacgtcgaaggcagccgcgagcgcgcgcgtaaaggcgagctgatgttcggcaccatcgatacctggctgatctggaaattcactggcggcaaggttcacgtcaccgactacaccaacgcctcgcggaccatgctgttcaacatccacacgctggaatgggatcagcgcatgcttgatgtgctggacatcccgcgcgagatcctgcctgaggtcaaaagctcttccgaggtctacggtcacagcaagagcggcatcccgattgccggtattgcaggcgaccagcaggcagcgctattcggccagatgtgcgtcgaacccggccaggccaaaaacacctacggcaccggctgcttcctgctgatgaacaccggcaaaaaagccgtgaagtctgcgcatggcatgctgaccacgattggctgcggcccacgcggcgaagtggcttacgcactcgaaggcgccgtattcaacggcggttcgaccgtgcagtggctgcgtgacgaactgaagctgatcaacgacgcgctggacaccgagtacttcgccggcaaggtcaaggacagcaacggcgtgtacctggtgcctgccttcaccggtctcggcgcgccctactgggacccgtatgcccgcggcgcactgttcggcctgacccgtggcgtgaaggttgatcacatcatccgcgcggcgctggaatccatcgcctatcagacccgtgacgtgctcgacgcgatgcagcaggactcgggcgagcgcctcaagtcgctgcgcgtggatggcggcgcggtcgccaacaacttcctgatgcagttccaggcagacattctcggcactcatgtcgagcgcccgcaaatgcgtgaaacaacggcactgggcgcagcgttcctggcaggtctggcgattggtttctggagcagcctggacgagttgcgcaacaaggctgtgatcgagcgcgtgttcgagcctgcttgcgaagaggcgcatcgcgagaagctgtacgcaggctggcaaaaagccgtcgcgcgcacccgtgactgggaaccgcacgaaaacgaagag

SEQ ID NO: 33740 - DNA, 924 bp, Pseudomonas syringae
atgcgtatcgttccccatctgcttggcgcagccattgctgccgctctgatcagcactccggttttcgccgccgaactcaccggcaccctgaagaagatcaaagaatccggcactatcaccctcggccaccgtgacgcctccatcccgttttcctacatcgcggatgcctctggcataccgatgggctactcccatgacatccagctgaaaatcgtcgaagccatcaagaaagaactcgacatgcctgacctcaaggtcaagtacaacctggtgacgtcccagactcgaatcccgctggtgcagaacggcactgttgacgtggaatgtggttcgaccaccaacaacgtcgagcgtcagcagcaggtcgatttctccatcggcatcttcgaagtcggtacacgcctgctgtccaagaaagactccagctacaaggacttcgatgacctgaaaggcaagaacgtcgtgaccacggccggcaccacgtccgagcgaatcatcaagacgatgaacgccgacaagcagatgggcatgaacgtgatctccgccaaggaccacggtgagtcgttccagatgcttgaatccggccgtgcagtcgctttcatgatggacgacgcattgctggccggcgagatggccaaagccaagaagccggatgactgggctgtgaccggcactgcgcaatcctacgaaatctatggctgcatggttcgcaagggcgacgccccgttcaagaaggccgtggatgacgccattgtcgccacctacaagtccggcgacatcaatgccatctacagcaagtggttcatgtcgccagtcccgcctaaagggctgaatctgaatttcccgatgagcgccgaactcaagaagctgatcgagaaccccaccgacaaagctgctgacgacaaagctgaagacaagaaagcc

SEQ ID NO: 33741 - DNA, 348 bp, Pseudomonas syringae
gtgcgcaagcgcgacactcaggcattcatgcagccgggcggcaagatcgagcctggcgagcccgcaccgctggcgcttgccagagagcttgaagaagagctcgggctggtcatcgacccgcaacaggcaacgtttctgggcgagttcgcggcaccggcggccaacgagccggggtttgaggtacgctgccaattatatgaagtcaggaccgacgccgacgtgttgcccgccgccgagatcgaagaagtgatctgggtgagcgcagacggccatgccgatctgcatctggcgcctttgacccgtgatctgatcctgcctctgtaccgccagcggcaggccgcagcgaac

SEQ ID NO: 33742 - DNA, 981 bp, Pseudomonas syringae
ttgacgctgatcggcgtcgacaagctgggccgttggctgcgtttcgacgaggccgattacctgctcaatgccaatgaccctgcgcggatcaagctgagcggttcgggcaagcagttgtcgttgctgcccggcagtgtgggcgggcagtttgtcgaggtcgagtcgggcaagccgctggcggccatcgatgtggtctttccgctgatccacggcgcgttcggcgaagacggcgcgttgcaaggcctgttgcgtatgctggctgttcctttcgtgggcgccgacgtgctcgcttctgcggcgtgcatggacaaggacgtgaccaagcgcctgttgcgtgatgccggcattgccgttgcgccgtttatggtgctgaaccgtggcgaaagcctttcgttcgcgcaggcggctgcgcagttgagcctgccgatgttcgtcaaacctgccaatcaggggtcatcggtgggtgtcagcaaagtatctgacgaggcgggtttcgctgcggcactggcgttgggtttcgagttcgatcacaagctgctgatcgagcagggcatcgtcggcagggaagtggaatgcgccgtgctgggcaatgatgaggcgcaagtcagtgtttgcggtgaagtcgtcgccaacgacgaattctatgcctacgacaccaagtacctgaacggtgatcaggcgcgcatcgccatacccgccgagctgcctgccgacctgagcgatcaggtgcgtgacgttgcgctacaggcttacaaagtgctgggttgcgcggggctgtcacgggtcgactttttcgtcaccgaggcgcgtgaaatcatcatcaacgaggtcaacacgcttcccggcttcacctcgatcagcatgtaccccaagctctggcaggccaccggtctgagctatgccgaactgatccatcgcctgatcgttctggccctggagcgtgcagacgaagcgcgcctgctgaaaagggacatttttgca

SEQ ID NO: 33743 - DNA, 1041 bp, Pseudomonas syringae
atgtctgaccgcctgaccctcctgcgtcccgacgactggcacattcacctccgtgacggagctgttttgcctcataccgttgccgacgtagcgcgaacttttggccgcgcaatcatcatgcccaacctcgtgcctccggttcgcaacgcacagcaagccgacgcctatcgccagcgtattctggctgcacgcccggccggcagccgcttcgagccgttgatggtgctttacctcactgaccagaccacgcccgaagacattcgtacggccaaggccagcggctttgtccatgcggccaagctatacccggccggtgcgaccaccaactcggattccggtgtcaccagcatcgacaagatcttcccggccctcgaggcaatggccgaagtcggcatgctgctgctggtgcacggggaagtgacacgcggcgagatcgacgtgttcgatcgcgaaaaagtgttcattgacgagcacctgcgccgtgtcgtcgaacgcttcccgaccctcaaagtggtgtttgaacacatcaccaccggcgatgccgtgcagttcgtcaacgaagcctcggccaacgtcgcagcgaccatcacggcgcaccacctgctttataaccgcaaccacatgctggtcggcgggattcgtccgcacttttactgcctgccgattctcaagcgcaatacgcatcaggttgccctgcttgacgcggccaccagcggcagcggcaagttcttcctgggcaccgactcggcaccacatgcccagcacgccaaggaaaacgcctgcggttgtgccggttgctacaccgcctatgcggccatcgagctgtatgcagaagctttcgagcaacgtaacgcactggacaagctggagggcttcgccagccttcacggtccggcgttctacggcctgcccgccaatcaggacaccatcacgctggtgcgtgacgagtggaccgcccctaccagcctgccgtttggcgagttgaccgttattccgctgcgcgcgggtgaaacactgcgctggcgtctggaggaacacgcg

SEQ ID NO: 33744 - DNA, 471 bp, Pseudomonas syringae
atgagtagtgctatttgcccctgcggcagtggcgacctgttgctggcctgctgcggtcactatcacgccggccagcctgcgccgtgcgcggagaaactgatgcgctcgcgttacagcgcgtacgtgctggggctgacggattatctggtgcagaccacgctgccggtgcagcaagccgcgctggaccgtgaagccatcgcacaatggagcgcgcaaagcacctggctggggcttgaagtggaaagcgcggaggtattgggcggcaaacccgagcacgccttcgtgacgtttactgcacgctggcacgatggtaatggcgaacacagccacaaggaacgctcatcgtttgtgcagaatcagggccactggtacttcatcgattccaccgtcccgctcaaggccggccgcaatgatggttgtccgtgtggcagcgagcagaaattcaagaagtgctgctcggcttatgtgatt

SEQ ID NO: 33745 - DNA, 747 bp, Pseudomonas syringae
ttgactgtctatttcatcggcgcaggccctggcgatcccgagttgatcaccgtcaaggggcaacgcctgatccgcacctgtccggtcattatctatgcaggttcgctggtgccgctcgccgtgctggaaggccaccaggcggtgcaggtgaccaacagcgcggaactgcatctggagcaaatcattgatcggatcaagaccgctcatgcgcaaggccaggatgttgctcgtgtacattccggcgaccctagcctgtacggtgccattggcgagcagatccgccatttgcgtgaactgaatatcccctttgaaatcattccgggagtaactgcgacggccgcctgcgctgcgttactgggcgtggagctgacgctgccggatatttcgcaaagcgtgattctgacccgctacgccgacaagacctcaatgccgagcggcgaagaactcgccagcctggcaagccacagggcgaccatggcgattcatctgggcgtaaataacctgcacagaatcgtcgaagagctgaccccgcattacggcaccgactgcccgattgccgtggtacaccgcgccagttggccggatcaggaatgggcaataggtacgctggcagacatagaggaaaaagtgcgagccaaaggctttcgccgcaccgcactgatcctcgtcggccgcgtactggccgccgacacatttggcgaatcctcgctgtaccgggccgggcatgcgcacctgttcaggcccaag

SEQ ID NO: 33746 - DNA, 777 bp, Pseudomonas syringae
atgaaacactttttccttcccgcactgaccgttgttgcttttcctgccctgtcgttgccgtttgcccacgctgaaccgggcgatttcagcctgggcctgggcgcggcaatcagcgaaagcccttatgcaggcgtcggcacacaggtcaacccgattccgttgattaaatatgaaggcgaacgtttttacgtgaacggcgtaaccgcgggttatcacctgatcaacaccgagtcgttctccctcgatgccattgttgccctgcagatggacggcatcgatcgtgacgacttcggtcgccgcgaactggccagaaacggcatcgaccgcgacctgctggaagaccgcgacaatggcatcgacgcaggcttggccgccaaactgcgcggcgctgccggccagcttgaaggggtcgccaaaaacgacatcagcggtgccagcgatggctactcgctgaaccttgaatacgcgtaccccttcacctggggcaaaacccgcttcaagcccaacatcggtgccacccatatgtctggcaacctggtgaattactactacggtacgctgaaagaagaagagcaacgcggcattgcccggtaccgtccaggcagcgccacggtgtcctatgccggtctcggtttttcccggtccatcggcaaacagtgggaagtctcgggcaacctgcgctacagcgcactgccggatgaactgagcgacagcccgctggtggagcgtgacacggacagttccacgtcgatgtttatcggcatatcaagaaagttc

SEQ ID NO: 33747 - DNA, 870 bp, Pseudomonas syringae
atgcccgactcacccacaacaacctcgacgctcgatctggaactgctgcgcaccttcgttgccgtggtcgaccagcacagctttgctcaggccggcgctcacctggcgcgaacccagtcttcggtcacgcagcacatgcagcgcctggagcagcagaccggtgtcagcctgtttcagaagaaaggacggcacaagcaattgaccgagtcgggtcggcaactgctgaggcacgccaggcagatgctgtcgctcaatgacgatgcgctcaattcattgcgcgacagcagcctgagcggcgtgctgcgcatcggctcgccccatgacatcgccgacaccattttgccgccgctgctcagccacatcgcccgttcggcgccaaggctacgcctggagatcgatgtggggcgcagcccgttcctgatggacgacctgcaccgcggcaaagtcgacatggtgatttctacccgcgaagacccgacgctggagggcttcgccctgcgaacctcaccggtctggtggatctgctcggcgcagtacattcatgtgccgggcgagcccctgccgctgattctggtcgatgagcccagcatctatcggcgctatgcgctgcacgcgctggaggcggccaacattccatggcgccaggcctatctggcttccaacctgatcggcatcaaggccgccacccgcgcggggcttggcgtgacgccacgcagcatggaaatgctcggcccggacatgcgcgtgctgggggaaagcgaaggcctgccgcgcctgccggacgtcacctaccacttgtggatcaggcccaataccttgaacccgctggcgcgcaaggcctatgagctgatacgcgcaagccagagcctg

SEQ ID NO: 33748 - DNA, 1200 bp, Pseudomonas syringae
atgaccaccgcctgcctgatgagcacttatcaacctctggccctgagtttcacccgtggcctgggcacgcgcctgtgggaccagagcggtcgtgaatacctggacgcggtggcaggcgtggcggtgaccaatgtcgggcattcccaccctatgctggtggatgccattcgcgatcaggcgggtttgctgttgcacacctccaatctgtacagcattgactggcaacagcggctggcgcaaaagctcaccaggctggcagggatggaccgggtgtttttcaacaattccggtgccgaggccaacgaaaccgcacttaaactggcgcgcctgcatggctggcacaagtacatcgagcagcccttggtggtggtcatggaaaacgcctttcacgggcgcacgctgggcaccctggccgccagcgacgggccggcggtgcgcctgagttacagcgacttgccgggtgattacatcaaggtgccgttcggtgatctgctcgcgttcgacaaggtttgtgtaacccacggccaccggattgctgccgtgctggtcgaaccgattcagggcgagggcggcgctcaggtcgcgccggctggttatctcaaggcgttgagagaacgttgcacgcggcgtgactggctgctgatgctcgacgagattcagaccggcatgggccgtaccggcaagtggtttgcctttcaacatgaaggcattgtgccggacgtcatgaccctcgccaaagggctgggcaatggcgtaccgatcggcgcctgtctggcgcgaggcaaagccgcagagttgttcacgcccggcagtcatggcagcacgtttggcggcaacccgctggcgtgccgggtcggttgcacggtcatcgacatcatcgaacagcaggcgctggtagaaaacgccggggttcgagggcagcacctgctcgggcgcttgcaggaagtgctgggcggccatccgcaggtcatgcaggtacgtggcagggggctgatgatcggtatcgaactgcgcgaggctattcccgaactgacccgcatcgcagccgagcaacatggcttgttgatcaacgtcacgcggggcaaagtcattcgtcttctgccgcccctggtgctggaggctgccgaggtggagcagattgttcaaggcctggcggcaagcctcgacagcgcgagctaccgtgcgctcgagcgctctgcc

SEQ ID NO: 33749 - DNA, 1521 bp, Pseudomonas syringae
atgcaacaggctatcgagcaaacagccacaggcggtgccttgcgcttcaatggcatctgcaaggtatttcccggcgtcaaggcgctttcggacatcagcttcgaggcccgccctggcagtgtccatgcgctgatgggggagaacggcgcaggcaaatccacgctgctgaagattctgggcggctcttatcagcccaacagcggcaccctgcagatcggtgagcacagctatcaattcaaatccaccgccgagagtatcgcggcgggtgtggcggtgattcatcaggagctgcatctggtgccggaaatgaccgtcgccgagaacctgctgctcgggcacatgcctaatcgtttcggcttgatcaatcgtggcgccatgtaccgtcgagccggtgagctgctcaaaggtctggccgacgagatcgacccgcgcacgcgcttgggcgacctgtcgctgggccagcggcaactggtggaaatcgccaaggccatgtcgcgcaacgctcatgtcatcgcgttcgacgaacccaccagcagcctgtcggcgcgcgagatcgaccgtttgatggcgatcatcgtgcggctgcgggatgaggggcgggtgattctgtatgtgtcgcatcgtatggaagaaatcttccgggtctgcgatgccgtgaccgtcttcaaggacgggcgctttgtcaaaaccttcgagcagatggctgatctggaccacgaccggctggtgacttgcatggtcggtcgcgatattcaggacatctacaactatcgtccacgtcagcatcaggggccgagcctgcgggtcaccggtctgttggggctgggcttgcaggagccagtgagtttcgccgtgcagaaaggcgaggtgctgggctttttcggtctggtgggcgcaggtcgtaccgagctgtttcgcattctttccgggctgacgcgcagtaccgccggcagcctgcaactggacggtcagccgctgactttgaagtcgccacgtgatgccattgcggccggggtgctgctctgcccggaagaccgcaagaaagaaggcatcgtgccgctgtccagcgtcgcggagaacatcaacatcggtgcgcggccccggcatgtgaatcttggctgcctgatccagggcggctgggagcgggacaacgcgcgtgctcagatcaagtcgatgaacgtcaagacgccatcgcccgagcaacagatcatgtttctgtccggcggtaatcagcaaaaagccattctcggtcgctggctgtcgatgccgatgaaagtcctgctgctggacgagccgacccgcgggatcgatgtcggagccaaatccgagatctacgagatcattcacacattggccgccgatggcattgccgtgatcgtggtgtccagcgacctgatggaagtcatgggcatttccgatcgtattctggtgatgagtgaaggcgccattaccggtgaactcaaccgcgacgaggctgacgagtcgcgacttctgcaattggctctgccacgcacgcgcggc

SEQ ID NO: 33750 - DNA, 1566 bp, Pseudomonas syringae
atgcacaccgaacacacgtctcacgacccgctgcaccccttcgccgaccagaccctccctcaacgcctgcgtcgctgggcgaaccagtacggcgcgcacaccgcgctggtcgcaggcgacgtacgcctgagctacgcgcagctggaccagcgggttgatcgcctggccgggggccttgcagcgctgggcattacggcaggtgaccgggtcatgctgcaactgcccaacggtgtcggctttgtctgcgcattgtttgccgtgatgcgcatcggcgcggtaccggtattggccatgcccacccagcgtgcagtggacattgcagcgctgtgccggttggccgaacctgtggcctacctgatccccgatcgccttcgggacttcgattaccggggcatggcagccggcatcgtcgagcagcagccctcactggcgcacgtcattgtcgatggcgaacccgggcctttcatcgccttgtcggcgctggatgccccctgcccgaccgatccgctggccgacccgcgcgggctggccttgctgctgctttcaggcggcaccaccggcacgccaaaactgatcccgcgcagccacgccgactacgcctacaacttttcccactcggccaggctctgtgaactggacagcgatagcgtgtacctggccgtgttgccgaccgcgcacaatttcacccttgcctgccccggcgtgctcggcagtctggccgccggtgcgacggtggtaatgggcgacagcgccagttgtgatgcggccatgccgttgatcgagcgcgaaggcgtcacccatgtggcgctggtcccgccgctggcgcaactctgggcccaagggcgcgactgggaggacagcgacctgaccagcctgaagctgctgcaagtcggcggctcgcgactggacccggcactggcagcccacctgcttgaagcgctggactgccaaatacaacaggtgttcggcatggccgagggcctgctgtgctacacccgcccggacgatccgctggaagtggtgctcaatacgcagggccgtccattgtcgccgttcgaccaggttcgtctggtggacaccgacctgaatgacgttgctcatggccagaccggcgaactgctgacccgcggcccctacaccattaccgggtattaccgggcggcagatcacactgcgcgcagtttcaccgccgatggctactaccgcagcggcgaccttgcgcgctggacgccgcaaggcaacctgatcgtcgaagggcgcatcaaggaacagattcagcgcagcggtgaaaagatctctgcggcacacatcgaaaatcacctcacggcgctgcccgacatcgaatctgccgtcgtggtggcggtgccggatccgctgctgggcgaacgcatctgcgcgttcattctgggcgacccgccaacgggtgccggccaatgcattcgcgaccaactgcgtcggcaggggctgggtgaagacaagctgcccgatcagttcgagtgggttgccgcatggccgctgacggccgtgggcaagatcgacaaacgccaactggccgctctggcccag

SEQ ID NO: 33751 - DNA, 1251 bp, Pseudomonas syringae
atgttcagccgtgatttgactatcgccaagtacgacgccgatctgtttgccgccatggagcaagaagctctgcgtcaggaagaacatatcgagctgatcgcctcggaaaactacaccagtccggccgtcatggaagctcaaggctcggtactgaccaacaagtacgctgaaggctacccaggcaagcgttattacggtggctgcgagtacgtcgacgttgtcgagcaactggctatcgaccgtgccaaagagctgttcggcgccgactacgccaacgtccagccacacgccggttcgcaagccaactcggcggtctacctggctctgctgcaaggcggcgacaccattctgggcatgagcctggctcacggcggtcacttgacccacggtgccagcgtgtcctcctcgggcaagctgtacaacgctgttcagtacggcatcgacggcaacggcatgatcgactacgacgaagtcgagcgcctggctgttgaacacaagccaaaaatgatcgttgccgggttctctgcctactcgcagatcctcgacttcccgcgcttccgtgccattgccgacaaggtcggtgcctacctgttcgtcgacatggcgcacgtagccggtctggttgccgcaggtgtctacccgaacccggtgccgttcgccgacgtcgtcaccaccaccacgcacaagaccttgcgcggtccacgtggcggtctgatcctggctcgcgccaacgccgacatcgagaagaagctcaactccgccgtattccctggctcccagggcggtccgctggagcacgtcatcgcagccaaggccatctgcttcaaggaagcgttgcagcctgagttcaagacctaccagcaacaagtggtcaagaacgccaaggcaatggccggcgtgttcatcgagcgcggtttcgacgtggtgtccggcggtactgaaaaccacctgttcctgctctcgctgatcaagcaggacatctccggtaaagacgccgacgccgcattgggtcgcgccttcatcaccgtcaacaagaactcggtacccaacgacccacgctccccgttcgtcacctccggcctgcgcttcggcaccccggcagtgaccactcgcggcttcaaggaaacagagtgcaaagaactggccggctggatctgcgacatcctggcggacctgaacaacgaagccgtgatcgacgctgtccgtgagaaggtcaaggccatctgcgcgaagctgccggtttacggcgct

SEQ ID NO: 33752 - DNA, 3762 bp, Pseudomonas syringae
gtgaaaggtgtattggcggcgctggtcttggtgatgcttgccatgttgctctggcaattgatcgagcagtttcaccagactcaggaacgccagcgtcagcgcagcctggaatacagcatccagctttccgaccggatgagcctgaacatggcgctcaaggcgcagatcgccatgaacctgctggacgaggcgcaatcgtccggggaacgtctggagcagcccgtcatgctggcaggcctgcgcactgccctgcccgcgctgcgcagcgttgctcgcctgaacccggccggtgacatcgtcagcgacagcgccgaagtgccccgcgacggcgacttcctcaggcatgccatgaggcaggcgctgggccgcccttatttctacaccagtaccgacgacggcaaccagctctacgtgctgattcgccagggcggcggcattaccggtgactattgggcgctgcgcatggcaccggacgcgctgaaagacctggccagccagccggctcaggactttcagcacgtgtggcgtctggagcaacgcaagacacaacgggtcatcctccgcgaaccgctgccctccaatgatgccgacagcggtctgtccgaaaccattcttctgcaaccgctcagcaacagtgactggcagctgcgcggcctgttcgacacctacaaggcgcgcagcgaactgctcacgccactgatcggcaaatgtgtgatcggcctgctgctctcgatcctgccattgatcgcactgatcagcctgcgccgacgtcagcgccagatgctgcaaagtcgacgccgctatcgggacatcttcgaaggcgcgggcgtggcgatctgcgtgatggatatgtctggcctgcaggagcaactcgacgcccttcagatcagcacgggcgaagagtttgatcggctgctcaagagccagcctgcctcgctgaaaaggctgctgcagcaactgcgcatcaacgagctcaacgaagttgcgcttggcctgctggaaatcgagtgcaacgaacaggcctggcagcagttgatcgagggcgaatcgcgcacgcgcccaggcatcggcattcaggtgatacatgccgtgcttgccagacagacacgattggaactggaaatctgcctgacacgtgcaagtggtcaggaccagcatctgtggctggtcatgcgcctgcccgaagcgcgtagcgacttcgatgccgtgattctcagcatcggcgacatcaccagccgcaaacagaccgagctgtcactgctggaccgcgaaagcttctggtccgatgtgatccgcaccgtgccggaccacctgtatgtgcaggacgtgctcagccagcgcatgatctacagcaaccaccattttggccatacgctgggctacaacaagttcgaactgcgcgcgatgggcgagttcttctgggaaatactgctgcacccggacgatgccaagagctatcaggacatgcgcctgcgccagcgccaccacgggcacaacgagttgctgcaatgcgtgctgcgctttcgcgatcacgagaacaactggcgttgcttcgacgtgcgcgagcaggcactggcctgggacacagaacatcttgtcacgcgcatcatcggcattgccaaggacatcaccgagcaggttgcgtccagccagtcgctgcgcgacagcgaacagcgctaccgtatgctcgccgaaagcatcagcgacgtgatcttttccaccgacgcccatctgaccgtcaattacgtcagcccctcggtcgagcgcgcgctgggctacagcgccgactggattacccggaacggctggtctgccgccattgccaacccccagcaactgaccggttttgatgcgctcatcagccgcatcagcaaagtcctccacaagccgcaggagctggcgcggttgcgcgacgaagtgaccacccggatgtttctgttcgactgcctgcgtgcagacggtcgcaagatcccggtggaactgcgcgtggtactggtatgggatgaacacggcaatttcgagggcattttcggcgtcggcagggacatcagccagcaacgccgcgccgaaaaagacctgcgcatggctgccacagtatttgagcattccgcctcggccatcctcatcaccgaccccgcaggctatatcgtgcaggccaacgaggccttcacgcgcgtcagcggctacgaagtcgctcaggtgctcgaccaactgccgggcatgctcaccgttgaaagcgaacaggaagcgcacttgcgctacatcctcaggcagttgaacgggcaaggcacctgggaaggtgaaatcaggctcaagcgacgcaacggcgaacactatccggcctgggtcggcatcacggcagtggtcgatgacgaaggcgacctggccagttatgtgtgcttcttcagcgacatcagcgagcgcaaggccagtgaggaccgcatccaccgcctggcttattacgacgcgctgacgcacctgcccaaccgcacactgtttcaggatcgcctgcattcggcgttgcagcaggcagagcgccagcaggcctgggtggtgctgatgttcctcgatctcgaccgtttcaaaccgatcaatgactctctgggccatgccgccggcgaccggatgctgcaggaaatggccacgcgcctgctggcctgtgtatccgctgacgacaccgtggcacgcatgggcggtgatgaattcacgctgttgctgcaaccggacatcacgcgcgaagccgcgctgacgcgcgccattcacgtggccgagcggatcctgaccagtctggtgacgccgtttgtgcttgaaggccgtgagttctttgtcaccgccagtatcggcatcgcgctcagcccgcaggacggtagcgaactgagcaagttgatgaagaacgccgacacggcgatgtatcacgccaaagagcgcggcaaaaataacttccagttctaccagaccgacatgaacgccacggcgctggagcgtctggagctggagagcgatctgcgtcacgccctggaacagcaggagttcaccctctattaccagccgcagttcagtggtgacggcaaacgcctgacgggcgcagaagcgttgctgcgctggcgccatccgcgtcgcgggctggtgccgccgaacgacttcatcccggtgctcgaagagctcgggctggtggtggaagtcggcgactgggtgctcaccgaagcctgtcgccagctcaagcactggcatcaggcgaaagttcgcgtgccgaaagtatcggtgaacatctcggcgcggcaattctcggacggccagttgggtaaacgcatcgcccacatactggaacagacgggtctgtcgcctgcctgtcttgagctggaactgaccgaaagcatcctgatgcgcgaggtcaacgaggccatgcagatcctcgacggcctgaaaaaccttggcttgagcatcgccgtcgatgacttcggcaccggatactcgtcgctgaattacctcaaacagttcccgatcgacgtgctgaagatcgatcgcaccttcgtcgatggcctgccctcaggcgaacaggacgcccagatcgcccgcgccatcatcgccatggcccacagcctgaacctctcggtcatcgccgagggcgtggaaacccacgaacaactggagttcctgcgtgagcacggctgtgacgaagtccagggctacctcttcggccgccctatgccacccagccagttcgaagcgcaattcagcaacgatgccctgttcatgctggat

SEQ ID NO: 33753 - DNA, 1257 bp, Pseudomonas syringae
atgatcgaaagcggtgccgccgcgcctcccagcgggcgcaccggctggaccggctcacaggcgcagatcagaaccctggcgcaagtcagcgttgaagagatcccgcgtttctccaccaactccgccgaactcgacagggtgctcggtggcggtctggtggatggttctgtggtgctgatcggcggcgaccctggcatcggcaagtcgacgattctgttgcaaacgctgtgcaacatcgcccagcgcatgcctgcgctgtatgtcaccggcgaggaatcccaacagcaggtggccatgcgcgcccgccgtctgggcctgccgcaggacaaactgcgggtcatgaccgaaacctgcatcgaaaccattattgccaccgccaaggtcgagaagcccaaggtgatggtgattgactcgatccagacgatcttcaccgagcaattgcagtccgcaccgggtggcgtgtcgcaagtgcgcgaaagcgccgccttgctggtgcgctatgccaagcagagtggcaccgcgattttcctggtggggcatgtcaccaaggaaggcgcactggcggggccgcgtgtgcttgagcacatggtcgataccgtgctgtatttcgagggcgagtcggacggtcgtctgcgtttgctgcgcgctgtaaagaaccgtttcggcgcggtaaacgaactgggtgtgttcggcatgaccgacaagggcctgaaagaagtgtccaatccgtcggcgatttttctgacccgtgcgcaggaagaagtccccggcagcgtggtcatggccacatgggaaggcacccggccgatgctggtcgaagttcaggcgctggtggatgacagccatatgtccaatccgcgccgcgtaaccctgggcctggatcagaaccgtctggcgatgctgctggcggtgctgcaccggcatggcggcattccaacccacgaccaggacgtgttcctcaatgtggtgggcggggtcaaagtgctggaaaccgcgtccgatctggccttgatggccgcagtcatgtccagcctgcgcaatcgcccgctgccgcatgacttgctggtgtttggcgaggtggggctgtcgggtgaggtcaggccggtgcccagcgggcaggagcgcttgaaagaggctgccaagcacggcttcaaacgggccatcgtgccgaaaggcaatgcgccgaaagaagcgcctcccggtctgcagatcattgcggtcacgcgtctggaacaggcgctggatgcgctgttcgag

SEQ ID NO: 33754 - DNA, 1884 bp, Pseudomonas syringae
atgcagctcgatccgctgcgggcgacaccggcggtggtcaacaacgatggtctggactacgtgccgaccaacaaacacatcctgttcggtcaccactttgccgccatcgctggcgcaggcccgctggtcggccctgtcctggctgcgcagatggggtatctgcccggtacgctgtggctgattgccggggtggtactggccggtgcggtgcaggacttcatgatcctgttcctctccacgcgccgtgacggtcgctcgctgggcgatatggttcgcgaggaaatgggccgcattcccggcaccatcgccttgttcggctgcttcctgatcatgatcatcatcctcgcggtgctggcgctgatcgtggtcaaggccctggccgaaagcccgtggggcatgttcacggtcatggcgacgattccgattgcgatgttcatgggcatttacatgcgttacatccgcccgggccgtatcggtgaaatctcgctggtgggcgtgctgctgttgctcggttcgatctgggtcggcggcatggttgcggccgacccgacctgggggccgatgtttaccttcaccggcatccagatcacctggatgctggtgggttacggctttgtggctgcgatgctgccggtctggctgctgttggcaccgcgtgactacctgtcgacgttcctgaaaatcggcaccattctggcgctggcaatcggcatcctgattctggcacccgagctgaagatgccggccctgacccagttcaccgacggcaccggtccggtctggaagggcgcgctgttcccgttcctgttcatcaccattgcctgcggcgcggtatcgggtttccacgcactgatctcctcgggcaccacgcccaagctgctggataacgagaaaaacgcccgttatatcggttatggcggcatgttgatggagtcgttcgtggccatcatggcaatggtcgccgcttcggtgatcgagccaggcgtctacttcgccatgaacagcccggccgctgtggtcggcagcgatgtggtgaccgtcgcgcagacagtgtccagctggggctttgccatcacgccggagcaactgaccgccgtggccaaggacatcggtgaaaacaccatcctggcccgtgccggtggtgcgccgacgcttgctgtggggatcgcgcagatcctccatcaggtactgccgggtgaaaacaccatggcgttctggtatcacttcgcgattctgttcgaggcgctgtttatcctgacggcggttgacgccggtacacgtgccgggcgcttcatgcttcaagacctgctgggcagcttcgttccggccctcaaacgcacagaatcctggacggccaacgctatcggcacaggggggtgcgtggcgctgtggggttatctgctttatcaaggcgtcatcgacccgctgggcggcatcaataccttgtggccgttgttcggtatctccaaccagatgcttgccggtatcgcgttgatgctggccagcgtcgtgctgatcaaaatgaagcgtcagcgctatgtgtgggtcaccatgctgcctgccgtctggctgttgatctgcactgtgacggcgggcctgatcaagctgttcgatgccaaccctgcggtcggcttcctggccctggccaagaaatacagcgcagcggcagatgccggccagattctggcgccggcaaaaaccatggaccagatgcagcacgtgattttcaacgcgtacaccaactccgggttgaccatactgttcctgtttgtggtgttcagcattctgttctacgccatcaaggtgggccgtgcggcctggacgaccgaggcgcgtaccgacaaggaagctccttaccaggccatgccgcccgcgtcgcaggtg

SEQ ID NO: 33755 - DNA, 195 bp, Pseudomonas syringae
atgttcaatgacctgagtcgcctcgggaaatacctcggtcaggccgcccgcctgatggtgggcatgcccgactacgacacctacgtcgagcacatgcagaacacgcacccggacaagccgatgatgatctacgagcagttctttcgagagcggcaagaggcgcgttacggcggcaagggcggtccgaagtgctgc

SEQ ID NO: 33756 - DNA, 975 bp, Pseudomonas syringae
atgaccgagttgcaacccatcccagtgaccgtgctgaccggttttctgggcgcaggcaaaaccaccttgctgcgccacctgctcaaggccgaacacggcctgaaaatcgccgtgatcgaaaacgaattcagcgatgccggtatcgacagccagttgctgggcaccgacccggtgcagatcatgaccctgtccaacggctgtgtgtgctgcaccattcacaccgacctgaccaaagcgctttacctgttgctggagcgtctggacagcggcgaaattgccttcgaccgactggtgatcgaatgcaccggcctggccgatcctgcgcccgtcgcccagacctttttcatcgatgaagaactgcgcgagcgctacatcctcgacggcatcatcacgttggtcgacgctgcccacgccgacacccacctgacgcaaaccatcgcccaggcgcagatcggctttgccgaccgcttgctggtcagcaagcgcgatctggtcgacgacgcagccttcgatgccctcagcgcacgcctgacccgcatcaaccgccgcgccccgatccgcatcgtcgagcacggcaagatcgacctcgccgagctgctcgacgtacgtggcttcaacctcaacgccgatctgggcggcagcatgaccctgcgcccgctggccccggccggtaaatccagcgaccgcatcaccagcctcgtcctgcgcagcgacaaacccctgaacctggaccgcctcagcgagttcatgaacgaactgctcgaagaccacggcaagcaactgctgcgctataaaggcgtgctcaacattgaggatgaaccgcgcaaaatggtatttcagggcgtgctcaaactgtacggctttgactgggatactgaatgggccgagggcgagctgcgtgagagcgtgatcgtgtttattgccgatgagttgccggaggagaagattcgggcggggtttgcggcggtggtgggg

SEQ ID NO: 33757 - DNA, 1056 bp, Pseudomonas syringae
atgacctacccggagtttacggtgagtaccgacctggcgctgcccggcgcgggcatcacggcactgttcggcccgtccggttcgggcaagaccacctgcctgcgttgcatcgccgggctggaaaaagccgaacagggttttattcgtgttcatgacgaagtctggcaggacagcgaaaacggagtctttctggccccgcacaagcgcgcaatcggctatgtctttcaggaagccagcctgtttgaccacttgtcggtgcgcgccaacctggaattcggcctgaaacgcattccgcgcccgcaacgccgcatcgagttgcagcaggcgaccgagttactcggcatcgatcacttgctggaacgtcgccctgacaagctgtccggaggtgagcgccaacgcgtcggcatcgcacgggccttgctgaccagcccacgcctgatgctgctcgatgagccgctggcggcgctggacactaaacgaaagggtgaaatcctgccctatctggagcgcctgcaccgcgagctggacatccccatgctgtatgtcagccacgctcaggacgaggtggcgcggctggccgaccatctggtgttgcttgaggccggcaaggtgctggccagcggcccgatccgcgaaacactggcgcgcctggacctgccgctggccatgggcgacgatgcaggcgtggtaatcgaaggcacggtcagcgcctacgaccgccattatcaactgctgaccgtcaccctgccgggcagcaacctgtgcatgcgcgtcgcacacgccgaactgcagatcggcaccctgctccgcgtcaaggttcaggcccgggacgtcagcctgaacctgcagtccgacgaccacagcagcatcctaaaccggctgccggtcacggtgctggaagaagcgcttgccgacaacctcgcccatgtgctggttaagctcaatgcgggcggcacgcctttgctggcgcgtatcacccgctactccagcgaccagttgaacctgcacagaggccagacactgtgggcgcagatcaaggcggtcgcggtgctggca

SEQ ID NO: 33758 - DNA, 765 bp, Pseudomonas syringae
atgcgaacgatcacgctgcgcgccgccctcaagttttctacactggcgctggccatgtccggcgccgcctacgccagcgctgatgaggtgcaggtcgcggttgcggccaacttcaccgcgccgatccaggcgattgccaccgatttcgagaaagacaccgggcacaagctggtcgcagcgtttggtgctaccggccagttctacacccagatcaagaatggcgcgccgttcgaggtgttcctgtcggccgacgacaccaccccggcgaagcttgagcaggaaggcgacaccgtgaagggctcgcgcttcacctacgccatcggcacactggcgctgtggtcggccaaagaaggttacgtcgacagcaagggcgaggtgctcaaggccaatcagtatcagcacctgtcgatcgccaacccaaaagctgcaccttacggcttggcggcgacccaggtgctgagcaagctgggcctgactgacacgaccaaggcaaagatcgtcgaaggccagagcatcacccaggcttatcaatttgtttccaccggcaatgcgcaactgggctttgtcgccctgtcgcagatttacaaggacggcaagctgaccagcggctcggcgtggatcgtacccgactcgttgcatgacccgatcaagcaggacgccgtgatcctcaccaaaggcaaggataacgtcgctgccaaggcgctggtcgaataccttaaaggcccaaaggccgcagcgatcatcaagtctttcgggtaccagctg

SEQ ID NO: 33759 - DNA, 540 bp, Pseudomonas syringae
atgggctatgaagcgggcggccatcgggggctgtttctcagtgatcaactgcacacccaggtcggcacctttgcgctggtgccgcagatcgccgatgccgtgaagatcccggtcattgcggcgggcggcatcgctgatgggcgcggggttgcagccgcgtttgtgctgggcgcctcggcggttcaggtcggcacggcctatctgttctgcccgcaagccagcgtcagcgcactgcatcgtcaggccttgctcgatgccacagacagccagacggcgctgaccaacctgttcaccggtcgtccggcgcgcggcatcgttaaccggatcatgcgtgaagcaggcccgatcagcgccctcgccccggcctttccactggcaggcggcgcactgatgccattgcgcgctatcgcggaaaaacaacacagcagcgacttcacaagtctgtgggcaggccaggcggtcggcatcaagcatcaactggatgccactgggctgacgcggcaactggctgaaaatgcgctgaaaattctttcgccactg

SEQ ID NO: 33760 - DNA, 705 bp, Pseudomonas syringae
atgggtatcgacctgggtcgcgagtcggcaccggatgccaccaccttgctgcgttttcgccgcttgctggaaacccatcagctaacgcggctgctgtttgaaacgattaaccagcatctggccagccgggggctgctgctcaaggaaggcactatcgtcgacgctaccctgatcgccgcgccgccctcggtcaagaaccgagaaggcaagcgtgatcctgagatgcatcaggccaggaaaggcaatcaatggcacttcgggatgaaggcccacattggtgtagacgccacgtcggggctggtgcacagcgtagtagggacggccgctaacgtggcggatgtcacccaggttggccagttgctgcacggtgacgaaacctatgtttcgggtgacgctggatacaccggtgcggccaagcgaccggagcatgctgaacgggacgttatctggtcgattgcagcacggccaagcagttacaagcagcacggcgaaggcagcgtgctgtatcgggtcaagcgtaaaattgaatatgccaaggcgcaactgcgcgccaaggtcgagcaccccttccaggtaatcaaggtgcgcttcaatcatcgcaaggttcgctaccgtgggctggaaaagaatacagcgcagttgttcagtttgtttgggttggccaatctgatgctggccaagcggtatttgcaacaggcggcagga

SEQ ID NO: 33761 - DNA, 486 bp, Pseudomonas syringae
ttgtttgagcagctggagatcgtcgggaaggttgtcgggcatggatttcatgccctggattataccgaatcaggccacgaatcgcggcgtcaaaacctgatggggacggttacgccagaggtcaaaaccgtcgagcagccagttcagttcctgaacggtcaggacaatcgcctcgtcggtggcatcgggcgatgttttgaatcgctccgattccaggcgtttgagccaaaggcagaagccgttgcgctcccagtacaagattttcactcggttgcgcggcttgttgaggaaaacgaaaagtaccgggtcgaacacggcaaccttgatatccagttcgaccagcgcagccagtccgtcgatggattttcgaaagtccacaggtttggggtagaggtacactttttcgactttggcgtcgggtcgcatcatggtcgatgggctcctgagaaaatcgggagcccagcatctggcattagctcagtgctt

SEQ ID NO: 33762 - DNA, 1143 bp, Pseudomonas syringae
atgctgaacgaacagattttcagtaatgcccgtgtggtgaccgctgagcaggtgtttatcggcaccgtcgtggtgcgtgatggcctgattgccgaggtgcagaccgggcgcagtcagttgagccaggcccaggaccttgagggcgactttctgttgcctgggctggtggaattgcacaccgacaacctggaaaaacacctgtcgccgcgtccgggtgtggactggccatcgatgtcggccgtcatcagccatgatgcgcagattgtcgcggccggtattaccaccgtgttcgacgcgctgtcgattggcgacatcaaccccaagggcaagcgcatgcagcaattgcccgccatgcttcaggcgattgccgacgccaacgaagcgggcctgacccgcgccgaccacctgctgcatttgcgttgcgaagtcagccatccggacaccctgaacgtgtttcgcgacctggtgggccagccgctggtgcaactggtgtcggtgatggaacacgcgcccggccagcgtcagtttgcgctggagtccaagtaccgcgagtactacatgggcaaataccacatgagccatgaggagatggatcacttcatcgtcgaacaggtcgccaactccaccgaatatgccgatcgctaccggcgggcaatcgtcgaactgtgtctggcgcggggcctgtcgattgccagccacgatgatgcaaccatggcccatgtcgaggaatcggcgggttttggcatgaacatcgccgagtttccgaccacactggaagccgctcaggggtgtcggcaactgggcatgagtgtgttgatgggcgcaccgaacatcgtgcgcggtggctcgcactccggtaacgtggcagctgcatcgttggccaggcacgggctgctggacattctgtccagtgattactatccggccagcctgctgcaggccgcgttcatgctggccgagcaggacaacgactgcgagctgccacacgcaatcaatatggtcagccgcacgcctgccattgcggcggggctggcggatcgcggtgaaattcgcgtcggtctgcgcgctgatctgattcaggcgcgcaatcatgcaggcctgccggtgatcgacaaggtctggcgacaagggaagagggtgttt

SEQ ID NO: 33763 - DNA, 434 bp, Pseudomonas syringae
atggcgatgctgcgtattcacctgatgcagaactggtttggttacagcgatccggcgatggaggaagcactttacgagacaacgatcctgcgccagttcgcagggttgagtctggatcgaatcgccgatgaaaccacgattctcaacttccggcgtctgttggaaaagcatgagttggcaggcgggattttgcaggtcatcaatggctatctgggtgatcgaggtttgatgctgcgccaaggtacggtggtcgatgcgacgatcattcatgcgccgagctcgaccaagaacaaggacggcaaacgcgatcccgaaatgcatcagacgaagaaaggaaaccagtatttcttcggcatgaaagcgcatatcggcgtcgatgccgagtcgggtttagtccatagcctggtgggtactgcggcgaatgtggcggacgt

SEQ ID NO: 33764 - DNA, 2127 bp, Pseudomonas syringae
  misc_feature (1017)..(1018): n=g, a, t or c
  misc_feature (1074)..(1074): n=g, a, t or c
gtggacgtgaaccttatgcacaaagctcttgggtatcaaagccttggcgacattgttcacgaccagaccttcctcgaggtcacgggtgtgggtcccgattttttcctgaaaatggagtcactcaaccccgcgggctcgatcaagctcaagaccgccgtcggcctggtcaatgacgtgcaggcccggggcctgcttgggccacagacgacgctgatcgagtcttcatccggcaacctgggtgtggcgctggcgatgatctgcgccgagcgcgggattccctttacctgcgtggtcgatccgaacagttccagccacaacatccgcatgatgcgcagttatggcgcgcaggtcatccaggtcgagattccggatgccaacggcgggtttctcggcacacgcatcgcgctgattcgcgagaaagtggccagcgatccgcgttacgtctggctcaatcaatacgagaacgcggccaacccgagagcccatgcgcggaccacggcgcactcgatcagtcggcatttcggccatgtcgattatctcttcgtaggggccggaaccactggcacgctgatgggctgcctgcagcattttcagcgacaccatccgaccaccaaaatcatcgccgtcgacagcgtgggctcggtgacctttggcaccccggccagccgtcgtttcataccgggtctgggcaccagtcagcggccgccgatcttcaatggcgatggtattcacgcactggaaatggtcccggaagcaaacgctgttgccatgtgccgcattctggcgcgcagcaaaggcatgctggtcggcggctcgacggcaacggtgatcgcagctgtgcacgcctggcgcgagcggatagagccgggctcggtggtggttgcgctgtcgcctgactggggcgagcgctacctagacacgctgtacgacgaccaatgggtcgagcagcgcttcggccgtgaagtgctgagcatgaccctgacagacctctcgaacagtaaaaatacacctcttctnnkggcgcgagattgctcgcgaaagcggtggttcattggtgacgccttcgcgagcaantcgcgcccacagggtgtgtgttcaacttgtgaggtggcggccgggcgcctagcgcaggcggcttttcatgtggttgacggggaagtgacggcgcggctgctggcggctgatccgctggcttgtatcgacgacgtgcaggccgcgtatctggcccatgaggccgggcgcacggtcaaccccgacagctattttctgcgctttcccgaggtgccggccaatcgcatcattgccttgcccgccagcctgtcgggtgatcagcctgtcagcggcatcaagtggatctccagctttccgggcaatgtcgacaccggcctgcaacgtgcatcggcggtgctgatcctcaatgaccctgtgaccggctatgcgtttgcctgcctggaagcctcgcggatcagcgccatgcgcaccgcagcctcggcggtacttggtgcacgctggatgaatcgtcagcagcgctacgtcaggcgaatggcgtttatcggtgccggtttcatcgccagaaccattctcgacatgtttgtcagcgatggctgggcgatggactcggtaagcgtcttcgatcagcacgaggattcagcgctggccttgatcagccacgctgccggtcggcatcggttgaacggcgagcaaacggacctgcacgcctgcctgcaggccgatgtggtggtattcgccaccaccgcgccgcgcccttacgttctggaaccggtgtttcgcccagggcaagtggtgctgaatatctcactgcgtgatctggggccggaggttatcgctcaggccgacaacatccttgatgacgtcgagcattgcctcaaggctcagacgtcgcctgaccttgcggtgcgccactatcagcaccgttcgttcattaccggcacgctggcgcaactgatgaccggccaggtggaattgagcccggatcgcgcatcgatcttctcgccattcggccttggcgtgctcgaccttgccgtgggccagcgtgtgtatcgccaggcgcttgcagagggcagcgcgctgccggtgccgcgattcttctttgagtcgaaccgctgg

SEQ ID NO: 33765 - DNA, 688 bp, Pseudomonas syringae
ttcgatctttcggcgatcctgcagggcgagtacgccgagctgatcgtcaagggcatagaaaccaccgtgcaactggcttttgtcgcctggtgcatggccatggcggtggccctgttgctggtgtcgattcgcctgactggcaacatgtacgccgagcgtctggtcgcgggttatgtgtcctaccaccgcaacgtgccgacgctggtgcaactgatgctctggtatttcggtatcccgacattgctgtccgagagcacgcagatctggctgtccggttacagcactgagtacctgttttcggtgatcgctctggggctttgccaagccgcctacttcagtgaagacatccgcagcgggctgcgcgccattccggccgggcaggtcgaagcgtcccgggcgctgggcctgggctatgtacgttcgatgcgctacgtgatcttgccgcagggcgtgcgcaactgcctgccgtcgttgatcaaccacaccgttctgctgttcaagaacaccagcctggtcatggccatcggtgtggtcgagctgacctatgccacccgtgaggtcgagaactacaccttccgtaccttcgaggcgtatctggtcgcaaccgtggtctatctggccatttctctgatgttgatgggcctgggtgcgttgctggcccggcacttcagcaaagccatggcgaggt

SEQ ID NO: 33766 - DNA, 1317 bp, Pseudomonas syringae
gtgacgtacaaactgcccaccactgccaccgcgccgttctgcccctcggcgaccaccgacagcgtcgccatcccgcccaacgcttcattgctgcgcaaaatgatgttgttcgtcggccccggcctgctggtgtcgatcggctacatggacccgggtaactgggcgacggccattgaagccggctcgcgtttcggctactcgttgctgttcgtggtggtgctggccagcctgtcaggcatggtcttgcaaaacctctgctcgcgtctgggcatcgccaccgggcgcgatctggcgcagttgtctgcggctcgctatagccgcaacgtcgccaagggccagtggttgctggcggaactgtcgatcatcgccaccgatctggccgaagtgctgggcgcggcgttggcgtttcatctgctgctgggggtttccatcaccacaggcgtggcgctgactgccttcgacacgctgatcgtgctggccctgcagggcgccaatttccgccgtctggaagccatcgtactcgggctgatcgtgactatcgccagttgctttgccgtcgaactgatcctcatcaagccgttctggccggatgtggtcgccggtttgcgaccgagctgggatgtacttagcagccaggagccgttgtacatcgccatcggcattttgggtgccactgtcatgccgcataacctttacctgcattcttcggtggtgcagacgcgggtcaacggcatggatgtcgccagcaaggccagcgccattcgttatgcgcgcctggacaccatcggttcgctgagcctggcgctactcattaacgcagcgattctgatcctcgccgccgcagcgtttcacaagaccggccacactgacgtggtagagattcaggacgcctatcacctgctcgacccgctggtcggcggtgcgatcgccagcgtgttgtttggtgtggctttgctggcggctgggcagagctcgacattttccggcaccatcgccgggcaggtggtgctcgagggctttttgcaggcgaaaattccctgctggcagcggcgcttcattactcgagcgctggcgctgatcccggcgttgatcggggtgatctggctgggcgacagttcagtgggcaagatgctggtgctcagtcaggtggtgttgagcctgcaactgccgtttgcgctctggccgctgatccgctttaccagcgatccgcagttgatggggccgttcgtcaacagccggctggtcaagacggccgcctggtgtctgttcggcctgatctcggctgccaacctgacgctgttgtggttctgggtgagc

SEQ ID NO: 33767 - DNA, 291 bp, Pseudomonas syringae
ttgatcgcctgcatgaccttgctcggctgcttctgcgccgtcaccctgccggttcacgcggcagaggcgccagaaccgaaagtgaccgagtccaaggacaacgttcacgaactggaagtgggctcccgcgtgccggagaagtaccgccgaagcgatcttgaggtcaaggactggaaaagcaagggcctggaagcgcccgccaaggaaagcgagtgggtgaagatcaatgacaaatatgtgcgattccagaaggtcaatggccagataatggatatcgtgccggtgaaaaaa

SEQ ID NO: 33768 - DNA, 1716 bp, Pseudomonas syringae
atgtccaagaccatcgccgaccatcttgcgcaaaccctcgcagcggcaggtgtttcccacatctggggggtgtctggtgacagcctcaacggtttgaccgacagcctggagcgcatcgactcgatcaactggatgcacacccgccacgaagaagttgcagccttcgctgccggtgcccaagcggcgtccagtggcaagctggcggtctgcgcaggcagctgcgggccgggcaatctgcacctgatcaacggcctgtacgattgccatcgcaatcgcgtgccggtgctggcgattgcagcgcatattccgtcttcggaaatcggcctcgattactttcaggaaacccacccgcaggagcttttcaaggaatgcagccactttgttgaactggtcagcaaccccgaacagttccctcgggtgctggagcgtgccatgcgtgcggcgatcagccagaagggcgttgccgtgatcgtgctacccggtgatgtagcgctcagcgaatcacctgatgtacccgcgaaatgggtcgaggccacgccgcctgttgtcgtcccggcggacaccgacttgcagtcgatggccaacatgctcaatgactcaaaggccgtaaccttgctgtgcggcgcaggctgcgcgggcgctcacgagcagatcctcgcgctggctgacacgctgggcgcacccattgttcatgccttgcgcggcaagcagcacgtcgaatacgacaacccgttcgatgtcggcatgaccggcctgatcggtttcagctccggttaccacgccatgctgtcctgcgacacgctggtgatcctcggcagcagctttccgtaccgcaatttctaccccgaaaaagccaacatcatccagatcgacctcgaccccacgcagttgggccggcgcacgcctgtggcgctcggtctggtcggtggcgtgcgggaaaccctcgacgctctccaaccaaaactcaagccgcacaccgaccgccgtttcctcgacaaagccctcaagcattacgccaaggcccgtgaagacctcgacgaactggctacgccgacccccaacggcacgccgattcacccgcaatacctcacgcgcttggtcgatgaacaggccgacgccgacgcaatcttcaccgtcgatgtcggcacgccaaccctatgggccgcgcgctacctgcacatgaacggcaagcgcagcctgctgggctcgttcaaccacggctcgatggccaacgccttgcctcaggcgctaggcgccaaggccgagcacccggaccgccaagtggtcgcgttgtgcggcgatggcggcctgtcgatgctgctgggcgacctgctgagcattcgccagttgaatctgccgatcaaaatggtggtgttcaacaacagctcgctgggcttcgtcgacatggaaatgaaagccagcggctacgtgccccacggcaccgacctgcatgaaaccaactttgccggcatcgccttgggcgcaggcattctcggcctacgcgtggagaacgccgaagagttgcctgctgccttgcgcaaggcgttcgatcatcccggcccggtgctgatcgatgttgttaccgccaagcaagagctgggcatcccgccgaaaatcaaactggctcaagccaaaggcttcagcttgtacatgatgcgcgcgatcatgagcgggcgcggcagtgaagtgctggagttggcgaagacaaacttgcgt

SEQ ID NO: 33769 - DNA, 978 bp, Pseudomonas syringae
atggaccgctttgcacgcaaggtcgattatctgcgcatgtcggtgaccgaccggtgcgattttcgctgcgtgtactgcatggccgaagagatgacgtttctgcctcggcaacagatcctttcactggaagaaatccaccaggtggccgagcgtttcgtggcgctgggcacgcgcaagattcgcctcaccggcggggaaccgctggtgcgtgccggcgtggtcgggctttgcgagaaaatcgccgccctgcctggcctgcgcgaactgtgcatgactaccaacggttcgcaactggacaagctggccgcccccctgttcaaggccggcgtcacccgactgaacatcagcctggacagcctggacccgcagcgctttcgtgagctgacccgcacgggtgatctgcacaaggtcattgccgggatcgatgccgccaacgcagcgggcttcgtgcacaccaagctcaactgcgtggtcatgcacgggcgcaatgaccacgagatcaacgacttgctggcctttgccatcgatcgcaatctggatgtctcgttcatcgaagaaatgccgctgggcatcatcagcgagcacagccgtgccgagtctttctattcaagcgatcaggttcgcgagcgcatcgccgagcgctacacgcttatcccgtccaccgactcgactcaggggccatcgcgctactggcgtctggcgcaagcgccgggcatacgcatcgggtttatctcgccgcacagccacaacttctgcggcacctgcaaccgcgtgcgactgaccgtcgaaggtcggctgctgctgtgcctgggcaacgaacattcggtggacttgaaagcggtactgcgcgccacccccggccagccggagaaactcgaaaaagccatcatcgacgccatgcagttgaagccctggagccacaacttcacccatgacgacggcgtacaggtggtgcgtttcatgaacatgacgggcggc

SEQ ID NO: 33770 - DNA, 957 bp, Pseudomonas syringae
ttgtacctgggcatgaacggcgggaccatggagcggctgtatgccgatcaggtgctacccgcgttcgagaaagccaacaacgtcaaggtggtcatcgtgcccggcacctcggccgacatcctcgccaaggtccaggccagcaaggacaacccgcagatgcatgtgatctttctcgacgacggcatcatgtatcgggccatttccatggggctgtgcgacaccctgcaacccagcgacagccttgccgacctgccggcaaaagccaaaatcaaggaacaggccgcggccgtcagcctgggcgtgaccggcctggcctataacacgcgcatgttcaaggaaaagggctggagcgcgccgacctcgtggatggacctggcggataaacgcttcaaggacaaggtggtgttccagtcgctggcctcgtcgaccttcggcctgcacggttttctgatgttcaaccgcattcagggcggcagcgagaaagacgtcgagccgggtttcaaggcctggccaaagaccgtcggcccgaacgtgctggaatacattgccagttcggcgaagatctccgagatggtgcagaccgacgaagccgcgctgttcccgttgacgcccactcaagtgaccgctttgaagatcaagggcgtgccggtggaatacgcctctcccaaggagggcggcgtggtcttgaacgtggctgaatgcgcaatcgccaagaacaatcagcctgagctggcgcaaaagctcgcggcgtatctgctgaccccgcaagcgcaggcaccggcgctggagttcggcgaccagatcccgtccaacccgaaaaccccgaccaccgacaagacccgccctcaggtcgaggcgatggaaaagtacctggaaacggcggtgactatcgactgggatcaggtcaatcagatccgtccggagtggaatgcgcgctggagccgcagcatcgagcga

SEQ ID NO: 33771 - DNA, 798 bp, Pseudomonas syringae
atgcatatctcactcaagcaacaagtcgcaatcgtcaccggcgccagttccggtctgggcgcgggtgccgcgcgagcgctggcggacgccggtgcagcggtggtgatcaattacaattccaaggctgaacctgccgagaagctggctgaagagattcgtgcagcgggcggtcgtgcgcttgctgtcggggctgatgtgtcgaaagaggaagatgtcgagcgtctgtttgcgcagaccgtggagcactttggcgcgctggacattctggtcgccaactcgggcctgcagaaagacgcagccatcgtcgacatgagcctggaagactggaacaccgttatcaacgtcaacctgaccgggcagtttctttgcgcccgcgctgcgttgcgccagttcatcaagcaaggcatgcgcccggaggtgtcgcgggcgatgggcaagatcattcacatgagctcggtgcaccagttgatcccgtgggccgggcacgtcaattacgccgcctccaagggcggagtcgacctgctaatgcgcagtattgcccaggaagtcggcgagctgaaaatccgcgtcaacagcgtcgcgccgggcgccatccgcacgccgatcaatgccgacgcacgcaagggcgacgccgaaaaggaaatgctcaagctgatcccttacgggcgcatcggtgagccggaagacgtcgccaatgcggtgctgtggctggcctccgacgcctcggattacgtgcatggcaccaccctgtacatcgatggcggcatgaccctctatccggagttccgtggcaatggc

SEQ ID NO: 33772 - DNA, 1530 bp, Pseudomonas syringae
atgggtctgtcgcgcggcagtgccgagcaaaaagccgaagttgcgcccccaaccaccctgtttctgttcggtgcacatggtgacctggtcaagcgtctgctgatgccggcgctttacaacctgtcgcgcgacggtctggtggatgaagggctgcacatcgtcggcgtcgatcacaacgcgatcagcgatgcggacttcgccaaaaaactcgaaaatttcattcgcgacgaggccgccggcaaaattgccggcggtggcaaggaccctctcgatcctgcgttgtggggcacgctggccgagcgtatcagctatgtgcagggtgactttctggatgattcgacctatcaggacatcgccagcaagattgagagcaccggtgcgaaaaacgcggtgttttatctggccaccgcgccgcggttcttcagcgaagtggcccagcgcctggggtcgtccggtttgctgcaggaaaccgatgacgggttccgccgggtaatcatcgaaaagccgttcggctccgatctggccagtgcagtggcgctcaatggctgcctgctcaaggtcatgagcgaaaaacagatctaccggatcgaccattacctgggcaaggagacggtgcagaacattctggtcagccgtttctccaatggcctgttcgagtcgttctggaacaaccactacatcgaccacgtgcagatcaccgccgcggaaaccgtgggtgtcgagacccgtggcagtttttacgagcacaccggtgcactgcgcgacatggtgcccaatcacctgttccagttgctggcgatggtcgcgatggagccccccgcggccttcggtgccgacgcggtccgtggcgaaaaagccaaggtggtgggcgcgatcaggccgtggaacaaagaggaagcactggccaattcggtacgcggtcagtatgcgcagggcacgatgggcgacaaggaggttgtcggttatcgccaggaagatcgggtcgagcctgacagtacgacggaaacctatgtggcgctcaaggtcatggtcgacaactggcgctgggtgggcgtgcctttttatctgcgcacaggcaagcgcatgagtgcccgcagcactgaaatcgccatctgcttcaaacctgcgccctatgcgcaatttcgtgacaccgaagtcgatcgtttgaagcccaactacctgcgcatccagattcagcccaacgaaggcatgtggttcgatctgttcgccaaacggcccggcccgacgctggacatggaggacatcgcgctgggttttgcctataaggacttcttcgagatgcagccttcgaccggctacgaaacccttatatacgactgtctgaccggcgaccagaccctgtttcagcgtgccgacaacatcgaaaacggctggcgtgctctgcagccgtttcttgatgcctgggccagccagcctgaagttcagccgtatgaggctggcaagaacggacctgatgcgggtgacgagttgctgagccgtgatggtcgcgagtggagagatctgaatgtc

SEQ ID NO: 33773 - DNA, 837 bp, Pseudomonas syringae
atgatcaagaaatgcttgttcccagcagccggttacggcactcgcttcctcccagcgaccaaggccatgcccaaggaaatgctgccggtggtcaacaagccactgatccagtacggtgttgaagaagcgctcgcggcaggtctgaccgaaatttccatcgtgactggccgtggcaagcgctctcttgaagatcactttgacattagctacgagcttgagcatcagatcaaaggcactgacaaagagaagtatctggtcggtattcgcaaattgatcgacgagtgcagcttctcctacacgcgtcagaccgaaatgaagggcctgggccacgctatcctcagcggtcgtccgctgatcggcaacgaagcgtttgccgtagtgctggccgatgacttgtgcgtcaaccttgaaggcgacggcgtgctggcgcagatggtcaagctgcacaagcactatggctgctcgatcattgccattcaggaagtcgatccgtcggaaaccaacaagtacggcgtcatcgctggcgaagagatcaagccaggcttgttccgcgtgaccgacatggtcgaaaagccgaagcctgaagatgcaccgtccaacctggcgatcatcggccgttacattctgacgccggacatcttcgaaaaaatcgaacagaccgagccaggcaagggtggtgagatccagatcactgacgccctgatgaagcaggcagcggaaggtaacgtgctggcctacaagttcaagggcacgcgctttgactgtggcggcgctgaaggctacatcgaagcgaccaacttctgcttcgaacatttctacaaagctggcaaagcgcat

SEQ ID NO: 33774 - DNA, 1197 bp, Pseudomonas syringae
gtgtatggcgcgcatttttccgaagacttcgatcacgccaaagggttcggctggtcattgggtgaagccagctttgactggtccacgctgatcgccaacaaggaccgcgagatcaatcgcctcaatgacatctaccgcaagttattggttgatagcggcgtcacgctgctggaaggtcatgcaaaaatcgtcggccctcaacaggtcgagatcaacggccagacccacagcgccgagcgcatcctgattgcgaccggcggctggccgcaggtgcctgacgtgcctgggcgcgagcatgccatcacgtccaacgaggccttctacctcaaggccctgccaaaacgcgtggtggtggtaggcggcgggtatatcgccgtggaatttgcctcgatcttcaatggtctgggcgccgacaccacgctggtctaccgtggcgaactgttcctgcgcggctttgacggcagcgtgcgtagccatcttcatgaagagttgctcaagcgccacatgacgattcgcttcaacagtgatatcgagcgcatcgacaagcagtccgatggcagtctgctattgtccatgaagggcggtggcacacttgagaccgattgcgtgttctatgcgacgggtcgtcggccgatgctggataaccttggtctggacagtgtcgacgtcaagctcgacgagcatggctacatcaaggtcgacgagcattaccagaccagtgagccatccattctcgcgctcggcgacgttataggcggtgtgcaactgacgccggtggcgctggctgagggtatggccgtggcccgtcgcctgttcaagcccgagcaatatcgtccggtagactacaatcacattccaacagcggttttcagtctgccaaacatcggcactgtcggtttgactgaagaagatgcgatcaaggcgggtcatgatgtgcaggtcttcgagagtcggttcaggtccatgaagctgacgctgaccgacgatcaggagcgcaccttgatgaagctggtggtggacgcgaagaccgaccgggtgctgggctgccacatggtagggccggatgctggcgaaatagtgcagagcctggcgattgccatcaaggcgggtgcaaccaagcaggtgttcgacgataccatcggcgtgcatcctacggctgcagaagagttcgttaccatgcgcacgcccgccaagcgt

SEQ ID NO: 33775 - DNA, 777 bp, Pseudomonas syringae
atgctcccggcaggcgctccgaccgaagacaccattcagaccctcagtcagttgcttgaagccgacgacgtgatcatcgatggcggtaacaccttctacaaggacgacattcgtcgtgcgcaggaactgagcgaaaaaggcctgcactatgtcgatgtcggcacgtccggtggcgtctggggccttgaacgcggctactgcatgatgatcggtggcgacgtggcggcagtcgagcgtcttgatccgctgttcgcgtccctcgcacccggccttggttcgatcgagcgcactcgcggtcgtacctcgaccgacgaccgcgcagagcgtggctacatccactcaggccctgcaggttcggggcatttcgtgaagatgatccacaacggcatcgagtacggaatgatgcaggccttcgccgaaggcttcgacctgctcaagcagaaaaactccgagcatctgccggccgagcagcgtttcgacctcaacactgcagacattgccgaggtctggcgtcgtggcagtgtggtttcatcctggctgctcgacctgaccgccgatgccctggcgactgacccgcaactcgacgctttttccggctcggtcgccgacagtggtgaaggacgctggaccatcgaggcggcgatcgagcaggccgtaccggttccggtgctctccagcgccttgttcgcgcgcttccgctcccgtcagacaagctcgtatgcagacaagatgctgtctgccatgcgctttggatttggtggccacaaggaacccaag

SEQ ID NO: 33776 - DNA, 333 bp, Pseudomonas syringae
ttgatcaaggcaaaggatttcgacaaggccagtcaggccttcaccgctttcctgcgcaaataccccaacagttcatacgcgggcaatgcccagtattggctgggcgaagtgaatctggccaaaggcgaccttcagggtgccggtcaggcgttcgccaaagtcagccagcagtaccccaagcatgccaaggtgcctgactcgctgtacaagctggctgatgtcgagcgtcgtctgggtcataccgacaaggtcaaaggcatattgcagcaggttgtcgcccagtatccgggcacttcagctgcacagttggcgcaacgagatctccagcgcctc

SEQ ID NO: 33777 - DNA, 372 bp, Pseudomonas syringae
atgagcacggccaaccctccttcccatactgccaagctggaccgcattctggccgacgcccagcgcgaccgcgaaatgggttaccgcgacaaggcattgcgcatgtacccgcacgtgtgcggccgttgtgcccgcgagtttgccggcaaacgcctcagcgaactgacagtgcatcaccgcgaccacaaccatgacaacaatccgcaggacggctccaactgggagctgctgtgcctgtattgccacgacaacgagcactcgcgttacaccgaccagcaatacttcgccgacggttcgctaagcacgccgaaaaccgccaaggccacgcataacccgtttgccgcgctggcaggtttgatgaagaaggacgag

SEQ ID NO: 33778 - DNA, 1008 bp, Pseudomonas syringae
gtggcattgcatatcctgattttcggcatgctgttcgtcagttttgccatgactccggatctgcccgaagccaagcctatcgttcaggcaacgctctatcagctcaagtccaagagccaggccactacccagaccaaccagaagattgccggtgaggcgaagaaaactgctgcgcgacagactgaagtcgaacagctggagcagaaaaagatcgagcagctcaaacaggaagctgtaaaagctgcggaacaaaagaaagaagagtcggctcaaaaagccgaagagcagaaagccgccgacgaggccaagaaagccgagcagaaggcagaagaggccaaaaaggctgatgatgcaaagaaagctgacgaagccaagaaggtcgctgacgctaaaaaggttgaagaaaaacaattggctgatatagccaagaagaaagccgaagacgaggcgaagaaaaaagccgaggaagacgccaagaaagctgctgccgaggaagccaagaaacaggctgctgatgaggccaagaaaaaggccgcagaagacgccaagaaaaaggctgccgaggacgcgaagaaaaaagccgctgccgattctgccaagaaggcgcaggaagcagctcgtaaatcagctgaagacaagaaggcgcaggcactggccgatttgctgtccgacaaaccggaacggcaacaggctttggctgacgaacgtggcgatgagacggctggcagtttcgatgatctgattcgtgttcgggcgtccgagggctggagtcgtcctccatcggcacgtaacaacatgtcggtaacgttgcagatcggaatgttgccggacggtacgattgcttccgtatcgattgccaagtccagtggagacgggccgtttgacagctctgcagttgcagcggtgaagaacattggacgtttgacagaaatgcagggtctgaagccggctgacttcgctccctatcgttcattcaagatgacattcacacctggagatctagccttg

SEQ ID NO: 33779 - DNA, 246 bp, Pseudomonas syringae
atgtacctttacgtcttgaagagcgacgtcctcaagcgcgtgccgccagagctgctggtggcgttcggcaaaccggttcatgcatttgatctggtgctgagccccgagcgtgcgctgtcgcgcgaagatatcaatgcggtgctgaagaacctcgacagccagggctatcacttgcagatgcctcccgctgaagatgaatacatcgagcatttgcccgaagagctgctgcgccgcaacgaccccatg

SEQ ID NO: 33780 - DNA, 1713 bp, Pseudomonas syringae
atgcgcaccagtcaatttttgctcgccacacagaaagaaaccccttccgatgcggtcgtggtcagccatcagctgatgctgcgtgccggcatgatccgtaaactggcgtccggcctctacacttggctgcccatgggcctgcgcgtgctgcgcaaggtcgaagcgatcgttcgtgaagaaatgaacgctgtcggcgcacttgaaattctgatgcccggcattcagcctgcagagctgtggcaggaatccggtcgctgggagcaatacggcccggagctgatgcgcctggtcgaccgccacaaccgcgaattctgcctgggcccgacccacgaagaagtcatcaccgatctggcccgcaatgagctcaacagctataaacagctgccgatcaacatgtaccagatccagaccaaattccgtgacgagatccgcccgcgcttcggcctgatgcgcggccgcgagttcgtcatgaaagacgcctactcgttccacgccgacaacgcttcgttgcaggtcacatacgaccgcatgcacctggcgtacagcaacgtattcagtcgcctgggcctgaagttccgcccggtcgaggctgacaacggctcgatcggtggcgcaggctcgcacgagttccacgtcctggccgaatccggcgaagacgatatcgtgttcagcaacggctccgattacgccgccaatatcgaaaaagccgaggcagtgcctcgcgaaaaagcgcgtgcggccgctactgaagagctgcgcctggtcgacacaccgaatgccaagaccatcgcgcaactggtcgaaggcttcggtttgccaatcgaaaagacggtaaagacgctggttgtgcacgctgccgaagaaggcaagctgatcgcgctgatcattcgcggcgatcacgaactcaacgaaatcaaggccagccagcaagaactggtcgccagcccgctggtgatggcgtccgaagcagaactgcgtgacgccatcggcgcaggcgcaggctcgctcggcccattgaatctgccgctgccgtgcatcatcgaccgttcggtcgagctgatgagcgacttcgccgtcggcgccaacatcgacgacaaacattatttcggcgtcaactgggagcgcgacttgccggtgccgaccgttgctgacctgcgtaacgtggttgccggcgatccaagcccggatggccagggcacgctggaaatcaaacgcggtatcgaagtgggccacatctttcagctgggcaccaaatacagcgaagcgatgaagtgtcaggtactgggtgaaaacggcaaaccggtcaatctggccatgggttgctacggtatcggcgtttctcgagtggttgccgccgccatcgaacagaacagtgacgaaaacggcattatctggaacgacacactggcacctttccagatcgcgctgattccactgcgttacgaaaccgacgccgtccgtgaagcgacagacaaactgtatgccgagctgaccgccgccggctttgaagtgctacttgatgaccgcgacaagaagaccagcccgggcatcaagttcgccgacatggaactgatcggtattccgcatcgcatcgtggtcagtgatcgtggcctggccgaaggcaatctggaatacaagagccgtaccgagtcgcaaccgcaagccattgccgtcgcggatgtgctgtcgttcattcagggccgagtgaaacgc

SEQ ID NO: 33781 - DNA, 972 bp, Pseudomonas syringae
atgagccgtatctacgctgataacgcccattccatcgggaacacaccgctggtgcagatcaaccgtatcgcgccgcgcggtgtcaccattctggccaagatcgaagggcgtaatccgggctattccgtcaagtgtcggatcggcgccaacatgatctgggacgctgaagccagcggcaggctcaagcccggcatgaccattgtcgaacccacctctggcaacaccgggatcggtctggcattcgttgccgccgctcgcggttacaaactgatgctgaccatgcccgcttccatgagcatagaacgtcgcaaggtgctcaaggcgctgggggctgaattggtgttgaccgagccagccaaggggatgaaaggcgcgattgccaaggccgaagagttgctggctggcgatcccgagacatttttcatgcctgcccaattcgacaacccggccaacccggccatccacgagaaaacgaccggccccgaaatctgggctgataccgacggcaccatcgacgtgctggtagccggcgtcgggacgggcgggactatcaccggtatttcccgatatatcaagcacacagcgggtaagccgatcctgtcggtcgcggtagaacccgacagttcgccgatcatcacccaagccatggccggtgaagaaatcacgcctgctccgcacaagattcagggcatcggcgcgggcttcattccgaaaaacctcgacctgtcgattgttgaccgggtagaacgcgtcaccgacgatgagtccaaggcgatggccaggcgcttgatgcaggaagagggcatcctgtgcggaatctcctgcggcgcagcaatggcggctgccgttcgtctggctgaaaagccggaaatgcagggcaagactatcgtcgttattctcccagactccggcgagcgttacctgtcgagcatgctgttcagcgatcttttcactgaccaggagctatcgcag

SEQ ID NO: 33782 - DNA, 1893 bp, Pseudomonas syringae
atgagtcaaacaaacagtcatgcccaggccggaggcactgcgaagcccatcgggttgttgattgcagcagtgggggtagtttacggcgacatcggcaccagcccgctgtacaccctcaaagaggtgtttcagggcggatacggcgtagaagtcacgcatgacgcgatacttggggtgttgtcactgatcttctggtcgctgatctgggtggtttcgttcaagtacatggcgtttgttctgcgtgccgataaccagggtgagggcggcatcatggcgctgatggcgctggcgcgcagggcgtcggccaaacaccccaaactgcaaatgatgatggtggtgttcggcctgttcggtgctgcactgttctatggcgatagcatgatcaccccggcggtgtcggttctgtcggcgatggaagggctggaactggcgttcgatggccttgatcactggatcgtgcccatggcactggtcgtgctggtggggctgtttctgattcagcgccacggcacggcgcgcatcggcgtgctgttcgggccagtgatggtcgtctggtttctggtgctgggcgcgctgggcgtttacggcatcatgcagtcgccggaagtgctgaaagcggtcaatccggcatggggtctgaatttcttcattatccatccagggatcggcgttgccattctgggcgctgtggtcctggcgctgaccggcgccgaggcgctgtacgccgacatgggccacttcggtcgcaagcccatctcgcgtgcctggttcatcctcgtattgcccgcgctgttgctcaactattttggtcagggcgcgctggtgctgggcaatccggaaacagtgcgtaacccgttctacctgctggcgccgagctgggcgctgctgccactgatcggcctgtcgacgatggcgaccattattgcctcccaggcggtcatctccggcgcgttctcgatgacgctgcaggccatccagctgggctacattccacggatgcatatccagcacacctccagcgacgcgcagggccagatctatatcggtgccgtgaactgggcgttgatggtgggtgtgatcatgctggtgatcggtttcgagtcttccggcgcgctggcctcggcctatggcgtggcggtaaccgggaccatgctctgcaccactattctggtctcgacggtcatgctgatgctctggaaatggccgccgttgctggccgttccgctgttgatctgcctgttgctggtagacggcctgttctttgcggccaacgtgccgaagatctttcagggcggtgcctttccggtgctggcaggcgcggtgttgttcatcctcatgaccacctggaagcgtggcaagcacttgctggccgagcggatcgacgaaggcgggctgccgctgccaatcttcattggcagcattcgcgtgcagccgccgcatcgcgtgcagggtacggcggtgttcctgaccgcgcgttcggacgctgtgcctcatgcgttgctgcacaacatgctgcataaccaggtgctgcatgagcaagtggtgctgttgacggtggtgtatgaagacacacctcgcgtgccttctgcgcagcgctttgaagtggagtcgtatggcgaaggcttctatcgggtgatcctgcacttcggctttatcgacgagcctgatgtgcctgctgcgttggcgctgtgtcatctggccgagctggacttcagtccgatgcgcaccacctacttcctcagtcgcgaaaccgtcatcccgtccaagatggatggcatggcgcgctggcgtgaagcgctgttcgccttcatgctcaagaacgccaacggcaacctgcgcttcttcaagctgccgttcaaccgcgtgatcgagctgggtacgcaagtggagatg

SEQ ID NO: 33783 - DNA, 680 bp, Pseudomonas syringae
caaatgagcttttccgacgttgagtacgctggcaaacgcaagcaaacccgccgcgaacgtttccttgccgaaatggatcaggttgtaccctggaaaggtctgccgggactgatagagccgttctacctcaaggccggtggcggtcgaaaaccctacccgctggaaaccatgttgcgcattcacctgttgcaaaactggttctcccttagcgatccatgcatggaagaagcctcatatcggcaccgatgttgaatccggactggttcatcatgtttacggtaccgccgccaacgtggccgatgtcacacaggttgcagaacttctgcatggcgaagaaaacgctatctatgcagacgccggatacaccggtgccgagaagcgcaaagagcatgaaaatagtaagattgtctggcagatcgcagcgcgccacagtacctattccacgctggtataaggacagtgtgttttacaagatcaagcgcaagattgagtactgcaaagccaagacacgagccaaggtcgagcatccgtttcgcgtgatcaagcgccagtttggttacgtgaaagtgcgctttcgtggactgatgaaaaaaacggctcagctgactaccctgttcgcgttgtcgaacctgtggatggtacgaaaacagcttatgggtacgggcgagctgcgcgtctaa

SEQ ID NO: 33784 - DNA, 1059 bp, Pseudomonas syringae
gtgaaaaccctggtcagcgcggcgcatctggctggcagtcaggacaatgccagcgccctgctgattcaggtcgacagcctgggcacagacgatctgggcgacacgttgctgcaattgcagcagtggccgctgccgccaacactcaaggtcggtcagacctttgaaggctggaacgtcggcgacatcgtggcgcaatcgcggcagtcgattctctatcgggtaaaggacgcccacggccagccttggctgctgaagaccctgccgaccagtcgtcatgacgaagccggtgccgggcaggggctgttgctcgaagagtggtttctgcgccgggtcgccgggcggtttttccccgaggttcattcgcttgcgcagcgtcagcacctgtattacgtgatgcgcgaataccccggaagtacgctggctgaggtcttcagacgcaacgggccgttgccactggtgcaatggcaggacctggcgactcgtgtgttacgggccaccgggctgttgcatcgacgaaatatcatccaccgcgacatcaaaccggaaaaccttctgctgggtaacgacggcgagctgcgcctgctggatttcggcctggcgttctgcccgggcctgtcagccaccaatgccgaggacctgcccggtacgccgagctacattgctccggaagccttcaacggtgcagaagcgcaccccaggcaggacttgtatgccgttggtgtgacgctgtattacctgttgaccggtcattacccctacggcgaaatcgaagcctttcaacatcgccgcttcggcacgccgattcccgccagccgctatcgacccgacctgccacaatggctgagccagagcctggacaaagccttgcaggccgacccggatcaacgttacgaaaccccggaacaatggctgctggaactggagcaggccgagcatcgctcactggttacgcgcccgcgcccgttgctggaacgcgaaccgctgaaagtctggcgcacgctggcgctggtctcgttgctgtgcaatctgctggcggtcatctggttcatggggcgccac

SEQ ID NO: 33785 - DNA, 672 bp, Pseudomonas syringae
atggtacaacaaatcaataatgccgccgacaaggacgatgtgcgaccgatcatcttcgacaccatcgtcaatcaggacattcgcgagattctggcgacgtccaacggcttcatgattgatattttctcgaccttcctggcgccgctggagcaggagcttagttcacactcctcgtattcggtgggcaaatcgcattccatcgggcacaactccaactacatggagcgcattgaggcggtcaacttcgcgctggacaacgacgacggcgcacgtacgcactattacgacaaggccgacatcatcctggtgggcgtatcacgctgcgggaagaccccgacctgcctgtacatggccatgcagttcggcattcgggcggccaattacccgctgaccgaagacgacatggagcgcctgcaattgccgccagctctcaagcagcatcgcgaaaagctattcggcctgaccatcgaccctgaccgccttaccgcaatccgccatgagcgcaagcccaacagccgctattcgagctacgcccagtgcgaattcgaggtgcgcgaagtggaaagcctgttccgccgcgagaacatccccaacatcaactccacgcatttttcggtggaagaaatctccgccaaggtgctggtcgaaaaaggcgtggagcgacgctttaaa

SEQ ID NO: 33786 - DNA, 2718 bp, Pseudomonas syringae
atgaccagcatggccatccagaccactcaggtgacggcatccacctgctgctattgcggcgtcggctgcggggtgctgatcgagcatgacgggcagcgcattctcggcgtcagcggcgatccccaacacccggcgaacttcggcaagctgtgcagcaaaggttcgagcctgcacctgaccggcgacatcgaagcacgggcgttgtacccggagctgcgcctgagcaaagggctggcgcgcagcgtgaccgattgggacaccgcactggagcacgccgccaccgtgtttgccgagagcattcgcgaacacggccccgacagcgtggcgttctacatttccggccagttgctgaccgaggactactacgcgttcaacaagctggcccgcgcactggtcggcaccaacaacatcgacagcaactcgcggctgtgcatgtcttcggccgtggccggctacaagcgcagcctgggggccgatgcgccgccgtgcagctacgaggacctcgagctgagcgactgcgtgatgatcgtcggcagcaacatggcctacgcgcatccgattctgtttcgccgtctggaagaagcaaaaagccgccgtcccgcgatgaaactcatcgtcatcgatccgcgtcgcaccgatacctgcgaactggcggacctgcacctggcgattcagcccggcaccgacgtcgcgctgtttcacggcatcctgcacgtattgatgagcgaaaacctgatcgacccgcaattcattgccgcccatacgctgggctatgacgaactggcagcgctggtatgtgattatccgcctgaacgcgtggcaaacatctgcggtatttcacagcaacacttgcacacctgcgcccgctggctaggcaagtcggcgggctttctgtcgctgtggtgcatgggattgaatcagtccactgccggcagcgcgaaaaacagcgcactgatcaatctgcacctggccaccgggcagattggccgacccggcgccggccctttctcgctcaccggccagcccaacgccatgggcggtcgcgaaaccggcagcctgtccaacctgctgccaggccatcgcgatgccgccaatcccgaacaccgcgccgaagtggccgagtactggggcatcgacagcctgccggctactcccggcctgtccgccatcgagctgttcgagcaactgcaaaacggcacgatcaaagccttgtggattgcctgcaccaacccggcacaatcactgcccgaccagaacagaatccgtcaggcgctggaaacctgcccgttcgtggtgcttcaggaagccttcaagaccaccgaaaccgcacgctttgccgacctgctgctgcccgccgccagttggggggaaaaggaaggcacggtaaccaactcggaacggcgcatctccaatgtgcgcaaagccattcaggcacccggtgaagcccgttcagactgggccattaccgtggatttcgcccagcgtctgcaaaagcgcctgcagccagaagcgcctgcactgttcgacttccagacgccaaaatcgctgttcgatgagttcaagggcctgacggtcgggcgcgatctggacatgtccggtatcgaccgcgaactgattgaccgccaaggcccacagcaatggccgttcccgacaggcgccagcgtgggcacaccgcgtctttatctcgatggtattttcccgacggcttcgggccgcgcacagtttttggccgagccctatatcgccgcccgagaattgcgtgacgctgaatatccactgacgctcaacaccggcaggctgcgcgatcaatggcacggcatgagccgcaccggcaccgccgcgcgcttgttcgggcatgtcagcgaggcgctgttgagcctcaacccaaagcaaatgcttggccatgacctgcagaacggcgatctggtcaaactgatcagccgacgcggcgaactgctgctgccggtcagcagtgatgacagcgttgtcgccggccaggcttttttgccgatgcactggggcgagcggtttctcaagggcggcgtgaacgtcctgacccagcctgccttcgacccgctctccaaacagccggagctcaagcactccggggtcagaatcgaaaaagcccggctgccctggcagttcttcgccttgatcgagggcaatgtgcaacagcacatggagcgcctgcgaccgctgtgcgaagcgttcacctacctgagcatgggcctgatcgggcgagaacgaccggcactggtggtgcgcgcggccagcaccgaagcgccagactcgacgctgctgcagcgcatcgacagcctgkttaacctcgatgaaggcccggtcatggcctacgacgaccccaagcgttcaatcggcaaacgggtgcggatcgacaacgggcgcatcaccgccatccgcctggcgggagaaacgctcgcccagcactggctacagacgttatggctgcaagagcgtgccgatcccgcgctacggcgatggctgctggcgcctttgagcagcgagcccggcaaagactcgaccctgtctcgcgacaagaccttgtgcaactgcatgaacgtcagccagagcacggtgatgagcggtatcgagcgaggcktgaacktgaatcaactcaaaacccaattaggctgtgggacgcagtgcggttcgtgtgtcccggaaataaaaagactgatcaacgccgtggcagtgactgaa

SEQ ID NO: 33787 - DNA, 1137 bp, Pseudomonas syringae
gtggagaacaccatggctgaagcaaaagtattgagtggtgccgggcttcgcgggcaggttgccgggcagacggcgctgtcgacggtgggcatggccggtgccgggttgacctatcgcggttatgacgtgcgcgaactggccgccgaggcgcagtttgaagaggttgcctacctgttgctgtatggcgagctgccaacgcaaagccaactggccgcttacctgggtaaactcaaggggctgcgtgatctgccgcaggccttgaaagaagtgctggagcgcattccggcagatacccatccgatggacgtcatgcgcaccggggcatccatgctcggcacgcttgagccggagctgagctttgatcagcagcgcgacgccaccgaccgcctgctggcggcctttccggcgatcatgtgctactggtatcgcttcagccatgacggccaacgcatcgactgcaccacggacgagtcgtccattggcgggcattttctgcatttgctgctggacaagacccccagcgaattgcaccgcaaggtcatggacgtgtcgctgattctgtacgccgagcacgagttcaacgcgtctacgttcaccgcaagggtttgcgcgtcgaccctgtcggacctttactcctgcgtcacggcagccatcggcaccctgcgcggcccgctgcatggcggcgccaacgaggcggcgatggaaatgattcagcgtttcgcctctgccgatgaggccactcaaggcaccttgggcatgctggagcgcaaggaaaagatcatgggcttcggtcatgcgatctataaggagtccgacccgcgcaacgaggtcatcaaggggtggtcgaaaaaactcgccgacgaggctggcgacagcgtgttgtttccggtgtccgaggccatcgacaaggtcatgtgggagcagaagaagctgtttcccaatgccgacttctatcacgcctcggcgtaccacttcatgggtatcccgaccaagctgttcacgccgattttcgtctgctcgcgcctgaccggctgggccgctcacgttttcgagcagcgcgccaataaccgcatcatccgcccgagtgccgaatacatcggcgtcgaacagcgcagcttcgtgcccatcgaacagcgc

SEQ ID NO: 33788 - DNA, 726 bp, Pseudomonas syringae
gtgtcgacaatgtcggtcggagcagaaaggttgctgacaacggaagacgacccggaaaccctttccgagaacgttttccgacgcattcagtcggccattgtcaaaggcgaaatcgcccccggcagcaagatttccgagccggagctggcgcgcacctatggcatcagtcgcggcccgttgcgtgaagcgatccatcggcttgaaggccagcggctggtggtgcgtgtgccgcatgtgggcgcccgtgtggtcgcgctcagccacgccgaattgatcgagctgtatgaaattcgtgaatccctggaaggcatggcctgccgcttggccgccgaacgcatgagccaggccgagattgatgagttgcgcagcgtgctcgacacccatgaacgcgatgcggcgttccaggcgggcatcggttactaccagcaggaaggtgatttcgactttcattaccggatcatccagggcagcggcaaccgcaccctcagtcagatgctctgcggtgagctttatcaactggtgcgcatgtaccgcatccagttctccaccacgcccaaccggccccggcaggcctttgccgaacaccaccggattctcgacgccatcgccgagcgcgacggcgagctggccgaattgttgatgcgccgtcacatcggcgcgtccagacgcaacatcgagcgccattatcaggcggcttcccaggcaacttccgaccgaggtcaacca

SEQ ID NO: 33789 - DNA, 1416 bp, Pseudomonas syringae
atgatcggcatgctggagctggcgctcaagcgtgccgatcagggcgagctggatcgctccgccatcgaggtggcttacagctcggccaacgacctgctggacctgatcggcgatattctcgatatcgcgcggatcgagtccggaaggctggcgctgaacccggaacgggcgaacctgcggcaactggtcgagtcggtgctcagggtatttgacggcctggcgcgccagaaagacctcgacctggtgttggagctggacagccggatcaacaccgacgtactgatcgacccgctgcgcttcaagcagatactctccaatctggtcagcaatgccatcaagttcaccccgatgggacgcgtcaagatcgccctgcaggcggtcgacaatccggatccgcaattactgcacctgcacatcaccgtgcaggacagcggcataggcatcagcgtcgaagaccagaagcgtctgttcgagcctttcgcccaggccgacaacaccggacagatggcccgcaccggcgccgggctggggctggtgatctgtcgcagcctgtgcatgatgatgggcggcaacctctcgctcgacagtgaaccgggcaacggcacccggatcagcatgaacctgctgctgaccacactcgaaccaatgaccaggcagcctgtcgcgacaaaaccaccggcggcggcccatcaggtgctcagaatcctgatcgtcgacgaccaccctgccaatcgtttgctgctgtgccagcaactcggctttctcggccatcactgcgagatggctgaaaacggcgcgcaggggcttgagcgatggaaggccgatgcgttcgatctggtggtcgccgactgcaacatgccgatcatgaacggctatgacatgaccttggcactgcgcactcatgaaagcgtgacggagcagccacgctgccccgtgtggggtttcacggccaatgcccagcctgacgagatcgagcgctgtcgcgcagcaggcatggacgactgcctgttcaaacccatcagcctgtcgatgctcagcgagcggttgacggcgatctctccactggcacgtgcgcatcctccgttcagcctcgacagcatcagcagcctgaccggcaaccgcccggaaatggtcgagcgcctgatcacgcaattgcaacacagcaaccatgaagatcggctggtgctcgccaggctgatgcctgacaacgaccgtatcgaaacacgtgagctggcccacagaatcaagggcgctgcgcgcattatcagtgcggccagcgtggtacgggcctgtgacgcgcttgaactggcctgcgaaccggacgtgccggatgagcatttccacacctgcaagcaggttgtcgaactggcgatgatcgaacttgaggacgcgctgatgctgcaacaggcgaagacc

SEQ ID NO: 33790 - DNA, 1464 bp, Pseudomonas syringae
atgatcaaatcgctccgtccattgttgctcgcctcgatgcttctgccactggctctgccctcctacgccgccgtcatcaacaccacgctgcccccaaaggttcagcaggccctgaaagccagcaagcttggcgatgatgcgctctcgctggtcatgttgccgctcaatggtcccggcacacccaccgtgttcaacgccgatgtgtcggtgaacccggcgtcgaccatgaagctcatcaccacctacgccgcgctggaaatgctcggcccgacccatcagtggaaaaccgaattcttcaccgacggcaccctgagcaacggcgtgctgcgcggcaacctttacctcaaggggggcggcgaccccaagctgaacatggaaaagctctggctgctgatgcgtgacctgcgcgccaatggcgtgcagcaggtgaccggcgacctggtgctggaccgcagccatttcgtgcagccgcaattgcctgagttcaatgacgacggcaacgatgaaaacaagccgtttctggtcaaacccgacgcattgatggtcaacctcaaggcgttgcgctttgtgacgcgcaacgatgacggcagaatcctcgtgtctgtggagccgccaattgccaccattcgtgtcgataaccaggtcaaggccattgcctcgaaacaatgcacgggcgatgtgcgttacaacccggtgactcaggctgacggcagcgtcattgtgaccgtgactggccagttgggcaacggctgcaactcccagacctacctgtcgctgctcgaccacccgacctacgccgcaggcgcggtgcgggccatctggcaggaactgggcggcaccattctgggcaaggatcgcgtcggcgtcgtgccgaccaacaccaagctgctggccaaggcgttctccccggacctggtcgaagtcattcgcgatatcaacaaattcagtaacaacaccatggcccagcagctgttcctgagcctgggcgaagaattccgcaacgaagccgatggtgacgacggcaaggccgcgcagcgggtgattcgccagtggctggcgaaaaaaggcattaccgcgccgcatctggtcatggagaacggctcgggtctttcgcgtgcggagcgggtcagtgcccgcgagatggcgattatcctgcaggccgcctggcgcagcccgtatgccgccgaattcatgagttcgatgccgctggcagggcttgacggcaccatgcgcaaacgcctcaagcgtacgccgctactgggcgaggcccacatcaagaccggcaccctgaacaccgttcgcgcgattgccggtttcagccgcgacagcaatggcaacacctgggcagtcgtggcgatcctcaacgatccgcgtccgttcggggcgtcttcgattctggatgaggtgctgatcgacctgtatcgccagcccaagctggccaacaccacggtctcgatccagcag

SEQ ID NO: 33791 - DNA, 1209 bp, Pseudomonas syringae
atgaacgaacgaaccggcaatgcactggactgggtggctggcagtgacgccccggaaatgaacagcctggacgtgggcttcatggcactgaccgactgcgccccgctggtggtcgctgccacccaggggtttgcccagccttacgggctgagcctgaacctgaaacgccagacctcctgggccgggctgcgtgacaggctggtcagcgggcagcttcaggcggcacatagcctgtatggtttgatctatgccgtggagctgggcatcagcggcggcccggcgaccgacatggccatcctcatgggcctcaaccagaacggccagtgcatcaacctgtcccgcgagctacaggatgctggcgtgatcactcctgaggcactggacaaacgcgcgcaccaaagcggctcaaagctgaccttcgcccagacctttcccaccggcaaccacgccatgtggctctactactggctcgccagccagggcattcacccgctcgatgatgtcaccagcgtggtggtgccgcccacacagatggcgcagcacctgcaggccgggcgtatcgacgggttttgtgtcggtgaaccctggggtgccagcgcggtgcagcagcaactgggtttcaccatggcaaccagccaggcgatctggcctgatcaccccggcaaggtgctgggttgcactcgcgaatttgtcgagcagaaccccaacaccgccagggcgttgatcatggctgtgctcgaagccagccgtttcatcgaacaaagcgaccacaaccggcgcagcaccgcgcaactgctcagcggcgtggattacctggatgcctcgctggactgcatcgaaccgcgcctgctcggccagtacagcgacggcctgggcaatcaatggcaggacccgcatgcggtgagttttcacgaccagggtcaggtcaactacccgtggctgtcggacggcatgtggttcatgacccagttccggcgctggggcctgttgcgcgaagacccggattacctggcggtcgccagccgcgttcagcagctggacctgtaccgtcaggccgccaatgcactgggtatcgatgcccccagcgcgaccctgcgcagtagccagctcatcgatggcaaggtctgggacggcagtgatcccgcaggctatgcgcgaagcttcaaactccactcgctggccgataccgcgcctgctgttgccagtcgt

SEQ ID NO: 33792 - DNA, 903 bp, Pseudomonas syringae
atgaacagccccctcccagacgttgccctgacggaagtgtcctcggccctgattgcactcgactgggtcggcatgcaaggcgtcgaagtgccgctgacgctgggcgagcagggtgccacccacccggttcatgcctacgcagacctgcaggtcgatctgactgaccccagcgtcaagggcatccacatgtcgcggctttaccggctgcttgacggttttgccgaacatcaggtgctcacgcccgagacgttatctgcgctgctggaggcgatggtcgagagccatgtcgattgtcactccagcggcgcccgcatcacgctgaccttcaacctgttgtgccgccgtccggcgctggttaccgaagggctcagcggctggaagtcctatccggtcaagcttgaggccgtctggcgggcggggcgtttgtgcctcgacgtctctgccgatatcacttactcgtccacttgcccatgctcggcggcactgtcccgacaactgttggaagaagcgtttgtcgcccgttttggccgccagtcgttcgttgaccccatgcaggtcgcggcctggctgcgcgagaacgcctcgtatgccacgccgcacagccagcgcagtgtggcgacggtgcaggtgcgcgtggcggagcaggccaccgaaatgggcctgatggcgctgatcgatacggtcgaacaggcgctgggcacgccggtgcagaccgccgtcaagcgtgccgacgagcaagcctttgccaggctcaacggccagaacctgatgtacgtcgaagacgccgcgcgcaagatccagcaggcgcttgagggccgctacccagcctccagcgtcagcgtgcgtcacttcgagagcctgcatcctcatgatgcagccgcgcagacttccagctacctgtcc

SEQ ID NO: 33793 - DNA, 906 bp, Pseudomonas syringae
atgcagctctatggtgtgcagtccacggccctgcgctacttccttgaagtggcgcgttgcgggtcaatcagcgaggcctcggtgcgcctcaatgtcgcctcgtcggcggtcagtcggcagatcagcaaactggagcgcgagctggatgcgctgctgttcgagcgccaggcgcgcggcatgatgctcagcgaggcgggcattcgtctggcggcctatgcgcgcaagtcccagctggaggccgagcaggtcgtgctggaaatcaccgagctgcaaggcttgcagcgcggccatgtgcgcattgcctgctcggagggttttgcgctggatttcctgccgcaatgcatcgcgcgttttcggcggctttatcaggggattcatttctcgatggaggtctgcgctccggctcaggccaccgagcgggtgcgctcgggcgatgccgacctgtgcctgacgttcagcctgacgccgcagaacgaaatcaaggtcgagcatattcacagcggcgcgatctgcgcggtggtcagccacaaccacccgctggcctcacgcaaggaggtcgcactggccgaactgcagccgtacgccatcgcgctgaccaacaccgacacgacgttgcgccagttgttcgacatctgctgcggcgtgcaaggcctgatgttcgacccggtgctgaccagtaactacatcggttcgctgttgaggttcgtcagcgaagagggcgggatcagcctgtccagtgaaatgaccctggacaagcgggtgcatgaaaagcagcttaaatcgctgccgatcagcgatgaaggcatgaaagcgcgacggatcgaactgcaaagcatggcggggcgcaaccttccggcagcggtcgcggcatttcgggattttcttattgaagaactggcaaaaacc

SEQ ID NO: 33794 - DNA, 1023 bp, Pseudomonas syringae
atggatttcaaacgcaagcttctcatcgcggcactcccgctggccttctgcatgtcgggcctggcccaggcagacgtcaaaatcaagttcgccgaggttcatcccgcaggctacgcgccggttgtggccgaacagaacatgggcaagaagctcgaggagcaatccaagggcgagatcagcttcaagatgtacgccggcggcgtgcttggctccgagaaggaagtggtcgagcaagtgcagagcggtgccgtgcagatgacccgcgtcagcctcggcatcgtcggcccggtagtgccggacgtcaacgtcttcaacctgccgttcgtgttccgcgatcaggcacatatgcgcacgattatcgacggtgagatcggccaggaaattctcgacaagatcaccaactcgcaattcaacatggtcgcgctggcctggatggatggcggcacccgcaacctgtacaccaaaaaaccggtacggcagattgctgacctcaaaggcatgaaaatccgcgttcaaggcaacccggtgttcatcgaaaccatcaacgacatgggcggcaacggcatcgccatggctaccggcgagatcttcagcgccctgcagaccggcgtcatcgatggcgctgaaaacaacccgcccacctacttccagcacaaccactaccagaacgccaaattcttcacgatgaccgagcacttgatcctgcctgagccgatcgtgatgtcgaaagccacctgggaaaagctcaagcccgagcaacaggcgctggtgaaaaagctcgcgcgtgaagcgcagatggaagagcgcgtgttgtgggacaagtcgtcagccgatgccgaggtcaagctcaaggccgcaggcgtggaattcatcacgctgacaccggagcagaagaaagcgttctacgacgctacccaaccggtacgtgacaaattcggcgcgccctacaaggacttgatcagccgcatcgaagcggtccagaccaatccggcgctggctgcggccagttcccaagcggcccaa

SEQ ID NO: 33795 - DNA, 1575 bp, Pseudomonas syringae
atggcggaaaacctgatcgaaattcgcgacctgagcgtcgctttcaacgggcagcaagtggtcagccacctgagcctggatgttcggcgtggcgagtgtctggcgctggttggcgaatccggctccggcaagtccgtcacggcgcactcgatcctgcaactgctgccccgcagtggcactgcgactaccggcagcatcacttaccgtggtcaacagctggtgggcgctgacgagcgcaccttgcgcgagctgcggggcaaccgcatcgcgatgatctttcaggaaccgatgacgtcgctgaacccgttgcacagcgtgtcccgacagatcggcgagacattgctgctgcatcgcggcatcagtggccgtgaggcgcagaagcgcatcatcgagctgctggaactggtcgggattcaacaaccggagaaacgcctcaaagcctatccgcatgagctgtccggcggacaacgtcagcgggtgatgattgccatggctctggcctgtgagccggaactgttgatagccgacgagccgaccaccgcgctggacgtcaccgtgcagcgcaagattctcctgctgctcaaagagctgcagcagcgcctgaacatgtcgctgctgctgatcagtcacgacctgaatctggtgcacagcgtggcacagcgggtgtgcgtgatgcgcgcaggcgagattgtcgagcaggccgactgcaagtcgctgttcaagtcaccccaacatccctacagccgcctgctgctggatgctgaacctgcgggcgaaccgctgccacgcgatacgcgggaaacggtgctgcaggtcgataacctgaaagtctggttctccctgaccggtggcgttctgcggcggcacaaggaatacctgaaggcggtcgatgacatcagcctgagcattcagcgcggcaagacgctgggcatcgtcggcgagtcgggttccggcaagtcgacactgggtcaggcaatcctgcgtctgctggagtcgcaaggcagcatccgctttcggggccaggcactggacggcctcagccagaagcagatgcggccgtggcgcaaagagatgcaagtggtctttcaggacccttacggcagtttgagcccgcgcatgtcagtggcacagatcattagtgaagggctggaggtacacagccagttcaaccccacacaatgcgatgccgaggtgattcgggcgctggaagaggtcggcatcgacccgcagtgccgccatcgctacccgcacgagttctccggcggccaacgccagcgcatcgccattgcccgggcgctggtgttgaaaccggcgcttattctgctcgacgagcccacgtctgcgctggaccgcacggtgcagaaacaggtggttgccctgctgcgcgacctccagcagaagcacgggctgacgtacctgttcatcagccacgacctggcagtcgtccaggccctggcccacgacgtcatcgtggtcaaggacggcaaagtggtcgaacgcggcgccagccacgacgttttcgaatcgccgcagcacccgtacacacaggaattgctggcggctgcgcaccccgaa

SEQ ID NO: 33796 - DNA, 1644 bp, Pseudomonas syringae
atgagtctcagtcctttcgccggcaagctggcacctgcgcagttactggtagatattccgagactggtcaccgcttattacaccggccagcctgatgcatcagtgccgacccagcgcgttgccttcggcacttccgggcatcgcggcacctcgttcgagctgggcttcaacgaatggcacgtgctggctatcagccaggccatctgtctgtaccgcaaggccaacggcatcgacggcccgttgtttctgggtgctgacacccatgcgctgtccacgccagccgctgccaccgcgcttgaagtgctggctgccaatggcgtgcaggtgatgatctccgaaggtgacgagtacacgccaacgcctgcggtgtctcacgcgatcatctgttacaaccgtggccgcacgtccgggctggctgacggcatcgtcattaccccgtcgcacaacccgccgcaaagcggtggcttcaagtacaacccgcccaacggcggcccggccgacagcgatatcaccaagtggatcgagaacaaggccaacgaactgctggccgataaggtcgtcggcgtttcgcgcatcagccatgaaaaagccttgcgtgccgacaccacgcaccgccatgactacgtcaatagctacgtcgctgacctgaagaacgtcatcgatctggacgccatccgcgattcaggtttgcgtctgggtgtcgatccgctgggcggggcaggggtcaattactggtcggcgatcggcgagcattacggcctgaatctggatgtggtcaacaaatttgtcgaccccacgttccgtttcatgaccgttgactgggacggccagatccgtatggatccttcctccagccacgcgatgcagagcctgatcggcctcaaggatcgttatcaggtggcgtttgcctgtgacccggaccacgaccgtcacggtatcgtcaccccgaccggcggtttgatgacgcccaacagctacctcgccgtgtccatcgactatctgtttcagaaccgccctgactggcgcgctgatgccgcggtcggcaagaccgtggtcagcagcggcatgattgaccgtgtggccgcacgtctgggccgacgcctgtacgaagtaccggtcggcttcaagtacttcgctcaggggctgttcgagggttcgctgggcttcggcggtgaagaaagtgccggtgcttcgttcctgcgtcgcgatggttcggtgtggaccaccgacaaggacggcctgattccggcattgctggcggcagaaatgaccgcacgcaccggtcgcgacccgagccagatctacaagaccatgatcgatgagcttggcgagccgttctcgacccgcgtcgatgccaaggccaacccgcagcagaaggcgctgctgagcaagctgtcgccagagcaggtcacgtccaccgaattggccggcgagccgatccagcaggtgctcagcaatgcgccgggcaatgaccaggcgttcggcggcgtgaaagtcatgaccgaaaacggctggtttgcagcgcgcccgtcgggcactgaggacatctacaagatctacgccgaaagctttgtcagcgaagatcacctcaagcgcctggtggcagaggctcaggtattggtggacggggcgatttcgccgaag

SEQ ID NO: 33797 - DNA, 1518 bp, Pseudomonas syringae
atgcgttacgctcatcccggtaccgaaggcgctatcgtcaacttcaaggaacgctacggtaactacattggcggcgagttcgtcgctccggtcaaaggtcagtatttcaccaacacctcgcccgtcaacggcaagcccatcgccgaattcccgcgctccaccgccgaagacatcgacaaggcactcgacgctgcccacgcagccgccgcagcctggggctcgacctcggtgcaggcgcgctcgctggtgctgctgaaaatcgccgatcgtatcgaagccaatctggaagtcctggccatcaccgagacctgggacaacggcaaggcgattcgcgaaaccctcaacgctgacatcccgctggccgctgaccacttccgctacttcgctggcgtgctgcgcgcccaggaaggcagcgccgccgagatcgacggcaacaccgtggcgtatcacattcacgagccgctgggcgtggtcgggcagatcatcccgtggaacttcccgatcctgatggccgcctggaaactcgcccccgcactggctgccggtaactgcatcgtactcaaacctgccgagcagaccccactgggcatcagcgtgctgatcgaactgatcggcgacctgttgcctgcgggcgtgctgaacatcgtccagggttatggccgcgaagccggcgaagcgctggccagcagcaagcgcattgccaagattgcctttaccggctcgacgccggtgggctcgcacatcatgaagctggcggcagacaacatcattccatccaccgttgagctgggcggcaagtcgccgaacatcttctttgaagacatcatgagcgccgagccggaattcatcgacaaagctgccgaaggcctggtgctggcgttttttaatcagggcgaagtctgtacctgcccgtcgcgcgcgctggtgcaggagtcgatctatccacagttcatggaggcagtgctgcgcaaggtcgaaaaaatcaagcgtggtgaccctctggacactgacaccatggtcggcgctcaggcctccgagcaacaattcgacaagattctctcgtacctggaaatcgccaagggcgaaggcgccgagctgctgacaggcggcaaggtcgagaagctggaaggcgatctttcgacgggctattacatccagccgacgctgctcaaaggcaacaacaagatgcgcgtcttccaggaagaaatcttcggcccggtggtcagcgtcacgaccttcaaggacgaagcgcaagccgtggcgattgccaatgacaccgagttcggcctgggcgcaggcctgtggactcgcgacatcaaccgcgcctaccgcgtaggccgggcaatcaaggccgggcgcgtctggaccaactgctaccacctgtacccggcacacgccgcattcggtggctacaagaaatccggcgtcggccgcgaaacccacaaaattgcccttgagcactaccaacagaccaaaaacctgctggtgagctacgacactaacccgctgggttttttc

SEQ ID NO: 33798 - DNA, 519 bp, Pseudomonas syringae
atgacgaccgagcattcaaacacaccggacttgctggatcacctgttgggcatcgaacctggcaaccctttgcacacagtgcgccatgcccgtgacaaggttgcctcggcaacccagggcagccaggcgctttttttcgacccggcattggcagataacctgccgctgagcgagcgtctgtgggttgcctattacgccacccaactgagtgcgcagccaaccctgaccgcgtattacctgcagcaactgcgcgaagtgggcgtagcggacagtgtgctggcggacgtggacgccaaccggatcgacctgcttgaagacccgcgcctggcggcgatcctgcgttttacccgcaccttgatcgagtctccggtgcatggcgatcaaagcgccttgcaggcgctgcaacttcagggcttgagcactgctgaaatcgtggtactggcgcagctgattgcgttcctgtcctaccaggtgcgtctggccgcagggctgaccgccattcaatctgccggagcagcc

SEQ ID NO: 33799 - DNA, 1257 bp, Pseudomonas syringae
atgagtaccgctgataccacccgcctgattttgcgcaacggccgtctgctggacctgcagcaggggcgattgatcccggggcaggaagtcgtgatcgagggcgaacggatcgtagcagtgcgtgccgagggtgaagctgccccggcagatgcgcaggttatcgatctgggcggcagaaccctgatgcccggcctgatcgactgccatgtgcatgtgctggcgtccaacgccaacctgggcatgaacgcgttgcaacccaacgcgatcatcatgtaccgcgccttgccgattctggccgcaatgctcaatcgtggtttcaccactgtgcgcgacgccggaggagccgactgggcgctggcacgttcgatccagatgggcctgattcccggaccaagaatatttgcctccggcaaggcactgtcgcagaccggcgggcatggcgacatgcgcgcacgcggcgaactgttgctcaacgaaccgtgctcgtgctgcttccgcgccggagccatcgcccgcgtggtggacggcgtcgataatgtgcgcctggcggtgcgcgaagagctgcaacagggtgccaaccagatcaagatcatggcctcgggcggcgtttcttcaccgaccgatccgattgccaatacccagtacagcgaggccgaaatccgcgcaatcgtcgatgaagcggccgcagccaacacctacgtcatggcccatgcctacactgcccgagccattagacgcgccatcgagtgcggcgtacggaccatcgagcacggcaatctggtggacgccgacacggctcggctgatggccgaaaaaggcgcgtttgcggtgccgactcaggtgacctacgaaatgctcgcagaatacggcgaacgctttggcctgcctgccgactccgtggccaagatcgaggacgtgcgtcaggccgggcgcaacgcgctgttactgttcgccgaagcgggcgtgccgatgggctatggctctgatcttttgggcgaaatgcacgaataccagacccatgaactgaagattcgtgcggagttgctgggtaacctggcggcgctgcgcagtgcaaccagtgttgccgcgcagatacttcaacgcgaaggtgaattggggtgcatcgcggccggtgcaattgccgacctgctggtggtggacggcgacccgctgagcgatatcagctgcctggtgggccagggcgagcagttggcgatgattgttcagggtggtcatgtgcacaagaacaccctggcc

SEQ ID NO: 33800 - DNA, 1479 bp, Pseudomonas syringae
atgaccaccgttcgtacccgcatcgcgccatcgcccaccggcgaccctcacgttggcacggcctacatcgcgctgttcaactactgctttgccaaacagcacggcggcgagtttattctgcgcattgaagacaccgatcagttgcgctcgacccgcgagtccgaacagcagattttcgacgcactgcgctggctgggcatcgaatggagcgaaggcccggacgtcggcggtccacacggtccgtatcgtcaaagcgaacggggcgatatctaccagaaatacgcgcagcaactggtcgaattgggtcatgccttcccgtgtttctgtaccgccgaagaactcgacgagatgcgcgccgagcagcaggccaaaggcgaaaccccgcgttacgacggtcgtgccttgctgctctctaaagaggaagtccagcgccgcctggatgccggcgagccgcacgtcatccgcatgaaagtgccgaccgaaggcgtctgcgtggtgccggatatgctgcgtggcgaagtcgaaatcccgtgggaccgcatggacatgcaggtcctgatgaagaccgacgggttaccgacctacttcctggccaacgtggtcgatgaccacctgatgggcatcacccacgtactgcgtggcgaagaatggctgccatcggcgccgaaactgatcctgctttacgagtattttggctgggacaagccgcagctgtgctacatgccgctgctgcgtaaccccgacaagagcaaactgtccaagcgcaagaacccgacctctgtgaccttctacgagcgcatgggctttatgcctgaagcgatgctcaactacctgggccgcatgggctggtcgatgcctgacgagcgcgagaagttctcgctgcaggagatggttgaccacttcgacctgtcgcgtgtttcgctgggcgggccgatcttcgatatcgagaagctctcctggctcaacggccagtggctacgtgagctgccggtcgaggaattcgcctcgcgtctacagacctgggcactgaaccctgaatacatgatgaagatcgcgccgcatgtgcagggcagggtagagaccttcagccaggtcgcgccgctggcaggctttttcttcgcgggcggcgtcacgcctgatgtgaaactgttcgagcacaagaagctgtcgccggatcaggtgcgtcaggtcatgcagttgattctgtggaagctcgaatcgctgcgtcagtgggagaaggagcggatcatgggcagcatccaggccgtcgtcgagcacctcgagctcaagttgcgtgacgccatgccactgatgtttgcagcgatcaccggtcaggccaattcggtctcggtgaccgacgcgatggaaatcctcgggcctgacctgacccgcttccgcctgcgccaggcactcgatttgctgggcggcgtttcgaagaaagaaaacaaagaatgggaaaagctgctgggtgccatcgcc

SEQ ID NO: 33801 - DNA, 2076 bp, Pseudomonas syringae
atgagcactactgaagtttcaagaaatgctgctgcaaaagccgctgatccacaggccgtcaacgaatcagcgaaaaccggcatcgccgccctgtggcgtccggcgctggtgcaggccttcgtcaagctcgacccccgccagctcaagcgttcgccggtcatgctggtggtggaactgactgccattctgaccaccgtgctgtgtgtcatccccgacccgcaggtgccgacttcggtctgcgtgcagattgccctgtggctgtggttcacggtgttgttcgccaactttgccgaagcactggctgaaggccgtggcaaggcgcgcgctgacagcctcaaggccggtagcgaagggctcaaggcgcgcatccgtgacgaaaacggcagcctgcgcacgatcaatgccagcgagttgcgcaagggcgatgtggtgcgcgtcgaaatcggcgaaatgattcccggtgacggcgaagtcatcgaaggcattgcagccgtcaacgaagcggcgattaccggtgaatccgcgccggtgattcgcgaatccggcggcgaccgctcggcggttaccggcaacacccggctggtgtccgactggctgctgatccgcatcagcagcaaccccggcgaatcgacgctggaccgcatgatcgcgctggtcgaaggcgccaaacgtcagaaaacccccaacgaagtggcgttggatatcctgctgatcggcctgacgctgatcttcctgttggtggtcattaccttgcagccgttcgcccatttcgccggtggcagcctgccgctggtgtttctggtggcgctgctggtgacgctgatccccaccaccatcggcggcctgctgtcggccatcggcatcgccggtatggaccgtctggtgcgcctcaacgtgatcgccaagtccgggcgtgccgtggaagccgcaggcgatgtgcacgtgctgttgctggacaagaccggcaccatcacgttcggcaaccgccgttgcgctgccgtctacgcagcacctggcgtgacccccaaagagctgggcgagggcgcgttgctggcgtcgctggccgacgacacggcggaaggcaaatccatcgtcgagttcttgcgcgagcagcacccgatgaacgagccgaccctggggtcggtgacggccgtgccgttcagtgctgacacacggctgtccggcgtggactatcaaggccatgtgtaccgcaagggcgcggtggattcgctgctggcgttcatcaacatgcagcgcagcgagctgccgccggcactggcacgcgaagtcgacaagatcgccaagaccggtggtacgccgttgctggtttgcgccaacggtcggctgctgggcgccatccacctcaaggatgtggtcaagccgggcattcgtgagcgctttgaagaactgcgcaaactgggcattcggaccgtcatggtgaccggcgacaacccgctgaccgccgcggcaattgctgccgaagcgggcgttgatgatgtgctggcagaagccacgccggagaagaagctggagcggattcgtcaggagcagggcgaaggccgactggtggcgatgtgcggcgacggtgccaacgatgcgcctgcgctggcccaggccgacgtcggcatggcgatgaacgacggcacccaggcggcgcgcgaagcggccaacatggtcgacctcgacagcgaccccaccaagctgctggacgtggtgcagatcggcaagcaattgctggtcacccgtggcgcgctgaccacgttctccattgccaacgacgtggccaaatacttcgccgtgctgccggcgctgtttgcctcgatctacccgcaactcggcgtgctcaacgtcatgcagctggccagcccgcagagcgcgattctctcggccatcgtcttcaacgcgctgatcatcgtcgtgctgatcccgctggccctgcgcggcgtgcgtgtgcaggcggccagtgcggctcatctgctgcgtcgcaacctgttgatctacggcctgggcggcatcgtggtgccgtttatcggtatcaagctgattgacatgttgctggtcggtctcggccttgtg

SEQ ID NO: 33802 - DNA, 2673 bp, Pseudomonas syringae
gtggtaaccaacttgagtgattccggtcgagctgacgcattgttggcccagttaccccgcgaaggccgtgggcggctgaaagtttttctcggcgcggcgcctggcgtcggcaaaacctacgccatgctccaggcagcccacgcgcagttacgccagggcgtcagggtgatggcgggcgtggtggaaacccacggccgcgcggaaaccgaggcgttgctcaacggcctgccgcaacagcccttgctgcgcaccgaataccgcggcatgaccctcgaagaaatggacctcgacgcgctgctcaaggcggcgccgagcctggtgctggtcgacgaactggcgcacaccaatgcgcccggcagccggcacaccaaacgctggcaggatattcaggaattgctcgcggccggcatcgacgtctataccaccgtcaacgtccagcacctggaaagcctcaatgatcaggtgcgcggcatcaccggcgtgcaggtgcgtgaaacactgcccgattgggtgttgcaggaagccttcgacctggtgctgatcgacctgccgccgcgcgagctgctcgagcgcctgcgcgacggcaaggtctacgtaccggagcaggcgcgcgctgccatcgacgccttcttcacccagaccaacctcaccgcgctgcgcgaaatggccatgcagaccgcagcggcgcaggtcgataacgatctggcgcagggctatcggcaattgggccagtctgccccggcggtgcgcgggcggatgttggtgggcattgatggcgacatgcatgccgagcgtctggtgcgccacgccagccgggtggcccagcgtcgtcatctgccttggagcgcggtgcatgtggatgacgggcaaaccctcgacgagcaatcgcgggcacgcttgcaaaacgcccagcaacttgccgagcgactcggtggtgaagcggtttcgttgcgcgccggggaagttgccagaacgctggtgcagcatgccatcgaacggcgtgccagcgtggtgctggtcgggcaatcgcggcggcactggcgacgccgggtgttcggtggtggcgtcgcggcgcgtttgctgcgcgaagggcacgggctggaaatctcggtgctcgatgacagtgaagagctgcctgatcaaccgccgcgtgcgcgcccggcgcgcgaagtggtgtggttcgactacggcctggctttcgtcgccacgctgatcgccagtctggtggcctggggtgtggcgggggtgctggcgctgcccaatatttccctgatctttctcgccgcggtgctgctggtcgccgtgcgcagcagcatggggccggcgctggcctgtgccggattgtcgtttctggcttacgacttcttgttcataccgccgagtttttccctgaacatccagcgcgaagaggacgtgctgacgctgttgttcttcctgctgatgtcggcgctgaccggcaaactggctgctcgccagcgcaggcaattgcaggcgctgcgtgatactcaggaacagaccagcgagctgctcgacctgtcgcgcaagatgaccgccgccactgaccgcaaagcggtactcaacgccgccgaacagcatttttccggctggaaggagctgtacctgtgcctggtggatcgcgatacgcagggcggcctggtggtcgaaaccggcgggccgctgacgttttcggaagccgaacgggcagcggccgactgggcgtggcagcacgatcaaccggcaggcagcggcaccggtacgctaccttcgggtcgctggtggtggtggccgattaccgcagaagaagggccactggcattgctgggtgtgtgtgcacgggaagggcagtcgtttaccgatcagcacagacggctgctggccgcactgactcagccactcgcccaggccttggcccgtgcgcaactggcgcaggagcttgaggcggcgcgtctgcacggcgaaaccgagcaactgcgcagcgccttgctggcctcggtgtcgcacgacctgcgtaccccgctgacctcgatgcgcggcagtatcgacagcctgctagcgctgggcgaagccattgcgctggaggatcgccgcgagctgctggaaggcactcgtgacgaggctgagcgcctggaccgctatatccagaacctgctggacatgacccgtctgggccatggagcgctgaaactggcgcgcgactgggtgtcgcctgccgatattgtcggcagcgcgctgaaccgcctgcgtgcggtgctgacgccgttgcaggtcagcacgcaggtcaccggcgacttgccgttgctgtatgtccacgcggcgttgatcgagcaggcgctggtcaacgtcctggagaacgcggcacgtttttcacccctcggcgggcgcttgcaagtaacggccggcgtggtcgacagcgagctgttcttctcggtcagtgacgaagggcctggcatccccgaggatgagcgggcgaagattttcgacatgttctacaccgccgctcgcggtgatcgcggcgggcagggcaccgggctcggcctggcaatctgtcagggcatgatcggcgcgcatggcggacggctcacggtcgaggaaggcatcgacgggctgggtacgcgcatcacgttgtttctgccgctacaggcccagcctgacgctgaaatggaggaacccgct

SEQ ID NO: 33803 - DNA, 567 bp, Pseudomonas syringae
atggcccgtggggttaacaaagtcatattggtcggtacatgcggccaggatcccgaagttcgctacttgcctaacggtaacgccgtgaccaacctgagtctggcaaccagcgaacaatggactgacaagcagagcggccagaaggtcgagaagaccgagtggcaccgtgtttcgatgttcggcaaggttgccgaaatcgccggcgaatacctgcgcaagggttcgcaggtctacatcgaaggcaagctgcagacccgcgaatgggaaaaagacggcatcaagcgctacaccactgaaatcgtcgtcgacatgcaaggcaccatgcaactgctgggcggccgtccacagggcgacgctcaacaaggtcagggcggtggcggcaactacaaccagtccgcgcctcgtccacagcagtcgcgcccacagcaatccgcgccgcagcaatctgcccctcagcagaactacaaccagcaaccgccacaacagcgcgattcgcgcccggcgccgcaacaacaagcgccgcagcctgctgctgactttgacagctttgatgacgatattccgttc

SEQ ID NO: 33804 - DNA, 759 bp, Pseudomonas syringae
atgcccaaatctgctcccctcgtccgctcgtctctgattgcccatcgcggcgccaaggcttacgtgccggaaaacactttgctggcccttgagaaagctgccgagtgcggcgcgaagtgggtcgagatcgatgtgaaactgacccgtgacggccagcctgtggtgattcatgacgacatgctcgaccgcaccaccaacgggcgcggcgctgtcgtgcttcatgatctgagcgccatccgcacgctggacgccggcggctggttcgcagcggagttcactggcctgcaggtcccgacatttgaagaaatagtggcctgtgcgttacgcctcgagctcggcctgcaggtcgaactcaagccgacgattggcgacgacgtcgagacggcggaggtggtcatgccgatcctcaaaagcctttggcctgccgacaatgatcagctattcgtttccagtttttcagtgcgctccctcactgccgctcgccggttatgggccgacgtaccactggccatcgcctcggtggtggcccctgctgacccggtcgcactgctggccgaatatgactgccgaatacttcacgtacttgacgatatgctcgatgaccatcaccttgttcgcctgaaaagcagcggcgtcgaattcgccgtggctaccatcaacagcccgaaacgcgcacgctacctgcttgaacacggcgcgcaatcgattctcagcgattacccggacctgttgaacctgccaaacggaggctgcctgcaa

SEQ ID NO: 33805 - DNA, 1008 bp, Pseudomonas syringae
atggacctcgcgcagcagtcggtacaccgcctgatcgaagagttgatcagtcgtggcctgttgcgcagcggcgagcgcgtgaagaacggccgaggccaaccgagcccgcgcatcgaactggtcaacgaggcggtgtatgccatcggcgtgtcgatcaacaccgactcagcagtcgtctgcgtagcggatctgggctgcaacgtgctggaacaagtcaccctgcgcacgccgccgttgagccgcaacagcacgctggattcgctggcgaaaaccatcgaacgcatgcttcagcgtaacggcatcgagacggaccgcgtcatcggtatgggcttcgccatcgccggattcttccttgaaaaccgccagatcaacgcaccggagccgctgcgcgactggtcattgatcgacttgcagccagtactcgaagaacgcttcggcatgccggtctggctggaaaacaacgccaccacagccgccatcggcgaaagcctggtgggcgttggcgcctgggccagcaacttcatctacctgtcgttcaacttcggtttcggcgcaggcgtggtcatcaacggtaaaccgtacttcggcagccacggcaacgcaggcgagatcaccctctacaacgatgaagaatcaataaaccgcccggcgttgcgctatttgctggaagaactgcatcagaaaggcgtgcaagtggattccatcgaagacctgcgcctgcgcttcgaccccaactggcccggtgtcgatacctggttgaaacgaatccagccaacgctggaccggctggtcaatgcgctggcggggttgtttgatccacaggcggtggtgtttggtgggcaattgccggcggaactggggaagcgcctgattgcggcgacgactttctgggggacccatcggtataactcgccaccgccaaggcctcggttattgctgagtgaaaccaatggggatgcggcggctatcggggcggcgttggtgcctttgaaggagcggttttttgtt

SEQ ID NO: 33806 - DNA, 294 bp, Pseudomonas syringae
atgcacgagctggaagtcgtgcgtctctgcgtgcaccgctcttcgcagcacatttatgcccaggtcatctcggccgacggcagcaaagttctggcaagcgcctctactttggacaaagaactgcgtgatggcgccactggcaacatcgacgcggccactaaggttggcaagctggtcgccgagcgcgcgaaagccgcgggtgtatcgcaagtcgctttcgaccgttctggcttcaagtaccacggccgtgtcaaagcgctggctgatgctgctcgtgaaggcgggctggagttc

SEQ ID NO: 33807 - DNA, 228 bp, Pseudomonas syringae
gtgaaaatcaaagatctgagcgacgagcagattgaacagctgcgtggcgaagtggcgaagttcaccactgaaggtgacctgcgtcgcgaaatcaacatgaaaatcaagcgcttgatggacctgggctgctaccgcggtctgcgtcatcgtcgtggtcttccagtgcgcggtcagcgtaccaagaccaacgcgcgtactcgcaaaggtccgcgtaagccgatccgcaag

SEQ ID NO: 33808 - DNA, 384 bp, Pseudomonas syringae
atgcgtcatcgtaaaagtggacgtcacctgagccgtaccagctctcaccgtaaagccatgtttcaaaacatggcggtgtcgctgttcgagcacgagctgatcaaaactaccctgccgaaagccaaggaactgcgccgcgttgccgagccgctgatcaccctggccaaggaagacagtgttgctaaccgtcgtctggctttcgaccgtactcgttcgaaagaaatcgtcggcaagctgttcaacgatctgggcaaacgctatgcaacccgtcagggcggctatctgcgtatcctcaagtgcggtttccgcactggcgacaacgcgccaatggcgtacgtcgagttggttgatcgtcctgtcggtggctctgtagaagctgctgaa

SEQ ID NO: 33809 - DNA, 2634 bp, Pseudomonas syringae
atgatggagaagccggacgtcgatacgatcgaaggtctgtcgccggccatttccatcgagcagaaatccacgtcgcacaacccgcgctcgaccgtgggcacgattaccgagatttacgattacctgcgtcttttatatgcgcgggtcggacagcctcgctgcccggatcacgatattccgctggaagcccagaccgtcagccagatggttgacctggtgctgactcaacccgaaggcagcaaactgatgctgctggcgccggttattcgcgagcgcaagggtgaacacctttcggtattcgaagagctgcgtgcgcagggttttgtgcgggcgcgggttaacggtcggctgtgtgagctggatgaactgccgaagctggacaagcagaagaagcactccattgacgtggtagtggaccgcttcaaggttcgcgccgacctgcagcagcgtctggccgagtctttcgagacggcattgaagctggcagacggcattgcgctggtcgcaccgatggacgacgagccaggcgaagaagtaattttctccgcccgcttcgcctgcccgatctgtggccacgcgatcagcgagcttgaacccaagctgttctcctttaacaacccggctggcgcatgcccgacctgcgacggtctgggcgtgaagcagttctttgatatcaagcggctggtcaacgccgagctgacgctggctgaaggcgcgatacgcggctgggacaggcgtaacgtctattatttccagatgctcggctcgctgtccaagcactacggtttcagcctggaagtgccgttcaaagaaatcccggccgacatgcagaaggttctgcttaatggcagcggctcgcagagtgtcgacttccgctatctgaatgatcgcggcgatatcgtcaaacgtgcgcacccgttcgaaggcatcgtgccgaatctggaacgtcgctatcgggaaaccgaatcagcgaccgtgcgcgaggagctggccaagtttctcggtacacagccctgccctgactgccgcggcactcgcctgcgtcgcgaggcacgtcatgtgtgggtgggtgaaaagaccttgcctgcggtgaccaatctgccgattggcgacgccacgcattattttgaaacgctgaagctgaccggccgacgcggcgaaattgccgacaagattctcaaagagatccgcgagcgtttgcagtttctggtaaacgtcggtctggactacctgaccctggatcgcagcgcagacacgctgtctggcggtgaagcgcagcgcattcgtctggccagtcagatcggtgcgggcctggtcggagtgatgtacatcctcgatgagccgtctattggcctgcatcagcgcgacaacgaccgtttgctgggcacgctcaagcacctgcgcgacatcggcaacacggtgattgtggtcgagcatgatgaagatgcgattcgtctcgccgactacgtggtcgatatcggccctggcgctggcgtgcacggcgggcatatcgttgccgaaggcacgccggacgaggtgatggcgcaccctgactcactgaccggcaaatacctgtcgggacgtgtgaagatcgccgtacccgccaagcgcacgccccgcaacaagaagctgtcgttgacactcaagggtgcgcgtggcaacaacctgcagaacgtcaacctcgacattccgattggcctgctgacctgtgtgacgggcgtttccggttcgggcaagtcgacgctgatcaacaacacgctgttcccgctgagtgctacggcgctcaacggcgcaacgacgcttgaggctgccgctcacgacagcatcaacggcctgcagcatctggacaaggtcgtggacatcgatcagagccctatcggtcgtacgccacgctccaacccggcgacttataccgggctgttcacgccgattcgcgaactgtttgccggtgtgccggaatcgcgctcgcggggctatggcccgggacggttctcgttcaacgtcaagggcggtcgttgcgaagcgtgtcagggcgatggcttgatcaaggtcgagatgcactttctgccggacatctatgtgccgtgcgatgtgtgcaagagcaagcgctacaaccgtgaaacccttgagatcaaatacaagggcaagaacgtccacgaagtgcttgagatgaccatcgaagaagcgcgcgagttcttcgacgccgtccctgcactggcgcgcaagctgcaaaccctgatggacgtagggctttcctatatcaagctgggtcaatcggcgaccaccctgtcgggcggtgaagctcagcgcgtcaagctgtcgcgtgagctgtccaagcgcgacactggcaagacgctttatatcctcgacgaaccgactaccggcctgcactttgccgatattcaacagttgctggatgtcctgcatcgcctgcgcgaccatggcaacacggtggtggtaatcgagcacaatctggatgtcatcaagacggcagactggttggtggacctggggccggaaggcggctcaagaggcgggcagatcattgcgaccggcacacctgagcaggtcgccgagatggagcagtcgtataccgggcattacctcaagcctctgttgatcagagacagggct

SEQ ID NO: 33810 - DNA, 669 bp, Pseudomonas syringae
atgctgtacggcgaaggcccgctgaaagccgcaccgttctattaccagcttgaccatttgggtaccccgcaggaactcaccgactatagcggcgagatcatgtggtcggcgaaataccgcgcctacggcaacctcgccaccctcgacgtcagcgagatcgacaacccgctgcgcttccagggtcagtacttcgatgcggaaacgggcttacattacaaccggcatcgctattacaatccgggcactggaaggtttttgaccccggacccgatcaagctggcgggtgggttgaacaactaccagtatgtgcctaaccctacggggtgggtggatccgttggggttgaatagtgaatgtccgggaacaaaatctgtgggcgatgttggaagccctccagagaaagcgaaaacaaatgaaggcgaaccagcagtacctgctcctgtagcacgtggagaaaatacgactcgtgtccgacactacaccaatagaaaaggctctgccggtatcgaaaatgacggcataatacaagctcaggataataatcgagtttatgcagaactagccaataaaaagccgatgagtccagctgatgcagaagaaaaatatcaaattggcagagggcgtggtagggactatatcgaaacagatgtacctaaggaaggtctgaag

SEQ ID NO: 33811 - DNA, 1083 bp, Pseudomonas syringae
atgactatcagcgacgcgctgcacagactgttactggataacctgaccactgccaccattctgctcaacgccgacctgcgacttgagtacatgaacccggcagcggaaatgctcctggccatcagcgggcagcgtagccatgggcaattcatcagcgagctgttcaccgagtcggctgaggcactgagttcgctgcgtcaggcagtggaacaggcacacccgttcaccaagcgcgaagcgatgctcaccgcactgaccggtcagacattgactgtcgactatgccgtgacgcccatcctcagcaagggcgataccctgctgctgcttgaagtgcatccccgtgaccggctgttgcgcatcaccaaggaagaagcccagctgtccaaacaggaaaccaccaagatgctggtgcgcggcctggctcacgaaataaagaatccgctcggcggcattcgcggcgctgcgcaattgctggcccgcgaactgcccgaagaaagcctcaaggattacaccaacgtcatcatcgaagaggccgaccgcctgcgtaatctggttgaccgcatgctgggctccaacaagctgccgtcgctggcgatgaccaacgtgcacgaagtgcttgaacgggtgtgcagcctggtggaggccgagagccggggctgcatcacgttggtgcgtgactatgaccccagcattcccgacgttttgatcgaccgcgagcagatgatccaggcggtgctcaatatcgtgcgtaacgccatgcaggccatcagcggccagaacgaactgcgtctgggccggatcaccatgagaacccgcgccatgcgccagttcaccatcgggcatgtgcgccaccgactggtgagcaagatcgaaattatcgacaacggcccgggcatcccggccgagcttcaggaaaccattttctatccgatggtcagtggtcgcccggacggcacagggctcggtctcgccattacccagaacatcatcagccagcaccagggcctgatcgagtgtgacagccatcccggccacaccacgttctcgatcttcctgccgctggaacaaggagcagcttcgaca

SEQ ID NO: 33812 - DNA, 498 bp, Pseudomonas syringae
atgtcaaatcacgaccaaaaacgcgacgaaggctacatcgaaaaactggttcaagttaaccgcgttgccaaaaccgtaaaaggcggccgtatcttcactttcactgcgttgaccgtggtgggtgatggtaaagggcgcgttggcttcggccgtggcaagtcacgtgaagtgcctgctgcaatccagaaagcgatggaagctgctcgccgcaacatgattcaggttgacctgaacggcactacattgcagtacgcaatgaagtctgctcatggcgcctcgaaggtgtacatgcagcctgcttctgaaggtaccggtatcatcgctggcggcgcaatgcgcgcagtgctggaagttgctggtgttcagaacgtattggccaagtgctacggttcgactaaccctgtaaacgtggttcacgccactttcaagggtttgaaaggcatgcagtctcctgagtcgatcgctgccaagcgtggcaagcgtgttgaggagatcatc

SEQ ID NO: 33813 - DNA, 1449 bp, Pseudomonas syringae
atgcaccaaatgactctggccgagatcgctcgcggactcgccgaaaaaaagttttcttccgaagagctgacccgcgttctgctgtcgcgtatcgcgcagcttgacccgcagctcaatagcttcatcagcctcaccgaagacctggccatcacccaggcccaggcggcagacgcccgccgtgcggccggtgaaaacgggccgctgctcggtgcccccctggcgcacaaggacctgttctgcacccagggcattcgcaccagttgcggctcccggatgctcgacaacttcaaggcgccgtacgacgccacggttgtgtcgaaactggcttcggccggcacggtaacgctgggcaagaccaacatggacgaattcgccatgggttcggccaacgagtccagccattacggcgcggtgaaaaacccgtggaacctggaatgcgtgcctggcggctcctctggcggttcggctgcagcagttgctgcacgcctgctgcctgcggcgaccggcaccgacaccggcggttcgattcgccagccagcggcgctgaccaacctcaccggcctcaagccgacctacggtcgtgtgtcgcgctggggcatgattgcttatgcgtccagccttgatcaggcaggcccgatggctcgcaccgccgaagactgcgcactgctgctgcaaggcatggccggtttcgacccgcaggactccaccagcatcgacgagccggtcccggactactccgccagcctcaatacctcgctcaagggcctgcgtatcggtgtgccgaaagaatatttcagtgcaggcctcgacccgcgcatcgcgcagctggtgcatgagagcgtcaaggagctggaaaagctcggcgcaatcgtcaagcaagtcagcctgccgaacctgcaacacgccattcctgcctactacgtcatcgctccggcagaagcatcgtccaacctgtcgcgtttcgacggcgtgcgcttcggctaccgttgtgaagacccgaaggacctgaccgacctgtacaagcgctcgcgcgccgagggctttggcccggaagtgcagcgacgcatcatggtcggcgcctacgcgctgtcggcgggttactacgacgcctattacttgcaggcgcagaaaatccgccgcctgatcaagaacgatttcatgagtgcatttgccgaagtcgacgtgatcctcggcccgaccacgcctaacccggcctggaaaatcggcgccaagacccacgacccgattgcccaatacctggaagacttctacaccatcaccgccaacctggcgggcctgcccggcttgtccatgccagcgggctttgtcgatggtctgccggtcggcgtgcaattgctcgccccgtatttccaggaaggccgtctcttgaatgtggcgcatcagtatcagcaagtcactgactggcacactcgcgcacctgaaggcttc

SEQ ID NO: 33814 - DNA, 423 bp, Pseudomonas syringae
ttgctgctggggatcgactacggcaccaaacagatcggcgtcgcggtcggccaggcgattaccggccaggcccgcgaactctgtacgctcaaggcgcagaacggcgtcccggactgggacaaggtccaggcgctgatcaacgaatggaaacctgacgccatcgtggtcggcctgccgctgaacatggacggcacgcccagcgagatgagtgcccgcgccgagaagttttcgcgcaaactcaacggccgcttcggcgtcacggtctacacccacgacgaacgcctgacgaccttcgaggccaagggcgagcgcatggctcgcggcggccagaaaggcagctatcgcgacaacccggtggacgccattgccgctgcgctgctgctgcaaggctggctcgacgagcaccccgaattgctgaatgtg

SEQ ID NO: 33815 - DNA, 975 bp, Pseudomonas syringae; identical to SEQ ID NO: 33042

SEQ ID NO: 33816 - DNA, 471 bp, Pseudomonas syringae
atggcaatcgatattggtatcagtgaagaggatcgcaaatcgatcgtggacggtctttcgcatctgctgtcggatacttatgtgctttacctcaagactcataactttcactggaatgtcagcgggccgatgtttcgcacgctgcacctgatgtttgaagagcaatacaacgaactggcgctggcggttgactctatcgccgagcgtattcgcgcgctgggcttcccggcacccggcacttactcgacgtatgctcgcctgtcttccatcaaggaagaagaaggtgtgccaagtgctgaagatatgatcaaaagtctggttcaaggtcaagaagccgttgtccgcactgctcgtagtatctttcctcttttggataaggttagtgacgagccgaccgctgatctgttgacccagcgcatgcaggttcatgaaaagactgcctggatgctccgctcgatgcttgagtcgaag

SEQ ID NO: 33817 - DNA, 684 bp, Pseudomonas syringae
gtgtcacatacatttattcatgaccaaggtgagcccaaaacaagctttggctcacttcatcttgtcaactggcgcacattgtttgcggttttctcgttaatgctaaccacaacgttgatctggttttcgaccacggcccaggtttccgacttggctagtggcaaaaatcttgtcacctcggggcttgtcgagcaatggagacatggtgatgtagtggtcatgatcaggcacgcggaacgctgtgaccgatctgcaaatagctgtctcggcagtcctgacggcattacggtgaacggtagccatgcggcgtctgatgtaggtgaggggctgcgaaggttagggcttgatcggacccagctgatcgccagcccattgactcgtacgcagcagacggcaaattacatcgcgggacaagcagtagtccctcagggctgggctggggactgtaacaatcacttcaaggatgcagtcgttgcccacaaaataaaaggggaaaacctggtgttgataacccacagcggttgtatcgatcatttcgagcgaaccatgggggtgcctgcaggggagcggtctagcgaatacgctgaggcattctttgtaaaaatggacggcaagtcgacccccagaattcttggctcattgaatgcggtgcagtggaagagcttggccaacgaccagcttaag

SEQ ID NO: 33818 - DNA, 513 bp, Pseudomonas syringae
atggccaagtattcagagcaattcaagctcaccgtcgtcaaagcctatcttgcaggcaacataggctttcgcaaggtgtccagccagttctcgatcgattccagcctgcttcgacgctgggtcgccaattacaagagccatgggcacacaggccatcgtaagcctggtcttcggtacagcgaagccttcaaacgctcagtgctggagcacaagcgcgagcacgggctgtcccttcgccagaccgcagcgcattttggtattggtgatcctggccaaatagtcatttgggaacagcagcattacagtaacgatctagccccctacgttcccaagagaagaaagtctgttgccatgcccaagaagccttatcccaccgcaccagtaatcgacgacgatacgcagaagacgcgtgaccagttaatggccgagctcgaatacctgcgcatggagaacgcttacctaaaaaagttggaagagttgaaggagcagcaacgacggcaaaagaaaaagccc

SEQ ID NO: 33819 - DNA, 321 bp, Pseudomonas syringae
atgaccttcgtcgtcaccgacaactgcatcaagtgcaagtacaccgactgcgtagaagtctgtccggtggactgcttttacgaaggccccaacttcctggtgattcacccggacgaatgcatcgactgcgcgctctgcgagcctgaatgccctgccgtcgccattttctcggaagacgagatcccggccggtatggaaaatttcatcgagctcaacgccgaacttgccgaggtgtggcccaacatcaccgagaagaaagacggtatgcccgatgctgccgactgggatggcaagaaaggcaagatcgaacatctggaacgc

SEQ ID NO: 33820 - DNA, 849 bp, Pseudomonas syringae
atgcgcacttttcgtctggtgattgcttgcccggaccgtgtaggcatcgttgccaaagtcagtaactttctggcctcccataacggctggatcaccgaagcgagtcatcattcggacaatctcagcggctggtttttcatgcgccacgagattcgtgccgataccctgccttttgacctggacgggttccgtgaggcctttacgccgattgctgaagaattctcgatggactggcgcattaccgactcggcgcagaagaagcgcgtcgtgctgatggccagccgcgaatcgcattgtctggccgacctgctgcaccgctggcacagcgacgagctcgactgcgatatcgcctgtgtgatttccaaccatcaggacctgcgcagcatggtcgagtggcatgacattccttactaccacgtgccggtggaccctaaagacaaggaaccggcgtttgccgaagtgtcgcgtctggtcggtcatcatcaggcagatgttgtggttctggcgcgttacatgcagattctgccgccgcagctgtgccgtgaatacgcccatcaggtgatcaacatccaccacagcttcctgccctcgtttgtcggcgccaagccttaccatcaggcctcgctgcgcggggtcaagctgatcggtgcgacctgtcactacgtcaccgaagaactcgatgccgggccgatcatcgaacaggatgtggtccgcgtcagccatcgcgacagcattgaaaacatggtgcgcttcggccgcgacgtggaaaagatggtgttggctcggggtctgcgtgcccacctggaagaccgtgttctggtacacgacaacaagacagtcgtcttcgac

SEQ ID NO: 33821 - DNA, 975 bp, Pseudomonas syringae; identical to SEQ ID NO: 33042

SEQ ID NO: 33822 - DNA, 849 bp, Pseudomonas syringae
atgacatctgcgctgtacccaacccggttgccttgcggcaaccgggttcttgatttggcccatacccatgtgatgggcatcctcaacgcgactccagattcgttctccgacggcggccgttacagccagctcgatgctgccctgcgtcatgcagaagccatggtgctggccggtgccacgctgattgacgtcggtggcgagtcgacccgtccgggcgcacgcccggtgtctcctgcgcaagaagtcgagcgtgtagcgccggttgtcgagattattgcgcgtgaactcgatgtgatcatctcggttgatacgtcaacgcctgaggtcatgctggcgacggcagggctgggcgctggcatgatcaatgacgttcgctcgttgcagcgtccaggcgcgcttgaggcggctgcaagcaccggtttgccggtgtgtctgatgcatatgcagggcgagccgggcaccatgcagaatgatccgcactatgaggaccttctgggcgaggtcagtgccttcctgctggagcgcatgaatcagtgtgtggccgcggggattgatcggcaacagctcatccttgatccgggttttggttttgccaagacgctggaacataatctgagcctgttcaggcgtatggaagcgttgcacgcgctgggtcggccgctgttggtgggggtttcgcgcaaaagcatgatcggtgcagtgctgggacggcccgtagatcagcgcttgtctggagggctggccctggccgccctggcgatgaccaaaggggcaagaattctacgtgtgcacgatgtcgccgaaacggctgacgtggtgcgcatgatcgcagctgtccaggcagctgaa

SEQ ID NO: 33823 - DNA, 1446 bp, Pseudomonas syringae
gtgagtgctcccatgcctttcatcagtagaattttttccgtactggcactgctgccgcttgccactcaggcgctcgccgcacccgccgagttctggtacagccacagcggtgcggcggcgagcgccatcgcagacgtgtgcagaagcttcaatgcgcaacgtgaggaaggcgatcgcctgcactgcattcgccaaggcacttatgagcagacgttgcagaaaaccgccgccgcctatcgcgccggcataggcccggcactggtcgagatttatgacgtcgccacgccggacatgctgctgggtggcgctacgcatgcggtcgatacggtgatggccgatcatcaacgagcctattcagatgacgcgtttctacccgcattgcggcgctattactctgatgatcacggcacgctagcggcccaaccctttgcggcctcgacagcggtgttttacacgcaccgaaaagcgctggctgcagcgggtatcagtgaaccgcctgccacttgggaagctttcgatactgccttgcgggccttgaagagaagtggccacacgtgtcctgtcgtaactgagttttccccgtggatctggctggaacagaccagtgccgcacaaggcacgcacgtcgcgatccgcgccgcaggcactgaccattatcagttcgacaaaggcacgcacgtgcgcctgatgaccgaccttgcgcggtggaccgccgaaggccttgtgcggcaccaggactcgacccgcagcggccagcagggtctggcgtttgccaccggcgactgcgccatgctgctggattcaacaggcagctggaatctcatgcacggtgatctggagtctgatatcgaggtgagcgcactgccgatctacgctcaaacccagcgccgcgccaacgtccccggcggctcttcgctgtgggtgatgcgcgggcattctgtgcacgattatcgagtggtttcggaatttctggcgttcgtactgcaaccggataaccagttgatgttcagcgcacggacgggttacctgccggtcactcaggctgcggctgcgcgattgcaatccagcacaaagaagccctcggcggtggcggtcgggctcgccgcactcaacgatatcgacggggagccctctgctccgttgcgctgcggctttatcacgctgatgcgcttgatctggtcgcaggaaatggaaaatgcgctcgcaggccgtcaaagcgttgataacgcactgcgccagacaacgatgcgcgccaacgatctgctcagcctgtttcaacagatgcaccaggctcaggccagcaactcagctctagacacacatcctgcgacgcttcgcttgctcgcgaagaggcccgtacagccctcggaaattgggcgcgcggacgatcgctttggcgagcaagctctctccgacaagaatctccactcgagcgaggtaacgcca

SEQ ID NO: 33824 - DNA, 408 bp, Pseudomonas syringae
atgcagtttttgtcaccgctgatccttttcaccagttgcactctgctggcaaccagcttgctggccgccgaacaggcaccgccaccctctgagtgcctgatcaaaagtcagcaaatcagcagccagattcaggatgccaagaccgagggcaacaaggccgagcaaagcgggctggaaaaggcgctcgccgaagtcaatgccaactgcacggaaacctcgctgctcaaacagcgcgaacaaaaggtgctggacgccaaacgtgaggtcagccgtcgtcagaccgatctgaacaaggccatggacaagggtgatccagagaagatcaacaagcgcaaagacaagcttgccgagtcgcgcaaggaactgcaggaagcccagactgacctcgaaaaagtccagtcagacgat

SEQ ID NO: 33825 - DNA, 708 bp, Pseudomonas syringae
atgctgcaaatcattctccgtcgcctcatgaaagccctgctgtggttcgctgcgggcagcgctctcgtggttctggtcctgcgctgggtaccgccaccgggcacggcgctgatggtcgagcgcaaggtcgaatcctggttcgacggcgaacccatcgacctgcagcgcgactgggagccgtgggacaaaatttccaacaatctgaaaatcgcggtcattgccggcgaagaccagaagtttgccgagcactggggctttgacgtcgacgcgattcaggccgccattctgcacaacgagcaaggcggttcgattcgcggggccagcacgttgagccagcaggtgtcgaagaacctgtttctgtggtcgggccgcagctacctgcgcaaagggcttgaggcctggttcaccatgctcattgaattgctgtggtccaaggagcgcatccttgaggtgtacctcaacagcgtcgaatgggacgaaggcatattcggcgcccaggctgccgcgcaacaccacttccgcaccaacgccagtgcactctccgagcaacaggccagctacctcgccgccgtcctgcccaacccccgccaatggagcgccagccacccgagtggctacgtctcgcgtcgcgcgggctggatacgtcaacagatgcgtcaactgggtggggatgagtatttgcaggggctcaatagcagccgtcggtgg

SEQ ID NO: 33826 - DNA, 1620 bp, Pseudomonas syringae
atgccgggaagcgcgcttcccggcaataaacgcttaaacgcggaactgcttggtgaggcggttcaggccagcggccagcgtcgacaactcggcggtggcgatggcggtctggttcgaaccctcggacgtctgactggacaggtcacggatgctgaccaggcttctgtccacctcacgcgccacctgagcctgttcttcagcggcggtggcgatcatcaggttgcgctcgttgatctgactgatggattcagtgatttcgagcagtgccttgcctgcgccgttggccatttccagcgtcttgtacgcctgcacgctggtctgctccatcgcggtgacagcgttgccggtgccggtctgaatcgaaccgaccatctgttcgatttcacgggtcgattgctgcgtacggtgcgccagtgcacgaacttcgtcggcgaccaccgcaaaaccgcgtccggcttcgccagcgcgggctgcttcaatggcggcgttgagtgccagcaggttggtttgctcggcgatggcgcggatcacatccagtaccttgctgatgtccgttgccatgaccgccagaccttgtacctcggtggacgtgagctgcactttggacaccatcaggttgatggccgtgaccgtttcatcgacctgtgcgcgcccggccatggccgctgtgctcgattgcgatgtcacttcggaggccgatgcggcgttgctggccacttcctcgaccgcagcgctcatctgattgacagcggtagcggccatctcgatttcgttgctctggcgctgaatggtccgcgaagcatcttcagtcaccgcatgcatttcttccgacgttgcggccagttgagtggaggaatcaccaatcagcgtcagcgcgccacgcagattggtttgcatggcggcgagggcggcaatcagcctggccgcttcatcgctgccgctgtgtggaatgtctttgctcagatcattggcggcgatgcgttgcgcgatgttcagcgactcattgatcgggccggtcaggctgcgggtatacagccaggcgagcaacaacgtagcgattacgccgacagcgataaaaatacccaccatccacagggtttgctggtaggcgtcgtcggcctgatttcccgctctttctgctttgccatcattgatgccgatgagtttcttgagcgtgttttcaacctggtccgccgcgtttttcatctcgccattggagatggtgactgcctcctcgaaatttcctgcggcaacggaagccaagtaatgattctgggcagtctgataatcgctgatggctttgttgagctcgtcgaatgcctgacgcccttgaggggtcacgatcaacttgccgagtgcatccgaaaagcctgcaatcagcgcgcgagactgctgaatgtcgctgagtgctttggtcttgcgatcctgcggctcaagcgggttgcgcaagcgggcgttgttgcccctgatgccgacaaattcccggtccagagaacccagcagcttcacgctgggcagaacgttttcttcaatgaatttttctgcggtgttgagaagtgctgcctgacgcagagccaatacacccaatgcaacgatcatcagacagaaaataccgaaaca

SEQ ID NO: 33827 - DNA, 789 bp, Pseudomonas syringae
gtgggttcccgaagtggtggcactgcgtctggacctgtccggtggggcgggcggcgaatgacggcgtcgaataaaaagcagcagggcgttgcgttgctggtggtgctttgggtgctggcgctattgagcctgttgctcggcgggctggccggttgggtgcaactggaaagccgacaggccctctggttgcggcaaaacactcaggcgctgctggccgccgaggctggcatgaatatggctgtgcagggtttgcttgatcctgcacagcgcaaacgctggattgccgatgggcgtctggtgtcgttgcgcatggatgacgcgcagttggtggtcagcatcagaagtgaacgaggcaagctggacctcaacagcgcaccggtcgccgatatatcccgcctgttgcaggcctgtggcgcgaccagaaatcaggccagcggtatcgctcaggtgctggaggctcagcgcaatggcggtcagtcgcccttgcgggtggtcgaggaagtacgccagttgccaggcatgaatcaggcgctgtatgcccggttattgccggaaattacattatggagcgggctggaccggcctgaccctgccttcgcttcggcgttgttgcgccgggccttgaacctgccgaaccagagcgcggtgggggccgatcccggtgaggtactggccatcgatagccgcgcagaacaaccgggcggtgtgattgccctgttacaaactactgttttattgagcccatcggagggaagcgcacagccctatagggtgttgcgttggcaagaa

SEQ ID NO: 33828 - DNA, 666 bp, Pseudomonas syringae
gtgaaagccccgtacactcatgaggtttacaacatgactattggtgtagtcggtcgtaaatgcggtatgacccgtattttcaccgaagaaggtgtctccattccggtcacggtcattgagatcgagccgaatcgcgtcactcagttcaaaaccgaagaaaccgatggctatcgtgcagtgcaagtcactgtcggcgagcgtcgcgcttcgcgtgttacagccgctcaggctggccacttcgctaaagcgaatgtagccgccggtcgtaccgtcatggaattccgtcttgaagaaggcgagtaccaggctggcgatcagatcaacgctgaaatcttcgctgctggtcaactggttgatgtaaccggtcagtccaaaggtaaaggcttccagggtacgatcaagcgctggaatttccgtggtcaagacaatacccacggtaactccgtctcccaccgcgtcccgggctctatcggccagtgccagactcctggtcgtgtattcaagggcaaaaaaatgtccggtcatatgggcgctgagcgcgtgaccgtgcagtccctcgaagtggtgcgcgtggacgctgaacgcaatctgttgttggtcaagggtgctgttcctggcgctactggcggcaacctggttgtacgtccggcagccaaggctcgcggt

SEQ ID NO: 33829 - DNA, 372 bp, Pseudomonas syringae
ttgcgcctccttttaacgggcgtattgcgctcggtgggaacagcaatctggagtctgaatccaatgcaaaaccagcaaatccgtatcaggttgaaggcttttgaccatcgcctgatcgaccaatcaacccaggaaatcgtggaaaccgcgaaacgtactggtgcacaggtgcgtggtccgattccactgccgacccgtaaagagcggttcaccgttctggtttctccgcacgtcaacaaagacgcgcgcgaccagtacgagatccgtactcacaagcgtgttctggacattgtccagccaacggaaaaaaccgttgatgcgcttatgaagcttgatcttgcggccggtgtggaagttcagatcagcctcggc

SEQ ID NO: 33830 - DNA, 975 bp, Pseudomonas syringae; identical to SEQ ID NO: 33042

SEQ ID NO: 33831 - DNA, 291 bp, Pseudomonas syringae
atgagtgagcacgaacatctgcatgaccacacgcaccagtctcacgaggcggttatcaaacgcctcaagcgtgcagacggccacttgcgcagcatcatcgccatgatcgaagacggtcgtgaatgcgtggacattgcccagcagctgcacgctgtcgagaaggcggtgtgccaggcgaaacgcacgctgattcaggatcacatcgatcattgccttgagaacacgatgggcgcactcgccaacggcgatcgggcaccgctggaagctttcaagcaaatcaccaaatacctg

SEQ ID NO: 33832 - DNA, 573 bp, Pseudomonas syringae
ttggcttttggactgcccccaagaagttggacaccaatccgacctaatgggggtgttcaaatggccaagtattcagagcaattcaagctcaccgtcgtcaaagcctatcttgcaggcaacataggctttcgcaaggtgtccagccagttctcgatcgattccagcctgcttcgacgctgggtcgccaattacaagagccatgggcacacaggccatcgtaagcctggtcttcggtacagcgaagccttcaaacgctcagtgctggagcacaagcgcgagcacgggctgtcccttcgccagaccgcagcgcattttggtattggtgatcctggccaaatagtcatttgggaacagcagcattacagtaacgatctagccccctacgttcccaagagaagaaagtctgttgccatgcccaagaagccttatcccaccgcaccagtaatcgacgacgatacgcagaagacgcgtgaccagttaatggcagagctcgaatacctgcgcatggagaacgcttacctaaaaaagttggaagagttgaaggagcagcaacgacggcaaaagaaaaagccc

SEQ ID NO: 33833 - DNA, 6132 bp, Pseudomonas syringae
gtcatttacatggacgttcaccaactggccctgcttgctcgtcagccttctgctgtgctgaccgaacgcaggtctttctggggaatgcccaagcgcggcctcgcgctgattctcgccaatgcgatgttctggcagccgttgctggtccaggccgaaggcattgtggtcagtgggccaaataccagcctgagtcaggcgggcaatggcgtgccgatcgtcaacattgccacgcccaatgccagcggcctgtcgcataaccagtaccagcagttcaacgtcgaaagccagggcgtcatcctcaacaactccaccaaccagacccagagtacccaactgggcgggatcatcgttggcaactccaacctgcgtggcacggcggcgaccaccattctcaacgaagtggtcggggccaacgccagccagctcaaggggtatacggaggttgcagggcaggcggcgcgagtcattgttgccaacccctacggcatcagttgcaacggttgcggcttcatcaacaccccgcaggtcacgctgaccaccggcaagccggtgctggacgccaatggccagttgcagcgtttcaacgttcagggcggaagtatttccatcgacggcgtggggcttaatgccgacaacgttgaccagttcgacatcatcacccgcagcgcgaagatcaacgccgaactgcacgccagacgcctcaacatcattgccggtcgtaacgatgtcgacgcgcagaccctgaacgccacagccttggctgacgacggcggcgccaaaccggaactggccatcgacagctcggcactgggcgggatgtacgccgggacgatccgtctggtgggcaccgaagcaggtgtcggcgtcaggctggccggtaatctggcggccagtggcggtgatattcagatcgatgccaacggtcatttgaacgtaatgcagaccgctgcaagtgctgccgttacggtcaaggccaacagtgccgaagtcaacgggccggtctatgcgggcgcgtcgctggccgtgaccacggcgggtgatctcgtgacccgtcagaacgtcgccgcacgcgatgcgctgacactgtccgcaggcggtcagctcaacaactcggcggtgatcgaagcaggcgtcaacgccgataacagccgcaacggttcgggcgatgtcacgttgtcggccaacgggctgagcaacagcggcagcattaccgccagccgtgccttgcaggccactgttacccaggtcctgaataaccagggtgcaaccctgaacgggcaggccagcacacgcattgcggccgccgcgatcgataaccgccagtcgggcagaatactgagccagagtggcagcgtggacatcaacgcctctcaggtgctgaacagccagagcggcttgatcagcagcagcggtagcctgacgatcaccgccgggtcgctggacaacagccagcaaggcaagctgtccagcagcagcgccttgtccgcgcgtatttccggtcagttcctcaatcaattgggccttgtcagtgccaacggttatctgctgctcaacgccgccacactggacaaccgcagcgcagaaatctccagcctcggcaacctgacctcgaccgtggggcagttcaacaacagcgaaaaaggccgcctgctggccaatggttcattgcagctgacatccgacactctgaataaccagaacggctcgctggccggtcagcagaacgtgcaactgacgctggggcaactgaccaataccggcaacggcagtgtttacggtaagaacaatctgaacctgaccctcaacggcgcgctgaacaacgatcaaggtgcactgcgcagtgacggcacgctggatgtgcgcgcggcgtcactgagcaacaacagcggcagcacaaccagcgccggggcggcgtcggtcaccaccagcggtgcagtcgtcagccggggcgggcagatcctgagtgatgcgggcctgacgctcatcagtggcagccttgataacagccagagcggtcgtattgccggtaacggcgtggtgctgagcactggtgctttcgacaaccagcgtagcggcaatctgtcgagcaccggcacgcttcagttgaccgcagcgcaagtcaataacagcgacgcaggtcgcatcgccagcgcgatggcattgactgccgtggtgacgggcctgaatcagaccaacgacggccgcgtgtacagcaacactgatgtcagcctggacctgagcaatggcttgctgaccaaccagggtggtttgatcaatgcaccgggccaactggtgctgaaaaacctcaacgtggtcaacaaccagagcggcaagatctccagcgccaacggtttcacgctggcggccacgtcgctggacaacaccgacggctcgctactcagcgacaaggcactcgtcgtgcgcgtcaaccagttgctgaccaaccttcgcggtctggtttctgcaaccggtcttgatctgacagcgggctctctgaacaaccgcaatggcgaaatttccagccttggtggcctgacggccaacatcggccagttcgacaaccgtgaaaaaggccgcctgttggccaatggtgcgctgctgttgacggccgacggtttgaataacctgaacggaattgtttccgggcagcagggcgtgcagttgaatctggggcaactggacaataccggcagtggcagtctttatgccaaaagcagtctcggcctgaacgtcagcggaacgttgaacaatgatcagggcgtggtgcgcagcgatggcaccatggacctgaaagcagccggtctggccaacaccaatggcagcgtgaccagtgccggaacaggtgtgctcaacttcaacggcgcagctgtcaatcagggcgggcagatcgtcagcgatgctcaactgacactcaccagtggcagcctggacaacagccagcgcgggcgtattgccggtaacggcgtgttgctaagcaccggcactttcaacaaccagcagggcggcagcctgtccagtactggcgccctgcgcctgacggcggggcaagtcgacaacagcgctgccggtcgcatcgccagcgcgatggcattgactgccgtggtgacgggcctcaatcaaaccaacgatggccgtctgtacagtaatagcgatgtcagcctggacctgagcaatggcttgctgactaaccagggtggtttgatcaatgcaccgggccaactggtgctgaaaaacctgagcgtggtcaacaaccagagcggcaagatttccagcgccaacggtttcacgctggcggccacgtcgctggacaacaccgacggttcgatactcagcgacaaggcactcgttgtgcgcgtcaaccagttgttgaccaacctgcgcggtctggtttcggcgaccggtcttgatctgacagccggctccctgaacaaccgcaatggcgaaatttccagccttggcaacctgacggccaatatcggccagttcgacaaccgtgaaaaaggtcgcttgctggccaacggcgcgctgctgttgacggccgacggtttgaacaacctgaacggggttgtttccgggcagcaggccgtgcagttgaatctggggcaactaaacaataccggtgctggcagtctttacgctaaaaacgccctgaatctgacgctgggcggtgtattggcaaacgatcagggcgtggtgcgcagtgatggcacgatggacctgaaagcagccggtctggccaacaccaatggcagcgtgaccagtgccggaacaggtgtgctcaacttcaacggcgcagctgtcaatcagggcggacagatcgtcagcgatgctcaactgacactcaccagtggcagcctggacaacagccagcgcgggcgtattgccggtaacggcgtgttgctgagcaccggcacgttcaacaaccagcagggcggcagcctgtccagtactggtgccctgcgcctgacggcggggcaagtcgacaacagcgctgcaggtcgcatcgccagcgcgatggcgttgactgccgtggtcataggcttgaatcagaccaacgacggccgtctgtacagcaacactgacgtcagcctggacatgagcaatggcttgctgaacaaccagagcgggcagatctccgctcccggccagttgctgctgaaaaacctcaacgtggtcaacaaccagagcggcaaaatctccagcgccaacggtttcactctggcagccacgtcgctggacaacaccgacggctcgctgatcagcgacaaagcgctgatcgtgcgcatcaatcagttgctgaacaacgtgcgcgggcagatttccgccagcggcgtcaccctgagcgctgcaacgctggacaaccgcaacgccgaactgtctagccttggcaacctgacggccaacatcggccagttcgataaccgcgaaaaaggccgcctgctggccaacggtgcgctgctgttgacggccgacggtttgaataacctgaacggaattgtttccgggcagcaaggtgtgcaactgaacctggggcaactgaccaacaccactggcggcagcatctatgccaaaagcagtctcggcctgaccgtcatcggggcggtgaacaatgaccaaggcgtgctgcgtagcgacggttcgctgacgctgcgtgccgcgtcgctgaccaacaacgcgggcagtatcagcagtgccggggttgcatcgatcaatgtcgatggcgacgttgtcaatcggggcgggcaggtcctcagcgatgcgacactgacactcaccagcgccagcctcgataacagccagagtggccgtattgcgagtaaaggcctggtgctcaccaccggcgtcttcgacaaccatcaggacggtcgcctgaccagtaccggcgagcttcaactgaatgccgggctggtcaacaacagcgacgcaggtcgtatcgccagcgccatggccctgacggccgtggtcactggcttgaatcaaacccgcgacggcaggctttacagcaacagcgatgtcagcctggacctgagcaatggcgtactgaccaaccagggcggcctgatcaatgcgccgggccagttgctgcttaaaaacctcacgtcggtcagcaaccgaaagggtgaaatatccagtgcgaatggtttcacgctggcggccacctcgctggacaacaccgagggttcgctgctcagcgacaaagccctcgttgtgcgcatcaaccagtggctgaccaacctgcgcggcaagatttccgccaacggggtcaacctgagtgccgcaacgctcgacaaccgtaatgccgagctgtccagcctgagcaccctgaccgccaccctcggcgggttcgacaacaccgacaaaggtcgcctgctggctaacggcgcactgctgctgacagccgacaccctgaacaaccagaacggtatcgtttccgggcaacaggacatgcaactgaatctgggccaactgagcaatacgggcgcaggcagtgtttatgcaaaaaacagactgggcctgacgctgaccggcgctttgaacaacgatcagggcgtgctgcgcagtgatggcgcgcttgacctgaaagcgggttctctggccaacaccggcggtagcgtgaccagtgctggcgtttcaggcctggcaaccgatgctgccgtggtcaatcagggcgggcaaatcctcagtgatgcaaccctgacgctcaccagcgccagcctcgataacagccagagcgggcgtatcgccagtaaaggcctggtgctcaccaccggtgccttcgacaaccatcaggacgggcgtctgatcagcaccggcacgctgcaactgaatgccgggcaggtcaacaacagtgaggcgggccgtatcgccagcgcgatggcgctgacggctgtggtgacaggtctggaccagaccagcgatggccggttgtacggtaacggtgatgtcagcctggacctgagcaacggcgtactgaccaaccagggcggtcagctatccgcgcctggccagttgctgctgaaaaatctctcatcggtcaacaaccgcagcggcaaaatctccagcgccaacggcttcacactggccgcgaccacgctggacaacaccgcaggttcggtgatcagcgataaagcg

SEQ ID NO: 33834 - DNA, 387 bp, Pseudomonas syringae
atggcaaaacctgctgctcgtcctcgtaaaaaagttaaaaagacagtggttgatggcatcgcccacatccacgcgtcgtttaacaacacaatcgtcaccattaccgatcgtcaaggtaacgctctttcgtgggctacctccggcggttcgggtttccgtggttcgcgcaaatccaccccgttcgctgctcaagtagctgctgaacgtgctggccaagctgcgctggagtacggtctgaagaacctcgacgtcaatgtcaagggtccaggcccaggtcgtgaatccgctgtccgtgcattgaacggctgtggctataagatcgccagcatcaccgacgtgacgccaatcccgcacaacgggtgccgtccgccgaagaagcgccgcgtg

SEQ ID NO: 33835 - DNA, 123 bp, Pseudomonas syringae
atggctctgcgtttggctggcgaactgatggacgccgccgaaggtaaaggtgctgcggtcaagaagcgtgaagacgtgcaccgtatggccgaggccaacaaggctttctcgcactaccgcttc

SEQ ID NO: 33836 - DNA, 975 bp, Pseudomonas syringae
atgaaacagatgaccttcgccgatgccgagtacgcgggtaaacgtaagcatacccgccgcgagcgctttctcatcgagatggatcaggttgtgccctggaaaggcttgattgcccttatcgaaccacattatccaaagggcgaaggtgsccgtccggcttatccgctgatggcgatgctgcgtattcacctgatgcagaactggtttggttacagcgatccggcgatggaggaagcactttacgagacaacgatcctgcgccagttcgcagggttgagtctggatcgaatcgccgatgaaaccacgattctcaacttccggcgtctgttggaaaagcatgagttggcaggcgggattttgcaggtcatcaatggctatctgggtgatcgaggtttgatgctgcgccaaggtacggtggtcgatgcgacgatcattcatgcgccgagctcgaccaagaacaaggacggcaaacgcgatcccgaaatgcatcagacgaagaaaggaaaccagtatttcttcggcatgaaagcgcatatcggcgtcgatgccgagtcgggtttagtccatagcctggtgggtactgcggcgaatgtggcggacgtgactcaggttgatcaattgctacatggtgaggaaacctatgtcagcggtgatgcgggctacaccggcgtggacaagcgtgcggagcatcaggatcgtcagatgatctggtcaattgcggcccgcccaagccgttataaaaagcatggcgagaaaagtttgatcgcacgggtctatcgcaaaatcgagttcacgaaagcccagttacgggcgaaggttgaacatccgtttcgcgtgatcaagcgccagtttggttatacgaaagtccggtttcgcgggctggctaaaaacaccgcgcaacaggctactctgtttgccttgtcgaacctttggatggtgcgaaaacggctgctggcgatgggagaggtgcgcctg

SEQ ID NO: 33837 - DNA, 975 bp, Pseudomonas syringae; identical to SEQ ID NO: 33042

SEQ ID NO: 33838 - DNA, 186 bp, Pseudomonas syringae
atgctgattctgactcgtcggtgcgcagaaagcctgatcattggtgatggtgaaatcaccgtaaccgtgctcggagtgaagggtaatcaggtgcgtattggtgtcaatgcgcccaaagaagtcgcggttcaccgtgaagagatttacctgcggatcaagaaagagaaggacgaagaaccaagccat

SEQ ID NO: 33839 - DNA, 975 bp, Pseudomonas syringae; identical to SEQ ID NO: 33042

SEQ ID NO: 33840 - DNA, 825 bp, Pseudomonas syringae
atgcctgacattcctgtgagccagcctgtgaacccaggctgcgatgcaccggtcggggttttcgattccggcgttggcggcctttctgtcctcaatgaaatccgccagacgctgcccaacgagtccctgctgtatctggccgactgtggccatattccctacggcgagaaaactcctgaattcatcatcgagcgttgcctgatcattgccgatttttttcacgggcagggcgccaaggcgctggttgtagcatgtaacaccgcaactgctgcaggcgtggcgcacatacggcaacgctatcccgactggcccatcgtgggcatggaacccgcagtaaaacctgccgccgaggccactcgcagtggcgtcgtcggtgtactggcaaccaccggaacattacaaagcgccaggttcgcggccttgctcgaccggtttgccagtgacgtaagcgtcgtgacacaaccgtgcccggggctggtcgagctgatcgagaccggcgatctggtcagccctcagattcgtcaactgttacagcgttacgtcgagcctctgctggcggcgcgctgcgacaccatcattctgggctgcacgcattacccctttctcaagccattgctgcgcgaaatgctccccgcgtcggtcaccctgatcgacaccggggctgcggtcgcgcgtcaattgcagcgtcttttgtcccgttccggcctgcttgccagcggccccgcacgagacactttgtattggtctagtgacataccggacaatttcggaaaaatcctaccttttctgtcgcaaatgtctggcaatgtgagaagcttccgtttg

SEQ ID NO: 33841 - DNA, 630 bp, Pseudomonas syringae
gtgggcggtacactggccgagcatctggcgggcgaagccaacgacatcaccgtggtcgacaccgacggcgaccgcttgcgcgatctgggtgatcgcctggacatccgcaccgtgcagggcaaaggctcgtatccggcggtgctgcgccaggcaggtgccgacgacgctgacatgctggtcgccgtgaccagcagcgacgaagccaacatgatcgcctgccaggtggcccacacgctgtttcacacaccgaccaagatcgcgcgcatccgtgaagcggcgtacctgacccgcgcaggcctgttcgacaagaacgcgattccggtcgacgtgctgatcagcccggaacaggtggtcaccaattacatcaagcgcctgatcgagtaccccggcgcgcttcaggtaatcgatttcgccgaaggcaaggcgcagctggtcgcggtcaaagcctattacggcggggcgcttgtcggtcagcaactgcgccagctgcgcgcgcacatgcctaacgtcgatacccgtatcgcagcgatctaccggcgcgaccgggcgatcctgcccaaaggcgatacggtcatcgaagccgacgacgaggtatttttcatcgccgccagggctgatattcgtgcggtg

SEQ ID NO: 33842 - DNA, 441 bp, Pseudomonas syringae
ttggagtgcctcatggccaagaagataaccgcatacatcaagctgcaagtgaaagccgctcaggctaaccctagcccgccagttggtcctgctctgggtcagcacggtgtgaacatcatggaattctgcaaagcgttcaacgcccgtactcagggtattgagccaggcctgccgactccagtgatcatcactgtatacagcgaccgtagcttcacttttgaaacaaaaagtactcctgcatcggttctgctgaagaaagctgcaggcttgaccagcggctcggctcgcccgaacaccgttaaagtcggcaccgtgactcgtgctcagctggaagatatcgctaaagcaaaaaatgcggatctgactgcagctgacatggaagcggccgtgcgtaccatcgccggttccgctcgtagcatgggccttaacgtggagggtgtg

SEQ ID NO: 33843 - DNA, 234 bp, Pseudomonas syringae
atgagcaccatcgaagagcgcgtcaagaaaatcgttgccgagcaacttggcgtcaaatcagaagaggttgtcaacactgcttctttcgttgaagacctgggcgctgactccctggacaccgttgagctggtaatggctctggaagaggaattcgagaccgaaatccctgacgaagaagcggaaaagatcacgaccgttcaagcagcaatcgactacgtcaacagccatcaggct

SEQ ID NO: 33844 - DNA, 975 bp, Pseudomonas syringae; identical to SEQ ID NO: 33042

SEQ ID NO: 33845 - DNA, 519 bp, Pseudomonas syringae
atggttgattcttacgacgactccctcgacggggagaaaagcaaaacccaggtcaaacgagagctgcatgctctggtcgacctcggcgagcgactgacaacactcaaagccgatgtgctggccaagctgccgctgaccgatgctttgcgcaaagccctggccgaagcgcccaagcacaccgccaacatcgcccgaaaacggcatattctgttcattggcaagctgatgcgcgatcaggaccaggaagccattctggtgttgctggaccaactcgatgcctccactcgccagtacaatgaacgttttcacaatctggagcgctggcgtgatcgcctgatcgcgggtgatgacgccgacctcgagaaattcgttatcgaataccccgacgccgaccgtcagcagctgcgttcgctgattcgtcaggcgcaacacgaagttgcacgcaacaaaccgccggccaccagccgcaaaatcttcaaatacatccgtgagctggacgaacttcaacgcggtctgcgt

SEQ ID NO: 33846 - DNA, 6288 bp, Pseudomonas syringae
tatgaactgtcctctgtacagcagggtatctggctcggtcagatagcggattcgaacataccactgtacaacattggcatgagactggagatcaatggtgatctcgatattccgatgttcgagaaggctatcaatctggttgccaagcataacgatgcactacggcttgccttgttccatgagggcgatatagccaggcagagggtgctgccatctgtcgatatcagactcgcactcgtcgatttttcagactacgttgacagtgtcgagcgagcgctggaataccttcaacaatcattttcccgaccgttcaatcccttggaaggcattctttgggaggtgcagctcgtacggtgcagtgcatcccatcattactggctggggcggtgccatcatttggtcatggatggcgcaggggtaacgctgttctgccatgcagtggagaaagcctacaataatttgttggcgggcatcgacgagctcgaggaagccccttcctacagcgacttcctgatcaaagacaaggcctatctgagttcgtcgcgcctggagcgcgacagggcgttttggcgcgaacgctatacacaactgccgccacctctgctgcagtggtccggcgatcatgccgtgggttcaatgtgcaagagcggtcatattcgctcgacgataaagcgtgacctgttcaatgccctggtcgccgttgccaccgagcatgacctttctcctgtcgcgatattctttgccgccgtaggcgcctatttttcacgtgttggtgatgctgaagaggtcatcatcggcatgcccctgcataaccgcacgacggcctgtcagaaaaagacgatcggtatgttttcttccgttattccgatcggcgtacgggtcgaccccaatcgctccctgctcgaattgatgggcaatgtggccgccgaattgcgacgctgctaccgccatgagcattttccaatcgcggaactgaatcgcgccctcaatattgggcattccaggcgcaagcagatcttcgatatcacgctttcattcgaaaaatttgacgcggactttatctttggcggctcccctgcgcaggcgatcaggatgtacagcggcttcgatcagacgccactctcaatcgctatctgcgattactattcagacgatgacattgtcgttgactttaacttcaatctgacctgctttggccaagacgaaattgaacggattcgggaccgcattacgctgctcctgaagttggttgccgctcatgactcaacaccgattagccagcttgcgctgatgggcgaaaccgagcgccggcaagtgctcgtcgagttcaacgcaacacatcaggcattgcagcaggatctattggtccatcagcttttcgaacagcaagcgcagcagcagcctcaagcgcttgcactggtgtgcggcgacgagtgtgtgacttacgcggacctcaacagacgcagcagccaggtggctcatgtcttgctgtcactgggcattgttgccgacgaccgcgtggcgatctgtgtggaacgcagtgtggagatggtggtgggcttgctggggatcctgaaggctggcggtgcatatgtgccgctggaccctgggtatccgctggagcggttgcgctacatgctggaggacagcgcgccggtggcggtgctggtgcagcccgaaacccgggagctgctgggtgcgctggcgatgccggtgctggatctgcaaagcgcgaactgggcggttaaggccgagcttgatcgcgtgtcgccgacagtcacgccacagcacctggcttatgtgatctatacctcgggttcgaccggccaacccaagggcgtgatgattgagcatcgcaatctcgttaacctggtggcttggcactgcgatgcattcgatctgacccatcacaatcgcgtttcgagcgtggcgggagtcggtttcgatgcctgcgcctgggaaatatggccagctttgtgtgtgggagccagcctgtcgctgctgcctggacaagcgcttggcaacgatgtggatgcactgctgtggtggtggcgtcggcaagatctggatgtgagcttcctgcctacgccggttgccgagatggcattcacccaagagatcgaaccggccacgctgcaaacgttgctgattggcggagaccggttgcgtcggtttcccaatccggatagtcaggtcgcgctgatcaacaactatggtccgaccgagacaacggttgtggcgacatccggtctgatcgatgcaacacagtcggtattgcacataggccgtcctatagccaatacgcaggtttatctgttggatgcccacggccagccagtacccattggggtcagcggcgagatccatatcggcggtgcgggggttggccgtggctatctgaatctgccggaactgacggcggagcgtttcgtcgaggatccgttcagtgccgagccggcagcgcggatgtacaggagcggcgatctggggcgctggctggcggacggtaatatcgaatacttggggcgcaacgacgatcaggtcaagatacgaggcttgcgtatcgaactgggcgagatcgagacgcagctgaaacagatagcgaacatcagggaagcggtggtggttgcccgagaggacacgccgggcgagaagcgtctgacggcgtattacacacagcaggaagcgaaacaggcgattacggcgcagacattgcgtactgccttgcaggcgaggctgcctgaatacatggtgccggcagcgtatgtgaaattgtcggaatggccgctgacgcccaatggcaagctggaccggcgggcattgccgacgccgggggacgacgcttacgccagtggtgactacgaggcgccggcaggcaaagtcgaacgtgcactggcggatatctggcaagagctgctcggtatcgatcgggcagggcgccacgatcacttcttcgagctgggtgggcattcgttgctggcgatgagactgatctccctggtccgacagcgtttgaacgtagagttgcgattggccgagttattcgcacatccgcagctcgaggcgcttgcctgcgtggttgagcaggcacaaagcaacgcgctgccgcagattgcgccagtctcacgagagatgccattgccgctgtcgtttgctcagcaacggcagtggtttctggcccagatggaaggtgccagcgttgcttaccacataccggcggggctgcgcatactcggcgcgctggatgagcccgccttgcaacgatcgttgaaccggatagtggcgcgtcacgaagtactgcgcacaacgtttgtccagcagaccgcggaccagtccgtggtgctgcgcatacatcccgaggaaacaggctgccccttgcgcaagtacgatctcacgacgcatgccgatggctcgcgtgagttggcacgactggtggacgaagaagccattaggcgcttcgatcttcagcagggaccgctgattcgagggagcctggttcgtctgagcgatgaagagcatgtgctgctgttgaccatgcaccacatcgtatcggatggctggtcgatgggcattttgacgcgcgagttgggagcgctctacgcgagcggttgccaagatgaggcagccccgttgccgccgttgttgattcagtacgcggactacgcgatgtggcaacgaagttggttgagcggcgaggtattgcacaagcaaagcacttactggcagacggctctgctcgatgcgccggcattgctgatgttgcccgctgaccgtgtacgtcctgcgcaacaggactatacgggtgcgtcggtagctgtggtgctggatgcgacgctgagcaatgagctcaagacgttgagtcggcggcacggcaccactcttttcatgacactactggcgggctgggcaacggtattgagtcgtttgtcagggcaggatgaggtggtaatcggttcgccggtggcgaaccggatgagcgcggaggtcgagggcctgatcggtttttttgccaacaccctggcgttgcgggtagatgtgtcagacgacccgacggtcgaggcattgctgagtcgagtcaaggcctgcacgctggcggcgtatgaacaccaggatctgccgttcgagcaggtggtggagttgctcaagccggtgcgcagcttgtcccatagcccgctgttccaggcgatgctgtcgtggcagaacatgccgacggcggaactcgcgatcgacgggctggagctgacgctgctggattcggtagtacgcaccaccaagtacgatgtgtcgctcgacttggcggaggtagagggccggatcgtcggttcgctggaatatgcgacggcgctgttcgacagagatacggcgcaaagctacgtggcgtatctggaacgggtgctgcgtgcaatggtcgagaacgagcgccaggtagtcggagcgatcaagctcttgggcgaaaccgaacgccggcaagtacttgtcgagttcaacgcaacacaccaggccttgcgacaggatttattgctccatcagcttttcgaacagcaagcgcagcagcagccgcaagcgcttgcgctggtatgcggcgacgaacgagtgacttacgccgatctcaacaaacgcagtaatcaggttgctcatgtcttgctgtcactgggcattgttgccgacgaccgcgtggcgatctgtgtggaacgcagtgtggagatggtggtgggcttgctggggatcctgaaggctggcggtgcatatgtgccgctggaccctgggtatccgctggagcggttgtgttacatgctggaggacagcgcgccggtggcggtgctggtgcagcccgaaacccgggagctgctgggtgcgctgggtgcgctggcgatgccggtgctggatctgcaaagcgcgaactgggcggctgaagctgagcatgatcgcgtgttgtcgacggtcacgccacagcacctggcttatgtgatctatacctcgggttcgaccggccagcccaagggcgtgatgattgagcattgcgccattgtgaaccgcctgttatgggcgcaggaccactatcggctgagtcgcgaagaccgcttcttgcagaagacaccgttcgggtttgacgtgtcggtctgggagttttttcttcctttgctcgccggtgcgcaattggtgatcgcacgtccggcaggccatcaggaccccgagtatctggccgagttgatcgcaggctcgggagtgacgatattgcattttgtaccctccatgttgcagagcttcctcaatcaggttggcccgctggcatgtagcacattgcggcaggtgttctgtagcggcgaggcgttgccctatagtttgcaaaagcacttcgagcaacgctttgcgcatgtgcaattgcataacctgtatggccctactgaagccgctgtcgacgtcacctactggcactgcgtgcccgacctgcatacggggatcgtgccgattggccggcccgtcgccaatacccggctgtatctgttggacccgcatatgcaaccggtcccggttggcgtgcgcggcgagatttacatcgcgggtatacagctcgctcgcggctatttgaatcgtgatgcgctgaccgcggagcgattcgtgaaagaccgtttcagtaacgacccgacggcgcggatgtataggagcggcgatctggggcgttggctggcagacggtaatatcgagtatctgggacgcaacgacgatcaggtcaaactccgtgggttccgtatcgagctgggcgacattgaagcgcatctggctgggtgtgctggtgtcggagaggctgtggtggttgcccaggaggacacgccgggtgagaaacgcctgatcgcttattacacgacgagggaagcgaaagagattattgcagtgcagacgctacgtgcggccttgcaggcgagtctccctgagtacatggtgccggcggcgtatgtgaaattgtcggggtggccgctgacacctaacggcaagctggatcgccgggcgctgcccgcgccggagggtgatgcttatgtgagccgcggctacgaagcgcctcgcgggaaggtggagatggcgcttgccgaaatctggcaggagctgcttgatgtcgaacgggtagggcgccacgatcatttcttcgaactgggcgggcattcgctattggccgtcagtctgatgggccggatgcgtcaagcgggactgtcggcggatgtacggatgctgtttgctcagccgactctttcggcgtttgccgaggttttgggtaacggtcatgaggtggag

SEQ ID NO: 33847 - DNA, 705 bp, Pseudomonas syringae
ttgtcgtgggtgcctttattccatcagggcgaatgcctcgtggaaaaaaatgtattctcgttatgtgtgcacaaccctgaatggatgatcatggaaaactcacagggcggacagagtcttgtctggcaacccagccaggtctcttcaaaggaccgcgagcagcacttgcgccagacgccgaagacggtgtggctgacgggactcagcggctcaggaaaatccaccattgctttcgcgctcgagcgagcgctgatggacctcggcaaacttgcctacacccttgatggcgacaacattcgtcagggtttatgccgtgatctgggcttttctgccgagcaccgttcggagaacatccgacgcattgctgaagttgcccgattgatgaatgacgcaggcttgatcgttatctcatcattcatttcgccctatgaggcggaccgcgaagcagcccgttcgatcattggcaatgaacgcttcatggaagtatttatcagcactcccctggaaacctgcattcagcgtgaccccaaagggctttatcgcagggctgtggcaggagaattgaaagactttaccggcatcagcgccccgtatgagtcgccgttgtatcccgtgctgcaactggacacccgccatgtacccattgaagagtgcgtcgcacggattctggatattcttcagataacaaaaaaccattttcgcgcc

SEQ ID NO: 33848 - DNA, 246 bp, Pseudomonas syringae
atgctttcagcggttatcttttccgaacatagctacccggcaatgccactggcgtgacaaccggaacaccagaggttcgtccactccggtcctctcgtactaggagcagcccctctcaaatctcaaacgtccacggcagatagggaccgaactgtctcacgacgttctaaacccagctcgcgtaccactttaaatggcgaacagccatacccttgggaccggcttcagccccaggatgtgatgagc

SEQ ID NO: 33849 - DNA, 975 bp, Pseudomonas syringae; identical to SEQ ID NO: 33042

SEQ ID NO: 33850 - DNA, 966 bp, Pseudomonas syringae
atgaccttcgccgatgccgagtacgcgggtaaacgtaagcatacccgccgcgagcgctttctcatcgagatggatcaggttgtgccctggaaaggcttgattgcccttatcgaaccacattatccaaagggcgaaggtggccgtccggcttatccgctgatggcgatgctgcgtattcacctgatgcagaactggtttggttacagcgatccggcgatggaggaagcactttacgagacaacgatcctgcgccagttcgcagggttgagtctggatcgaatcgccgatgaaaccacgattctcaacttccggcgtctgttggaaaagcatgagttggcaggcgggattttgcaggtcatcaatggctatctgggtgatcgaggtttgatgctgcgccaaggtacggtggtcgatgcgacgatcattcatgcgccgagctcgaccaagaacaaggacggcaaacgcgatcccgaaatgcatcagacgaagaaaggaaaccagtatttcttcggcatgaaagcgcatatcggcgtcgatgccgagtcgggtttagtccatagcctggtgggtactgcggcgaatgtggcggacgtgactcaggttgatcaattgctacatggtgaggaaacctatgtcagcggtgatgcgggctacaccggcgtggacaagcgtgcggagcatcaggatcgtcagatgatctggtcaattgcggcccgcccaagccgttataaaaagcatggcgagaaaagtttgatcgcacgggtctatcgcaaaatcgagttcacgaaagcccagttacgggcgaaggttgaacatccgtttcgcgtgatcaagcgccagtttggttatacgaaagtccggtttcgcgggctggctaaaaacaccgcgcaacaggctactctgtttgccttgtcgaacctttggatggtgcgaaaacggctgctggcgatgggagaggtgcgcctg

SEQ ID NO: 33851 - DNA, 666 bp, Pseudomonas syringae
gtgagttcgccaaacatgcaaacaggtctggatttcacccttgtcgaggacctggtcgcaggcgttgacgaagtcggccgcggcccattgtgtggcgcagtggtgaccgctgcagtcattcttgaccccgccaagcccattctcgggctcaatgactcgaagaaactgaccgaagccaaacgcgaaaagttgtttgtcgaaattcaggaaaaggccttgtgctggttcatcgcccgggctgaagttgaagaaatcgaccagttgaacatcttgcacgccacaatgctggccatgaagcgcgccgtagaagggttgagcatcaccccgaaactggccctgattgacggcaatcgctgcccgcaactgtcggtgccctctgcaccggtggtcaagggtgactccaaagtgccggcgattgccgccgcatcgattctcgccaaagtgagccgtgatcgtgaaatggctgcgctcgagctgatttatccgggttatggcatcgctgggcacaaggggtatcctacgccggtgcaccttgaggcactggcccggctcgggcctacgcctattcatcggcgttctttcgggccagtgcgtacggcccatgaagcgcgtgcggccatcatgctcggcggttcgatcccgttaccggtcggtctgttgcaagac

SEQ ID NO: 33852 - DNA, 1581 bp, Pseudomonas syringae
atgacccaacaggccgccgaagtcgcgaaacgccgcactttcgccattatttcccacccggatgcgggtaaaaccaccatcacggaaaaactcctgctgatgggcaaggccatttccgtcgccggtacggtcaagtcgcgtaaatccgaccgccacgccacctccgactggatggaaatggagaaacagcgcggtatctccatcaccacgtcggtgatgcagttcccgtatcgcgatcacatgatcaacctgctcgacaccccgggtcacgaagacttctccgaagacacctaccgtaccctgacggccgtcgactcggccttgatggtgctcgacggcggtaaaggcgtcgagccacgtaccattgccctgatggatgtctgccgcctgcgtgacacgccgatcgtcagcttcatcaacaagctggaccgcgacattcgcgacccgatcgaactgctcgacgaaatcgaagcggtcctcaagatcaaggctgcgccgattacctggccaattggctgctaccgtgacttcaagggtgtctatcacctggctgacgactacatcattgtttacaccgcaggccacggtcacgaacgcaccgacaccaaaatcatccagaatctggactccgacgaagcccgcgcccacctgggtgacgagtacgaccgcttcgtagagcaactggaactggtgcagggcgcttgccacgaattcaatcagcaggagttcatcgacggccaactgaccccggtgttcttcgggacggctttgggcaacttcggcgtcgatcacgtgcttgatgctgtggtgaactgggcgccgatgccgctggcacgggttgccaacgagcgcaccgtcgagccggaagaagaaaaattcgccggtttcgtgttcaagattcaggcgaacatggaccccaagcaccgcgaccgtattgcgttcatgcgcatttgctcggggcgctacgagaaaggcatgaaaatgcgccacgtgcgcctgggcaaggacgtgcgaatcggcgacgcgctgaccttcttctcctcggagcgtgagcaactcgaagaagcctacgctggcgacatcatcggcctgcacaaccacggcaccatccagatcggcgacaccttcaccgaaggcgaagcgctgggcttcacgggtattccgcactttgccccggagctgttccgccgcgtgcgtctgaaagacccgctcaagtccaagcaactgcgccagggcctgcaacagctcgccgaagaaggcgccacgcaggtgttcttcccgcagcgcagcaacgacatcattctcggcgccgtcggtgtgctgcagttcgacgtggtcgccagccgcctgaaggaggaatacaaggtcgaatgcgcctacgagccgatcaccgtctggtcggcccgctggatcgactgcgctgacaaaaagaagcttgaagagtttgagaacaaggccgtggaaaacctggcagtggacggcggcggtcacctgacctacctcgcccctacccgcgtgaacctggcgctgatggaagaacgctggcccgacgtgaaattcagcgccacccgcgagcaccat

SEQ ID NO: 33853 - DNA, 447 bp, Pseudomonas syringae
atggttcccgtaatcgccctggtgggtcgaccgaacgtcggcaagtccaccatgttcaaccgcctgaccaggacccgcgacgctattgtcggcgatctgtccggtcttacccgtgatcgccaatacggagaggcgaagtggcaagggcgctcctatattctgatcgacaccggcggtatttccggtgacgagcatggcatggacgaaaaaatggccgagcaatcgctgctcgccattgaagaagccgatgtggtgctgtttctggtggacgcccgtgcgggctataccgccgctgatcagatgattggtgagcacctgcgcaagcgcaacaaacgttcttacgtggttgccaacaagatcgacaacatcgatgagaacctggcgcgtgccgagttcagcccgatgggtctgggcgatgccattccggtggccggtgcccacggtcgc

SEQ ID NO: 33854 - DNA, 1035 bp, Pseudomonas syringae
atgattgaagaatcggcgatgcccgcattacttgacgcctcgagcttgaaccaacgattcagacagctgatacacggccatggcgtacatcacactgcggttataacgggtgattgcataaaaattgttcagacccagccagtattcgggaccattgtcgccttcaagacggaatgccgtcaccggcatgtcgtcgcgcagcgcatcatgacttgcccaacccagctgtcgcaactccccgaccgacattaccggatcaagtgcagggctcaagccttcatcaacccggtcgccacgcgccgttgcgcggctgacgacctgctggccggccacccagccatgacgcttgaaatagctggccacgctgccgatggcgtcgtccgggtcggtccagatgttgatgtgaccgtcgccgtcaaagtccactgcataagcgcggaagctgctcggcatgaattgcggcaggcccattgcgccggcatacgagcctttcagggtcagcggatcgacctgttgctcgcgggccagcagcaggaactcacgcagttccttgcggaagaacggggcgcgcggcgggtaatcgaaaccgagcgtcgacaaggcgtcgatcacccggtaattaccggtgttgcggccgaaaaaggtttcgacgccgatgatcgaaacgatgatctgcgccggtacgccatattcctgctcggcgcgggccaatgcggcctcgtgctgacgccagaaatcgacaccgcgggctatgcgcgtgtcagtgatgaacatcggccgatactctttccactgcttgacccgttcagccgggcgcgaaatggcatccagaatggcctgcttgcgctcgacctcacgaaacaggcccatcaactgctcgccggcaaaaccgtagtcgcgggtcagttcaccgacgaactcggccacctggggcgaaccttcgtaatcaccggccagtgcctcttgcaccgacccaaggatgcccaccaggccgaccaccggagcatatcgagcccagttacgcattgcttgcat

SEQ ID NO: 33855 - DNA, 975 bp, Pseudomonas syringae; identical to SEQ ID NO: 33042

SEQ ID NO: 33856 - DNA, 1257 bp, Pseudomonas syringae
gtgctgctcgacagcggcagaccggttgccgagcgcggccgctacgacctgctcagcgcctggccacggcaggaactgacgattgcggatggcgagagcggcacggcttacctgcaacgattgcgcgacagcctggcgtcgctgggaacggcgaccttgccggcgggctgcgagctgccctttgccggcgggctgatcggctacctgagttacacgttcgggcgacgcctcgaaccgctgcccgatcaggccatcgacgacctgcaattgcccgaagcgcggctggggctctacgcctgggcgctgatcagtgatcatcaggcgcagaccagccaactgatgtttcatccagacttggccgacaccgagcgcgagcggctggttgacctgttcactggcagcatcagcgaggcgccatcgcacttcaggctcagccaaccgtttcaggccagtatcagcgccgacgactaccaggacgccttcgagcgaattcaggcttatattcaggcaggcgactgttatcaggtcaatttcgcacaacgctttcaggcgcagtgcactggcgatccgtgggcagcttattgcgcgcttcgagcagcctgcccgacgccgttttccggctacctgggcctgtcgggcgccgatgcggttttgagcctttcgccggagcgtttcgtcaagatcagcgcgaggcaggtggaaacccgcccgatcaaaggcacgcgcccgcgcagccaggacgctgtgcaagacgccgctttcgcccaagagctgctgaacagcgagaaggatcgcgccgaaaacctgatgattgtcgacctgctgcgcaacgacctggggcgcagctgcacaacaggctcggtgaaagtgcccgagttgttcagcctggaaagctaccccaacgtgcaccatctggtgagcagcgtgaccggcgagctggcggccggcaacgatgctctggacctgatcgccggcagcttccccggcggctccatcacgggtgcgccgaagatccgcgccatgcagatcatcgacgaactggaaccgactcgccgcagcctgtactgcgggtcgctgctgtatgtggatgtacgcggcgagatggacagctccatcgccatccgcagcctgctggtcaaggacgggcgcatttcctgttggggcggcggcggcattgtggcggactctcactgcgaggccgaatatcaggaaaccttcaccaaggtccgcgtgctgctagaaacgcttgaggcactt

SEQ ID NO: 33857 - DNA, 1398 bp, Pseudomonas syringae
atgtacggcgagatgatcgagtttccgggcggcgtctacggtatggcgctgaaccttgagcaagactccgtaggtgccgttgtactgggcgcttacacgactctggctgaaggcatgagcgccaagtgcactggccgcatcctcgaggttccggtgggtaaggaactgctgggtcgcgttgtcgatgcactgggtaacccggttgacggcaaaggtccgctgaacaacaccgagaccgatgcggtcgagaaagttgctccaggcgtgatctggcgtaagtcggtagaccagcctgtacagactggctacaaggctgtcgatgccatgattcctgtcggccgtggccagcgtgagctgatcatcggtgaccgtcagatcggtaaaaccgctctggccatcgacgcaatcatcaaccagaagaacagcggcatcttctgcgtctacgtagcaataggtcagaagcaatcgaccatcgccaacgttgttcgcaagctcgaagaaaacggcgcactggctaacaccatcgtcgtggctgcaagtgcttccgaatccgctgcgctgcaattccttgcaccgtactcgggttgcaccatgggtgaattcttccgcgaccgcggtgaagacgcgctgatcgtttatgacgatctgtccaagcaagcagtggcttaccgccagatttccctgctgctgcgccgtccaccaggccgtgaagcttacccaggcgacgtgttctatctccactcccgtctgctggagcgcgcatcgcgtgtttccgaagagtacgtagagaagttcaccaacggcgcagtgaccggcaaaacaggctccctgaccgcgctgccgatcatcgaaacccaggctggcgacgtttccgcgttcgttccgaccaacgtgatttccatcaccgacggtcagatcttcctggaatcggccatgttcaactccggcatccgtccggctgtgaacgccggtgtttcggtatcccgtgtgggtggtgccgctcagaccaagatcatcaagaagctttccggtggtatccgtactgctctggctcagtaccgtgaactggcggcattcgcccagttcgcttctgacctggacgaggcgacccgcaagcaacttgagcatggtcagcgcgttaccgagctgatgaagcagaagcaatacgcaccaatgtcgatcgctgacatggcgctgtcgctgtatgccgctgagcgtgggttcctgactgacgtcgaaatcgccaagatcggcagctttgaacaagcgctgattgcttacttcaaccgcgatcacgccgatttgatggccaagatcaacgttaagggtgacttcaatgacgaaatcgacgctggcatgaaagccggtatcgagaagttcaaggccacccaaacctgg

SEQ ID NO: 33858 - DNA, 1629 bp, Pseudomonas syringae
gtgttcgaccccgatcgtgcagacagcttcgctgccgccgaccgtgtgcgcagcgagtacgtggtcaaggtcgtcggcaaggtccgcgcccgtcctgccggtgccgtcaacgccaacatggcatccggtgccatcgaagtgctgggctacgagctcgaagtactgaacgagtccgaaactccgccgttcccgctgaacgaatattccgatgtcggcgaagaaacgcgcctgcgttatcgcttcatcgatctgcgtcgtccggaaatggctgaaaagctgcgtctgcgttcgcgtatcaccaccagcattcgtcgttatctggatgaaaacggctttctcgatgttgagacgccgatcctgacccgtgccacaccggaaggcgctcgtgactatctggtccctagccgcacacatccgggcagcttcttcgcgctgccgcaatcgcctcagttgttcaagcaactgctgatggtggccggcttcgaccgctattaccagatcgccaagtgcttccgcgacgaagacctgcgtgctgaccgtcaaccggaattcacccagatcgacatcgagaccagcttcctcaacgaggaagacatcattggtctgaccgagaagatggttcgccagttgttcaaggaagttctgaacgttgagttcggtgacttcccgcacatgaccttcgaagaagccatgcgtcgctacggttccgacaagccggacctgcgcaacccgctggaactggtagacgtcgccgatcagctcaatgccgtggaattcaaggtgtttagcggtccggccaacgatccgaaagggcgtgttgccgcactgcgtgtaccgggcgctgccagcatggcgcgcagccagatcgacgactacaccaagttcgtcagcatctacggcgccaaaggcctggcctacatcaaggtcaacgagcgtgcgaaagggcctgagggcttgcagtcgccgatcgtcaagttcatccctgaagaaaacctgaacgtcatccttgatcgcgtgggcgcggtcgatggcgatatcgttttctttggtgcggacaaattcaaggtcgtcagcgaagctctgggcgcgctgcggatcaagatcggtaacgacctcaagctgcacacctgcgagtgggcgccgatgtgggtcgtcgacttcccgatgttcgaagaaaacgacgacggcagcttctcggcgttgcaccaccccttcactgcacccaagtgcacgcctgaagagctggaagccaaccctgccacggcgctttcccgtgcctacgacatggtgctcaacggcaccgaactgggtggcggttcgatccgtatccaccgcaaggaaatgcaacaggcggtattccgtctgctgggcatcgccgaagacgagcagcaggagaagttcggcttcctgctcgatgccttgaagtacggtgcaccgccgcacggtggcctggcattcggtctcgaccgcctggtcatgctgatgaccggcgcgcaatcgattcgtgaagtcatcgccttcccgaaaacccagagcgcggccgatgtcatgacccaggcgcctggcgttgtcgatgccaaagcgttgcgcgagttgcacatccgtctgcgcgagcagccaaaagccgag

SEQ ID NO: 33859 - DNA, 615 bp, Pseudomonas syringae
atgaacagccaacctctgcgcgtcggcatcggtggcccggtcggatccggcaagaccgccctgaccctggccctgtgtctggccctgcgtgaacgctacaacctggcggtcgtgaccaacgatatctacacccgcgaagacgccgactttctggtgcgcaacgaagcactggcaccggagcgcatcatcggtgttgaaaccggtggctgcccgcacacagccattcgtgaagatgcctcgatcaaccttgaagccgttgaccagctcaatcgtcgtttcgaggggctggatatgatcattgttgaatccggtggcgataacctgtcggcgaccttcagccccgagctgtcagacctgaccatctacgtgatcgatgtgtcggcaggcgacaaactgccgcgtaaaggcgggcccgggatttgcaagtccgacctgctggtgatcaacaagatcgacctggcgccgctggtgggtgcttcgctggagatgatggacagcgacacgcgcaaaatgcgtggcgaaaagccgttcgtcttcagcaaccagaaaaccggccagggtctggaacagatcattgcctttatcgagcgccagggcctgctgaccacggccgcc

SEQ ID NO: 33860 - DNA, 419 bp, Pseudomonas syringae
atttcactgagtctcgggtggagacagcgccgccatcgttacgccattcgtgcaggtcggaacttacccgacaaggaatttcgctaccttaggaccgttatagttacggccgccgtttaccggggcttcgatcaagagcttcgcttgcgctaaccccatcaattaaccttccggcaccgggcaggcgtcacaccctatacgtccactttcgtgtttgcagagtgctgtgtttttaataaacagtcgcagcggcctggtatcttcgaccggcgtgggcttacgcagtaaatgcttcaccctcaccggcgcaccttctcccgaagttacggtgccattttgcctagttccttcacccgagttctctcaagcgccttggtattctctacccaaccacctgtgtcggtttggggtacggttcc

SEQ ID NO: 33861 - DNA, 1023 bp, Pseudomonas syringae
atgaccacgcagcagcccgtagcggttcttggtggcggcagcttcggtaccgccattgcaaatctgctggccgaaaacggtcatcaggttcgtcagtggatgcgcgatccggagcaggcagaggcgattcgcgtcaatcgcgaaaaccctcgttacctcaaaggcatcaaggtgcgccctgaggtcgagccggtaaccgacctgaccgcggcgctcgaggtcagcgaactgatcttcgtcgccttgccctccagtgcgctgcgttccgtgctgtcgccgcatatcgagcgcctgagcggcaagatgctggtgagcctgaccaaaggtattgaagcgcagagcttcaaactgatgagtcagattcttgaagaaattgtcccccaggcgcgtatcggcgtgttgtccgggcccaatcttgcgcgcgaaatagccgagcacgccctgactgccaccgtggtggccagtgaagatgaagacctgtgtcagcaggttcaggctgccctgcacgggcgaaccttccgggtctatgccagcaacgaccggtttggcgtcgaactgggtggggcattgaagaacgtctacgcgatcattgccggtatggccgtggcgctggacatgggcgaaaacaccaagagcatgctgattacccgtgcgctggcggaaatgacccgttttgctgtgagtcagggcgccaatccgatgacctttctggggctggcgggggtgggcgatctgatcgtgacctgctcctcgcccaaaagccgtaattatcaggtcggttttgccttggggcagggcctctcgctggaagaagcggtgactcgcctgggcgaagtggctgagggtgtcaacaccctcaaggtgctcaaggtcaaggcgcaggaggttcaggtctacatgccgttggtcgcgggactgcatgcgattctttttgaaggccgtacgctcagtcaggtcatcgaggcgctgatgcgtgccgagccgaagaccgacgtcgattttatttcgattaccggcttcaat

SEQ ID NO: 33862 - DNA, 975 bp, Pseudomonas syringae; identical to SEQ ID NO: 33042

SEQ ID NO: 33863 - DNA, 471 bp, Pseudomonas syringae
gtgatgaaattattttttctgctggtctggtttgcaatttgcgccgaacaggatgcgcgccgcaaggaaattctcaacgggctgacactgggcgccgcagcgctggctgccggctatctggccgttaccggcctgacctggctgggctcgccgccgcttgaaggcgccctggcgctggtgctggccttggccctgacactgcccggttacacgctgggcaggctgggcgctgcagacgtcaagttgatgacggcattggcgcttgcatcaaacactgcctatttgttatgcacgtttattggcgcaggcgtcgcgatgctggcatgggccttgataggtaaaagagtctggcctcttatacaccaacaggttacgcagcgttataaacacatgaatcccgggacgccagacaaatatcctttctcaccgttcttattgatcggcctgctgctgacagtgtgtgttatccat

SEQ ID NO: 33864 - DNA, 984 bp, Pseudomonas syringae
gtggctgaggcctacccctggcaggaatcactctggcagcagatggccggtcgtgcgcagcacgctcacgcttatctgttgcatggcccggcaggtatcggcaagcgggcattggccgagcgcctgatggccagcttgctgtgcagggcacccgaagggcttgaggcctgtgggcactgcaagtcctgcctgttgctggtggccggcagccatccggacaattacgtgctggagcccgaagaggccgataagccgatcaaggtcgatcaggtgcgtgatctggtcagctttgtcgtacagaccgcacagatgggcgggcgcaaggtggtgctcgtcgaaccggtggaggcgatgaacgtcaatgccgccaacgccctgttgaaaagcctcgaagagccgtcgggcaataccgtcctgctgctggtcagccatcagccaagccgcttgttgccaaccgtcaaaagtcgctgtgtgcagcaagcctgcccactgccaggcgagcagatgagtctggactggctgagcggcgccttgcctgattgtacagccgaagaacgcttcgaactgctgacactggccgccggctcgccgctgttggcggtgtcgcttcacgcccaaggcgttcgcgaacagcgtgcgctggtagtggagggggtcaagaagctgctcaagcagcaacaatcggccactcagttggctgaaggctggaaagacattccgctgttgctgctgtttgactggttctgtgactggtcgcatttgatcctgcgctatcagatgacgcaggatgaagagggccttggtctgggtgacatgcgcaaggttgtgcaataccttgcgcagaagtcgacgcgcggcaaggtgctggatattcaggactgggtgttggcgcaacgacagaaagtcatgtccaaggccaaccttaaccgggtattgctgctcgaagcattgctggtgcagtgggcagggttgccgggacaggcg

SEQ ID NO: 33865 - DNA, 366 bp, Pseudomonas syringae; identical to SEQ ID NO: 29947

SEQ ID NO: 33866 - DNA, 633 bp, Pseudomonas syringae
ttgatgcgctatccgttttggcgtctggctgtatttctcgctgcctgtgttgcgccggtctggtggctctatcaggcatggatctttgccctggggcctgatccgggcaaggtcctggtagagaacttcgggctcgcgaccttggtgatgctgctgattaccctggccatgacgcctttgcagcgtctgaccggctggccgggatggatcgttgtgcgtcgtcagctggggttgtggtgttttgcttatgtagtgctgcacatgacgatgtatgcgctgttcatccttgggctggattgggggcagttgggtgtggagctggtcaagcgtccttatattatcgtgggtgcgctggcgttcctcggcctgctggcattggcggtcacttccaatcgttatagccagcgccgcctgggcagtcgttggaaaaagctgcaccggcttgtttatgtcattctggggctgggtttgctgcatatgttctggattgtcagggccgaccttaaagagtgggcgctgtatgcaggtataggcgcgatcttgttgctactgagagtcccaatgattgctcggcgaatcccgcgtcttggaggtgctgcgaaggcagggtcgataaaagttcaaaataacggt

SEQ ID NO: 33867 - DNA, 979 bp, Pseudomonas syringae
atgaaacagatgaccttcgccgatgccgagtacgcgggtaaacgtaagcatacccgccgcgagcgctttctcatcgagatggatcaggttgtgccctggaaaggcttgattgcccttatcgaaccacattatccaaagggcgaaggtggccgtccggcttatccgctgatggcgatgctgcgtattcacctgatgcagaactggtttggttacagcgatccggcgatggaggaagcactttacgagacaacgatcctgcgccagttcgcagggttgagtctggatcgaatcgccgatgaaaccacgattctcaacttccggcgtctgttggaaaagcatgagttggcaggcgggattttgcaggtcatcaatggctatctgggtgatcgaggtttgatgctgcgccaaggtacggtggtcgatgcgacgatcattcatgcgccgagctcgaccaagaacaaggacggcaaacgcgatcccgaaatgcatcagacgaagaaaggaaaccagtatttcttcggcatgaaagcgcatatcggcgtcgatgccgagtcgggtttagtccatagcctggtgggtactgcggcgaatgtggcggacgtgactcaggttgatcaattgctacatggtgaggaaacctatgtcagcggtgatgcgggctacaccggcgtggacaagcgtgcggagcatcaggatcgtcagatgatctggtcaattgcggcccgcccaagccgttataaaaagcatggcgagaaaagtttgatcgcacgggtctatcgcaaaatcgagttcacgaaagcccagttacgggccgaaggttgaacatccgtttcgcgtgatcaagcgccagtttggttatacgaaagtccggtttcgcgggctggctaaaaacaccgcgcaacaggctactctgtttgccttgtcgaacctttggatggtgcgaaaacggctgctggcgatgggagaggtgcgcctgtaa

SEQ ID NO: 33868 - DNA, 975 bp, Pseudomonas syringae
atgaaacagatgaccttcgccgatgccgagtacgcgggtaaacgtaagcatacccgccgcgagcgctttctcatcgagatggatcaggttgtgccctggaaaggcttgattgcccttatcgaaccacattatccaaagggcgaaggtggccgtccggcttatccgctgatggcgatgctgcgtattcacctgatgcagaactggtttggttacagcgatccggcgatggagraagcactttacgagacaacgatcctgcgccagttcgcagggttgagtctggatcgaatcgccgatgaaaccacgattctcaacttccggcgtctgttggaaaagcatgagttggcaggcgggattttgcaggtcatcaatggctatctgggtgatcgaggtttgatgctgcgccaaggtacggtggtcgatgcgacgatcattcatgcgccgagctcgaccaagaacaaggacggcaaacgcgatcccgaaatgcatcagacgaagaaaggaaaccagtatttcttcggcatgaaagcgcatatcggcgtcgatgccgagtcgggtttagtccatagcctggtgggtactgcggcgaatgtggcggacgtgactcaggttgatcaattgctacatggtgaggaaacctatgtcagcggtgatgcgggctacaccggcgtggacaagcgtgcggagcatcaggatcgtcagatgatctggtcaattgcggcccgcccaagccgttataaaaagcatggcgagaaaagtttgatcgcacgggtctatcgcaaaatcgagttcacgaaagcccagttacgggcgaaggttgaacatccgtttcgcgtgatcaagcgccagtttggttatacgaaagtccggtttcgcgggctggctaaaaacaccgcgcaacaggctactctgtttgccttgtcgaacctttggatggtgcgaaaacggctgctggcgatgggagaggtgcgcctg

SEQ ID NO: 33869 - DNA, 513 bp, Pseudomonas syringae; identical to SEQ ID NO: 33818

SEQ ID NO: 33870 - DNA, 456 bp, Pseudomonas syringae
gtgcttgatacgcctgtcgccatacggcgaaccgcaatggacctgctcgcacgccgcgagcacggtcgagtcgagctgacgcgcaaactgcgtcagcgcggcgcccctcctgaacttatcgaagcggctcttgatcgactggtcgaagaagggctgctgtctgaatcccgttaccttgaaagctttgtttcctatcgggcgcgctcgggctatggccctgctcgtatccgggaagagcttaaccagcgtggcttgcaacgcgctgacgtcgaacgggcgctcaaggaatgcggcgtgaactggcaggaaaaacttcaggaagtctggcagcgcaagtttgccggagaactgcctgtcgatgctcgtgagcgcgccaggcaggggaggttcttgagttatcgaggctatccactggatatgatcggccgcttgctaagcggccgtggtggggatgac

SEQ ID NO: 33871 - DNA, 2811 bp, Pseudomonas syringae
ctgggcccagcattaacggcagggctgcgacagttgggtcagcgtcatggtgcgacgctgttcatgacattgctggcggggtggtcgagtctgttgagccggttcagcgggcaggatgacgtggtgatcggcacaccggtggcaaatcgtccgcgtagcgaactggagtcgctgatcggcttcttcgtcaacacactggcgctgcgcatccggccggaagggagcctgagcgtggcggcgttgctggagcaggtcaaggcggtcatgctggcggcgcatgcgcatcaggacctgccgttcgagcaggtggtggaggcgttgcagccaccgcgcagcctgggccatagcccgatcttccaggtcatgctggcgctgaacaacaccccgggcggcggcgaactcagcctgccggagctgagcctggagccgctgcaaacgccgcacacgacagcccagttcgacctgtcgctttcacttgtcgaggcgaagggtgggttgctcggttctctggaatacgcgagcgatctgttcgagcgtgcgacgatcgatcggatggcggggcatttgcaggtgcttctggaagggatggtggcggatgaccagcagccggtcggaaaactaccgctgctgtcctgcgcgcaacgtcggcaggtgctggagacgttcaacgatacggcggcggcctacccggcggacaagctgcttcatcaactgttcgaggagcgggtggcacaacatccggatgccctggcggtggtcgatgaagccggaagcctgacctatggcgaactgaatgtgcgggcgaatcgactggcacattatctgatcggcctgggtgtccagccggacgatcgggtggcgatctgtgttcagcgcagtctggaaatggtggtgggcttgctgggaattttgaaggcgggcggtgcgtatgtgccgctggaccctggatatccgccagagcggttgcgctatatgctggaagacagtgcgccggtggggttgctgttgcagggcgaaacccggatgttgttgggcgagttggcggtgccgatgcttgatctgcaagaaggcgactgggaggttgaggctgatcataatcccgtggtgccgaccatcaagccgcagcacctggcctatgtgatgtatacctcaggttccactggtaaacccaaaggtgtggccaaccagcataacggcgtcgtaaaccggttgtggtgggcgcagagtgaataccagctcggggccgacgattgtgtcttgcagaagactccattcggcttcgatgtatcggtctgggagatctttcttcctctgcttgccggagcacagctggtcatggcccgccccggaggccatcaagaccctcactacctgatggaagtgatcgagcgccgaagcattagcatgctgcacttcgttccttccatgctgcaggcctttgtcaatcagacgccagcagggcggtgttcgacgctcaagcgagtaatttgcagtggagaaacactgccgcatactttgcaattgcaaagccaggcgcatttcccgaaaagcgagttgcataatctttatggacccaccgaagcagccattgacgtcactgcatggcattacgtggcagagcaggagatcgggatcgttccgatcggccgtccgatagcgaatacacggatttacctgttggatatgcacggccagccagtgcccatcgggatcagcgccgagatttatatcggcggagtaggggtcgcccgcggttatttgaatcgaccggaattgacggcggagcgtttcctggaggatccgttcagtgcagggccggcggcgcggatgtacaggagcggtgatctggggcgctggctggcggacggcaatatcgagtacctggggcgtaacgacgatcaggtcaagctccggggctaccgtatcgaactgggcgagatcgagtcgcagcttgcggcttgtctcggggtcagggaggcagtggtactggcgcgcgagcacagtcccggagacaaacgcctggtggcgtatctgacagcgcatgaaggtgccgtgttgtcggcgacgcagttgcgcgagcaactgtcgcaagggctggccgaatacatgattccgagtacctttgtaacgctggagagtttcccgctaacgccgaacggcaagctggatcgacgggcattgccggcgccggaagacgacgcttatgccagtcgtggttacgaggcgccggtaggtgaaatcgagcatgcgctggcagagatctggaaggcgttgctggggctggagcggatgggtcgccatgaccatttttttgaactgggcgggcattcgttactggcggtgcaactggtttcgtccctacgtgagcgtttcgaggtcgaagtggcattgggcgatctgttcctgcatccgacaatctgtgaacttgccgcgtcttgtcttagtggtttgaacaagtctcttcatccgaatctaaccaccattcgcaaagaggggactcaataccccttgttcctcattcatgaaggctcaggggatattggttatgcccaacagctggcgaagcaaatttcctctgatatcccggtgtatggcttttcggcgagcggactgcaaatcggagaggagcacctcaccactatcgaggcaatggcctcacgctacattcagggtatccgccatatacagccggatgggccgtatcgcgtcgccggttggtctgccgggggaacgatcgcctatgaaattgcccatcagttgataggggccggtgctacagtagagtttctcgggcttatcgacaccaccagt

SEQ ID NO: 33872 - DNA, 822 bp, Pseudomonas syringae
atggcaatcgttaaatgcaaaccgacttcccctggccgccgttttgtggtcaaggtggtcaaccaggagctgcataaaggcgctcctcacgcaccgctgctcgagaaaaaatcgaagactggtggtcgtaacaacaatggtcgtattactacccgtcatatcggtggtggccataagcagcattatcgtctggtcgatttccgtcgcaacgacaaggatggcattactgccaccgtcgagcgtattgaatacgatccaaaccgtactgctcacattgctctgctgctttacgcagacggcgagcgccgctacatcatcgcccctaaaggcgtgagtgctggcgaccagctgattgcaggtgctttggcaccaatcaagccgggcaacgctcttcaactgcgtaatattccagttggtagcaccgtgcacggcatcgaactgaagccaggtaaaggcgcacagatcgctcgttctgctggtgcttctgcacagctgatcgctcgtgaaggtgtgtacgtgaccctgcgtcttcgctccggtgaaatgcgtaaagtactgtctgaatgccgtgcaacgctgggcgaagtctcgaactccgagcacagccttcgttcgctgggtaaagctggtgccaaacgctggcgtggcgttcgcccaaccgttcgtggtgttgccatgaacccggttgaccacccacatggtggtggtgaaggtcgtacctctggtggtcgtcatccggtatcgccgtggggcttcccgactaagggcgcgaagactcgtggtaataagcgtaccgacaaaatgatcgtccgtcgtcgcaag

SEQ ID NO: 33873 - DNA, 975 bp, Pseudomonas syringae; identical to SEQ ID NO: 33042

SEQ ID NO: 33874 - DNA, 297 bp, Pseudomonas syringae
atgaaccaggaacgcgtatttaaagttctgcttggcccgcacgtttccgagaaggctacggttctggcagacaaaaaaggtcagttcgttttcaaggttgctactgacgcaaccaagctggaaatcaagaaggccgtcgaaagcctgttcagcgtgaaagtagagcgtgttactaccctgaatgttctgggtaagagcaagcgcactgctcgcggtctgggcaagcgtaatgactggaagaaggcagttatctcccttcagccaggccaagatctcgatttcagcagcagtgctgag

SEQ ID NO: 33875 - DNA, 747 bp, Pseudomonas syringae
gtgccgactccgcccgccgcttcttccctggcagcccagatgggcgaaagtcccgcacccttgtacgcccgcgtcaaacacatgatcgccttgcagattcagaacggcacctggccgccgcaccatcgcgtgccgtcggaaagcgagctggtgacgcagttgggcttcagccgcatgaccatcaaccgtgccctgcgcgagctgacggtcgagggtttgctggtgcgcatgcagggcgtcggtacctttgtggccgaacccaaaagccagtcggcgctgtttgaagtgcacaacattgccgacgagatcgctgcgcgcggccatcgccacacctgcaaagtgatggtgctcaaagaagaagccgcaggctcggaacgcgcactggcactggacatgcgcgaaggccagcgggtctttcattcgctgatcgtgcatttcgagaacgacatcccggtgcagatcgaagaccgcttcgtgaacgctcaggtcgcgccggactatctcaagcaagacttcaccctgcaaacgccttacgcttatctctcccaggtcgcgccgctcaccgaaggcgagcatgtggtcgaggcgatcctcgccgaagccgatgagtgcaaactgttgcagatcgatgccggagagccctgtctgctgattcgccgccgtacctggtcgggtcgccagcccgtcaccgctgcgcgcctgattcaccccggctcccgccatcgcctggaaggacgctttaccaaa

SEQ ID NO: 33876 - DNA, 975 bp, Pseudomonas syringae; identical to SEQ ID NO: 33042

SEQ ID NO: 33877 - DNA, 979 bp, Pseudomonas syringae
atgaaacagatgaccttcgccgatgccgagtacgcgggtaaacgtaagcatacccgcccgcgagcgctttctcatcgagatggatcaggttgtgccctggaaaggcttgattgcccttatcgaaccacattatccaaagggcgaaggtggccgtccggcttatccgctgatggcgatgctgcgtattcacctgatgcagaactggtttggttacagcgatccggcgatggaggaagcactttacgagacaacgatcctgcgccagttcgcagggttgagtctggatcgaatcgccgatgaaaccacgattctcaacttccggcgtctgttggaaaagcatgagttggcaggcgggattttgcaggtcatcaatggctatctgggtgatcgaggtttgatgctgcgccaaggtacggtggtcgatgcgacgatcattcatgcgccgagctcgaccaagaacaaggacggcaaacgcgatcccgaaatgcatcagacgaagaaaggaaaccagtatttcttcggcatgaaagcgcatatcggcgtcgatgccgagtcgggtttagtccatagcctggtgggtactgcggcgaatgtggcggacgtgactcaggttgatcaattgctacatggtgaggaaacctatgtcagcggtgatgcgggctacaccggcgtggacaagcgtgcggagcatcaggatcgtcagatgatctggtcaattgcggcccgcccaagccgttataaaaagcatggcgagaaaagtttgatcgcacgggtctatcgcaaaatcgagttcacgaaagcccagttacgggcgaaggttgaacatccgtttcgcgtgatcaagcgccagtttggttatacgaaagtccggtttcgcgggctggctaaaaacaccgcgcaacaggctactctgtttgccttgtcgaacctttggatggtgcgaaaacggctgctggcgatgggagaggtgcgcctgtaa

SEQ ID NO: 33878 - DNA, 975 bp, Pseudomonas syringae; identical to SEQ ID NO: 33042

SEQ ID NO: 33879 - DNA, 279 bp, Pseudomonas syringae
atgaaacccgatatccatcccgcttaccgcaccgtactgttccacgacaccgctgccgatgcctattttctgatcggctccaccgtggacaccgaccgcacgcagcaacacaccgacggcacgacctacccttatgtcgcgcttgacgtgtccagcgcctcgcacccgatgtacaccgggcagcagcgcaagaccaccaccgaaggccggatcgccggtttcaacaagcgtttcgccagcttcggctctggcagcaacaaagaaaccgctgcaacgcaa

SEQ ID NO: 33880 - DNA, 1191 bp, Pseudomonas syringae
gtggctaaagaaaaatttgatcgttccctcccgcattgcaacgtcggcaccattggtcacgttgaccatggcaagaccacgctgaccgctgctctgactcgcgtctgctccgaagttttcggttcggctcgtgttgacttcgacaagatcgacagcgcaccagaagagaaagctcgcggtatcaccatcaacaccgctcacgttgagtacaactcggctacgcgtcactacgcgcacgttgactgcccaggtcacgccgactacgtgaagaacatgwtcaccggtgctgcgcagatggacggcgctatcctggtttgttcggctgctgatggtccgatgccgcaaacccgtgagcacatcctgctgtcccgtcaggttggcgttccgtacatcgtggtcttcctgaacaaggctgacctggtagacgacgctgagctgctggaactggttgagatggaagtgcgcgatctgctgagcacttacgacttcccgggcgacgacactccaatcatcatcggctccgcccgtatggcattggaaggcaaagacgacaacgagatgggcaccactgccgtcaagaagmmggtcgaaactctggacagctacattcctcagccagagcgtgctgtcgacaagccgttcctgatgccgatcgaagacgtattctcgatctccggtcgcggtactgttgtgactggtcgtgttgagcgcggtatcgtcaaggtccaggatccactggaaatcgttggtctgcgtgacactactgtcactacctgcaccggcgttgagatgttccgcaagctgctcgacgaaggtcgtgctggcgagaactgcggcgttctgctgcgcggtaccaagcgtgacgacgttgagcgtggccaggttctggtcaagccaggcaccgtcaagccgcacactcagttcgaagctgaaatctacgttctgagcaaagaagaaggcggtcgtcacactcctttcttcaaaggctaccgtccacagttctacttccgtactaccgacgtaactggtagctgcgaactgccggaaggcgtagaaatggttatgccaggtgataacgttaaagtttccgttaccctgatcaagccaatcgcaatggaagatggtctgcgtttcgcaattcgtgaaggcggtcgtaccgttggcgctggcgtcgtagccaaaatcatcgcg

SEQ ID NO: 33881 - DNA, 1461 bp, Pseudomonas syringae
atggcctttaatctcagcaagattttcgctcataccgaccgcgatcccttgatccgcgagttgacactcgacagccgcaatgttcgtccaggtgacctgtttctggctgtgccgggtatcaaggtcgatggtcgcgcgcacattgccgacgcactcaagcgcggcgcagcagcggtggcctacgaggtcgaaggtgcaacggttctgccgatcaccgacgtgccgctgattccggtcaaagggctggcagcgcagttgtccgacgttgccggtcgcttctacggcgacccgagccgcagcctgaatctggtgggcgtcaccggcaccaacggcaagaccagcgtcacccagctggttgctcaggcgctcgacgcgctgggtcaacgctgcggcatcgtcggcaccctcggcaccggcttttacggcgcactgcaaagcggccgtcataccactcctgatcccattgccgttcaggcagcgctgaccgacctgagaaaggcgggcgcgcgcgccgtggctatggaagtgtcgtcccacggtctggatcaaggcagggctacggcgctggcgttcgacgtggcagtgctgaccaatctgtctcgtgatcacctggattatcacggcaccatggaagcttacgcggcagccaaggccaagctgttcgcgtggccgaatctgaactgccgggtgatcaatctggatgacgattttggtcgcgaactggctggcctcaagcaagaatcgcggttgatcacctacagccagctggatagctcggcttacctgtactgccgcgacgcgaaatttgatgacgatggcgtgcgcgccacactggtcacgcctcagggcgagcatttcctgcgcagcagcctgctggggcgcttcaacctgagcaacgtgctggcagcggtcggcgcactgctggggctggactacgcgctggacgaaattctcaaggtactgcccaaactcgaagggccggtcggccgcatgcagcgtctgggcggcgccgacaagcctctggtggtcgtggattacgcgcacaccccggacgcgctggaaaaagtgcttgaagcactgcgtccgcacgccaaaggccgcctgttgtgcctgttcggctgcggcggtgatcgcgatcgcggcaaacgcccgttgatggctgaagttgtcgaaagactggctgacggcgtctgggttactgatgacaacccgcgctccgaggcaccgaccaacatttttgacgacattcgtccaggtttcgtaacggccgacaaagtgcgcttcatcgaaggtcgtggtcaggccattgccgagctgatcgccagcgcaactgtcgatgacgtggtggtgctggcgggcaaaggccacgaggactatcaggaaatcgacggcaagcgccagccgttttccgatctggaagaagccgccacggcgcttgccgcatgggggcctgagaatgat

SEQ ID NO: 33882 - DNA, 660 bp, Pseudomonas syringae; identical to SEQ ID NO: 33222

SEQ ID NO: 33883 - DNA, 432 bp, Pseudomonas syringae
atgaaactcaatgatctgagtccagcgccgggttcccgtcgcgaaaagcatcgtccgggccgtggtatcggtagcggtttgggcaagaccggtggccgtggccacaaaggtcaaagctcccgctccggtggcactattgctccgggctttgagggcggccaacagccgctgcatcgtcgcctgccaaaattcggtttcgtttccctgaaggccatggatcgcgcagaagtgcgtctgtccgagctggctaaagtggaaggcgacatcgtaactgtgcagtccctgaaagatgccaacgtgattaaccagaacgtacagcgtgtgaaaatcatgctgtcgggcgaagttactcgcgctgtcactatcaagggtatcgccgccaccaaaggtgcgcgtgcggctatcgaagcagctggcggcaagttcgaggaa

SEQ ID NO: 33884 - DNA, 621 bp, Pseudomonas syringae
ttgaaaacaaggaaagtgcgcaggcagttgcgcaaaatggacaagctggaacggcatgccgaaaagatcagattgaaatacccgcgtgctgttgtaggtgtagggacctacggcataccggatatagtcgactttggtgacaactcgatactgcgagtcggttcgtacacttctatcgccgaaggcgtgaagattctgctaggcggggagcatcgcaccgactggatcacgacctatccgtttcctgcgatggttgagcaagtttccgatatccaggattacgcccccagcaaaggcgatgtcgtcattggcagcgactgctggatctgcgccaacgctgtgattgtgtcgggcgtcacaattggtcatggcgccattgtcggtgccggtgcaatggttgtgcgtgatgtggccccttattcagtcgtgggcggcaacccctgcaagttcatccgctggcgttttgaagaggatgttcgcgacctcttgctgcgggccgcctggtgggattggcccatggaagaggtcaagtccgtcgcgagaaccttgtgcagttccgacatggacgccttccttgcctatattcgccagcgtcaggcatcggtgaagcagccggccaac

SEQ ID NO: 33885 - DNA, 594 bp, Pseudomonas syringae
gtgaaacaattcatcgacttcatcccgctgctcctgtttttcatcgtctacaaaaccgagccgcgtgccgtggatatcctcggcaacagttacacgttcggtggcatattcagcgcaacggccatgctcatcatcagttcggtggtggtctacggcattctttacataaaacagcgcaagctggaaaagagccaatggctgacgctggtcgcctgcctggtgttcggcagcctgacgctggcttttcacagcgaaacctttctgaagtggaaggccccggtggtcaactggctgtttgccgtggcctttgccggcagtcacttcatcggcgaccgcccgcttatccagcgcatcatgggccatgccctgaccttgccggcggccatctggacccggctgaatatcgcctggatcatcttcttcctgttctgcggcgcggccaacctgtacgtggcgttcacttatcaggaattctgggtcgacttcaaagtgttcggcagtctgggcatgaccctgattttcctggtcggccaggggatctacctgtcgcgccacctgcacgacaccacacccaacacgcccaaatccgaggac

SEQ ID NO: 33886 - DNA, 2223 bp, Pseudomonas syringae
atgaaagcgttcggcaaaatcctggggctgtttattctcgggttgttgctgatcatcgtggctctgggcttcgccctgacccacctgtttgatcccaacgactacaaagacgagattcgacagctggcacgcgacaaggcaaacgtcgagctgacgcttgacggcgatatcggctggagcctgttcccttggctcggcctggaattgcacgaggcccatgtcgccaccctgaccgcacccgatcagccgtttgccgatgtgcagatgcttggcctgtccgttcgtgttctgccactgctgcgccgccaggtacagatgagcgacatccgtgtcgaaggtctgaacctgacgctgcaccgcgatgaaaatggccatggcaactgggaagacatcggcaagcctgctgtcgcaaccaccggcacacccggcgaagcgaccccagcgccagcgccggacgcggcgaaacctgatcgcccttcccagcccatccggctggacatcgacagcctgaccgtcaataacgctcgcgttgactacagcgacgcccgaaagggccgaaccttcacggccgagagtatccagttgagcaccgggccgattcgtgaagcgtccgatatcccgatcaaactgacagcgttcctgagcaccaaccagccggttgtacgcaccaagaccgagctggtcggccagttgcgcatggaccgcgtgctcaagcgctatcagttcgaagacatgcgcctgtccggcgaagtcgcaggcgagccgctgcagggcaaattggtaacgttctcggcccagggccaactgctggtggacctcaccgcgaacatcgccgaatggaacagcctcaaaatctcggccaaccaattgcgcgcgctgggcgaattgcgtgctcgcgacctggacaaaaccccgcagatcagcggcggcctctccatagcctcgcttgatctgcgcgcattcttcgaaaacatcggtcagccgctgccagcaatggcagaaggtgcgctgagcaaggttgaaatggtcacgcgcctcagcggcacgcccaccagccttgcgttggaaaacctcaacctgaaagttgatgacagcaccttcaccgggcgcattgccgtagacgacttcgccagacaggcgctgcgcgtccagctcaaggctgacaccttcgacgccgaccgctatcgcccggctgaaagcgaagaaagcaaaggcgccaaggctgcgcgcaaatccgaagtgcaatcgggcgaagccgccgccgttgcaggcgactcgccgttgcccgagcaaccgaccaaggcggcctggagcagcgcaaaactgctgccactggagcgtctgcgcacgctggatgtcgcggcagacctgagtttcggcaagctgaccctgaacaagctgcccatcggcaacgctgcgctcagaacacaggccagcggtggcgtgatcaagctcgacaccttgagtggcgatctctacaacggcaacttcgaggtcaagggtgacctggatgcacgtccggatgtgccggttgcgagtgtacaaacgcgtgttgccaaggtgccgatcgagcgcgttctcgaaagccagggccagacacctcccgtacgcggcctgctgaccctcgacagcagcatgaccggcaagggcaacagcgaaaaagccctgatcgacagcctcaatggcaccgccagctttgcactcaacaacggcgtgctggtcaatgccaacctggagcagcaactgtgcagaggcatttcgatcctcaaccgtaaaacgctcagcggcgagccgcgcgccaaggacacaccgttccagcaactcaacggcacgctggtcatgcgcaacggcgtcgccagcaaccccgacctgaaaatgcgcattccgggcatgaccgtcaacggcaacggtgacgtagacctgcgcgtactgggcatgaactaccgcgtcggcatcatcgtcgaaggcgacaagagcgacatgccggacccggcctgcgagatcaacccgcgctttgtcggcatcgagtggccggtgcagtgccgtggccccctggaactgggagccaaggcctgccgtctggacaaggaaggcgttggccagatcgccgcgaagctggccggcgaccggatcagcgagaagctcgagggcaagctggacgagaaactgggcgacaaggtcagccctgaactcaaggacgcgctcaagggattgttcaagcgc

SEQ ID NO: 33887 - DNA, 975 bp, Pseudomonas syringae; identical to SEQ ID NO: 33042

SEQ ID NO: 33888 - DNA, 192 bp, Pseudomonas syringae
atgccaaagatgaagactaaaagtggtgcagctaagcggtttttgaaaactgctaacggcatcaagcacaaacacgctttcaagagccacatcctgaccaaaatgtcgacaaagcgtaagcgtcaactgcgcggtagcagcttgctgcatccgtctgacgtggcaaaagtcgagcgcatgctgcgccttcgt

SEQ ID NO: 33889 - DNA, 174 bp, Pseudomonas syringae
atggctaccgttaaagtaacgctgatcaaaagcatgaccggccgcatccctaatcacagattgtgcattaagggtttgggtctgcgtcgcatcggtcacactgtagaagtcctggatactcccgaaaatcgcgggatgatcaacaaggcttactacatgctgcgagtcgagggt

SEQ ID NO: 33890 - DNA, 738 bp, Pseudomonas syringae
atggcaggggacaacatttccgaagaggcagccatcgccgccgctcgcgggttccctggcctcaagggcatggacctggcgaaggaagtcagcaccaaggacacctacgagtggcgccacagtgtctggaacctgcagaccgacagccaccccgaaatcgccgcttccgagctgccttatcacgtggttgcctacgattacggcgtcaaggtcaacatcctgcgtatgctggtcgagcgcggttgccgggtgacggtagtgcctgcgcaaacgcctgccagcgaagtgcttgcctacaagccggacggtgttttcctgtccaacggccctggcgaccctgagccatgcgactacgccatcaaggcgatcaagcaagtgctggaaaccgaagtgccagtattcggcatctgccttggtcaccagttgctggcgctggctgcgggtgccaagaccgtgaaaatgggccatggccaccacggtgcaaaccacccggttcaggatctggacaccggcgttgtaatgatcaccagtcagaaccacggttttgcggttgatgaatcgacgttgccgggcaacgttcgcgctatccacaagtcgctgttcgacggcaccctgcaaggtatcgagctgactgacaagagcgcgttcagcttccagggtcaccctgaagcaagcccaggcccgaacgatgtagcgcccctgtttgaccgctttatcgacgccatggccaagcgacgc

SEQ ID NO: 33891 - DNA, 144 bp, Pseudomonas syringae
gtgatcactctgaacgatggtcgtgaaatccaggccgtcgatactcccaagtacgatgaagactcgggtttctatgagttcaaacagctcgatggcaagcagacccgcatcaacaaggaccaggtacgtaccgtcaaggatctg

SEQ ID NO: 33892 - DNA, 1440 bp, Pseudomonas syringae; identical to SEQ ID NO: 33363

SEQ ID NO: 33893 - DNA, 663 bp, Pseudomonas syringae
atgagctaccagcacaaatatgtcgatggaacgagcattcacttcccgctgggcaaagtggtctgcatcggccgcaactatgccgagcacgccaaggaattgggcaacccggtgcccaccgagccgctgctgttcatgaagcctggcagtgcggtagttgcactggaaggcggtttcaccatcccggccgatcgtggctcggtgcattacgaagccgagattgtggtgttgatcggcaagcccctgagcaagaatccgtcccgcgaagaagtgctcgacgcgatcagcggctttgcacccggcctggacctgaccctgcgtgacgtgcagtcccgtctgcgcgagaaaggcctgccgtgggaactggccaagtgcttcgacggcgctgcggtgatccctccattcgtcccggctggcaccttcacggacctgacagacatcggcattcgtctgaccatcaacggcaaagtggtgcaggacggcaacagcagcctgatgctcaaccccatcgtgccgatgattcagcacatggcggccaacttctcgttgcaggccggtgacctgatcatgaccggtacgcctgctggcgtggggccgtttgaagccggtgacgaaatcgttctggaactgaccggtcaaacgccattcaccagcgtcgttcgc

SEQ ID NO: 33894 - DNA, 2052 bp, Pseudomonas syringae
atgagtgctcaagattttctggttgaactgggcaccgaagaactgccacccaagaccctcgtgtcgctggcagatgcttttctcgccggtattgaaaaaggccttgcgggcgcaggtctgacctatagcgccaaacaggtctacgccgcgccgcgtcgcctggccgtgctgatcaccgcactggccacgcaacagccggatcgcagcgtgaacctggacggcccgccgcgtcaggccgcgttcgacgctgacggcaacccgactcaggcagctttgggcttcgccaagaagtgcggcgtcgacctgagcgaaatcgatcagagcggcccgaaactgcgctacagccagaccattctcggcaagccgaccacctcgctgctgccgaccattgtcgaagactcgttgaacgacctgccgattgccaagcgcatgcgctggggcgctcgcaaggaagagttcgtacggccgacccagtggttggtgatgctgttcggcgatcaggtggtggactgcacgattctcgcccagagcgccggtcgtcattctcgcggccaccgcttccatcacccggaagacgtgcgtatttcttcgcctgccggctacctcagcgacctgcgcgcagctaatgttctggccgacttcaacgaacgtcgccagatcatcagcaagcgcgtcgaagagctggccagccaacaggaaggcaccgccatcgtgccgccaagcctgctggatgaagtggccgggctggtcgagtggccggttccactggtgtgttcgttcgaagagcgtttccttgatgtgcctcaggaagccctgatcaccaccatgcaggacaaccagaagtatttctgcctgctggatgccgacggcaagttgctgccgcgcttcatcacggtggccaacatcgagagcaaggacccggcccagatcatcgccggtaatgagaaggtggttcgtccacgcctgaccgacgccgaattcttcttcaagcaggacaagaagcagaagctggaaaccttcaacgatcgcctgaaaaacgtcgtgttccaggcccaattgggcagcgtgttcgacaaggccgagcgcgtctcgaagcttgccgcctacatcgcaccccgcatcggcggcgacgcccagcgtgcggcacgtgccgggctgttgtccaagtgcgatctgtcgagtgaaatggttggcgagttcccggaaatgcagggcattgctggttactactacgccaaggccgatggcgaggcagaagatgtcgcgctggcgctcaacgagcagtacatgccgcgtggcgcaggtgctgagctgccgaccacgctgaccggtgcggcagttgccatcgctgacaagctcgacacgctggtcggtattttcggtatcggcatgctgcccaccggcagcaaagacccgtatgccttgcgtcgtgcggcgctgggtatcctgcggatcctgatcgagaagaagctggacctgaacctggtcgagaccgtgaagttcgcggtcacgcagttcggtgccaaggtcaagcccgcagggctggctgagcaggtgctggaattcatcttcgaccgtctgcgtgcgcgttacgaagacgaaggcgtcgaagtggcggtatatctctcggtgcgtgccttgcagcccgcctcggcgcttgatttcgatcagcgcgttcaggcggtgcaggctttccgcaaactgccgcaagccgccgcactggctgccgtgaacaagcgcgtatcgaacctgctgagcaaggccgagggcagcattgcccagaccgtcgagcccaagtacttcgacaacgccaacgagttctcgctgtactcggcaatccagcaggctgatcatgcggtccagccaatggctgccgagcgtcagtacagcgaatcgctggcgcgtctggcgatgctgcgcgagccggtcgatgcgttctttgaagcggtgatggtcaacgcggaagacgccaatgtgcgcgccaaccgttatgccttgctggcgcgcttgcgcggcctgttcctcggcgttgccgatatctcgctgctgggc

SEQ ID NO: 33895 - DNA, 834 bp, Pseudomonas syringae
gtgggctacggcctggtgatgatcggcaccctcaagggtgaagtggtcgccatggacgcctcgaccggcgaagaaaaatggcgcgcccgcgtgaccagtgaggtgctggctccgcctgccaccaacggttccgtggttgtggttcagactcaggatgaccgtgttgtcggctttgatgcctccaccggctcccagctctggatctacgaaagcacgccagcggtgctgacactgcgcggcaccggtgctccactggccaccaaccgcctcgctgtagcgggtctgtcgaccggcaaggtcgtcgcgctggatatttccaatggcgtgccgatctgggaacagcgcgtagcgatccctaaaggtcgctcggaactggaccgcgtggtcgatatcgacggtggcctgctgctgtccggcggtacactgtacgtcgctacctatcagggtcgagttgccggcctggaactggaaagcggtcgtgtgctgtggcagcgtgatgcttcaagctactcgggcgttgcccagggctttggcagtgtttacgcaaccctggcctccggtactgtcgaaggcatcgacgagcgctcgtcctctgcactgtggagcaacgaatcgctggctcgccgccaactgggcgcaccggaagtgtattcaagctatgtagcagtgggtgacatggaaggctaccttcacctgttgagccaggtcgacggtcgttttgtcggtcgcgagcgcattgacagcgacggcctgcgtgctcgtccgctggtggttggggacatgatttacgtgtatggcaacagcggcaaactggaagcgctgtccatcaagcaa

SEQ ID NO: 33896 - DNA, 495 bp, Pseudomonas syringae
gtgcacgtatggccaccaaaaacggccgcgccgtcctttcgcgtcgtcgtgccaaaggccgtaagcgtctggcagtttgataaatcggcacaggaggtgagtcgagacttcagtcgggaaaagcgtttgctgactccccggcatttcaaggcagtctttgactcccctaccggtaaggttccggggaaaaatctcctgctccttgcgcgcaacaacgaccttgatcatccccgtctggggcttgtgataggtaaaaagagcgtgaagctctccgtcgagcgcaatcgtttgaaacgcctgatgcgcgaatcatttcgccaacaccaagacagtttggtcggttgggatatcgttatcgtcgcgcgtaaaggtttgggtgacgtagaaaaccctgaactgattcagcatttcggcaagctctggaagcgtctggcgcgtagccgacccactccggaagaaaagtccgaacctgcaggggtagacagtaccgatgcg

SEQ ID NO: 33897 - DNA, 195 bp, Pseudomonas syringae
atgcagttattcactgttcaaggcatgacctgcgggcactgtgttcgcgccgtgaccgaagcgatcaaaaatgccgaccctgccgccgagttacaggtcgaactggccagtaaacaggtgaaggtacagagcagcctgtcgccggagcagatcatcgggctgatcggcgaagaaggttatcaggcgcaattggca

SEQ ID NO: 33898 - DNA, 264 bp, Pseudomonas syringae
atggctgaagccgaaaaaactgtccgtacgctgactggccgtgttgtcagcgacaagatggacaagaccatcaccgttctgatcgagcgtcgcgtaaagcacccgatctacggtaaatacgttaagcgttcgactaagctgcacgcgcacgacgaaaccaaccagtgccatatcggcgacaaggtcactattcgtgaaactcgtccggtagccaagaccaagtcttgggcgttggttgatatcctcgaacgcgctgtggaagtc

SEQ ID NO: 33899 - DNA, 1263 bp, Pseudomonas syringae
atgagcaagtctttcaaacaggcgctgttcagcgccgcactggtctgggccgtggcctacccggtgttcggcctgaaactggcgttctccggcgtgaccctgcaagtgcagaatgccagcccgctgaccctgaccattattgccgtgtgctcggtgctgctgtttctgcgcgtgctgttcgccgagcaaatcagcagcctgcgtcgcggctcggaaaagccgctgatcccgcagaagaccagcgacttcctgactcagccgaaaacccagcgctggggcctggcggccctgatcgtgctggccttcatctggccgttcttcggctcgcgcggtgcggtggacatcgccacgctgatcctgatctacgtcatgctcggcctgggcctgaacatcgtcgtcggcctggccggcctgctcgatctcggctacgtgggtttctatgcggtcggtgcctacagctacgccctgctgtcccattactacgggctcggcttctggatctgcctgccgattgcggggatgatggcggcagtgttcggcttcttgctgggcttcccggtattgcgtttgcgcggcgactatctggccatcgtgacgctggggttcggcgagatcatccgtattttcctgcgtaacctcaccgagttgacgggtggcccgaatggcatcagcaacatcgacaagccgacctttttcggcctgacgttcgagcgcaaagcggccgaaggtatgcagacctttcacgagtatttcggcctgccgtacaactcgatcaacaaggttgtctttctctacctgatcgccctgctgctggcactggcggcgctgttcgtcatcaaccgtctgctgcgcatgccgatcggccgggcctgggaggcgctgcgtgaagacgaaatcgcctgccgcgcgctgggcctgaatccgaccgtcatcaagctgtcggccttcaccctgggcgctgcattcgccggtttcgccggcagcttcttcgcggcccgccaaggcctggtgacacccgaatccttcaccttcatcgagtcggcaatcatcctcgccatcgttgtgctcggtggcatgggctcgcaactgggcgtgattctggcggccattgtgatgatcctgctgccggaactgatgcgtgagttcagcgactaccgcatgttgatgttcggcgccctgatggtgctgatgatgatctggcgtcctcaaggcttcctgccgatgcaacggcctgaaatgaaattgaaagcggagctgcccaaa

SEQ ID NO: 33900 - DNA, 366 bp, Pseudomonas syringae; identical to SEQ ID NO: 29947

SEQ ID NO: 33901 - DNA, 419 bp, Pseudomonas syringae
atttcactgagtctcgggtggagacagcgccgccatcgttacgccattcgtgcaggtcggaacttacccgacaaggaatttcgctaccttaggaccgttatagttacggccgccgtttaccggggcttcgatcaagagcttcgtttgcgctaaccccatcaattaaccttccggcaccgggcaggcgtcacaccctatacgtccactttcgtgtttgcagagtgctgtgtttttaataaacagtcgcagcggcctggtatcttcgaccggcgtgggcttacgcagtaaatgcttcaccctcaccggcgcaccttctcccgaagttacggtgccattttgcctagttccttcacccgagttctctcaagcgccttggtattctctacccaaccacctgtgtcggtttggggtacggttcc

SEQ ID NO: 33902 - DNA, 276 bp, Pseudomonas syringae
ttggtcgccgaccagatccgcgggaagaaggtgggcgaagcgctcaacctgttggctttcagcagtaagaaagccgccgagatcctgaagaaagtgctggagtcggctgtagccaacgccgagcataacgaaggcgcagacgttgatgacctcaaggtctccaccgtcttcgtcaacgaagggcgttcgctgaagcgcatcatgccacgtgctaaaggccgtgctgatcgcatcgtcaagcggtcttgccatatcactgtcaaggttgctgacaag

SEQ ID NO: 33903 - DNA, 1329 bp, Pseudomonas syringae
gtgctcgaaggcctgtggctgaagacccgcgaagacgtctactgtgatctgtaccacttctggtcgaagatatttgccgtcaacttcggcatgggcgtggtgtccgggctggtcatggcctatcagtttggcaccaactggagccgcttctccgactttgcaggcgccgttaccggaccgctgctgacctacgaggtgttgaccgcctttttcctggaagccggcttcctgggtgtgatgctgttcggctggaaccgcgtgggccgcaacctgcacttcttctccacggtgatggttgccatcggtacgctgatctcgacattctggattctgtcctccaacagctggatgcagacgccacaaggtttcgagatcatcgacggtcgtgtgatcccgactgactggttcgcggtggtcttcaacccgtcgttcccgtaccgcctgacgcacatggcaattgccgccttcgtggcgacggccttcttcgtaggctcttcggcggcctggcacttgctgcgcggtcgtgacacgcccgccgtgcgcaagatgctctcgatggccatgtggatggccctgctggttgcgccagttcaggcagtggtcggtgacttccacggcctgaatacgctcaagcatcagcccgccaaaatcgccgccattgaaggccactgggaaaacatcggcgacgagccgaccccgctgatcctgttcggcatccccgacatgaaagaggaacgcaccaagtacaaggtggagattccgtacctgggcagcctgatcctgacccacagcctcgacaagcaagtgccggcgctcaaggagttcaaacccgaggaccgcccgaactcgctgatcgtgttctggtcgttccgggtcatggtcgccctcggcatgctgatgatcttcaccggcctgtggagcctctggctgcgcaagcgcggcacactgtatagctcgcgtccgttcctgtacctggcgctgtggatggggccgtcgggcctggtcgcgatcctggcgggctggttcaccaccgagatcggccgtcagccgtgggtcgtgtacggcttgatgcgcaccgcagatgcatcgtccggccacagcgtggcgcagatgagcatcaccctggtgttgttcgtggtggtttatttcgtgctgttcggtgcaggtctcggttacatgatgcgtctggtccgcaagggcccgaaagcgtatgtcgagcatgtgcctcatggtggtcccggccagcaacgcacaccggcccgcccgctctccgctgctgttgaaagcgaagacgatggcgacagtcctgaccgtctcggcaaggggaat

SEQ ID NO: 33904 - DNA, 309 bp, Pseudomonas syringae
cttcagggtgaagtttattacctgccacgcatcgcgctgccgacaggctgcgagttgaccgtcaccttgagcgacatcagcctggctgatgcactggcgattgaaattgacacctgcaaaaaaacgatcacccaccaggtgccgttgccgtttgaacttggctatgcctttgaccgctatcctgtaccgggtcacagctatgccttgtcggcgcgaatcgagcatgagggtcggttgatctggatcaacgacaccgtgcacccgattgaactgaccaacgaaaatcaaagcgatctgaagatcaaggtc

SEQ ID NO: 33905 - DNA, 207 bp, Pseudomonas syringae
atgtggggttcgtggatcggatacattgaatatgccaaggcgcaactgcgcgccaaggtcgagcaccccttccaggtaatcaaggtgcgcttcaatcatcgcaaggttcgctaccgtgggctggaaaagaatacagcgcagttgttcagtttgtttgggttggccaatctgatgctggccaagcggtatttgcaacaggcggcagga

SEQ ID NO: 33906 - DNA, 621 bp, Pseudomonas syringae
atgagcacaattaagaaaggtattgatctatcgcattttcaaggtgatattgattttaaaaaagtttttgaggctggcattgagtatgcctttatcaagacaacagaaggcgctaccgtacaggacaataaatacactacgtatcgtactgacgctagagccgtcggaattaaaacgggggcatatcattactttcgtgcgctcagcagctcgccggaagcacaacgagataacatagttagtacacttactgctgccggcttcgatgcatctactgagttttttgcaatcgatgcggagctcgaaggtaacgaaaaagctaccccggacgaaatggctgacaaccttcataaactgctaactttattggataacgaaaaaatcctaaagagccaaaaatcatttatatattgcgataataacttctggatgaatcatattttaggagaaaaatatgcatttagtgaataccctctttggatcgctaattgggatgtcagtgaacctaaagttccagcttcatgggaggtagcaggtaaaagctggtcaatttggcagcacagtaacaaaggtcgcatcgcgggcattgaggttgatgtagatcttaattgggttcgtact

SEQ ID NO: 33907 - DNA, 234 bp, Pseudomonas syringae
ttgaacgagcctgctgagtttcgacgcccagaggccttcaccgtgcgcatcgatcaggaggagtatcgcgtgccgagcaactgcccgcaccgtgaaggatggctggagcatggggtggtcaatgaacagcgcaggtccatcacctgccccctgcacttttcggtgttcagcctggaaaccggcgagcagttgagtggcccgccgtgtggccggttacaggtgcagcggctcaag

SEQ ID NO: 33908 - DNA, 1281 bp, Pseudomonas syringae
atgactgacacccgcaacggcgaggacaacggcaaattgctctattgctccttctgtggcaaaagccagcatgaagtgcgcaaattgattgccggcccctcggtctttatctgcgacgagtgcgtcgacctgtgcaatgacatcatccgcgaggaggtgcaggaagcacaggcagaaagcagcgcgcataaattgccttcgcctaaagaaatcagcggcatccttgaccagtatgtaatcggtcaggaacgtgccaaaaaggttctcgcagtagcggtgtacaaccactacaagcgtctgaaccagcgcgacaagaagaacgacgatgtcgagctgggcaagagcaacatcctgctgatcggccctacgggctccggcaagacgctgctggctgaaacactggcccgcctgcttaacgtgccgtttaccattgccgacgccaccaccctgaccgaagccggttatgtgggtgaggacgtcgaaaacattatccagaagctgttgcagaaatgtgattacgatgtcgagaaggcccagatgggtattgtctacatcgatgaaatcgacaagatttcgcgcaaatccgacaacccttcgatcactcgtgacgtttccggtgaaggcgtgcaacaggccttgctgaaactgatcgagggcaccgtggcttccgttccgcctcaaggtggtcgcaagcatccgcagcaggaattcctgcaggtggacacgcgcaacatcctcttcatatgcggtggcgccttctcgggcctggaaaaggtcattcagaaccgttccacccgtggcggcatcggtttcaacgccgaagttcgcagcaaggaggagggcaagaaggtgggcgagtccctgcgtgaggtcgagcctgacgatctggtcaagtttggtctgatcccggaattcgtcggtcgtctgccggtgcttgcaacgctggacgagctggatgaggctgctttgattcagatcctcaccgagccgaaaaacgcgttgaccaagcagtacgccaagctgttcgaaatggaaggcgtggacctcgagttccgcaccgacgcgctgaaatcggttgcccgtcgtgcgctggagcgcaagaccggtgctcgtggcctgcgctccatcctcgaaggcgtgctgctcgacaccatgtacgagatcccgtcgcaaagcgacgtgagcaaggtggtgatcgacgagagcgttatcgatggcacgtccaagccgttgctgatctacgaaaacagcgagccacccgccaaggctgctcctgacgcg

SEQ ID NO: 33909 - DNA, 618 bp, Pseudomonas syringae
atggctcgttacattggtccaaaatgcaaacttgctcgtcgtgaaggcaccgatctctttttgaagagcggcgttcgcgctatcgaatccaagtgcaacatcgaagcagctccaggcatccacggccaacgccgcggtcgccagtccgattacggtacccagctgcgtgaaaagcaaaaagtccgtcgtatctacggcgttctcgagcgtcagttcagcggctactacaaagaagccgccggcaagaaaggtgcaacaggcgagaacctgctgcaactgctcgaatgccgtctggacaacgttgtataccgcatgggcttcggctcgacgcgtgccgaatcccgtcaattggtttcgcacaagtcggttagcgtaaacggcaaaaccgttaacgttccttcttatcaggttcgtgctggcgacgttgttgctatccgcgaaaaggctaagaatcagctgcgtattgtccaggctctcgatctgtgtgcccaacgtggccgcgtagaatgggtagaagtagacactgagaagaaatcgggcgttttcaagaacgtaccagctcgcagtgatctatccgccgacatcaacgaaagcctgattgtcgagctctactccaag

SEQ ID NO: 33910 - DNA, 153 bp, Pseudomonas syringae
atgcgtgaattgatccgtttggtgtcgagcgctggtacaggccatttctacaccaccgacaagaacaaacgtactactccggataaaatcgaaatcaaaaaattcgatccggttgtacgcaagcacgtgatctacaaagaaggcaaaatcaag

SEQ ID NO: 33911 - DNA, 531 bp, Pseudomonas syringae
atggcggcggagtctaccagcttcgtcctgaacaggtggatcactatgccttcagcgctctggagtttcaccctcgatttctacgcccgaccgggtgtggagcaggcttgtctgacgctgcaagccaacgggggcaatgtgtgcatggtgctttgcggggtctggctcggtgcgcgcgaagtggcctgcaccgcgcaacgattagcacaaataagacaattggcgacgccctggcacgacgatgtggtgcgtccgctgcgtaatttacgcagtgaatggcgaaatgcggcacttgaggatgttgcgcttggcgggttgcgagcaaaggtcaaggcgctggaactggaggccgagcagagtttgatggcacggcttgaggggctgagcgcagattggcccgctggcgaggcaagggatgccgaggagtggctgatcgggcttgtcgatgaacgtgcagaaggctgtgtcgagggtcaccgcgatgcgctgcatgtgctgcgcatcgcggtggggcgtagcgacgaccagctt

SEQ ID NO: 33912 - DNA, 3801 bp, Pseudomonas syringae
aacgtccaggatatctacgcactggcgccactgcaggaaggggtgttgttccaccaccttgcgtcgctagagggtgacccctatttgctgaatacgcgttttgcgctgccaagcgaagaccacctgaaggctttcgtgcgggcacttcagggcgtgattgccaggcatgacatcttgagaacggcggtgctgtgggaggggctggacgagccggtccagatagtctggcgtgaagcgccattggccgtggaagcattggaactgaaggcggctgacggagacatcgaacagcaacttcaggagcgcttcgatcccaggcattgccggctggatttgacaaaagcccccttgatgaagatggcttacgcctacgacgacgcaaatagtcgctgggtggcgattctgctgtttcaccacatggtgctggaccacatggcgctggaagtggtgcaacatgaggtacaggcggatctgctggggcaggcagcgcgactgccgacgccggtaccttatcgtaaccatgttgcgcaggcgcgattgggagtaagccaagcggcccacgaagcgttcttccaggaaatgctcggtcaggtgacggagccgacgctgccattcggtttgcacgatgtgcagggtgacggtcgggacataaggcaagccaggcaggcagtgcccgcagagctggcgggcaggatccgtcggcaagccaggagtctgggtgtgagtgctgccagcctgcatcatctggcgtgggcgcacgttctgggacgcacgtcgggcagggaagaggttgtgttcggtacggtgttgctggggcggatgcagggtggcgacggtgccgaccgctcgttggggatgttcatcaataccttgccggtgtgcttgaacgtgggtgagcaaagcgtaagtgagggggtgaaggccacgcatgcccgcctgactgcgctgcttggtcacgaacatgcgtcgttgccgctggcgcaacgctgcagcgccattgccccgtcgttgccgctgttcagcgcgctgctgaattatcggcacagcgcccagccggaaatatcggatcaagcagaccgcccttggggcgaaatcgaggtcttgggctggaatgagtggaccaactatccgttgacgcttgccgtggacgatctgggcgagggctttgcactgaccgttcaatccacggcgggggtcgatccgcaaagggtatgtgcttacatggagacggcgctggagagtctggtcgaagcgctggagcactatcccgagtcgttgctgcgccgtctggatgtgctgccgcgagccgagcgtcagttgcttcaggagtggaatgcgacggccgtggattacccgcaagacacctgcgtccatcagttgttcgaaacgcaagtggaaaagacgccagaagcgattgcgctggtattcgaggcgcgcaaattcacttatgcgcaactgaatgcgcgtgccaaccagttggcgcattatctgatcggcctgggcatcgggccggatgaccgggtggcgatctgcgtggagcgcagcccggaaatggtggtgggcttgctgggggttttaaaagcgggcgctgcctatgtgccgctggacccgacgtatccggagcagcggttgcgctacatgctggaagacagcgcgccggcggcggtactagtgcagcgcatgacccgggcgttgccaggcaagttggcagtgccgttgctcgacctggaaggcgggggctgggagtctgaggctgactatgatccagtggcgcgagcagtcaagccgcatcatctggcctatgtgatttatacgtcaggctcaagcggccgacccaagggcgtgttgattgagcaaaagggttttcgcaatctgatgcactggtatctcgacgagctgaaactggcgtccgatgatgccgtactgcttgtttcatcctatagcttcgatctgacgcaaaaaaacattctggggccgttgttggtcggtggaacgctgcatctggccagagaggcttttattcccgacgtgctgctgaagcagattcaacgcgagcgtattacccacatcaatctttcacccagtgcgttcaacgcgctcatcaatgcaaacgattcaaggcaactagacagcattcgccgggtggtactgggcggagagcctgttcagttcgccagattggaaatgcttcccgagccgaggccggaattcattaacagttatgggcccacggagtgcagcgacgtggtggcctggcatagactggttgaggatatcgactgttatcggtcttcggtgtttccgatcggccgtccgatcgcgaatacacggatttacctgttggatgtgcacggccagccagtgcccatcggggtcagcggcgagatttatatcggcggtgcgggggttgcccgtggctatctcaatctgccggaactgacggcggagcgtttcctggatgacccgttcagtgctgagccggcggtgcggatgtacagaagcggcgatctgggccgctggctggcggacggtaatatcgagtacctggggcgcaatgatgatcaggtcaagatccggggctttcgtgtcgagctgggcgaaatcgagtcgcaactggcggtttgccccggggtcagggaagcggtggtgctggcacgcgagtatagccccggagacaagcgcctggtggcgtacctgacggcgcaggaaggtgccgtattgtcagcagcgcagttgcgcgagcaactgtcgcaagggttgacggaacacatgatcccgagcgcctttgtgacgctggcgagtttcccgctgacgccgaacggcaaactggatcgtcgggcattgccggcgccggaggacgacgcttatgccagtcgtgattacgaggcgcctgtaggtgaagtcgaacctgcgctggcggagatctggcaggcgttgctcggtatcgatcgggcagggcgtcaagatcacttcttcgaactgggcgggcattcgttactggccgtgcaactggtttcacgcctgcgtcggcagttcggagtcgacgtggcactgcgagatgtgtttgccgagcctacattacaaggtctggcacggcaggtgacgaacgccaggctcacggcgcagccgccgttgacgccggtcgaccgcaatctgccattgccgttgtcgtgggcgcagcagcgcttgtggttcctcgatcaactggaccgtgcggcgggagccgcctatcacatcgctgcagggctacgcttgcgcggccaattgaatcgcgacgccttgcaagccacgctggaccgcatcgtggctcgccacgaaatcctgcgcacccattttgtcttgcacaagggccaggcgatacagttgatcgcaccagcggcccaagggtttgccctggctacccacgacctgcgctctctgggcagcacggcgcagcacgaggcggtcgagcggctcgctcgcgaggagtcggttgcaccgttcgacttgtcgagtggtccgctgattcgtgggcggcttgtgcaactgtcggagacagagcacgtcctgctggtgacgcagcaccatatcgtttcggacggttggtcgacgggcgttctgctgcaggaaatcggtacgttataccgtgccttcagccaggggctggccgatcctctgccggcactggccttccagtatgccgactacgcggcgtcgcagcggcagtggttgcagggcgaaaccctgcaaacgcaggtcgacttctggcgccagcacctgagcggagctccggccctgctggagctgcccaccgaccaccgc

SEQ ID NO: 33913 - DNA, 606 bp, Pseudomonas syringae
ttgccgggcgagatcgccagaagctatcaggctgggggcgctacctgtctctcggtactgaccgatgtcgattttttccagggttcggacgcctacctgcaagaagcgcgcgcggcgtgcaatttgccggtgatccgcaaggacttcatgatcgacccttatcaagtggtcgaggcgcgtgcgctgggtgcagattgcatcctgctgatcgtctcggcgctcgatgacgtgcagatggccgagcttgccgccgttgccaagggtgtcggcctggacgtgctcgttgaagtgcatgacggtgacgaactggaacgcgcgctgaaaaccctcgacaccaagctggtcggcgtcaacaaccgcaacctgcataccttcgaggtcagcctggaaactacgctggacctgctgccgcgcattccgcgtgatcgcacggtgatcaccgaaagcggcattttcaaccgcgccgacgtcgagctgatggaaatcaacgatgtctactcgttcctggtaggcgaagccttcatgcgtgccgaacagcccggcgcagagctgcagcggttgttcttcccggagcgcaagccggcagcgggcggcccggctgtcgac

SEQ ID NO: 33914 - DNA, 288 bp, Pseudomonas syringae
ttgctgttcgcagatttttttatgccggccacctctattctttcaggggacttatctacaaaatttcgcagcctttctttgatgtgttgccgcaagatcgagttcacgaaaacccaggtgcgagcgaaggttgaatatccatttcgtgcgatcgagcgccagtttggttatacgaaagtgcggtttcgcgggctcgttaaaaataccacgcaacaggccaaactgtttgccttgtcgaacctttggatggtacgaaaacggctgttggcgataggagaggtgcgcctg

SEQ ID NO: 33915 - DNA, 1629 bp, Pseudomonas syringae
atgacgcgctacatcttcgtcacgggcggtgttgtttcttcattggggaaaggcattgcctcggcttcactggcggccatcctggaggcgcggggactcaaggtcaccatgctgaaactggacccctatatcaacgtggacccaggcaccatgagtccgttccagcacggtgaggtgtttgtcacccacgacggcgctgaaaccgacctcgaccttggtcactacgagcggtttatccgcaccaccatgacccagaacaacaatttcaccactggccgtgtgtacgaacacgtcctgcgcaaagagcgccgcggtgattatctgggcgcgaccattcaggtcattccgcacatcaccgacgaaatcaagcgccgcatcatcaagggtgctggcgatgccgatgtggccctggtcgaaatcggcggtacggtcggtgacatcgagtcgcagccgtttcttgaagccatccgccagttgcgttttgaagtcggcgcccgccgcgcgatgctcatgcacctgacactggtgccgtacatcgccacggccggcgagaccaaaaccaagccgactcagcattcggtcaaggaattgcgttccatcggtctgcagccggatgtactggtctgccgctccgatcacccgatcgacatttcctcgcgccgcaagatcgctcagttcactaacgtcgaagagcgcgcagtcattgccctcgaagacgccgacaccatctacaagatcccgggcatcctgcattcgcaggggctggacgattttgtcgtcgagcgcttcggcctgcagtgcggcggtgccgacctgtccgagtgggacaaggtggtcgacgccaagctcaacccggaacacgaagtcaccatcgcgatggtcggcaagtacatggaactgctcgacgcctacaagtcgttgatcgaagccatgagtcacgccggtatcaccaatcgcaccaaggtgaacctgcgttacatcgactccgaagacatcgaaaaccagggcaccggcctgcttgaaggcgtggatgcgattctggttccaggcggcttcggtctgcgcggcgtcgaaggcaagatcaccgctgtacagtttgcacgtgaaaacaaggttccgtacctgggcatctgcctgggcatgcaggtggcggtcatcgagttcgcccgtaacgtgctgggctggaaagacgccaactccactgaattcgaccgcaccagcgcgcacgccgtggttggcctgatcaccgagtgggaagatgccaccggcgcagtcgaaacccgtaccgaaagctctgatctgggcggcaccatgcgtctgggtgcacaggattgccagcttgaagccggttcgctggtgcacgattgctaccgcaaggacgtgattgtcgagcgtcatcgtcatcgctacgaagtgaacaacaacctgttgccgcaactgatcgaggctggcctgaagatttccggtcgctccggcgacggcgcgctggttgaagtggtcgaagcgccggatcatccgtggttcgtggcgtgccagttccacccggaattcacctccacgccacgtgacggacatccgctgttcagcggcttcgtcaaggcggcgctggctcaacatcagaaaaattcc

SEQ ID NO: 33916 - DNA, 975 bp, Pseudomonas syringae; identical to SEQ ID NO: 33042

SEQ ID NO: 33917 - DNA, 390 bp, Pseudomonas syringae
atgtcggcgactcaaaattacggcactggccgtcgcaagaccgcaaccgcacgcgttttcctgcgtccgggtactggtaacatctcgatcaacaaccgctccctggacaatttcttcggccgcgagactgcccgcatggtagttcgtcagccgctggaactgaccgagacagttgaaaagttcgacatctacgtcaccgtaatcggtggcggtgtaagtggtcaggctggcgcaatccgccacggtatcactcgcgctctgatgcagtacgacgagacgctgcgcggcgctctgcgtaaagcaggcttcgtgactcgcgatgctcgtgaagttgaacgtaagaaagtcggtctgcgtaaagcgcgtaagcgtccgcagtactcgaagcgt

SEQ ID NO: 33918 - DNA, 1383 bp, Pseudomonas syringae
gtgctggcatctgaaagcaaaccacgctcatcgcttcatgagcagagggagcagcgcatgaaagtgacagtgtttggaaccggctacgtggggcttacccaagccgcatgtctggcgaaagtaggccacaccgtttgctgtgtggatgtggacgaaaaacgtatccaggcactgcgtgaaggcgcatgcccgatattcgagcccggtcttgcggaccttctgcaaagcggtctggcttgccaacggttgcagttcaccacgaacgcagcccatgccagccgctttgccgagttgatattcatcgctgtcggaacgccgccgctagcggacggcagggccgatctgagccaggtgcttgccgtaatgcacaccgtgctcgagcacgccgacggtgcccggatcatcgtcaacaagtccacctcacccgtcgggacggtggaccgtttgctcgccgaaatcgctgccagcccgcgatgcgatgatggtttcgaagtcatcagcaacccggaatttttcaaggaaggctctgcggtcggcgattgtctgcgtccggatcgcattatcgtcggcggtgccagtcaatcggcactggagctcctgcgtgagctttaccaacctttcagccgcaaccgtgaaaagtttgtagtcatggatgcccgaagcgctgaactcaccaaatacgcagccaactgcctactcgcaaccaaaatatcgttcatcaatgaaatggccaatctggccgaacaggttgatgccgatatcgagcaggttcgtctgggcatcgggtccgatccgcgcataggttacgacttcatctaccctggctgcggtttcggcgggtcatgctttcccaaggaccttcaggcgctgatcggcactgctgcggaacacggtgtcgagacctcgctgctcagtgccgtagaacaggtcaaccgtcgccagaagcaccgattgttcgagaagatccgtacccattatcagggcgaacttgcaggtaaagtctttgccgtctgggggctggctttcaaacccaacactgacgatatccgcgaagcctccagtcacgctttgctggaagcgctctgggcctctggcgcgaggattcaggcccatgatccgcaggcgatgcaagccatacggcttcattatggcgagcgtgatgacttgaagctcgtcgactgcaaggaacatgcgcttgaaggcgcggacgccctggtagtggtcactgagtggcaggactaccgcgttctgaatctggaccggctcggtacgacattgcgcgaccgtgtcatcttcgatggccgtaacctgttcgatccggtacagctacgggaagcagggtttgtgtaccacggcattgggcgcggccagaggatcaacgta

SEQ ID NO: 33919 - DNA, 456 bp, Pseudomonas syringae
atgtctgataaaccccacacgcttgcgtctgccctgttcccgctgggcctgctgatcatcgccatgatcagcatccagagcggtgcatcattggcgaagagcctgttccctgtcgtaggcgcgcaaggcaccaccactctaaggctggtgttcgcaagtctcattctgctggtcatactccgcccgtggcgcgcgaggctgactgccaggtcgctgcgcacggtggtgatctacggcattgcgctgggcagtatgaacttcctcttttatatgtccctgcagactgtaccgctgggaattgccgtggcactggagttcaccggcccattggctgtcgcgctgctctcttcacgcaagccgatcgattttctctgggtcacgatggctgtcatcggcctgttgctgttgatacccctgaggcactcggacgccgccattgacctggccggtgcgggc

SEQ ID NO: 33920 - DNA, 192 bp, Pseudomonas syringae
atgtctaatcgccaaaccggcaccgtaaaatggttcaacgatgaaaaaggcttcggctttatcactccacaaggtggcggtgacgacctgttcgtacacttcaaagcgatcgaaagcgacggtttcaaaagcctgaaagaaggccagaccgtttcttttgttgctgctaaaggccagaaaggcatgcaagca

SEQ ID NO: 33921 - DNA, 1093 bp, Pseudomonas syringae
gaaatcaacccgatcctaaacagcatcaaggatttgtccgagcgctccgaaaccattcgggggtatctttgactacgatcacaaacatgatcgtctgaccgaagtaaaccgcgagctcgaagatcccaatgtctggaacaacccggcctacgctcaggagctggggcgcgagcgctcgttgctggcgcagatcgtcgaaaccctggacgaaatgtcctccgggctggtcgacgccaaagacctgctgctgatgtccgccgaagaagaagaccaggctgccgtcgacgacgtggctgccgaagtcgagcgcctgcgtgcctcgctggaaaagctcgaattccgccgcatgttcagtggcgagatggaccccaacaacgcctatctggacatccaggccggttccggcggcaccgaagcccaggactgggccaacatcctgctgcgcatgtacctgcgctgggccgacaagcgcggcttcgacgccaccatcatggagctgtccgccggtgaagtcgccggtatcaagggcgctaccgtgcacatcaagggtgaatatgcctttggctggttgcgcaccgaaatcggcgtgcaccgtctggtgcgcaagagcccgttcgactctggcaaccgccgtcacacctcgttctcggccgtgttcgtgtcgccggaaatcgatgacaacatcgaaatcgacatcaacccgtcggatctgcgcatcgacacctaccgctcctcgggtgccggtggtcagcacgtaaacaccaccgactcggcggtacgtattacccacgttccgaccaacactgtggtcagctgccagaacgaacgttcccagcatgcgaacaaggacaccgccatgaaaatgctgcgggcccgtttgtatgagcaggaagtgcagaagcgcaacgcagcgtcccaggcgctcgaagacaccaagtcggatatcggctggggtcatcagattcgctcttatgtcctggacgcctcgcgtatcaaggacctgcgaaccaacatcgaacgcagcgactgcgacaaggtgcttgatggcgatatcgacgaatacctgatcgcgagcctcaagcaagggctgtaa

SEQ ID NO: 33922 - DNA, 876 bp, Pseudomonas syringae
atgcccgactttgccagtctgttgcagcaaggcggttctcacgcctggctgtttttccccagcgccatcctgctgggcgccttgcacggcctggagccggggcactccaaaaccatgatggcggcgttcatcgtggccatccgggggtcggtgaagcaggctgtcatgctcgggctggcggcgacgctttcgcatactgcggttgtctggttgatcgctatcggcggcatgtatctggggcagggcctggatgctgaaacgaccgagccctactttcaacttgcgtcctcagcgctgatcatcgccatcgcgctgtggatgctgtggcgcacatggcgtggtgagcagctgttcaagtttgaggaagaaaacagtgctcaccacgggcacgacgaaacgcaccaccacagccacaaccatgaccacgatctggaacatcaccacggccatagccatgatcacagcaatccgggcggattggcgctgactgccgagggctatcaggatgctcacgagaaggcccatgccgacgacatccgcaagcgcttcaccaatcgtgaggtcagcaacggtcagattctgatgttcggtttgaccggcggactcatcccctgccccgctgcaatcaccgttttgctgctgtgcctgcaagtcaaacaagtcacgctgggggccgcgatggtgctgtgttttagcattggtttggcaatcacgctggtgactgtcggggccgctgccgctatcggcgctcgcaaggcatcaaaccgtttcccctggctcaatgccgctgcccggcgcgcaccctatctttccagcgtgctgatcatctgcgtagggatttacgtgggtatccacggctggaatggtctgtattcg

SEQ ID NO: 33923 - DNA, 609 bp, Pseudomonas syringae
atgtacgtcgtgcagcagtgtttcggtttctccgatgaaggttgcgaagatgccgtctacgacagccaggccatycgcggttttatgggtatcgacctgggtcgcgagtcggcaccggatgccaccaccttgctgcgttttcgccgcttgctggaaacccatcagctaacgcggctgctgtttgaaacgattaaccagcatctggccagccgggggctgctgctcaaggaaggcactatcgtcgacgctaccctgatcgccgcgccgccctcggtcaagaaccgagaaggcaagcgtgatcctgagatgcatcaggccaggaaaggcaatcaatggcacttcgggatgaaggcccacattggtgtagacgccacgtcggggctggtgcacagcgtagtagggacggccgctaacgtggcggatgtcacccaggttggccagttgctgcacggtgacgaaacctatgtttcgggtgacgctggatacacccgtgcggccaagcgaccggagcatgctgaacgggacgttatctggtcgattgcagcacgggcaagcagttacaagcagcacggcgaaagcagcgtgctgtatcgggtcaagcgtaaaatg

SEQ ID NO: 33924 - DNA, 192 bp, Pseudomonas syringae
atgctgctggaagctggcgagaagaaagttaacgtgatcaaggcagtacgtgagctgaccggtctgggtctgaaagaagccaaggcagtcgttgacggcgctccaggcatcgttctggaagctgttgccaaagacgcagctgacaaagccaaagctactctggaagaagcaggcgctaaagtcgagctgaaa

SEQ ID NO: 33925 - DNA, 1341 bp, Pseudomonas syringae
atgttggaaaaagttctgatcgccaaccgcggcgaaattgccttgcgcatcttgcgtgcctgtaaagaactgggcatcaagaccgtcgctgtacactccacggcagatcgcgagttgatgcacctgggcctggcggacgaaaccgtctgcatcggtccggccccggccaacctgtcctacctgaacattccggcgatcatctcggccgctgaagtgaccggtgccacggccattcacccaggctacggtttccttgcggaaaacgccgatttcgctgaacaggttgaaaaatccggctttgccttcattggcccgaaagcagacaccatccgcctgatgggcgacaaggtttctgccaaggacgccatgaagctggccaacgtgccaaccgttccgggctccgacggcccgctgccggaagacgaggcaatcgctctgcgcatcggtcgcgaagtcggttacccggtgatcatcaaggccgccggtggcggtggtggtcgcggcatgcgtgtggtgcatcgcgaagaagacctgatcgaagccgctgcacagacccgtgcagaagctgcggcctggttcagcaacccgatggtctatctggaaaaatacctgaccaacccacgccacgtggaagtccaggtcatttccgatggccagggccaggcgattcatctgggcgaccgcgactgctcgctgcagcgccgtcaccagaaggttctcgaagaagcgccggcaccgttcatcgacgaacaggcgcgtgccgatgtactggcagcctgcgtcaaggcgtgtatcgatatcggctatcgcggtgcgggtactttcgagttcctgtacgagaatggccgtttctacttcatcgaaatgaacacccgtgttcaggtggagcacccggtgtccgagatggtcactggtatcgacatcgtcaaagagatgctcagcatcgccgccggtaacaaactgtcgtacacccaggatgacgtggtcatcaccgggcatgcgctggagtgccggatcaacgccgaagacccgaaaaccttcgtgccaagcccaggcctggtcaagcacttccatgcaccgggcggcaacggcgtacgggtcgattcgcacctgtacagcgggtacaaggttccgtcgaactacgactcgctgatcggcaaagtgatcacctggggcgcaacccgcgaagaagccatggcacgcatgcgtaatgccctggacgaaatcgtggttgacgggatcaagaccaacatcccgttgcaccgtgatctgacccgtgatgaaggcttctgcgaaggcggcgtcaacatccactacctggaacacaaactggccaatcaa

SEQ ID NO: 33926 - DNA, 975 bp, Pseudomonas syringae; identical to SEQ ID NO: 33042

SEQ ID NO: 33927 - DNA, 3726 bp, Pseudomonas syringae
ttgtcgtctgcgcaacagcgcatctggttcatggcgcagatggaagacgccaacagcgcctacaacatttcgttgggccttaaactgaccggcccgctggacagccgtgccttgaaacgtgcactggagcgcatcgtggcccgtcacgacagcctgcgcagccgcttcagccaggaagacgatatcgcctgggtgcaggcggcgcccatcacttcagtgccggacatctgctggcaggatttgcgtggtcacggcgccgatgccttgcgcgcggtagcccaggaagaagccgcgcagcccttcgatctgcgccacgacctgcctgttcgcggtcgtctgctgtgcctggccgaagaacgccacgtactgctgctgaccgtgcaccatatcgttgccgacggctggtcgctgggtgtactgacccgtgaactgaccgcgctgtatcaggcgttcagccaagggctggctgatccgctgcccccgctgacgctgcaatatggcgattacgctgtgtggcaacgcacctggctggacgccgaacgcttgagccatcaggctgattactggcagcaggcgctgacgggcgcgccggtgttgctgacattaccgaccgaccgaccacgtcctgcgcatcaggactactccggggccagcgtcgcgctgactctggatgcgcgcctgagcactgacatcagaacgttctgccaggcccagtcggtgacaccgttcatgctgttcatgggggcttgggcggtattactgtcgcggttgtccggccaggaagaggtcgttgtcggcatgccggtggccaaccgtcgtcgcgccgaaatcgaaggcttgatcggcctgttcgtcaataccctggccgtgcgtgtggacacgtccggcgagccggatgccgtgacgctgctggcgcgcatcaaggcccgcgtggtggcagcgcaggaccatcaggacctgcctttcgagcaagtggtggagcgcctgcggccgccgcgcagcctggcgcacagcccgttattccaggcatcactgacctgggatggcagtcagggcctggacttgcaactgggcgatctgcaactggaaccgctggatgagcaggcggctttcgcaaagttcgacctggcgctgagcgtcggcgacagcgccgaacatttccgctgcatcgtggaatacgccaccgcgctgtttgaccgcagcaccgtcgagcgctatctgggttatctggaggcgatactgcgtggcatggtcgctgatggccagacggtggtgaaccacattgcgctgttgtcggaggccgagcgtcggcagttgaccgagggcttcaatgcacccgacgtggtttacccgcaagggcagaccctgcacagccagtttgaagcgcaggtgcagcgcacgccagatgcgattgccgtgagttttgcagaccaatcgtggagctacgcgacgcttaacgcccaggccaacaaaatcgcgcatcgcctgattggcctgggcatcggtgaggatgaccgtgtcgccatctgcacgcatcgtggcctggaaatgatcgcgggcctgctggggattctcaaggccggtgccgcctacgtgccactggacccggcttaccctctggagcgcattgcctacaccctcggcgacagcgcgccggtagcgttgctgagccagcggtcagtgcaggccgccttgccggtgtcgcaagtgccggtgatcagcctcgacgaggccggtttgcaggacgaatccgagcgtaatccgcaggtgtcggtcaagcccacgagcctggcgtatgtgatctacacctccggctccaccggcctgcccaagggggtgatgatcgaacaccgcaatgttgcgcgactgttctcggccaccgaagactggttcggtttcaacgaacaggacgtctggtcgctgttccactcgtttgccttcgacttctcggtctgggaaatctggggcgcgttgctgcacggcgggcgtttgttgatcgtgccgcaactggtcagccgctcgcctgaagacttctacgcgctgctgtgcagcgccggggtgacggtgctcaaccagacgccgagtgcgtttcgccagctgattgctgcccagggcgagaatccgcaggcgcattcgctgcgccaggtgattttcggcggtgaagcgctggaaacagcgatgctcaagccgtggtacgcccgcaacgtgaacgccgccacccaactggtcaacatgtacggcatcaccgaaaccaccgtgcacgtgacctattacccggtgcagcccgaagacgcccagcgtgtcggcgccagcccgatcggcaagcgcattgccgatttgcaattgtatgtcctcgacacctgcggcgagccggtgccgctcggtgtggtcggcgagctgtatgtcggtggtgccggagtggcacgcggctacctgaaccgtgaagcactgaccgccgaacggttcctcgataacccgttcagccacgccgcagatgcgcgcatttaccggaccggtgacctggcgcgctggatggccgacggcagcctggaatacctgggccgtaacgacgagcaagtcaagattcgcggtttccgtatcgagctgggtgagatcgcgtctcgcctgaatgatcatccacaggttctcgacgctgtggtcgtggcgcgcgaggatgtgcccggagacaagcgtctggtgggctattacacctgcgctgaagaccagaccgggctggatatcgagcagttgcgcgcctggctgtcggggttgctgcctgattacatggtgcctgcggcctttgtccggcttgccggcctgccgataacggcgaacggcaaactggaccgcaaaagcctgccagcaccggatcgtgacagcctcgccagccgggcttatgaagcgccgcacggcgcggtcgaaatcgccctcgccagcctctggggggagctgctgcaagtggagcaggtcggtcggcaggataatttctttgaactgggcggtcattcgctgctcgccgtgaccctgattgcgcgcatgcgccgtctggacatgagggcggacattcgcgttcttttcgttcagccaacgctggccgcgctggctgaggcagttggtcgcgacagcgaaatccaggtgccggccaacctgatcgatgcgcactgccagcacatcacccccgaactgctgcctttggtagcgctggatcaggcggccattgaccgcatcgtcgcgcaggtaccgggcggggctgccaatgtgcaggatatctatccgctgggccccttgcagaccggtattctttatcaccacctgacagccggggaccgcgatccctacctgttgcagccgcaattcgcgttcgccgacacgtcgcgtctggacgctttttgccaagccttgcagcgggtgatcgagcgcaacgacattctgcgcaccgcgttgtgctgggaaggcctgcaagcgccggttcaggtggtctggcgtcaggccccgctgcgcattcaagagacgcccttgccagagcttttcaatgcgccgcgcatggagctgacgcaggcgccgctgctgcatctggtttatgcccatgacccggacaaccagaggatcaccgcggtgctgcgttaccaccatgtgatcatggatcacatcgctcttgacgtcttgagccacgagttacaggccatactgctgggcaacgaagccgggctcgccgcccccgtgccg

SEQ ID NO: 33928 - DNA, 1155 bp, Pseudomonas syringae
atgatcgaactccagaacctctccaagactttccagagcaacggcaaagaagtgaaggctgtcgattcggtcagcctcacggtcaacgaaggcgaaatctgtgtcttcctcggcccgtcgggctgcggcaagagcaccacgctgaaaatgatcaaccgtctgatcatgccgacctccggcaaagtgctgatcaacggcgaagacaccactgacctggatgaagtgaccttgcgtcgcaacatcggctacgtgatccagcagatcggtctgttcccgaacatgaccatcgaggaaaacatcgtggtcgtgcctaaattgctgggctgggacaaacagcgttgccatgaccgtgcgcgcgaactgatgagcatgatcaagctggagcccaagcagtacctgcatcgctacccgcgcgaattgtccggtggtcagcagcagcgtatcggggtgatccgcgcgctggcggccgatgcgccgttgctgctgatggacgagccgttcggtgcggtcgatccgatcaaccgcgagatgatccagaacgagttcttcgagatgcagcgggcgctgaacaagaccgtgatcatggtcagccacgacattgacgaagccatcaagctgggcgacaagatcgcgattttccgtggcggtaaactgctgcagatcgatcacccggacaccttgctcgcgcatccggctgacgacttcgtcagcagcttcgtcggccaggacagcaccctcaagcgcctgctgctggtcaaggcagaagacgccgccgacaacgcgccatcggtcagcccggaaaccccggttgccgatgcgctggaggtgatggacgaaaacgaccgtcgctacatcgtcgtcaccgacagcgagaacaaggcgatgggctacgtacgacgtcgtgacctgcatcgccagcaaggcacgtgcgcgcagttcctgcgtgagttcaacgccacggcggcctacgacgagcacttgcgcatcctgctgtcgcgtatgtacgagttcaaccgcgcctggctgccggtgctggatgccgagaacgtgttcctgggtgaggtgacgcaagagtcgattgcggcgtatctgagttcgggccgttcgcgcggcatgaagaccagtattgtttcgcctgccgagcaagtggcttct

SEQ ID NO: 33929 - DNA, 1392 bp, Pseudomonas syringae
atgggggattttcactgtgtccctcgcgcagcgcatccagtgagtgcggtacgcgagcgcggcctgtggaaaagagcggtcgtctggctggtgttactcgcgccgttctttttcgccagttacggctttgccacctggtatacggcgcagcgcaccgacgtcggcagcctggtgttcgactgggaagcacacatgccgttctgggcctggaccatcttgccttattggtccatcgacctgctttacggtttttccctgctggcctgcctgacccgtcggcaactggacacgcatgccttgcgcctgttcagcgcgcaactcatcgccgttacctgctttttgctctggccgctgcgctttaccttcgagcgtccggaactggacggcatcttcggctggctgttcgcggtgctggcaggcttcgacaagccgttcaatcaggcaccgtccctgcacatcgccctgctggtggtgctgtgggtgtgttacgaccgctacgctcggcactttcatgtcgcgtggcgctggctgctgcacagctggtttgccctgatcggcctgtcggtattaaccacttggcagcaccacttcgttgacttgcccacaggcgcactggccggctggttctgtgtctggctgtggccggatgagggccgtagcccattgctggcggcgcgcctgacgcgacatcccaaacggctcaggctggcgctttactacagcatgggcgctgctttgctggcgatccctgcatttgcgctcgctggtggcgggttgtggttggcgtggccggcactctcgttgctgctggtggcgctcaattacctgctgttcgatgcagccggttttcagaaacgtgccgacgggcgattgtccgctgccgcttactggttgcttggcccatacgtactcggcgcgtggataaactcgcggctgtggacaaaaaagcggcccgatccggatcaggttgtggataacgtatggctgggtcgattgcccagtgaacaacagatgcagccgtttcaggcgattgtggatatgtgcgccgagctgccaatcaatccgggcacgcgaagttatcaacaggtcgctgcaatcgacctgatcccgcccgatatagacaattgcctgcgcgcggcaaaagccatcgaaaacctgcgccagcatgggcctttgctggtctgctgcgcactgggttactcgcgcagtgctacggcagtagcggcgtggctgctttattcaggcagggcaacgtcggtggataacgcggcggcgctgatcagggcagcaaggcctggcgtggttctgcgtgaaggacatcttcaggttctggcggatgtgctgcgtaaccgcgatgtcattcacacaagcactctgcctattggcgcgcga

SEQ ID NO: 33930 - DNA, 819 bp, Pseudomonas syringae
cctgcgataggggtgtcgcgcatgttgcgcatgtacgtcgtgcagcagtgtttcggtttctccgatgaaggttgcgaagatgccgtctacgacagccaggccatccgcggttttatgggtatcgacctgggtcgcgagtcggcaccggatgccaccaccttgctgcgttttcgccgcttgctggaaacccatcagctaacgcggctgctgtttgaaacgattaaccagcatctggccagccgggggctgctgctcaaggaaggcactatcgtcgacgctaccctgatcgccgcgccgccctcggtcaagaaccgagaaggcaagcgtgatcctgagatgcatcaggccaggaaaggcaatcaatggcacttcgggatgaaggcccacattggtgtagacgccacgtcggggctggtgcacagcgtagtagggacggccgctaacgtggcggatgtcacccaggttggccagttgctgcacggtgacgaaacctatgtttcgggtgacgctggatacaccggtgcggccaagcgaccggagcatgctgaacgggacgttatctggtcgattgcagcacggccaagcagttacaagcagcacggcgaaggcagcgtgctgtatcgggtcaagcgtaaaattgaatatgccaaggcgcaactgcgcgccaaggtcgagcaccccttccaggtaatcaaggtgcgcttcaatcatcgcaaggttcgctaccgtgggctggaaaagaatacagcgcagttgttcagtttgtttgggttggccaatctgatgctggccaagcggtatttgcaacaggcggcagga

SEQ ID NO: 33931 - DNA, 741 bp, Pseudomonas syringae
atgagccttcaaggtaaagttgcactggtaaccggtgccagtcgcggtattggtcaagccattgcgcttgagttgggacgcaatggtgcggtcgttgtaggcactgcgacctccgagtccggcgccgagcgcatcagcgcaacgttcaaggaaagcggcatcgaaggctttggcctgatgctggatgtctgcgatgcagagtctgtgagttctgttctgtcgaccattcaggagcgcgtaggcgcaccgttgattctggtcaataatgccggtatcacccgtgataacctggtgatgcgcatgaaagatgacgaatggtacgatgtcgtcaataccaacctgaacagccttttccgtctttccaagggtgttctgcgcggcatgaccaaagcgcgttggggacgaattatcagcattggttcggttgtgggtgccatgggcaacgccggtcaagtaaactatgcttccgcgaaggccgggctggaaggtttcagcagggccttggcccgtgaagtcgggtcgcgtgcagtgaccgtgaactcggttgcaccaggtttcatcgacaccgacatgacgcgtgagctgccagaggctcagcgtgaatcactgattacccagatacccctgggccgtctggggcaggcagaagagattgcgcacgtagtcgcttttcttgcttccgaaggcgcaggttacgttaccggggctacaatcccggtcaacggcggcatgtacatgagc

SEQ ID NO: 33932 - DNA, 801 bp, Pseudomonas syringae
atgccactggttggtcattgggatacgtggaggcctaacccgacttatcaaggaactatcatgtcccaagtcaatatgcgcgatatgctgaaggccggtgtgcacttcggtcaccaaacccgttactggaacccgaaaatgggtaaatacattttcggcgcgcgtaacaagattcacatcatcaaccttgaaaaaaccctgcctatgttcaacgaagctctgactttcgttgagcgcctggcgtcgggcaaaaacaagattctgttcgtcggcaccaagcgctccgctggcaagatcgttgctgaagaagcagcacgttgcggttcgccgtacgtcgatcatcgctggttgggcggcatgctgaccaacttcaagaccatccgtcagtcgatcaaacgtctgcgcgagctggaagtacaagctgaagacggtactttcgccaagctgaccaagaaagaagccctgatgcgcacccgtgatctggaaaaactggatcgcagcctgggtggtatcaaggacatgggcggtctgccagacgcactgttcgttatcgacgttgatcacgagcgcatcgcgatcaccgaagccaacaagctgggcatcccggttatcggcgttgtcgataccaacagcagcccggaaggcgttgactacatcatcccgggcaacgatgacgcaatccgcgccatccagctgtacatgggctcgatggctgacgctgttatccgtggtcgtaacaatgttgctggcggcaccgacgtattcgtcgaagaagctccagctgcagctgctgtagaaggc

SEQ ID NO: 33933 - DNA, 705 bp, Pseudomonas syringae; identical to SEQ ID NO: 33847

SEQ ID NO: 33934 - DNA, 1287 bp, Pseudomonas syringae
atggctgacaaaaaagcgcagttgatcatcgagggcgctgcccccgtcgagctgccaatactgaccggtacagtgggtccggacgtgatcgacgtacgcggtctgaccgccaccggccgcttcacatttgaccctggcttcatgtccacggcctcttgcgagtcgaagatcacctacattgatggtgacaacggaattctgctgcaccgcggctacccgatcgaacaactggccgagcagtccgattacctcgagacctgctacctgttgctcaacggcgagctgccaaccgccgaacagaaagcccagttcgtggccgtggtcaagaaccacacgatggttcacgaacaactcaagaccttcttcaacggctttcgccgtgacgcccacccgatggccgtcatgtgcggtgtagtcggcgccctgtcggcgttctaccacgattcgctggacatcaataacccgcagcaccgcgaaatttcggctgtacgcctggtcgccaagatgccgaccctggcagcgatggtctacaagtactccatgggccaacccatgatgtacccgcgcaacgacctcagctacgccgaaaacttcctgcacatgatgttcaacacgccgtgcgagatcaaaccgatcagcccggtgctggccaaggcgatggacaagatcttcatccttcacgccgatcacgagcagaacgcgtcgacctctaccgtgcgcatggcgggctcctcgggtgccaacccgttcgcctgtatcgcagccggtatcgcggcactctggggcccggctcacggcggcgccaacgaagccgtgctgaccatgctcgatgaaatcggcgacgtgtcgaacatcgacacattcatagccaaagccaaggacaagaacgatccgttcaagctcatgggcttcggtcaccgggtctacaagaaccgtgaccctcgcgcgaccgtgatgaagcagacctgcgacgaagtactcaaggaactgggcatcaaaaacgatcctcagctcgagctggccatgcgtcttgaagagatcgccctgaccgacccgtacttcatcgagcgctcgctgtacccgaacgttgacttctactcgggcatcatcctcaaggctatcggcatcccgaccagcatgttcaccgtgatcttcgccctggcgcggaccgttggctggatctcgcactggaaagaaatgctctccagcccttacaagatcggtcgcccgcgccagctctacaccggcaacgtgcaacgcgacattattgcactgaaagaccgcaag

SEQ ID NO: 33935 - DNA, 567 bp, Pseudomonas syringae
atgcgttacgcgctcgatcataaggcccaaacccaccagcgcatcgtcaaggaagcgtccatgcgctttcgtcgcgacggcattggtgctacgggcttgcaaccattgatgaaagcactcggcttgacccatggcggtttctacgcgcatttcaaatccaaggatgatcttgtcgaacaggcattgagtcacgctctcgacaatgtaaaaggaatcacaagcgaagttttcgccagacaggactcgctcagtgaattcatcgatctctatctctcgactaccagccgcgatgcgcaggacggcggatgtccgctgcctaccatgtgcctggaacttggacagcgcgaccaacccagcgagacgacggataaaatcgtccttcacttgctggaactgtttgagaactccctcgcggggaccggtcttgagcccagaagcgtaccgatcctgtcggcactggtaggcgggctggtacttgcccgcagtgctgcggacgacaagttgtcggagcgtatcctgaatacgacccgcgactacctcaagcaggagataaaaaagagcactaac

SEQ ID NO: 33936 - DNA, 390 bp, Pseudomonas syringae
atgagtatgcaggacccgttagcggacatgctaactcgtatccgtaatgcccagatggctgaaaagcccgtcgtcagcatgccatcttccacgttgaaggttgctgtagcaaaagtcctgaaggacgaaggctacattgcgggttatcagatcagcagcgaagttaaatcctcgctgtccatcgagcttaagtacttcgaaggccgtccggtcatcgaagaggttaagcgcgtcagccgcccaggcttgcgtcagtacaagtcctccgatgatctgccgaaagttcgtggcggtcttggtgtgtctatcgtctccaccagtaaaggtgtgatgacggatcgtgctgcgcgcgctgccggtgtcggtggcgaagtgctttgcactgtgttc

SEQ ID NO: 33937 - DNA, 285 bp, Pseudomonas syringae
atggcgcttgaacgctccgacgtggaaaagatcgctcatctggcccgacttggccttaatgacgccgatattccgcgtactaccgaagcccttaacagcatcctcgggctggtcgatcagatgcaggccgtcgacaccaccggcatcgaaccactggctcatccgctggaagcgacccagcgcctgcgcgaagatgcggtaaccgagcgaaatcgacgcgacacttaccaagccatcgcaccagcggtccaagacggactttatctggttccgaaagtcatcgag

SEQ ID NO: 33938 - DNA, 483 bp, Pseudomonas syringae
gcggcctcttgcaacacaccaatcccttgcgtacaatcgcgcaccctaactttcctgggcagcacctgccttacgcaatgcaaacgggccgttccagccccatgcagccatgccagccaatactcttcttataaagagctgggtgagcaggattttcggagaaataccatgtacgcagtaattgttaccggtggcaagcagtacaaagtcgccccaggtgaatacctgaaaattgaaaaactggaaatcgctactggcgaatccgtcactttcgaccgcgttctgctggttggcaatggcgacgacgtcaacatcggtgctccagttgttgctggcgctaccgttgtagctgaagtgatctcgcaaggtcgccacgacaaggttcgtatcatcaagttccgtcgtcgtaagcaccacatgaagcgcatgggccaccgccagtggtacaccgagatcaaaattacaggtattcaggcttaattc

SEQ ID NO: 33939 - DNA, 366 bp, Pseudomonas syringae
atgaatcccaaggctgaagcatcagactctcgctttgatttgctgaaatggctcctggtagtcattttggtagtcgtgggtgttgtcggtaatcagtattactctgctgagccgatcctgtaccgtgttctcgctctccttgtgattgccgcagcagctgcatttgtagcgctgcagactggcaagggcaaagctttcttcgttttggcgaaagaagcgcgtgcagagatccgtaaagtcgtttggcctactcgccaagaaaccacgcaaaccacgttgatagttgtggctgttgtgctggttatggcgttgctgttgtgggggcttgattccctgctcggctggcttgtttcctcgatagttggc

SEQ ID NO: 33940 - DNA, 975 bp, Pseudomonas syringae; identical to SEQ ID NO: 33042

SEQ ID NO: 33941 - DNA, 975 bp, Pseudomonas syringae; identical to SEQ ID NO: 33042

SEQ ID NO: 33942 - DNA, 738 bp, Pseudomonas syringae
atgcgtttgcatcagattttcgctgccgccgctgtcatgctggccagcacattcagtatgtttgccgttgcagatgctgcccccgatcaggccattcgcaagacactggattcgctccagctggagctgccggtcgagagcatttcgccgagcccgctcaatggcctttacgaggtcaaactcaagggcggtcgcgtgctgtacgccagcgccgacggtcagttcgtggtgcagggttatctgtttcaggtgcagaacggcaagccggtcaacctgaccgaaaagaccgagcgtctggccatttccaagaccatcaatgccattccgctttccgacatggtcgtctacccggcggtgggcgagaccaaatcgcacattacggtgttcaccgacaccacctgcccgtactgccacaagctgcatgaagaagtcgggcagttgaacaaaatgggcgttgaagtccgttacatggccttcccgcgccagggtctgggttctccgggtgacgaacagttgcaggccgtctggtgttccaaggaccgtaaaagcgccatggatcgcatggtcgatggcaaggacatcaaagctgccaagtgcgacaatccggtgagcaagcagtatgaaatcggtcagtcgatcggcgtcaacggcacccctgcgattgtcctcgccgacggtcaggtgattccgggttatcagcctgctgctcaggttgccaaactggcaatgggcgccaag

SEQ ID NO: 33943 - DNA, 543 bp, Pseudomonas syringae
atgagcagcctgtccgtttatcacgtttcaagcccggatattcccaacaaggtgctgacccacctggaagacatcgcctcgacgctggccgaacacggcgtggcgtttgaccgctgggaagccgcgacgccgatcacccccggcgccagtcaggaagaggtgatcaacgcctaccgcacccagatcgacacgctgatgacccggcacggctacgtcaccgtggacgtcatcagcctcaacagcgatcacccgcagaaagccgaactgcgtgccaggtttcttgaagaacaccgccacggcgaagacgaagtgcgctttttcgtcgccgggcgcggtttgttcacgctgcacatcgacgattacgtgtatgccgtgctgtgcgaaaaaaacgacctgatttccgtacccgccggtactcggcactggttcgacatgggcgaaaacccgcattttgtcgctattcgcctgttcaacaaccctgacggctgggtcgcaaactttaccggtgaagacattgccggccgtttcccgcggctggaagac

SEQ ID NO: 33944 - DNA, 405 bp, Pseudomonas syringae
atggcacaaaagatggaagaggacgacaaggttcgtctggataaatggctgtgggccgcccgctttttcaaaacgcgtgcgctggccaaagccgctatcgaaagcggcaaggtgcactgtcgcggcgaacgttgcaagcccggcaaggagcctcgccttggcgatgagtttcagattcgcatgggcttcgatgaacgcacagtggtcgtcgaggcgctgtccattgttcgccgtggcgcgccgcaagcgcagacgctctatcgcgagaccccggaaagcatcgccaaacgtgaaaatgcagctcttcagcgcaaggccggcaacctgggtgtgaccaccgatggcaagccgaccaagaagcagcgtcgccagcttttcgatttccgcggcgctcgcgacagcgaa

SEQ ID NO: 33945 - DNA, 216 bp, Pseudomonas syringae
atgtcgaaagaagacagcttcgaaatggaaggcactgtcgccgacaccctgcccaacaccatgtttcgtgtggagttggaaaacgggcacgtcgtaaccgcgcatatatccggcaagatgcgcaagaattacatccgtattctgaccggcgacaaggtgcgtgtagaactcacgccctatgacctgagcaaagggcgcatcacctaccgcgctcgt

SEQ ID NO: 33946 - DNA, 459 bp, Pseudomonas syringae
gtgatcggcgtcgacaattccatgccctggcatctgccgggggatttcaagtatttcaaggccacgaccctcggcaagccgatcatcatgggtcgcaagacctgggactcgctgggccgcccactgcccggccgtctcaatctggtggtcagccgccagacggacctgcaacttgagggtgcggaggtcttcccgtcactggacgccgccgtggtacgcgccgagcaatgggcgcaagaacagggcgtcgatgaggtgatgctgattggcggtgcgcagctttatgcgcagggtctggcgcaggcggatcgtctgtacctgactcgcgtagcgttgagccctgaaggcgacgcatggtttccggaattcgatacggcgcagtgggcgttggtgtccaatgccgagaacgctgccgttgatgaaaagcctgcttacagcttcgaagtctgggagcgcgtc

SEQ ID NO: 33947 - DNA, 183 bp, Pseudomonas syringae
gtaaagtggttcaacacatccaaaggcttcggctttatctcccgggattcgggcgacgatatttttgtgcattttcgagccattcgcggtgaaggtcaccgcgtgctggtcgagggccaacgcgtcgagttctctgtcatgaaccgcgacaagggcctgcaggctgaagatgtcatcgctgcc

SEQ ID NO: 33948 - DNA, 975 bp, Pseudomonas syringae; identical to SEQ ID NO: 33042

SEQ ID NO: 33949 - DNA, 1377 bp, Pseudomonas syringae
gtggatgcttcagagaaaatcctcaacgcccgcgcctggctaaactcagaaccaaaagtgatcggactgcgcgatgagggtctttggtcggacttgcatgaccggattatcgaaggggcgtcttacttccgtactgcggagcactctgcccaacaacccaaagccaagctcaagtcctacgagactcagttccgttcaggtcacatcaatctgttgagctgctcgaccaccatggagatgggtatcgacatcagcggtatcacggccgtcgcgatgaacaacgtaccgccccagacggcaaactacttgcagcgggcaggccgggcgggacgacgcggggaaggacgcgcggttgcgttaaccatttgccgcaagacaccccacgaccagcacgtgttcgccaagccccggtggccgttcgatacaaacatgatcattccggccgtctcactgcgaagcccagatctggtcgcgcgccacgtcaactcctaccttttgtcttactggctcaagacagtattggggcgagaggagctcaaaagcatgactataggccccttctgcatcgaggaargtggcgattccctggcgggtcgattcgaagcttggtgcacgaataccgcgggcattttgccggctgtcatcaaagggattgagaagctggttcaccgcagcccgctcgtggacatgaactctgaaacgctaactcgccacaccgcagccgcaatgcgagatgtcgcgcagagctggagggaggattacaacaacgccagtcaggagctcggctacttcaaaggctgctcagaaaagaagagcgcggcattgcgtgcgctgaatgctcagctggagcggatcaccggtgagtacctgttgagtgagctggcaactcgccggttcctgccaggttacggttttcccacagacatcgtcagctttaacaacatcatcagacagcccccggacaaagcgcgagaatactcgcgcgaagataaccgcgggcgctacctagatctcgcgacacgagaccgtgtaaccgggctgagagaatatgcacctggcgccgaagttgtcatggacggttgggtttatgagtcgcggggtatctcactcaattggaggcttcccgcgtccgaagaaatcctgcgtgaagcgcagcttttcaagtatgcgtggcgttgctcccattgcggcgcaagcgggagtacctttgcgcaacaaccgggcgactgcgggcagtgtggaagtcccttggacgagcaggaagatgttctgcgctatctggtgccttcagggttcgcggtggacttctacggtaaggatccgcacacagatatcagtaagcctacctatatccccgtccagcgcccttggctacgg

SEQ ID NO: 33950 - DNA, 957 bp, Pseudomonas syringae
atgcaatcagccaagccgttatttgactatcccaagtactgggccgaatgtttcgggcctgcacctttcctgcccatgagccgggaagaaatggatctgcttggctgggattcctgcgacatcatcattgtcactggtgatgcgtatgtggatcacccgtctttcggcatggcgatcatcggccgtctgcttgaatcccagggctttcgggtcgggatcatcgcgcagcccaactggcagtccaaagacgacttcatgaagctcggcgagccgaacctgtttttcggtgtcgctgccggcaacatggactcgatgatcaaccgctacaccgccgacaagaaaatccgttccgacgacgcctacacgcccggcggcatggccggcaagcgtccggaccgcgcgagtctggtctacagccagcgctgcaaggaagcctacaagcacgtgcctatcgtgctcggcggcatcgaagcctcgctgcgccgcattgcgcactatgactactggcaggacaaggttcgcaactcgatcctgatcgacgcctgcgccgacatcctgctctacggcaacgccgagcgggctattgtcgaagtcgcccagcgtctgtcgtatggccacaagatcgaagacatcaccgatgtgcgtggcaccgcgttcatccgtcgcgacacgccgcaaggctggtacgaagtcgactcgacacgtatcgaccgtccgggcaaggtcgacaagatcatcaacccgtacgtcaacacccaggacacccaggcctgcgccatcgagcaggaaaaaggcaacgtcgaggaccccaacgaagccaaggttgtgcagattcttgccagcccgcgcatgacccgtgacaaaacggtcatccgtctgccatcggtggaaaaggttcgcaacgacgccgtgctgtatgcccacgccaaccgcgtgttgcacctggaaaccaacccg

SEQ ID NO: 33951 - DNA, 951 bp, Pseudomonas syringae
atgcctatgaacccgaattttcttgatttcgaacagcctatcgctgacttgcaggccaaaatcgaagaactgcgcttggtgggcaatgacaactcgctgaacatcggcgacgagatctcccggctgcaagacaagagcaagacgcttaccgaaagcattttcggcaacctgaccagttggcagatcgcgcgcatggcgcgtcatccgcgtcgtccgtacacgctggactacatcgaaaacatctttaccgagttcgatgagttgcacggcgaccgtcacttctccgatgacgctgccatcgtcggcggcattgcccgtctggataaccagccggtgatgatcatcggccaccagaaaggccgtgaagtacgcgaaaaggttcgccgcaatttcggcatgccgcgccctgaaggctaccgcaaggcctgccgtctgatggagatggcagagcgcttcaagatgccgatcctgacgttcatcgacaccccgggcgcttatccgggtatcgacgcggaagagcgcaaccagagcgaggcgatcgcctggaacctgcgcgtcatggcgcgactgaaaaccccgatcatcgccaccgttatcggtgagggcggttccggtggtgcgttggccattggcgtctgcgaccagttgaacatgctgcagtactcgacttacgccgtgatctcccctgaaggctgcgcgtcgattctgtggaaaaccgccgaaaaggcacccgatgctgctgaagccatgggcatcacggcggaccgcctgaaaggcctgggcattgtcgacaaggtcatcgccgagccactgggcggtgcgcatcgcgacccggttgccgccgctgcgttgattcgtgaagaactgagcagtcaactggcgatgctcaaggcatttgataacgacgcgctgctggcccgccgttatgatcgcctgatgagctacgggctc

SEQ ID NO: 33952 - DNA, 909 bp, Pseudomonas syringae
atggcgggtaggtggccacaggctattggcttttccggcagtggtattaggacgaaaagtaaccgctttttgactgtcgtgcaccgaccggcaggagtggtttcagacttgcatggcgaaaggcttgaagcatcgaagtgcaggttgaacgcgatgagcatctttttcgataccaacaatattgcagcgcgagaacgagcagagttctggcaagaggtggtgtgcaatacttttgtaccgctgagctgcgccttttcggatcggaataacttccagggccggctgcgctcgcacagcatcgctacgctgtcattggtggacgtgcaggcttgcaggcaaaccgttgttcgcgatgccgcgcgaatttctcgcagcgacgatgaatttgtactggtgagtctggcgcttgaaggcagggcgcaggtttcccaagaggggcgcgaggcagtattggaggtcggcgactttgctatctatgacactcgtcgcccctaccggctgcacttcgacagtgcattcaggcagaccgtggtgcaaatcccgcgcaagagtctgcaacagcgcctgtgcaatcttgagtacctgacggcgttatcaatgtctcgcgataacccgctcaatggattggtgttcgactttttcaccggccttgccgccctcgagaatcgagtgggtgaaacacagcaagttcggataactgagcaagggctggacctgctggcaatggcgctgtccgagcgggtcaaaggacagacacagcgcagcgcccttctgctgggcatcaaagaccacattcagtccaacctgacagatacaacgcttaacctcccctgtgtcagcgcccggttcggaataagcactcgctacctcaacagcctttttcatgacgaggagacatcgttcggtcgg

SEQ ID NO: 33953 - DNA, 975 bp, Pseudomonas syringae; identical to SEQ ID NO: 33042

SEQ ID NO: 33954 - DNA, 402 bp, Pseudomonas syringae
tataatcaggactcctttggccgtaccgcttttgatactcaccccgacggcagtcgtcacacgctgggctggaacggccttggccaactgctggaagagcgcctgcccgatggtggccagcgtaaataccgttacgacgccctgggtcggcagatcacccgtcaggaagaaaccggcgccatcacccattatcagtgggacgcagccaaccgcctggcgcagatcaccctgcccggcggcgccacgcgtgctttctcctacaacgcctacggcaaagtcaccgccgagcgcgacgaactgggccgcatcacccgctacgaatacgccgacaacctgcatctggtcagccgccgcatcaacccggacggcagccagctgcgttatcgctacgacgtaagcgat

SEQ ID NO: 33955 - DNA, 489 bp, Pseudomonas syringae
atgcgactgactactaaaggccgatacgctgtgacagccatgcttgacctggcgttacatgcgcagaacgggccagtgtctctggccgacatctccgagcggcagggcatttccctgtcttatctcgaacagttgttcgccaaactgcgtcgcggcaatctggtttccagtgttcgtggtccgggcggcggttatcagctgtctcgtgacatgaaaggcatccaggtcgcccaagtcgtcgacgcggtcaatgaatcggtcgatgccacgcgttgtcaggggctgggtgattgccacgctggcgatacctgcctgacccaccacttgtggtgcgatctgagccagcagattcacgaatttctaagcggtatcagcttggcggatcttgtcactcgccgtgaggtacaagaagtcgctcagcgccaggatatgcgccgtggtcataaccacacgtcgcaactgggtaagatcgaaacgtccgccgtcgaa

SEQ ID NO: 33956 - DNA, 3063 bp, Pseudomonas syringae
ctggctaacggcgcgttgctgttgacggccgacaacctgaacaatcaaggcgctggtgcggtttccggtcagcaggaagtgcaactcacccttgggcaactgaccaacatcggcagcggcagtgtctacgccaaaaacaccttgggcctgacggtcagcggtgcactgaacaacaatcagggcgtggtgcgcagcgatggcacgcttgatgtgagcggcgcttctctggccaacacggcgggtagcatcaccagtaccggtgtttcggtcctgaaagtcgatggcgctgtggtgaaccgtggcgggcagatactcagtgattcaaccctgtcgctcagcagtgccagcgtggacaacagccagaacggccgtatcgccggcaagggtgtgacgcttgccaccggcgcgttcgacaatcagcaaggcggtcgcctgaccagtaccggcaccctgaagatcgatgcagggcaggtcaacaacagtgacgccgggcgaattgccagcgccatggccctgaccgccgtggtcacaggccttgatcagagtaacgatggccgactgtatggcaacggtgacgtcagcctcgacctgagcaagggcgtgctgaacaaccagggcggtctgattacggcgcccggtcaattgctgctgaaaaacctcacgtcggtcaacaaccagaacggggaaatttccagcgccaagggtttcacactggccgcgacgtcgctggacaacactgcgggttcggtgctgagcgacagcgcactgatcgtgcgtgtcgaccagttgctgaccaacctgcgtggcttggtgtctggcaacggtatcgatctgacagccaatgagctgaataaccaaagcggcagcgtgagcagcgatgctgatctgctgctgaccatcgccggcacactttccaaccagaagggcgagctgaccagcgccggtaacaccaccctcaacgcgctgagcctggccaatgccaacggccaggtcatggctgaccggtttctgaaactggttattactgacgccatcgacaatcaggccggcaccctgggcgcaggcaagggggccgacattcgagcggtgagtctggacaaccggcaagccggtgcactggtcactgatggtcaactggacctcacgctgaccgacgccctggacaatcgcgccagtggcagcctgcaagccaagggcctgatgaacctgaccagccagacgctggataaccgtggcgggcgtatcactgcgcagaacatgctgatggtgcgcagtgccagcgtggacaaccgtggcggtgcgattcgcgccgagaaaggcctgcagctgttcgtcgatgcactcgacaacagccagagcggcctgagcaccgctcaaaagggtctgatcaacagtaacgcgggtcttgagctggtaggcacgcgtctggataaccagaacggtctgctcaacgccgccggcctgatgcaattgcaggccgacagcgtgctcaacggcagcggccgtatcgccagccaggctgacctggtcgcccacattggcggtctgacccagcaaggtggcgaactggttgcgcagggcaacctgaccctgaccggcaacatcctcgacaaccagtcgggtggcctggtgggctccacaaaagcgctgaaaatcgatgtggccgacatcgacaacaaggccggtgaactgtccagccagatcggcgtggagatcatcgcccagacgctcgacaccagtaatggcggcaaagtgctggcgggcaccgcgctggggcttaccgtggcgcgcttgatcaacctgaacaaggggttgttgttcggtaacaccttgcgccttgaagggactcgcctggataacgcaggcggtacgctggccagccaacaggacctgaacatcggcctgtcgggtgcgctggacaacacgggcggcctgctcagcagcgaatcggccatgaccgtcagcgcggcgtccctgcaaaacgctgcgggcagcctgtccagtgccgatgccttgagcgtcaccaccaccggtgctttgagcaatcaggcaggttcgatcaccaccgatgcggcgctcacgctgaccagcgcaagtctggacaacagcaaagcgggcaaactgtccggcaagggcgctacgcaggtcaccaccggcacgtttgacaacagtcagaacggtcgcctgaccagcagcgacaccctgcgattgacggcaggcaaggtcatcaaccagagcgccgggcgcattgccagtgcgctggccttgaccgccagtgtgaccagcctcgatcagcaggctggcgaattgttcagcaacacgtcgctgagcctggacctgaacaacggccagttgaacaatcagggcggtttgatcaacgcctctggcgtactgttgctaaagaatctcaacggcattgccaaccagaacggcgaaatctccagcgcacaggcgttcagcctgaacgccagcagcttcgacaacagcggcggcaagctgctcagcagtcaggccctgacgctggtggtgaacaaggccctgagcaacctcaaaggtaatatttccggcgcgtcgctgaacatcaacagcgacagtctggacaacacccaaggcatgatcagcagccgcgcaggcctggacgtgacggtaaacaccgccttgaccaacgcccaaggcacgctgattggcgacggcaatgtgaatctgagcgccgcaacggcagacaaccgccaggggcaaatggcgagcaagcaaaacctcgacgcgcagatcggcaaccttcagcaacagaacggccagatgcttgcccaaggcacattgaccttgcgcggcgacacgctggacaaccgtcagaacggtttcatcggcgccacccaagccctcgccatcaatgtcaccaacatcgacaaccgcggcggtgaactgtccagccaggacacgatgaccctgaccggccagcaactgaacaacagcgacaaaggccaggtgctggcgcaaaaagccctgactctgaacattgcgcagaccactaaccgtgctaacggcttgctctcaagccaggcg

SEQ ID NO: 33957 - DNA, 384 bp, Pseudomonas syringae
ttggacaagaacatgaaaatcctcatcgttgatgacttctcaacgatgcggcggatcatcaagaatctgttgcgtgatctggggtttaccaacacatctgaagcggatgacggtctgaccgcattgccgatgctgcagagcggtgcctttgactttctggtgacggactggaacatgcctggcatgaccggtatcgacttgttgcgtcaggtccgtgcggacgatcgtctcaaaagccttcctgtactgatggttactgccgaagccaagcgtgagcagatcattgaagctgcccaggccggggtgaacggttatgtagtcaagccattcacggctcaagcgctgaaagagaagatcgaaaagatctttgaacgcgtcaatagc

SEQ ID NO: 33958 - DNA, 357 bp, Pseudomonas syringae
ttggtctatatttggtcttgtgatttccagtttaggccaaatcgtgccgaaagcagcggagagttaggcacgattttctcggtgccactacgaaggagatatcaactcatgcgagttgaaacaataagctatttgaaacgcaatgcagccgatctgcctctcgatgagccactgattgtcacgcaaaacggtgtcccggcctacgtggtggagtcttacgcagatcgtaagcgtcgcgatgagtccattgccttggtgaagctcttggcaatcagttcccgcgagtactcccaaggcaagcactgttctgctgacgaacttaaagcccgattgagcaggaggtttgcccacaaagaa

SEQ ID NO: 33959 - DNA, 600 bp, Pseudomonas syringae
atgcaattaaatgtaaatgacgctcaggcaatcgaagtttccgaactgacatttggcggcgaattcaacgagacgctggttcaccaggcagtcgtggcctacatggctggcggtcgtcagggtagcaagcagcaaaagacccgttccgacgttcgtggtggcggtaagcgcccttggcgtcagaaaggtactggccgtgctcgtgccggtactatccgtagcccaatctggcgcggcggcggtaccactttcgcagctcgtcctcaggatcacactcagaagctcaacaagaagatgtatcgcgcagctttgcgctccatccttgctgaactggttcgtactgatcgtctggtcgtggttcaggatttcgctgttgaagcaccgaaaaccaaagatttgctgaacaagctgactggcatgggcctgactgacgtcttgatcgtgtctgacgctgttgaccagaatctgtacctggctgctcgtaacctgccgcacgtcgatgtacgtgatgttcaaggttccgatccagttagtctgatcgcatacgacaaggtgttgatcaccgtgtcggccgtgaagaaattcgaggagctgctggga

SEQ ID NO: 33960 - DNA, 912 bp, Pseudomonas syringae
atgcagctaagccgcacgaatttggcagacattgtttatttcctagccatcgctcggcatcaaagcttcagaaaggcaggtctggaggtgggaatcagtgcctcagcgctcagtcatgccatgaaaggacttgagacgcggcttggcgttcggctgctcaatcgcaccacccgaagcgttactctgacagccgctgacgaggagttgcagggcctcatcagcgctccggtcaatgacataggccaagcgctggagaccctcaaccggctacgcgatgagcccgccgggcgtatccgcctgaacgtcttgagcgacggcgcaaaactactgctgggccccgttctccctgtttttattgatcgctatccggacatcgaggttgacctcaccgtgaccaataaaatggtcgatattatcggcgacggtcatgatgcaggcattcgctttggtgggacggttcccgaagacatgatagctcaacgactttctcccgatgtagcctgggcagtcgttggcgcgccggcttaccttgagcgattcggcacgcctaaacatccagaagatctgcaccaacatcgttgtttacgcgtgcgcctgggtaatgcgcacatctaccattggcaattctcgaaagacggtcaacggatggagattgacgctcccggagccatcacgatcgatgaagcacgcgttggtgtcgcgatggcgatgcgcggcgctggattgatgtacgttctcgcctctgtagttgagcgacagattacggaaggctcactgcagcgagtgcttgaagactggactcactacgacccggggtttcacatctattattcaagcttcagacaggttcctgtaggcctgcgcctgctcattgacctcatccgcgaacttgaacctctagggccacttcca

SEQ ID NO: 33961 - DNA, 714 bp, Pseudomonas syringae
atggcccagtcggaaaccgttgaacgcattcttgatgctgccgagcagttgttcgcagagaaaggtttcgctgaaacatccttgcgtcttatcaccagcaaggcctcggtcaatctggctgcggtgaactatcacttcggctcgaagaaagcgcttattcaggcggtgttttcgcgtttcctcggcccgttctgcatcagtctcgagcgtgagctggagcgccgccagggtaaacccgagcacaagcccagccttgaagagctgctggaaatcctcgttgaacaagcgctcgtcgtgcagccgcgcagcggtaatgacctgtcgattttcatgcgtctgctcggtcttgccttcagccagagccagggccatttgcgccgctaccttgaagacatgtacggcaaggtgttccgccgctacatgacgctggtcaatgaagcggctccgcgtatcccgcccattgagctgttctggcgcgtgcacttcatgctgggggccgctgcattcagcatgtcgggcatcaaggcgttgcgtgccattgccgagaccgatttcggcgttaacacctccatcgagcaggttatgcgtctgatggtgccgtttctggccgccggcatgcgcgccgacacgggtgtcagcgaccccgcaatgattgctgcccagctcaggccgcgtaccaagagcggcaccagcacgcctgcggtcgccaaagcc

SEQ ID NO: 33962 - DNA, 474 bp, Pseudomonas syringae
atgaccttgaagaccatcgaaggtaccttcatcgccccccaaggccgctacgccttggtggttggccgtttcaacagcttcgtcgtggaaagcctggttagcggtgccgttgatgcgctggtacgccacggcgtgagcgaaagcgatatcaccatcatccgtgcgccgggtgcgttcgagattccactggtcgtgcagaaagttgctcaacgcagcgagttcgcggccatcgttgcactgggtgcagtgatccgtggcggtactccgcacttcgaatacgtggcaggcgagtgcgtcaaaggcttgtcccaggtttccatggaattcggcgttccggtcgctttcggcgtattgactgtcgattccatcgagcaggccatcgagcgctccggcaccaaggccggcaacaagggcgctgaagctgccctgtccgccatcgaaatggtcagcctgctgtcgcagttggaggccaag

SEQ ID NO: 33963 - DNA, 975 bp, Pseudomonas syringae; identical to SEQ ID NO: 33042

SEQ ID NO: 33964 - DNA, 561 bp, Pseudomonas syringae
atgcctatcatcaacagccaggtaaaaccgttcaaggctaccgctttcaagaacggctctttcgttgacgtttcggacgccgacttcaaaggcaagtggtctgtcgtattcttctacccggccgacttcaccttcgtatgcccgaccgaactggaagatctggctgacaactacgacaccttccagaagctgggcgtagaaatctacagcgtttcgactgacacccacttcgctcacgctgcatggcacaacacttcgccagcaatcggcaagattcagtacaccatgatcggtgacccgaccctggctatctcgcgcaacttcgacgtgctgatcgaagaagccggtctggcggatcgcggtacgttcgtgatcaacccggaaggtcagatcaaaatcgttgaactgaacgacggcggcgttggccgtgacgcttccgagctgctgcgcaagatcaaggccgctcagtacgttgctgctcacccgggcgaagtctgccctgccaagtggaaagaaggcgaggccactctggcgccgtctctggacctggtcggcaagatc

SEQ ID NO: 33965 - DNA, 2589 bp, Pseudomonas syringae
atggtaggtgtggttggtggatcgcttacgatccaccgggtatactactctcttgatttgggagctccgatgatttctctgcctatcgacctcgttttgccagacctgcgagaggcgctggtcaaccgcaatgaagtgatccttgaagcgcctccaggtgcgggcaagaccactcgagtacctctggcgctgctgaacgaatcttggcttggcgaccagaagatcttgatgctcgaacctcggcgactggccgctcgggccgctgctgaacgcttggcgagtgaattgggagagaaggttggggaaattgtcggctaccgcattcgccttgaaagcaaggtagggccgcgcactaagattgaagtggtcacggaaggtatcctggctcgccggctccaagatgatcctgcgctggatggtgttggcgtggtcatcttcgacgagtatcacctgcgcaacctgcactctgaccttgcactggctctttgcctgagtggccgtgacctgctacgtgatgacccaccactgaaactgctcctgatgtccgcaacgctggagggagctcgtctttctaaggttttgaacaatgctcctgtgatcaccagtgaaggccggatgtatccggtctccacgatctggggcagcccgtatcaaccgggtgagcgtatcgatgcgcgagttacggacacctgcttagccgccatcaatgagcagcagggaagcatcctggttttccttcctgggcaggcagagattcgtcgagtagccgattttctcgaagagcaactcagcaaccgttcagacgtgaccgtatgcccgctgtatggagaccttgatctcaatgcccagcgcgccgcgataaatccggcaccaactggctcgcggaagatcgttctggccacaaacattgctgagaccagtttgaccatcgaaggcgtaagagtggtcgtggacagcggccttgagcgagtaccaaaattcgatcctcgcagtggtatgactcgcctcgacactcagcgcatctcgaaggccagcgctactcagcgtatggggcgagcagggcgcttggagccaggtgtgtgctatcgcctatggtcggaaacgcaacacgagcaaatagccggctacagcacccctgaaatcctgcaggcggatctctcagccttggcacttcagttggcccgatggggaatgaagccagaggaaatgacttggctcgaccaacctccgtcagctcccttcgcccaggccagagacctgctgaagcgcctaggcgcactcgatgctgctggccagctcacatcgcacggatccgccatgagcgagcttccagcgcatccacggatcgctcaccttctcatcaagggcaatgcgatggggctggatgaccttgcgtgcaacattgccgcgttgctgggtgagaaagatatcctgcgcggtgcaggcgccgatcttcacactaggctgagtgccttgtcaggcgagcattactcacgtcgaggtggtggttccttccagcgggtaaaacagtctgctcggcagtatcgatccctgctgcgtgggagggccgccagccctgttagtgagcccgatcacctaaggtgggtagggtgcctactggcattcgcttaccctgatcgaatcggtctccagaggcgtgcgaatgcctctgactaccgtctctccaacgggcgggctgctgtgttctcagagcctgatgctctcactaaacatgagtggctagtagtggccgatctgggtagccggcaagggcagcgcgaggagcgggtctaccttgcgagcgatctcgatcctgctttgttcgatggcgagctggctgaccttgtagggtcagtcgatgaggttgactgggacgagagggagggggtactcaaggctgagcggcagctaaaggtggggcagttggtactgtccgcaacacctttgccaagccttgatgagcaagctcgttcgctagccttggtcaatctggtgaggcgcaaaggcatcgaacttctgccttggaaccctgagttgcgccagtggcaagcgcgggttgatatgctgcgtcagctggatatccaaaatggccaagcagaaagcaagtggcctgatctcagcgataccagccttctagaaacgctggaaaagtggctcgcaccgtacttgggcaaagtcacgaggctcagccacttcagccacctggatctgtcatcgattgtcataaatcttctgtcttggccgcttccacaggagttggagactcaggcacctctgaccatccaggtgccgtctgggtcgaatatccgaatcgactattcgcagcatcctccgatcttggctgtgaggctgcaggagctttttggtctgtcagatacacctcggattgcccaaggtaaacagctcctgacgttgcatcttttgtcgccggcgcggaggcctgtacaggtcacccaagatctagccaatttctggcgcagcacctacgtggaagtgaagaaggatcttaaaggcagatacccaagacactactggcccgaagatccattagtggctgaggcgacggccaacgccaagccccgaaagtcc

SEQ ID NO: 33966 - DNA, 419 bp, Pseudomonas syringae; identical to SEQ ID NO: 33860

SEQ ID NO: 33967 - DNA, 4167 bp, Pseudomonas syringae
atgaagattgaaacagcccctcgcacatccgaatacccggtctggttggcagtgccgcctgacgatcgtgaaaaagcacgtctgtctgctggacgactcagtgacggtcgtgcggctattgcctggaacaaagaagaaaagctttggtttgccagacctggatgtgaccttgatcgcatcaccgcctggttgcctgatccaagccgccgtgccggtggtggtgacgccgaatcagagtttctagatgtactgactcaagccggcctggtggtcaaaggcatgccggtgatggacggtagtcggcagcgtgtcgcgacggtcgatgacaagcacggcaagaaaagcggcgtctattgtggctttctggatcgtcgccctgcaggctggttcatcaactaccaccgtgccgattcgcccaaggatgtaaccaactgggcggcgactggcggtgaatctgatccgatcacccgcctgcacattcgggccggggccaagcaagcccaggaagacgccgctcgtgatcgcgctgttacctacgccaagcagacgttggctgccaagagactttacgaccggctgcccgccgcagaccctgcgcacccctacctggtgcggaagggaatacccccgacgcccgacattcgtcaaacacgaaacggtgccctggtggtgccgttttttaatgcctcgggaacgttcaagacgctgcagtacatcccacccgagggtgagaagttcctcttcaaggatgcccccaaacaagagcatttcctggtggtgggcggctcgctcgatccggtcaaccccatcctgtatgccgagggctatgccactgcgcgcagcctgaacctggccaccggcctgccggtggtgatgaccattgacgccggcaacatggtggcggtggccaaggtgctgcatcagcagtatcccgacagtcggcacctgttcatggcggatttcgatcatgccaaggacgtgaacaaggggttgatcatggccaatgaggcggccatagcggtggggggccaggttctgtatccaacgttcaacgacgccgaaattgcccgtgggttcacggacttcaacgaccttcaccaatcacgaggactggacgcggtgcgcgaacagaccgctcccctgattcgaccgtatgaagaggtaactaccatgccgacagattcgaacactcagtctccggacaatactgcgcaaaaggtagcaactcccgcgcaagaaacgctggaactggatgcagcgcctgcagcttcaatacaggtcccggatcaatccgcaccgccgcagacccgtagtgctcaaccggttgcatctgaagcgtcatctgttgaaagccagtcgcccgaaactgcccaggtcactgaagcacctgttggcattgatgatgcgcaggtatccacccagccacctttggcgttgtcacctgctgagcaactggcgtcggtagaggccgatcctgacgcttccgcgatcgttgacgaacagcccaaagcgacaatgtctgtggcgacagaccgcaacacgccgtctgacgcgcctgaactcacccagcctacctcggcggaggtcgtgccagagcagtctaacgaaaccgctcaaccagatgcgcgctctgctcaacaacaggcaccgggagaggccgacccaggctcttctgccaacgtggatgatcagaagagggcggcaccacctgcggcgacagaccaagaaatgtcctctgacgcgcctgtactcaaccagccacctttggcggcggccgagccagagcagtcgaacgagactgctcaacaacaggcaccgggagaggccgacccaggctcttctgccaacttggatgatcagaagagggcggcaccacctgcggcgacagaccaagaaatgtcctctgacgcgcctgtactcaaccagccacctttggcggcggccgagccagagcagtcgaacgagactgctcaacaacaggcaccgggagaggccgacccaggctcttctgccaacgtggatgatcagaagagggcggcaccacctgcggcgacagaccaagaaatgtcctccgacgcgcctgtactcaaccggccacctttggcggcggccgagccagagcagtcgaacgagaccgctcaaccagctgcgcctcctgctaaacaacaggcgtcagtagaggctgatcctgacacttcccccgtcgctgaggatcaaccgataatcgcaccggcagggcctgctcaaaacgaagacaatgaaagcctttcagacgtggaggttccggtgtcaggggccctgccgcgtcgtttcaccacagcacgcaagaccggcccggcggtcgtaccggatgctatcttcgtaggggctccgataggtgccgacgagccacaactgcaagccagcaacatcgacaaagacgctctgttggcccgcatcagccgtgaggttcaaggtgacaattcggtgctctacaagctcgatgccgagcctgctttcgttgaccgtgggtcgcgcctggagatggtccaaggcgcaggtcaggaagatgagaaggtaatagctgcgttgctcacggcagcacagttctaccgggggcgcatcgaactgaccggcagtgacgaattcaaggcaaaagccatcgagctgattgctcagcaccagatcaatgtggagatgaagaaccctgcgcagcaaatgttgctggacgatgcccgtaacgcgttgaagcagccacctgtaacgcttgatgccattcatggtgataccccaccgccgtatggtggtccacagccgtcacaggcgaagccctcggcaccgcaacctcaacaagccgcgccggcaccggtgcattcgtctgcgcccgcgccggcgagtaccgcttaccagcctctggaggttgagggtctgcaacggcggccggctcaatctgccccacaggcacaggccccgcaagcgggcgttgcaccgcaacctcaacaagccgcgccggtacattcgtctgcgcccgcttcggcaagtactgcttatcagccgctggacgttgagggtctgcagcggccactggttcaacctgcaccaccggcacagccggacgcaccggtcatcaatccgccctcggcagctccagcatcggatcagcctgcaacgtcagcgaatcagcaggtgtcgcccgccatccatcagcctttccaggcggccaaggatggcgtgacaggcaagatcctcaaatttggccagaagccgtttcgttttgagccagacaagcccgagagcaccttcatcacactgcgtaccgtgaacggtgttcagactttttggggcaaggagctggcggggctgctgcgccaaacccgtgtgcagccaggcaagatggtgacgttgcagtggctgggcaatcatccggttaccgtcaaggtgccccgcaaaaacgagcagggcgtcaccgtgggttacgacgataaagacgttcatcgcaaccaatgggcccttaaggtagagggtaaccccgcagtgcgttctggccaggatgagggcgtcaaactcggcgcctatgacgccgggcgtttcgccgtggtgcaacaagcctggcttgcgcaactgggcgtggaggctcccttgcccacgccacccacggatggcctgtattggttgaccccaaacggtgaaggcagcgcaaaaacgggtgatgagctgtcagcccctcggccgccgatcgaccccaacaacacagcgggacaacccgtcatcagcagttggtcacgggatggccatctggacatgtacctggtgcgcggcgatggtccctatctgcaaggtgtggtgcgtcagggggatcagatgcagcatgtattggtgagtcttccaggccgtgacgatgggccttcgatggtgtttaacgccattacccccgagggactgctgccgatcggcacgggcaatggcatcaaccgctctggtggcgagccggtgtcgagagagcacattgccttcaagcttgaaggcgacagcgctgtgcgcattggcaagcttgatgcgcctggcgaggtgcccccgaccttgcacaacctattgggcttcgatcagcgctggaaagaggaaaacaccctcccaaagtcagctcccacagcggcaccgtcagtacagccgagcgatccacgtccggtg

SEQ ID NO: 33968 - DNA, 342 bp, Pseudomonas syringae
acggccgtgttgcgcacgaagcatgagtaagcaggcgggataagcggtaatgcgggttacaccgccgtggacaagtgtcaggaacatcaggattgtcaaattagctggccgatgcggtacgtccgagccgctaaaagcgtggtgagacaagttggatcgtggaggtgtccgcaaagtcgagcattcgttctgcgtgatcaagtgccagtttgcgtacacaaagttgcggctccgcggttgggctaaaaccaccgggcaacaggccgcgctatttacccagtctaatatttggatggtgcgaaagagctgcttaggatgggaaacctgcacctaaatacgaaa

SEQ ID NO: 33969 - DNA, 975 bp, Pseudomonas syringae; identical to SEQ ID NO: 33042

SEQ ID NO: 33970 - DNA, 312 bp, Pseudomonas syringae
atggctcgccaaaccgcacagaatgctcaggaaatcctgagggccgacttccaggtactggttgcagataccgagaaactgctggcacacaccgcctctctggcaggtgatcaggccgacgaactgcgtgcccagattcgtgaaagcctgttgcgtgccaaggaaacacttaaaaccaccgaagattcgctgcgcgagcgcggtgaagcggcggtggttgctacagaagactatgtccagaacaacccctggcagtccgtcggtatcgccgcaggtgtcggctttctgatcggtctgctggccacaaggcgc

SEQ ID NO: 33971 - DNA, 513 bp, Pseudomonas syringae
gtgaccggcctttacgccagggtcggcggtgtgctgctgattctgctggccgtggcaggtgcgctgtacggcgcataccggcacggcgtgagcgtgactgacagccagtggcaggcgaagtggtccgaacaggtcagcgcccagtcgcaggccgtggccacaaccaccgccgaatatcggaccgaagagcaacgccgccagaaagcggccaaccaggtggcaaacgatgcgagacaagaacagaccgctgcgcttactgatgctgctgtcgctgacgctgctggcggccggttgcgcatcgaagcaggaaagctggcagccacagcaggttgtgtgcccggcgataccggagcttccgagcgaggcaaggcagccacccgcgccgctatggtgctctccgacttgctcggccgggctgactcgcgagcgggagagctggcaaaggcttatgaccagtcccgagtagcagggctggcgtgtgagcgatcctaccaatccttgattacctctgag

SEQ ID NO: 33972 - DNA, 798 bp, Pseudomonas syringae
atgttgcgcatgtacgtcgtgcagcagtgtttcggtttctccgatgaaggttgcgaagatgccgtctacgacagccaggccatccgcggttttatgggtatcgacctgggtcgcgagtcggcaccggatgccaccaccttgctgcgttttcgccgcttgctggaaacccatcagctaacgcggctgctgtttgaaacgattaaccagcatctggccagccgggggctgctgctcaaggaaggcactatcgtcgacgctaccctgatcgccgcgccgccctcggtcaagaaccgagaaggcaagcgtgatcctgagatgcatcaggccaggaaaggcaatcaatggcacttcgggatgaaggcccacattggtgtagacgccacgtcggggctggtgcacagcgtagtagggacggccgctaacgtggcggatgtcacccaggttggccagttgctgcacggtgacgaaacctatgtttcgggtgacgctggatacaccggtgcggccaagcgaccggagcatgctgaacgggacgttatctggtcgattgcagcacggccaagcagttacaagcagcacggcgaaggcagcgtgctgtatcgggtcaagcgtaaaattgaatatgccaaggcgcaactgcgcgccaaggtcgagcaccccttccaggtaatcaaggtgcgcttcaatcatcgcaaggttcgctaccgtgggctggaaaagaatacagcgcagttgttcagtttgtttgggttggccaatctgatgctggccaagcggtatttgcaacaggcggcagga

SEQ ID NO: 33973 - DNA, 1206 bp, Pseudomonas syringae
tggcaacttgagcacctttcaaaactcgttgattttgcctataactacgtgccgttctaccacgctctctaccacgaagccggattcaggaccggtgatatagtcacgtggtctgattttgaaaagttgcccattgttgataaaaaaatgctggtggataatcgttctgcgttatgtgcgtccattggcttcgcacccgataaccatcatgtggccagaacatcgggttcgtcaggaatcaattttacgattgttcaagacgatacgagcgtggacacaagggtcgtactgaacttacgacaaacagaaatgatggttgggcacgcgctaagtccagacgattggcgatacggtatctatctcgcttcagagcgatttacctcactggcaggcggctatcccgtaatcactgtcggacaagactgtcctgcggtagacgtgtttgaacatattcagaaaatcaagccaaagatactctatgcatttccgagttatctgaagagacttcaagtctgtgcgggtgatttgaccgaatggggggtggagtgcatttgtacgaactcagaaccgagcactcaagaagagcggcaagtttttgcgcgccatttcggcgtgccggtgcttgatgaatactcgtcagaagaattttcgttgatcgccaccgaatgcaggtatggtcgataccatatagttgaagataacctgaaggcagaagtatgcaatattgacccggagggctggggcacgctggtgggaacgtcgttcgctaatacgtatatgccgtttatcagatattcgcaaggcgatatcgtaaagctggatgcccgtcaaattctgtgtgaatgcggaactcattttaggtacctcgacacatttcacgggcgtgctgatcaatttttagaatcaaagaataatggaaaaattccgccagacaaactgatggggctttacgacagcacattgattttggaaacgtcgggcgttaaggagttccaaatagtacaaacgcatctcgataagatagaaataaggattgtcctgatggataaggagggcgcttacaattatgcgctcatgtcgaattttgtcagtgggatcaagcagctattttctggagatccgctcacggttagcgtacacgtgcttgaatccatccctgcggcaaagtcttataagcgtcgtcttattgtaaatatgattaattct

SEQ ID NO: 33974 - DNA, 270 bp, Pseudomonas syringae
gtgaacaagtcggaactgattgatgctatcgctgcatctgctgatatcccgaaagctgctgctggccgtgcgctggacgcagtgatcgaatccgtcactggcgctctgaaggctggcgactcggttgttttggttggctttggtacgttctccgtgactgatcgtcctgctcgcatcggtcgcaatcctcagaccggtaagacgctggaaatcgctgctgctaaaaaaccaggtttcaaagccggtaaagctctcaaagaagctgtcaac

SEQ ID NO: 33975 - DNA, 1179 bp, Pseudomonas syringae
gtggcgaaggacaagccttattatcctcatgcatccatcggttctgtggccatgttggctaagacgctgggtgtgcatccaaagctgcttaatgatctggcgggacgggcgaccgattcatatactcattttgtcattaggacgaaaggagataaggagcggaacgtctatgaaccaaagtatgagcttaagaagcttcaaaagagaataaactcaagactctttgaaaaggtccattaccctttctatctacaaggtggggtcagagacgaggatcatcctcgcgactatatcgagaatagtcgaattcatgccggctcaaaatctttaattagtctagatattcgaaatttctacgataatattccttatgaaagcgttgtaagtattttcaagtatttttttaattttcccgatgaagttagtgatctcttgtctaagatagttactagagatggaaaagttccacaaggtgcgtgcacgtctagctacgtagctaatctaatatttcacaattctgagtataactttgtttcaaggctgagaaatcaaggtgttacatactcccgtcttctggatgatgtgacgctatcgtcaagtaggttactttctcaggatgaagtcagtggctacataaaatatgtcgccgggctgtttagtgaacataagttacgcattaaaaaaagtaagacgaagatcgagcggtctgacgatttatcggctgaatatactgtcacaggtgtatgggtagggcacggtgtcccaaaaattcggcgtgctgagagagatttgattcggcactccgtctatatctgtgagcgagagtatcagaaggacaggtttcgggatgaatatcacgagctttggaataaagtttcaggacaggttgctaaactaacgaggcttgagcattctcaagctttaaagttgcgtgcccggatgagagatatacttcccctctatgacggtaaggcaacagccgcaattattcgtgaagcggatttgctattaaagcggcctagaacgagtcatgtaaaagtttctgtggttaacgcttatcggagattgattaataggcttggaatcctgacaaggaccaacaaaacgctggcaaggggtcttaggcgtcagttgaagaccaaattttccgacgttccatcaaaggtattgatgtgggag

SEQ ID NO: 33976 - DNA, 1290 bp, Pseudomonas syringae
ttggagcaccctcgttattctggcttttcttaccaggagctcccgatgtcatcctcaaccgagcggcccgcgctaccactgaatgagtgcgaccctcactggcttcgcaatttatgggtgtgtgtattcggtgtgtttacgaccatcgttgccatgactctactgctgccgttcctaccgctgtatgtggaacaactgggagtcgataatcacgctgcggtggtactttggtcgggggcgacatacggggcaacattcctgtctgccgcgataacggcccctttatgggggcgcctcggtgatcgttacgggcgtaagctgatgttaatccgtgccagcctgggcatggccgtggcaatgtccttgattggtttagcgcaaacggtgtggcagttgttattgctgaggcttctggccggcttgctgggcgggtacgcctcaggtgcaaccatattggtcgccacgcaaacgcccaaggcgcgttctggctgggcactgggtgttttgtcatcaggaattatggccggaagcctggccgggcctttgatgggtggtgtgttgccgccgctgataggtatccgcaacaccttttttttagcaggaggtgtgattttcatcacttttcttgcaaccctgttgttgctgcgtgaaatgccgcgcaaagctccttcgcgggcaactgatagtgcgttgccagcagtggtgaagctcagcggcgagcagcgacgaatgatcacctgtatgtttgtcgtcgccagcctggtgatgttctcgaccatgtcagtcgagccgatcattacggtttacctcaggcaattgaagactgataacgtgacgatgatggctggcgtggtcatgtcggccacagcactgggtagcattcttgcggcgtcgcggctgggtcgtttggcagaccgaatcggttatctaccggtgctgaccagctgcctggccatgacagcgcttaccctgatccctcaagcatgggtcagcaacgtctggcaactggcagcattgcgtttcttcatgggccttgcactgggaggcttgctgccctgcgtcgcggctattatccgtcacaccgtacccaatgaagtcgctggtcgaatgctgggctactccacgtccagccagtatcttgggcaagtgctcgggccgttggccggcgggctattgggcgggtacttgggcataggcagcgtatttttagggactgccatggtgctcgctgcctgttcgatcatggtcggcagaatggacatgatacgcacacctgcctcaagcaagctt

SEQ ID NO: 33977 - DNA, 1122 bp, Pseudomonas syringae
atgcccctgctcatcagccgtttcgccgaacttgatctcattcgccaacccgagcaacaggatgagccgttgcaggcattcgatgctgctgacgagtacctgctcagccatgtcgcagaaaccgggctgagcctggacagccgcgtcctggtgctcaatgacagtttcggcgcgctggcggcgagtctggcgcgccacgccaatgtggtcagcagtaccgattcgtttctggcagcgcaggggctggaaaagaacctggcgcgcaacggcatggcctacgacgccgtgccgttgatcccggccagtgagccattgagcggccctttcgactgggtactgatccgcatccccaagacattggccctgctggaagagcagttgatccgcctgcaaggccaactggcccccggtgctcgcgttgttgcggccgcgatggtcaagcatttgccacgctcggccggtgacttgctggaagagtacgtggggccggtgcaggcctcgctggcggtaaaaaaagcccgcctgctgtttgcgacgccgcggccccaagaggtacgaacgtcgccttatccgacgcgttacacgctggacgagccggctatcgaattgctcaatcacgccaacgtgttttgccgcgacgggctggacatcggcactcgcgccctcctgccctgcctgccgaaaaacctcggcgcggcaagggtcgccgacctgggctgcggcaacggtgtactggccatcgccagcgcgctggaaaaccccgacgcgcactatacgctggtggacgagtcgtacatggcggtgcagtcggcaacagaaaactggcgggcacatctgggcgagcgagacgtcgtgctgcgtgccgccgacgggctggacacccagcaacccgactcgctggacgtggtgctgtgcaacccgcccttccaccagcaacaggtggtgggggatttcctcgcctggcgcatgttccttcaggcccgtgcagcattggttacaggcggtgcgctgtacatcgtcggcaatcgccatctggggtatcacaccaagctgtcgcgcctgttccgcggcgtcgagcaggttgcggccacaccgaaattcgtgatcctgaaagcacgtaaa

SEQ ID NO: 33978 - DNA, 690 bp, Pseudomonas syringae
gtgctgaaatcctgtgtcggtatgctgatctcaactatcgtgcgacgctctgcgtcgtcatgccgttccggacgctccgcgtcctcttcgcgactcagagcgtcgagagctgcattcccacgcggtggactgcccccaagaagttggacaccaatccgacctaatgggggtgttcaaatggccaagtattcagagcaattcaagctcaccgtcgtcaaagcctatcttgcaggcaacataggctttcgcaaggtgtccagccagttctcgatcgattccagcctgcttcgacgctgggtcgccaattacaagagccatgggcacacaggccatcgtaagcctggtcttcggtacagcgaagccttcaaacgctcagtgctggagcacaagcgcgagcacgggctgtcccttcgccagaccgcagcgcattttggtattggtgatcctggccaaatagtcatttgggaacagcagcattacagtaacgatctagccccctacgttcccaagagaagaaagtctgttgccatgcccaagaagccttatcccaccgcaccagtaatcgacgacgatacgcagaagacgcgtgaccagttaatggccgagctcgaatacctgcgcatggagaacgcttacctaaaaaagttggaagagttgaaggagcagcaacgacggcaaaagaaaaagccc

SEQ ID NO: 33979 - DNA, 555 bp, Pseudomonas syringae
atgatcaacgaaatcaagaaagacgctcagacgcgcatgcagaagagcctcgagtcgctgactcacgcgttcacccgcatccgtaccggcaaggctcacccaagcattctgggtggcgtcatggtcccttactacggtgccgacaccccgctgagccaggttgccaacgtgaccgtcaaggactcgcgcacccttcaggttgtggccttcgagcgcaatatgctcgcggcggtcgacaaggctatccagagctccggtctgggcttcaaccccaccaacctgggtgagctgctgttgatctccatgcctgcgctgaccgaggaaacccgcaagggcttcaccaagcaggcgcgtgatgctgccgaagacgcccgtgttgccgtacgtaacattcgtcgtgacgcgttgagtcagttgaaagacctcgtcaaggacaaggaaatcagcgaagacgaagagcgccgtgctgccgacgacgtgcagaagctgaccgacaaattcgtggcggatatcgaagttgcggtcaagcagaaagaagctgatctgatggctgtt

SEQ ID NO: 33980 - DNA, 1371 bp, Pseudomonas syringae
atgagccaatgtgaggctgattcgctccgagagactgcaataggagacgttgcctcagattgggagatgggggtaattggcgattttgtaactgcgctgcaagcaggtgttagcgtcaatgcttttgaaactgactctggctgcacagagggcgagcttggtgtgctgaagaccagtgctgtactccgtggtagattttttgcggagcagtacaaggtagtcgtcgcggaagacatgggaagagtggcaacaagcgttgtcggagaccggatcatcatcagtcgcatgaatactcctgcgcttgttggtgagtcaggctatgtgacaaaggatgagcccaatctcttcctacctgatcgcctttggcaaactgagccttcagaccgtccacactcacagcgttggctgtcttactggttgcagcatcctggggttcgccgattgattgctgccagtgcaactggcaccagcaacagcatgaagaacatctcgaaagagacagtgttgtcgctgcctgttcctcgtaccccactgcccgaacaacaaaagatcgccgccatcctcactgcggttgacgataagttggacgtaattttccgtcagattaaagccacacaggctctgaaacagggcctgatgcaagccctgttcagccggggcgtgggtacccaagatactactggtcgttggattcagcataccgagttcaaggacagtgaactcggcacgattccagcgctatgggatgttggcgtgatagcggattacgtatcagctcttcgttcaggggtcagtgttaacgcagaagatcgtatgcatggtgatgatgagatcggtgtcctcaaggtgagttgcgtactccgtggtgggttctatccaaattgtcataagacagttgtccccgaggagcgagagcgcgtcgctgagcccgttttacagggacgtattatcgtcagtcgagcgaacactcctgcattagtcggtgaatcagcgtatgtcaattctgcgtggcccaacttgtttctcccagacaaactctggcaaatcgagccctctgaaagcccccattcgataaagtggctgtctttttatttgcagtcaccatttgttcgtcaagaaatcagtaaggcagcaacgggcacaagtggcagcatgaagaacatctccaagccagcatttttaagcattcggatgcctttagtaccgctagctgagcaagagcacattgcagcgattctttctgacgttacatccaaaattgaagccttgaacagtaagcaaaaccatttccaaaccctcaaacgcgggctgatgcaaaaactgctaaccggcgaatggcgggtcaagatcgatagccctaccggtacggtc

SEQ ID NO: 33981 - DNA, 537 bp, Pseudomonas syringae
atgaaagccaaggctgacacacctttcgtacccctgaatatcgccgtactgaccgtcagcgatacccgcacccgcgaaaccgacacctcggggcagatgttcgttgaccgcctgaccgacgccggtcatggcctgatcgaacgcgtcctgctcaaggatgatttgtacaaaatccgtgctcaggtcgccacctggattgccgacgatcaggtgcaggtcgtgctgatcaccggcggcaccggctttaccggccgtgacagcacccccgaagccgtggcgtgcctgctggacaagcaggtcgacgggtttggcgagctgttccggcagatatccgtgccggacatcggcacctcgaccattcagtcccgcgcgctggccggtttgtccaatggcacgctggtttgctgcctgccgggttcgaccaatgccgtgcgcaccgcatgggacgggattctcgccgagcaactggactcgcgcttccggccctgcaacttcgtgccgcacctcaagcaggccgagccctgcgcgacccgcggt

SEQ ID NO: 33982 - DNA, 354 bp, Pseudomonas syringae
atggctcgtgtaaagcgtggcgtcattgcccgtaagcgtcacaaaaaaattctgaaacttgcaaaaggctactacggcgcgcgttcacgcgtattccgtgttgccaagcaagcggtaatcaaggcaggccaatacgcctaccgtgaccgtcgtcagaaaaaacgtcagttccgcgctctgtggatcgctcgtatcaacgctggtgctcgtgttaacggtctgtcctacagccgtttcattgctggcctgaaaaaagcgtccatcgagatcgaccgtaaggttctggctgatctggcagtgaacgaaaaagcggcgtttgctgcgattgtcgagaaagctaaagccactttggcc

SEQ ID NO: 33983 - DNA, 666 bp, Staphylococcus aureus
atgatagatcaacaaacaatttatcaatacatacaaaatggaaaaatagaagaagcgttacaagcattgttcggaaatatcgaagaagatcctacaattattgaaaattatattaatgccggtatcgtacttgctgatgcgaatgagattgaaaaggcagagcgttttttccaaaaagctttaacaatagatccgaagaatggcgtcgtattttataatctagcaaatgtatattataatcagcaacgttatcaagaagctattaaattatatcaacaagcattacaaacagagattgaacaagttgattgtaattatatgatcggtatggcgtttaatcagttagaatcatttaagctggcattgccgtatttaatgactgctgcggaactagataaagacaaagatgcagaagttcaatttcaatatggtcttgtattatgtcaattagaaatgtttaatgaagccataactcaacttaaacgtgtattaacgattgataaaaatcatgttgatgcaagatacaatttgggtttagcgttatttatgaaaaatgaagatattgatgaagccataactcattttaaagaagctgtgactatcgaccctaaacacttattaagtcagcatgcgctgaaaacattcactaaaatgaaagaggaggag

SEQ ID NO: 33984 - DNA, 1287 bp, Staphylococcus aureus
gtggcatttgaatttagattacccgatatcggggaaggtatccacgaaggtgaaattgtaaaatggtttgttaaagctggagatactattgaagaagacgatgttttagctgaggtacaaaacgataaatcagtagtagaaatcccatcaccagtatctggtactgtagaagaagttatggtagaagaaggtacagtagctgtagttggtgacgttattgttaaaatcgatgcacctgatgcagaagatatgcaatttaaaggtcatgatgattcatcatctaaagaagaacctgcgaaagaggaagcgccagcagagcaagcacctgtagctactcaaactgaagaagtagatgaaaacagaactgttaaagcaatgccttcagtacgtaaatacgcacgtgaaaaaggtgttaacattaaagcagtttctggatctggtaaaaatggtcgtattacaaaagaagatgtagatgcatacttaaatggtggtgcaccaacagcttcaaatgaatcagctgcttcagctacaaatgaagaagttgctgaaactcctgcagcacctgcagcagtatcattagaaggcgacttcccagaaacaactgaaaaaatccctgctatgcgtagagcaattgcgaaagcaatggttaactctaagcatactgcacctcatgtaacattaatggatgaaattgatgttcaagcattatgggatcaccgtaagaaatttaaagaaatcgcagctgaacaaggtactaagttaacattcttaccatatgttgttaaagcgcttgtttctgcattgaaaaaatacccagcacttaatacttcattcaatgaagaagctggtgaaattgtgcataaacattactggaatatcggtattgcggcggacactgatagaggtttattagtacctgtagtgaaacatgctgaccgtaaatctattttccaaatttctgatgaaattaacgaattagctgttaaagcacgtgatggtaaattaacagccgatgaaatgaaaggtgcaacatgcacaatcagtaatatcggttcagctggtggacaatggttcactccagttatcaatcacccagaagtagcaatcttaggaattggccgtattgctcaaaaacctatcgttaaagatggagaaattgttgcagcaccagtattagcattatcattaagctttgaccacagacaaattgatggtgcaactggccaaaatgcaatgaatcacattaaacatttattaaataatccagaattattattaatggagggg

SEQ ID NO: 33985 - DNA, 102 bp, Staphylococcus aureus
ttggtagagcatctgactgttaatcagagggtcagaggttcgaatcctctatggctcactactagcactttccatttttggaaagtgcttttttttatgaag

SEQ ID NO: 33986 - DNA, 852 bp, Staphylococcus aureus
gtgaagtgtcttatcgaattagacatacttccagaattagatgtacttatcgaatctgagtcgctcactgaagtcgagttgtgcgttgaaccagacatacttaatgattctgatgtacttatcgaagttgaaccacttgttgatccggaaatactttgtgacattgaaatactcgctgaattagattcactcattgatgttgagtcagatacactcgttgaaccagatgtacttaaggaactagacgtactcgatgagtcagatacgctcgttgaacctgaaccagacgtacttaatgattctgatacgcttgttgaacctgaattagacgtacttaatgattctgatgtgcttgttgaagttgaactacttgttgagccagatgtactcaatgattctgagtcactgatagaagttgaatcacttgtagattctgattctacagcactttgtgaaccactgatacttattgaagtcgaatcacttatactgtctgatgttgataatgacgtcgacaccgacgtgctttgtgatgtcaatgtacctgcacttgctgacattgataatgatatcgatgtgcttaacgaacctgatgcgcttgtgcttgttgactggctttgtgccatagaatcacttagcgactctgatgtactcgttgagctcgagtcacttacacttattgaacctgatattgagtcacttaaacttgtcgatgttgaaactgatacgcttccgctcattgaatcagatgttgaaagtgatgtactcgttgaatttgatccactgatgctagacgaatcgcttgtagacattgagtcactttctgatgcactgatgctcatagagtcaaat

SEQ ID NO: 33987 - DNA, 1434 bp, Staphylococcus aureus
atgatgaagcagaaaaaacaatttgatcaaatttttgatttgttggcgatacgtgttattgtcaattctattaatgattgttatgcgatacttgggttggtgcatacgttatggaaaccgatgccaggacgttttaaagattatattgcaatgcctaaacaaaatttgtatcagtcattgcatactacagtagtaggcccaaatggagacccgctcgaaatccaaatacgaacgtttgatatgcacgaaattgctgagcatggtgttgcagcacactgggcttacaaagaaggtaaaaaagtaagtgaaaaagatcaaacttatcaaaataagttaaattggttaaaagaattagctgaagcggatcatacatcgtctgacgctcaagaatttatggaaaccttaaaatatgacttacagagtgacaaagtatacgcatttaccccagcgagtgatgttattgagttgccatatggtgctgtgccgattgattttgcttatgcgattcacagtgaagtaggtaataagatgattggtgccaaggtgaatggcaaaattgtaccaattgactatattttacaaacaggcgatattgttgaaatacgtactagtaaacattcatatggaccaagtcgtgattggttgaaaattgttaaatcgtctagtgccaaaggtaaaattaaaagtttcttcaaaaaacaagatcgttcatctaatattgaaaaaggccgaatgatggttgaagctgaaataaaagagcaaggatttagagtcgaagatattttgacagagaaaaatattcaggttgttaatgaaaaatataactttgcaaatgaagatgatttattcgcagctgtaggatttggcggcgtgacatccttacagattgttaataaattaactgaaagacaacgtattttagataaacaacgtgctttaaatgaagcacaagaagttacgaaatcattgcctattaaagacaacatcattactgatagtggtgtctatgtagaaggtttagaaaatgtacttatcaagttgtcaaaatgttgtaatcctataccaggtgatgatattgtaggttatatcaccaaaggtcacggtattaaagtacatcgcactgattgcccaaatattaagaacgaaactgaacgactaattaatgttgaatgggtaaaatcaaaagacgcaactcaaaaatatcaggttgatttagaggtaactgcgtatgaccgaaatggcttgttgaatgaagtactacaagctgttagctcgacagccggcaatttaattaaagtttcaggacgttcagatattgataaaaatgcaataataaatattagtgtcatggtgaaaaacgtgaatgatgtttatcgtgtggtagaaaagatcaaacaacttggtgatgtttatacagtaacaagagtttggaac

SEQ ID NO: 33988 - DNA, 1542 bp, Staphylococcus aureus
atgatttcattttttacaaaaactactgatatgatgacatcaaaaaaaagatggactgcactagtagtattagctgttagtttgtttgttgttacaatggatatgacaatattaattatggctttaccggaattagtaagagagttagagccttctggtacccaacagttatggatagttgatatatactctcttgttttagctggctttataattccattgagtgcctttgctgataaatggggaagaaaaaaagcattattaactggatttgctttatttggcctcgtttcattagctatatttttcgcagaaagtgcagagttcgtaatagctattcgatttttacttggtattgcaggtgctttaataatgccaactactctttcaatgataagagtaatttttgaaaaccctaaagaaagggccactgcattagctgtatggtcaatcgcttcatcgataggtgctgtttttggaccaattatcggaggagctttacttgagcaattttcatggcactcggcatttttaattaatgtaccgtttgcgataatagcagttgtagcaggtttatttttattaccagagtctaagttatcaaaagaaaagtctcactcgtgggatattccttctacaattttatcaattgcaggcatgattggactggtatggagtatcaaagaattttcaaaagaaggactagcagatattattccatgggttgtaatagtattagcaattaccatgatagtgatatttgttaaacgtaatttatcaagttctgatccaatgttagacgtaagactttttaaaaagagatcattttcagctggtacaattgctgcatttatgacaatgtttgcaatggcatctgttttgttattagcttcacaatggttacaggttgtggaagaactttctccttttaaagctggcttatacctattacctatggcaataggagatatggtgtttgcaccaattgcacccggattagcggcgcgatttggaccgaaaatagtgttaccttccggaattggaattgcagccattggcatgtttattatgtatttctttggtcatccattatcatattctacaatggctttagcattaattttagttggagctggtatggcttcactagcagttgcatctgctctaataatgttagaaacacctacatcaaaagcaggtaatgcagctgctgttgaagagtctatgtatgaccttggaaatgtttttggtgtagcagtacttggtagcctatcttctatgctttatcgtgtatttttagatatttcatctttttcatcaaaaggtatagttggagatttagctcatgtagctgaagaatctgtagtgggcgctgtcgaagtagctaaagctacggggataaaacagcttgcaaacgaggctgtaacatcatttaatgatgcttttgtagcaactgctttagtaggtgggattatcatgattatcatttcaatagttgtctatttgttaattcccaaatcacttgatataactaaacaaaaa

SEQ ID NO: 33989 - DNA, 393 bp, Staphylococcus aureus; identical to SEQ ID NO: 8147

SEQ ID NO: 33990 - DNA, 631 bp, Staphylococcus aureus
gggtctttccgtcctgtcgcgggtaacctgcatcttcacaggtactatgatttcaccgagtctctcgttgagacagtgcccaaatcgttacgcctttcgtgcgggtcggaacttacccgacaaggaatttcgctaccttaggaccgttatagttacggccgccgtttactggggcttcgattcgtagcttcgcagaagctaaccactcctcttaaccttccagcaccgggcaggcgtcagcccctatacatcaccttacggtttagcagagacctgtgtttttgataaacagtcgcttgggcctattcactgcggctcttctgggcgttaaccctaaagagcaccccttctcccgaagttacggggtcattttgccgagttccttaacgagagttcgctcgctcaccttagaattctcatcttgactacctgtgtcggtttgcggtacgggcacctattttctatctagaggcttttctcggcagtgtgaaatcaacgactcgaagactcaatgtcttctccccatcacagctcagccttaacgagtaccggatttgcctaatactcagccttactgcttagacgtgcaatccaatcgcacgcttcgcctatcctactgcgtccccccatc

SEQ ID NO: 33991 - DNA, 564 bp, Staphylococcus aureus
atgaatacaaaatttttaggtaaaacattagtagcaagtgctttagtattaacaacattaggaacaggcttacattcttcatacttaggattagatacaaataaagttgttaaaacggctaaagcagaagaaaaaatgacagatggtcaattatggaaaaaagttaaagattcattacatgattctgatattattttaagtaacgagtacgaaacaatcaacgttacttatttattaagcaatggatattctagcagcgtttctgctcctggaaatgatgatggaggccatctaacacaatctatagactttaaaggattaaaacaaattgatttaactaaggaaaatgtctacgatgactttaacaaaaagctagatgctaaaaatacatggaattctctaaccgagaagttaaaaggtcttggtttactacaaaatggccaaaaagtatctatttattcttcagatagctcttctccagtctcgggtaaagtgggagaaggagtaactagtggtggcgaaaatactctaactaaacgcttcatcaacaaaatcacaattgat

SEQ ID NO: 33992 - DNA, 7200 bp, Staphylococcus aureus
aatgagcgattaacgcaagcaattaatcaattagtacctttagctgataatagtgctttaaaaactgctaagacgaaacttgatgaagaaatcaataaatcagtaactactgatggtatgacacaatcatcaatccaagcatatgaaaatgctaaacgtgcgggtcaaacagaatcaacaaatgcacaaaatgttattaacaatggtgatgcgactgaccaacaaattgccgcagaaaaaacaaaagtagaagaaaaatataatagcttaaaacaagcaattgctggattaactccagacttggcaccattacaaactgcaaaaactcagttgcaaaatgatattgatcagccaacgagtacgactggtatgacaagcgcatctattgcagcatttaatgaaaaactttcagcagctagaactaaaattcaagaaattgatcgtgtattagcctcacatccagatgttgcgacaatacgtcaaaacgtgacagcagcgaatgccgctaaatcagcacttgatcaagcacgtaatggcttaacagtcgataaagcgcctttagaaaatgcgaaaaatcaactacaacatagtattgacacgcaaacaagtacaactggtatgacacaagactctataaatgcatacaatgcgaagttaacagctgcacgtaataagattcaacaaatcaatcaagtattagcaggttcaccgactgtagaacaaattaatacaaatacgtctacagcaaatcaagctaaatctgatttagatcatgcacgtcaagctttaacaccagataaagcgccgcttcaaactgcgaaaacgcaattagaacaaagcattaatcaaccaacggatacaacaggtatgacgaccgcttcgttaaatgcgtacaaccaaaaattacaagcagcgcgtcaaaagttaactgaaattaatcaagtgttgaatggcaacccaactgtccaaaatatcaatgataaagtgacagaggcaaaccaagctaaggatcaattaaatacagcacgtcaaggtttaacattagatagacagccagcgttaacaacattacatggtgcatctaacttaaaccaagcacaacaaaataatttcacgcaacaaattaatgctgctcaaaatcatgctgcgcttgaaacaattaagtctaacattacggctttaaatactgcgatgacgaaattaaaagacagtgttgcggataataatacaattaaatcagatcaaaattacactgacgcaacaccagctaataaacaagcgtatgataatgcagttaatgcggctaaaggtgtcattggagaaacgactaatccaacgatggatgttaacacagtgaaccaaaaagcagcatctgttaaatcgacgaaagatgctttagatggtcaacaaaacttacaacgtgcgaaaacagaagcaacaaatgcgattacgcatgcaagtgatttaaaccaagcacaaaagaatgcattaacacaacaagtgaatagtgcacaaaacgtgcaagcagtaaatgatattaaacaaacgactcaaagcttaaatactgctatgacaggtttaaaacgtggcgttgctaatcataaccaagtcgtacaaagtgataattatgtcaacgcagatactaataagaaaaatgattacaacaatgcatacaaccatgcgaatgacattattaatggtaatgcacaacatccagttataacaccaagtgatgttaacaatgctttatcaaatgtcacaagtaaagaacatgcattgaatggtgaagctaagttaaatgctgcgaaacaagaagcgaatactgcattaggtcatttaaacaatttaaataatgcacaacgtcaaaacttacaatcgcaaattaatggtgcgcatcaaattgatgcagttaatacaattaagcaaaatgcaacaaacttgaatagtgcaatgggtaacttaagacaagctgttgcagataaagatcaagtgaaacgtacagaagattatgcggatgcagatacagctaaacaaaatgcatataacagtgcagtttcaagtgccgaaacaatcattaatcaaacaacaaatccaacgatgtctgttgatgatgttaatcgtgcaacttcagctgttacttctaataaaaatgcattaaatggttatgaaaaattagcacaatctaaaacagatgctgcaagagcaattgatgcattaccacatttaaataatgcacaaaaagcagatgttaaatctaaaattaatgctgcatcaaatattgctggcgtaaatactgttaaacaacaaggtacagatttaaatacagcgatgggtaacttgcaaggtgcaatcaatgatgaacaaacgacgcttaatagtcaaaactatcaagatgcgacacctagtaagaaaacagcatacacaaatgcggtacaagctgcgaaagatattttaaataaatcaaatggtcaaaataaaacgaaagatcaagttactgaagcgatgaatcaagtgaattctgctaaaaataacttagatggtacgcgtttattagatcaagcgaagcaaacagcaaaacagcagttaaataatatgacgcatttaacaactgcacaaaaaacgaatttaacaaaccaaattaatagtggtactactgtcgctggtgttcaaacggttcaatcaaatgccaatacattagatcaagccatgaatacgttaagacaaagtattgccaacaaagatgcgactaaagcaagtgaagattacgtagatgctaataatgataagcaaacagcatataacaacgcagtagctgctgctgaaacgattattaatgctaatagtaatccagaaatgaatccaagtacgattacacaaaaagcagagcaagtgaatagttctaaaacggcacttaacggtgatgaaaacttagctgctgcaaaacaaaatgcgaaaacgtacttaaacacattgacaagtattacagatgctcaaaagaacaatttgattagtcaaattactagtgcgacaagagtgagtggtgttgatactgtaaaacaaaatgcgcaacatctagaccaagctatggctagcttacagaatggtattaacaacgaatctcaagtgaaatcatctgagaaatatcgtgatgctgatacaaataaacaacaagagtatgataatgctattactgcagcgaaagcgattttaaataaatcgacaggtccaaacactgcgcaaaatgcagttgaagcagcattacaacgtgttaataatgcgaaagatgcattgaatggtgatgcaaaattaattgcagctcaaaacgcagcgaaacaacatttaggtactttaacgcatatcactacagctcaacgtaatgatttaacaaatcaaatttcacaagctacaaacttagctggtgttgaatctgttaaacaaaatgcgaatagtttagatggtgctatgggtaacttacaaacggctatcaacgataagtcaggaacattagcgagccaaaacttcttggatgctgatgagcaaaaacgtaatgcatacaatcaagctgtatcagcagccgaaaccattttaaataaacaaactggaccgaatacagcgaaaacagcagtcgaacaagcacttaataatgttaataatgcgaaacatgcattaaatggtacgcaaaacttaaacaatgcgaaacaagcagcgattacagcaatcaatggcgcatctgatttaaatcaaaaacaaaaagatgcattaaaagcacaagctaatggtgctcaacgcgtatctaatgcacaagatgtacagcacaatgcgactgaactgaacacggcaatgggcacattaaaacatgccatcgcagataagacgaatacgttagcaagcagtaaatatgttaatgccgatagcactaaacaaaatgcttacacaactaaagttaccaatgctgaacatattattagcggtacgccaacggttgttacgacaccttcagaagtaacagctgcagctaatcaagtaaacagcgcgaaacaagaattaaatggtgacgaaagattacgtgaagcaaaacaaaacgccaatactgctattgatgcattaacacaattaaatacacctcaaaaagctaaattaaaagaacaagtgggacaagccaatagattagaagacgtacaaactgttcaaacaaatggacaagcattgaacaatgcaatgaaaggcttaagagatagtattgctaacgaaacaacagtcaaaacaagtcaaaactatacagacgcaagtccgaataaccaatcaacatataatagcgctgtgtcaaatgcgaaaggtatcattaatcaaactaacaatccgactatggatactagtgcgattacccaagctacaacacaagtgaataatgctaaaaatggtttaaacggtgctgaaaacttaagaaatgcacaaaacactgctaagcaaaacttaaatacattatcacacttaacaaataaccaaaaatctgccatctcatcacaaattgatcgtgcaggtcatgtgagtgaggtaactgctactaaaaatgcagcaactgagttgaatacgcaaatgggtaacttggaacaagctatccatgatcaaaacacagttaaacaaagtgttaaatttactgatgcagataaagctaaacgtgatgcgtatacaaatgcggtaagcagagctgaagcaattctgaataaaacgcaaggtgcaaatacgtctaaacaagatgttgaagcggctattcaaaatgtttcaagtgctaaaaatgcattgaatggtgatcaaaacgttacaaatgcgaagaatgcagctaaaaatgcattaaataacttaacgtcaattaataatgcacaaaaacgtgacttaacaactaaaattgatcaagcaacaactgtagctggtgttgaagctgtatctaatacgagtacacaattgaatacagcgatggctaacttgcaaaatggtattaatgataaaacaaatacactagcaagtgaaaactatcatgatgctgattcagataagaaaactgcttatactcaagccgttacgaacgcagaaaatattttaaataaaaatagtggatcaaatttagacaaaactgccgttgaaaacgcgttgtcacaagttgctaatgcgaaaggtgccctaaatggtaaccataatttagagcaagctaaatcaaatgcaaacactactataaacggacttcaacatttaacaactgctcaaaaagataaattgaaacaacaagtgcaacaagcacaaaatgttgcaggtgtagatactgttaaatcaagtgccaacacattaaatggtgctatgggtacgttaagaaatagcatacaagataacacagctacgaaaaatggccaaaactatcttgatgctacagaacgtaacaaaacaaactataacaatgctgttgatagtgctaatggtgtcattaatgcaacaagcaatccaaatatggatgctaatgcaattaaccaaatcgctacacaagtgacatcaacgaaaaatgcattagatggtacacataatttaacgcaagcgaaacaaacagcaacaaatgccatcgatggtgctactaacttaaataaagcgcaaaaagatgcgttaaaagcacaagttacaagtgcgcaacgtgttgcaaatgtaacaagtatccaacaaactgcaaatgaacttaatacagctatgggtcaattacaacatggtattgatgatgaaaatgcaacaaaacaaactcaaaaatatcgtgacgctgaacaaagtaagaaaactgcttatgatcaagctgtagctgctgcgaaagcaattttaaataaacaaacaggttcaaattcagataaagcagcagttgaccgtgcattacaacaagtaacaagtacgaaagatgcattgaatggtgatgcaaaactggcagaagcgaaagcggcagctaaacaaaacttaggcactttaaaccatattacgaatgcacaacgtactgacttagaaggccaaatcaatcaagcgacgactgttgatggcgttaatactgtaaaaacaaatgccaatacattagacggcgcaatgaatagcttacaaggttcaatcaatgataaagatgcgacattaagaaatcaaaattatcttgatgcggatgaatcaaaacgaaatgcatatacgcaagctgtcacagcggctgaaggcattttaaataaacaaactggtggtaacacatctaaagcagacgttgataatgcattaaatgcagttacaagagcgaaagcggctttaaatggtgctgacaacttaagaaatgcgaaaacttcagcaacaaatacgattgatggtttacctaacttaacacaattacaaaaagacaacttgaagcatcaagttgaacaagcgcaaaatgtagcaggtgtaaatggtgttaaagataaaggtaatacgttaaatactgccatgggtgcattacgtacaagtatccaaaatgataatacgacgaaaacaagtcaaaattatcttgatgcatctgacagcaacaaaaataattacaatactgctgtaaataatgcaaatggtgttattaatgcaacgaacaatccaaatatggatgctaatgcgattaatggcatggcaaatcaagtcaatacaacaaaagcagcgttaaatggtgcacaaaacttagctcaagctaaaacaaatgcgacgaacacaattaacaacgcacatgacttaaaccaaaaacaaaaagatgcattaaaaacacaagttaacaatgcacaacgtgtatctgatgcaaataacgttcaacacactgcaactgaattgaacagtgcgatgacagcacttaaagcagctattgctgataaagaaagaacaaaagcaagcggtaattatgtcaatgctgatcaagaaaaacgtcaagcgtatgattcaaaagtgactaacgctgaaaatatcattagtggtacaccgaatgcgacattaacagtcaatgacgtaaatagtgcggcatcacaagtcaatgcggctaaaacagcattaaatggtgataacaacttacgtgtagcgaaagagcatgccaacaatacaattgacggcttagcacaattgaataatgcacaaaaagcaaaattaaaagaacaagttcaaagtgcaactacattagatggt

SEQ ID NO: 33993 - DNA, 10599 bp, Staphylococcus aureus
atggacaaattacgtcaaagtattgcagataatgcgacaacaaaacaaaaccaaaattatactgatgcaagtcagaataaaaaggatgcgtacaataatgctgtcacaactgcacaaggtattattgatcaaactacaagtccaactttagatccgactgttatcaatcaagctgctggacaagtaagcacaactaaaaatgcattaaatggtaatgaaaacctagaggcagcgaaacaacaagcgtcacaatcattaggttcattagataacttaaataatgcgcaaaaacaaacagttactgatcaaattaatggcgcgcatactgttgatgaagcaaatcaaattaagcaaaatgcgcaaaacttaaatacagcgatgggtaacttgaaacaagcgatagctgacaaagatgctacgaaagcgacagttaacttcactgatgcagatcaagcaaaacaacaagcatataacactgctgttacaaatgctgaaaatatcatttcaaaagctaatggcggcaatgcaacacaagctgaagttgaacaagcaatcaaacaagttaatgctgcaaaacaagcattaaatggtaatgccaacgttcaacatgcaaaagacgaagcaacagcattaattaatagctctaatgaccttaaccaagcacaaaaagacgcattaaaacaacaagttcaaaatgcaactactgtagctggtgtaaacaatgttaaacaaacagcacaagagttaaacaatgctatgacacaattaaaacaaggcattgcagataaagaacaaacaaaagctgatggtaactttgtcaatgcagatcctgataagcaaaatgcatataatcaagcagtagcgaaagctgaagcattaattagtgctacgcctgatgttgtcgttacacctagcgaaattactgcagcgttaaataaagttacgcaagctaaaaatgatttaaatggtaatacaaacttagcaacggcgaaacaaaatgttcaacatgctattgatcaattgccaaacttaaaccaagcgcaacgtgatgaatacagcaaacaaatcacgcaagcaacacttgtaccaaacgtcaatgctattcaacaagcggcgacaacgcttaatgacgcgatgacacaattgaaacaaggtattgcgaataaagcacaaattaaaggtagcgagaactatcacgatgctgatactgacaagcaaacagcatatgataatgcagtaacaaaagcagaagaattgttaaaacaaacaacaaatccaacaatggatccaaatacaattcaacaagcattaactaaagtgaatgacacaaatcaagcacttaacggtaatcaaaaattagctgatgccaaacaagatgctaagacaacacttggtacactagatcatttaaatgatgctcaaaaacaagcgctaacaactcaagttgaacaagcaccagatattgcaacagttaataatgttaagcaaaatgctcaaaatctgaataatgctatgactaacttaaacaatgcattacaagataaaactgagacattaaatagcattaactttactgatgcagatcaagctaagaaagatgcttatactaatgcggtttcacatgcagaaggtattttatctaaagcaaatggcagcaatgcaagtcaaactgaagtggaacaagcgatgcaacgtgtgaacgaagcgaaacaagcattgaatggtaatgacaatgtacaacgtgcaaaagatgcagcgaaacaagtgattacaaatgcaaatgatttaaatcaagcaatgacacaattgaaacaaggtattgcagataaagaccaaactaaagcaaatggtaactttgtcaatgctgatactgataagcaaaatgcttacaacaatgcggtagcacatgctgaacaaataattagtggtacaccaaatgcaaacgtggatccacaacaagtggctcaagcgttacaacaagtgaatcaagctaagggtgatttaaacggtaaccataacttacaagttgctaaagacaatgcaaatacagccattgatcagttaccaaacttaaatcaaccacaaaaaacagcattaaaagaccaagtgtcgcatgcagaacttgttacaggtgttaatgctattaagcaaaatgctgatgcgttaaataatgcaatgggtacattgaaacaacaaattcaagcgaacagtcaagtaccacagtcagttgactttacacaagcggatcaagacaaacaacaagcatataacaatgcggctaaccaagcgcaacaaatcgcaaatggcataccaacacctgtattgacgcctgatacagtaacacaagcagtgacaactatgaatcaagcgaaagatgcattaaacggtgatgaaaaattagcacaagcgaaacaagaagctttagcaaatcttgatacgttacgcgatttaaatcaaccacaacgtgatgcattacgtaaccaaatcaatcaagcacaagcgttagctacagttgaacaaactaaacaaaatgcacaaaatgtgaatacagcaatgagtaacttgaaacaaggtattgcaaacaaagatactgtcaaagcaagtgagaactatcatgatgctgatgccgataagcaaacagcatatacaaatgcagtgtctcaagcggaaggtattatcaatcaaacgacaaatccaacgcttaacccagatgaaataacacgtgcattaactcaagtgactgatgctaaaaatggcttaaacggtgaagctaaattggcaactgaaaagcaaaatgctaaagatgccgtaagtgggatgacgcatttaaacgatgctcaaaaacaagcattaaaaggtcaaatcgatcaatcgcctgaaattgctacagtgaaccaagttaaacaaacagcaacgagcctagatcaagcaatggatcaattatcacaagctattaatgataaagctcaaacattagcggacggtaattacttaaatgcagatcctgacaaacaaaatgcgtataaacaggcagtagcaaaagctgaagcattattgaataaacaaagtggtactaatgaagtacaagcacaagttgaaagcatcactaatgaagtgaacgcagcgaaacaagcattaaatggtaatgacaatttggcaaatgcaaaacaacaagcaaaacaacaattggcgaacttaacacacttaaatgatgcacaaaaacaatcatttgaaagtcaaattacacaagcgccacttgttacagatgtcactacgattaatcaaaaagcacaaacgttagatcatgcgatggaattattaagaaatagtgttgcggataatcaaacgacattagcgtctgaagattatcatgatgcaactgcgcaaagacaaaatgactataaccaagctgtaacagctgctaataatataattaatcaaactacatcgcctacgatgaatccagatgatgttaatggtgcaacgacacaagtgaataatacgaaagttgcattagatggtgatgaaaaccttgcagcagctaaacaacaagcaaacaacagacttgatcaattagatcatttgaataatgcgcaaaagcaacagttacaatcacaaattacgcaatcatctgatattgctgcagttaatggtcacaaacaaacagcagaatctttaaatactgcgatgggtaacttaattaatgcgattgcagatcatcaagccgttgaacaacgtggtaacttcatcaatgctgatactgataaacaaactgcttataatacagcggtaaatgaagcagcagcaatgattaacaaacaaactggtcaaaatgcgaaccaaacagaagtagaacaagctattactaaagttcaaacaacacttcaagcgttaaatggagaccataatttacaagttgctaaaacaaatgcgacgcaagcaattgatgctttaacaagcttaaatgatcctcaaaaaacagcattaaaagaccaagttacagctgcaactttagtaactgcagttcatcaaattgaacaaaatgcgaatacgcttaaccaagcaatgcatggtttaagacagagcattcaagataacgcagcaactaaagcaaatagcaaatatatcaacgaagatcaaccagagcaacaaaactatgatcaagctgttcaagccgcaaataatattatcaatgaacaaactgcaacattagataataatgcgattaatcaagcagcgacaactgtgaatacaacgaaagcagcattacatggtgatgtgaagttacaaaatgataaagatcatgctaagcaaacggttagtcaattagcacatctaaacaatgcacaaaaacatatggaagatacgttaattgatagtgaaacaactagaacagcagttaagcaagatttgactgaagcacaagcattagatcaacttatggatgcattacaacaaagtattgctgacaaagatgcaacacgtgcgagcagtgcatatgtcaatgcagaaccgaataaaaaacaatcctatgatgaagcagttcaaaatgctgagtctatcattgcaggattaaataatccaactatcaataaaggtaatgtatcaagtgcgactcaagcagtaatatcatctaaaaatgcattagatggtgttgaacgattagctcaagataagcaaactgctggaaattctctaaatcatttagatcaattaacaccagctcaacaacaagcgctagaaaatcaaattaataatgcaacaactcgtgataaagtggctgaaatcattgcacaagcgcaagcattaaatgaagcgatgaaagcattaaaagaaagtattaaggatcaaccacaaactgaagcaagtagtaaatttattaacgaggatcaagcgcaaaaagatgcttatacgcaagcagtacaacacgcgaaagatttgattaacaaaacaactgatcctacattagctaaatcaatcattgatcaagcgacacaggcagtgacagatgctaaaaacaatttacatggtgatcaaaaactagctcaagataagcaacgtgcaacagaaacgttaaataacttgtctaacttgaatacaccacaacgtcaagcacttgaaaatcaaattaataatgcagcaactcgtggcgaagtagcacaaaaattaactgaagcacaagcacttaaccaagcaatggaagctttacgtaatagcattcaagatcaacagcaaacggaagcgggtagcaagtttatcaatgaagataaaccacaaaaagatgcttaccaagcagcagttcaaaatgcaaaagatttaattaatcaaactaacaatccaacgcttgataaagcacaagttgaacaattgacacaagctgttaaccaagctaaagataacctacacggtgatcaaaaacttgcagacgataaacaacatgcggttactgatttaaatcaattaaatggtttgaataatccgcaacgtcaagcacttgaaagccaaataaacaacgcagcaactcgtggcgaagtagcacaaaaattagctgaagcaaaagcgcttgatcaagcaatgcaagcattacgtaatagtattcaagatcaacaacaaacagaatctggtagcaagtttatcaatgaagataaaccgcaaaaagatgcttaccaagcagcagttcaaaatgcaaaagatttaattaaccaaacaggtaatccaacactcgacaaatcacaagtagaacaattgacacaagcagtaacaactgcaaaagataatctacatggtgatcaaaaacttgctcgtgatcaacaacaagcagtaacaactgtaaatgcattgccaaacttaaatcatgcacaacaacaagcattaactgatgctataaatgcagcgcctacaagaacagaggttgcacaacatgttcaaactgctactgaacttgatcacgcgatggaaacattgaaaaataaagttgatcaagtgaatacagataaggctcaaccaaattacactgaagcgtcaactgataaaaaagaagcagtagatcaagcgttacaagctgcagaaagcattacagatccaactaatggttcaaatgcgaataaagacgctgtagaccaagtattaactaagcttcaagaaaaagaaaatgagttaaatggtaatgagagagtcgctgaagctaaaacacaagcgaaacaaactattgaccaattaacacatttaaatgctgatcaaattgcaactgctaaacaaaacattgatcaagcgacgaaacttcaaccaattgctgaattagtagatcaagcaacgcaattgaatcaatctatggatcaattacaacaagcagttaatgaacatgctaacgttgagcaaactgtagattacacacaagcagattcagataaacaaaatgcttataaacaagctattgctgatgctgaaaatgtattgaaacaaaatgcgaataagcaacaagtggatcaagcacttcaaaatattttaaatgcaaaacaagcattaaatggtgatgaacgtgtagcacttgctaaaacaaatggtaaacatgacatcgaccaattgaatgcattaaacaatgctcaacaagatggatttaaaggtcgcatcgatcaatcaaacgatttaaatcaaatccaacaaattgtagatgaggctaaggcacttaatcgtgcaatggatcaattgtcacaagaaatcactgacaatgaaggacgcacgaaaggtagcacgaactatgtcaatgcagatacacaagtcaaacaagtatatgatgaaacggttgataaagcgaaacaagcacttgataaatcgactggtcaaaacttaactgcaaaacaagttatcaaattaaatgatgcagtcactgcagctaagaaagcattaaatggtgaagaaagacttaataatcgtaaagctgaagcattacaaagattggatcaattaacacatctaaacaatgctcaaagacaattagcaatccaacaaattaataatgctgaaacgctaaataaagcatctcgagcaattaatagagcaactaaattagataatgcaatgggttcagtacaacaatatattgacgaacagcaccttggtgttatcagcagcacaaattacatcaatgcagatgacaatttgaaagcaaattatgataatgcaattgcgaatgcagcacatgagttagataaagtgcaaggtaatgcaattgcaaaagctgaagcagagcaattgaaacaaaatattatcgatgctcaaaatgcattaaatggagaccaaaaccttgcaaatgccaaagataaagcaaatgcgtttgttaattcgttaaatggattaaatcaacagcaacaagatcttgcacataaagcaattaacaatgccgatactgtatcagatgtaacagatattgttaataatcaaattgacttaaatgatgcaatggaaacattgaaacatttagttgacaatgaaattccaaatgcagagcaaactgtcaattaccaaaacgctgacgataatgctaaaacaaacttcgatgatgccaaacgtctagcaaatacattgctaaatagtgataacacaaatgtgaatgatatcaatggcgcaatccaagcagtcaatgatgcaatccataatcttaatggtgatcaacgactacaagatgctaaagacaaggcaattcaatctattaatcaagctttagctaataagctaaaagaaatcgaagcttcaaatgcgacggatcaagacaagcttattgcgaaaaataaagcagaagaattggcaaacagcatcatcaacaacattaataaagcaacaagtaatcaggctgtatctcaagttcaaacagcaggcaaccacgcgattgaacaagtgcatgccaatgaaataccaaaagcaaaaattgatgccaataaagacgttgataagcaagttcaagcattaattgacgaaattgatcgaaatccaaatctaacagataaggaaaaacaagcacttaaagatcgtattaatcaaatacttcaacaaggtcataacggcattaacaatgcgatgactaaagaagaaattgaacaagccaaagcacaacttgcgcaagcattacaagacatcaaagatttagtgaaagctaaagaagatgcgaaacaagatgttgataaacaagttcaagctttaattgacgaaatcgatcaaaatccaaatctaacagataaggaaaaacaagcacttaaagatcgtattaatcaaatacttcaacaaggtcataacgacattaacaatgcgatgacaaaagaagcaattgaacaagcaaaagaacgtttagcgcaagcattgcaagacatcaaagatttagtgaaagctaaagaagatgcgaaaaatgatattgataaacgtgtacaagctttaattgacgaaatcgatcaaaatccaaatctaacagataaggaaaaacaagcacttaaagatcgaattaatcaaatacttcaacaaggtcataacgacattaacaatgcgctgactaaagaagaaattgagcaggcaaaagcacaacttgcacaagcattgcaagacatcaaagatttagtgaaagctaaagaagatgcgaaaaatgcaataaaagccttagctaatgcgaagcgtgatcaaatcaattcaaatccagatttaacacctgagcaaaaagcaaaagcgctcaaagaaattgacgaagctgaaaaacgagcactacaaaacgttgagaatgctcaaactatagatcaattaaatcgaggattaaacttaggtttagatgacattagaaatacacatgtatgggaggttgatgaacaacctgctgtaaatgaaatttttgaagcaacacctgagcaaatcctagttaatggtgaactcattgtacatcgtgatgacatcattacagaacaagatattcttgcacacataaacttaattgatcagctttcagcagaagtcatcgatacaccatcaactgcaacgatttctgatagcttaacagcaaaagttgaagttacattgcttgatggatcaaaagtgattgttaatgttcctgtaaaagttgtagaaaaagaattgtcagtagtcaaacaacaggcaattgaatcaatcgaaaatgcggcacaacaaaagattaatgaaatcaataatagtgtgacattaacactggaacaaaaagaagctgcaattgcagaagttaataagcttaaacaacaagcaattgatcatgttaacaatgcacctgatgttcattcagttgaagaaattcaacaacaagaacaagcgcatattgaacaatttaatccagaacaatttacgattgaacaagcaaaatcaaatgcaattaaatcgattgaagatgcaattcaacatatgattgatgaaatcaaagctcgtactgatctaacagataaagagaagcaagaagctattgctaagttaaatcaattaaaagaacaagcaattcaagcgattcaacgtgcgcaaagcatcgatgaaataagtgagcaattggaacaatttaaagctcaaatgaaagcagctaatccaacagcaaaagaactagctaaacgcaagcaagaagctattagtagaattaaagacttttcaaatgaaaaaataaatagtattcgaaatagtgaaattggcacagctgatgaaaaacaagcagcaatgaatcaaattaacgaaattgtgcttgaaacaattagagatattaataatgcgcatacattacagcaagttgaggctgcattgaacaatggtattgctcgaatttcagcagtacaaattgtaacatctgatcgtgctaaacaatcgtcaagtactggaaatgaatctaatagccatttaacaattggttatggaactgcaaatcatccatttaacagttcgactattggacataaaaagaaacttgatgaagatgatgacattgatccacttcatatgcgtcactttagtaataatttcggtaatgttattaaaaacgctattggtgtggtgggtatctctggtttactagctagtttctggttcttcattgccaaacgtcgtcgtaaagaagatgaagaggaagaattagaaataagagataataataaagattcaataaaagagactttagacgatacaaaacatttaccacttttatttgcgaaacgtcgcagaaaagaagatgaagaagatgttactgttgaagaaaaagattcgctaaataatggcgagtcactcgataaagttaaacatacgccgttcttcttaccaaaacgtcgtcgtaaagaagatgaagaagatgtggaagttacaaatgaaaacacagatgaaaaagtgttgaaagataacgaacattcaccactcttattcgcaaaacgacgcaaagataaagaggaagatgttgaaacaacaactagtattgaatctaaagatgaggacgttcctttattattggctaaaaagaaaaatcaaaaagataaccaatccaaagacaaaaagtcagcatcaaaaaatacttctaaaaaggtagcagctaaaaagaagaaaaagaaagctaagaaaaataaaaaa

SEQ ID NO: 33994 - DNA, 575 bp, Staphylococcus aureus
atgcaatcttttgtaaaaatcatagatggttacaaggaagaagtaataacagattttaatcagcttatatttttagatgcaagggctgaaagtccaaacaccaatgataacagtgtaactattaacggagtagatggtattttaccgggcgcaattagttttgcgcctttttcattagtattaaggtttggctatgatggtatagatgttatagatttaaatttatttgagcattggtttagatctgtgtttaatcgcagacatccttattatgttattacttctcaaatgcctggtgttaaatatgcagtgaatacagctaatgttacatctaatttaaaagatggttcttcaactgaaattgaagtaagtttaaatgtttataaagggtattctgaatcagttaattggaccgatagcgagttcttattcgactctaattggatgtttgaaaatggaattcctcttgatttcacacctaaatatactcatacatcaaatcaatttactatttggaacggttctactgatacgataaatccacgattcaagcacgatttgaaaatattaattaa

SEQ ID NO: 33995 - DNA, 366 bp, Staphylococcus aureus
atgctttcagcacttatcccgtccacacatagctacccagctatgccgttggcacgacaactggtacaccagaggtatgtccatcccggtcctctcgtactaaggacagctcctctcaaatttcctacgcccacgacggatagggaccgaactgtctcacgacgttctgaacccagctcgcgtaccgctttaatgggcgaacagcccaacccttgggaccgactacagccccaggatgcgatgagccgacatcgaggtgccaaacctccccgtcgatgtgaactcttgggggagataagcctgttatccccggggtagcttttatccgttgagcgatggcccttccatgcggaaccaccggatcac

SEQ ID NO: 33996 - DNA, 631 bp, Staphylococcus aureus; identical to SEQ ID NO: 7833

SEQ ID NO: 33997 - DNA, 1014 bp, Staphylococcus aureus
atgtttgtcatctggagccatagaacagggttcatcatgagtcatcaacttaccttcgccgacagtgaattcagcagtaagcgccgtcagaccagaaaagagattttcttgtcccgcatggagcagattctgccatggcaaaacatggtggaagtcatcgagccgttttaccccaaggctggtaatggccggcgaccttatccgctggaaaccatgctacgcattcactgcatgcagcattggtacaacctgagcgatggcgcgatggaagatgctctgtacgaaatcgcctccatgcgtctgtttgcccggttatccctggatagcgccttgccggaccgcaccaccatcatgaatttccgccacctgctggagcagcatcaactggcccgccaattgttcaagaccatcaatcgctggctggccgaagcaggcgtcatgatgactcaaggcaccttggtcgatgccaccatcattgaggcacccagctcgaccaagaacaaagagcagcaacgcgatccggagatgcatcagaccaagaaaggcaatcagtggcactttggcatgaaggcccacattggtgtcgatgccaagagtggcctgacccacagcctggtcaccaccgcggccaacgagcatgacctcaatcagctgggtaatctgctgcatggagaggagcaatttgtctcagccgatgccggctaccaaggggcgccacagcgcgaggagctggccgaggtggatgtggactggctgatcgccgagcgccccggcaaggtaagaaccttgaaacagcatccacgcaagaacaaaacggccatcaacatcgaatacatgaaagccagcatccgggccagggtggagcacccatttcgcatcatcaagcgacagttcggcttcgtgaaagccagatacaaggggttgctgaaaaacgataaccaactggcgatgttattcacgctggccaacctgtttcgggcggaccaaatgatacgtcagtgggagagatctcac

SEQ ID NO: 33998 - DNA, 393 bp, Staphylococcus aureus; identical to SEQ ID NO: 8147

SEQ ID NO: 33999 - DNA, 366 bp, Staphylococcus aureus; identical to SEQ ID NO: 33995

SEQ ID NO: 34000 - DNA, 355 bp, Staphylococcus aureus
atgctttcagcacttatcccgtccacacatagctacccagctatgccgttggcacgacaactggtacaccagaggtatgtccatcccggtcctctcgtactaaggacagctcctctcaaatttcctacgcccacgacggatagggaccgaactgtctcacgacgttctgaacccagctcgcgtaccgctttaatgggcgaacagcccaacccttgggaaacctttcttgacttgtgacaatcgcttgcttctttcctctccttcggctctcgcttactcatttagctctactaaactcgttgcactcttttctcgtttcgtcagattcaaacgttttcacttcgccaagccatct

SEQ ID NO: 34001 - DNA, 366 bp, Staphylococcus aureus; identical to SEQ ID NO: 33995

SEQ ID NO: 34002 - DNA, 366 bp, Staphylococcus aureus; identical to SEQ ID NO: 33995

SEQ ID NO: 34003 - DNA, 631 bp, Staphylococcus aureus; identical to SEQ ID NO: 33990

SEQ ID NO: 34004 - DNA, 393 bp, Staphylococcus aureus; identical to SEQ ID NO: 8147

SEQ ID NO: 34005 - DNA, 366 bp, Staphylococcus aureus; identical to SEQ ID NO: 33995

SEQ ID NO: 34006 - DNA, 1833 bp, Staphylococcus aureus
ctaacagatacaacctttagagatgcacaccaatcattattagctacacgagttagaactaaggatatgattaatatcgcatccaaaacagcggacgtatttaaagatggtttctcactagaaatgtggggcggtgctacatttgatgtggcatataatttcttgaaggaaaacccatgggaacgacttgaacgtctacgtaaagctattccaaatgtattattccaaatgttgttacgtgcttcaaacgcagttggttataaaaactatcctgataatgttattcataaattcgtacaagaaagtgctaaagcaggcatagatgtctttagaattttcgattcattaaactgggtagatcaaatgaaagttgccaatgaagcagtacaagaagcgggcaaaatctcagaaggtactatttgttatacaggtgacattttaaatcctgagcgatcaaacatttatactttagagtattatgtcaaactagctaaagagttagaacgtgaaggtttccatattttagcgattaaagatatggcaggcttattaaaacctaaagccgcttacgaattgattggtgagttaaaatcagctgtagatttaccaattcatcttcacactcatgatacaagtggtaatggtttattaacatacaaacaagcaatagatgctggtgtcgatatcattgatactgctgttgcttcaatgagtggtttaacaagtcagccaagcgccaattcgttatattatgcattaaatggcttcccacgccaccttagaactgatattgaaggtatggagtcacttagtcattattggtcaactgtacgtacttattattcagactttgaaagtgatatcaaatcaccgaatactgaaatttatcaacatgaaatgcctggtggacagtattcgaatttaagtcaacaagctaaaagtttaggtttaggcgaaagatttgatgaagtcaaagatatgtatcgcagagtgaatttcttatttggtgatatcgtaaaagtaacaccatcgtctaaagtagttggtgatatggcactttatatggtacaaaatgatcttgatgaacaatccgtgattacagatggctataaattagatttcccagaatcagtagtgtcgttcttcaaaggtgaaataggacaacctgtaaatggttttaataaagatttacaagcggttattttaaaaggccaagaagcactaacagctcgtccaggtgaatatctagagccagttgattttgaaaaagtccgtgagttgcttgaagaagagcaacaaggtcctgttacggagcaagatattattagttatgtactatatccaaaagtatatgaacaatatattcaaactagaaatcaatacggaaacttatcgttacttgatacgcctacattcttctttggaatgcgtaatggtgaaacagtagaaatcgaaatcgataaaggtaaacgattaattattaaactagaaacgattagtgaaccagatgaaaatggtaatagaacgatttactatgcgatgaatggtcaagcgagacgtatttacattaaagatgaaaatgtgcatacaaatgcgaacgttaagccaaaagcagataagagtaatccaagtcatatcggtgctcaaatgccaggttcagtaactgaagtcaaggttagtgtaggtgaaactgtgaaagctaatcagccgttgctaattactgaagctatgaaaatggaaacaacaattcaagcaccatttgacggtgtgattaaacaagtaactgtaaataatggtgacacaatagcgacaggcgatttattaatcgaaatt

SEQ ID NO: 34007 - DNA, 1341 bp, Staphylococcus aureus
atggagtttttatctttagttattgttgttttagcagcgtttttaactccaataattgtcaatcgattaaatattaatttcttgccagttgttgttgcagaaattttgatggggattgtgattggaaattcatttctaaatatagtagaaagggattcaattctaaatattttatcaacgttaggctttatctttttaatgtttttaagtggtttagaaattgattttaaagcttttaaaaaagataaacgcgcacgtcaaggacaaaatgatgatgaatcctcaattccagggcatcttaatctagcgttaactgtatttgcatttattatgattatttcgattcttttagcgtatgtatttaaatggcttggattagtggatgatgtgttattaatggtcattatcatttcaactatttccttaggcgtagttgttccaactttaaaagaaatgaatattatgagaacaactatagggcaatttatcctattagtagcagtacttgcggacttagtaactatgattttattaacggtctatggcgcaatcaatggtcaaggcggcagtacaatatggttaataggtatattagttgttttcacagcaatttcatatattttaggtgttcaatttaaaagaatgtcatttttacaaaaattgatggatggtacgacgcaaatcggtattcgtgcggtatttgcattaataatattattagtagccctagcagagggagttggcgcagaaaatatattaggtgcattcttagcaggtgtcgttgtttcattattaaatccagatgaagaaatggttgaaaagttagactcatttggttatgggttctttattcctattttctttataatggttggtgtagatttaaacataccttcattaattaaagaaccgaaattactaattatcataccgattttaatcgttgcatttatcatttcaaaattaattccagtcatgtttattcgacgttggtttgatatgaaaacaacgattgcatcagcatttttattaacatcaacattatcgctcgtgatagctgcagccaaaatttcagaaagattaaatgctatttcagctgaaacgtcaggtatattaattttaagcgcagtcattacatgtgtattcgttccgattattttcaaaaaactgtttccagttccagatgagtttaaccgtaaaattgaagttagtttaattggtaaaaatcaattaacgattcctatagcgcaaaatttaacatctcagttatatgacgtgacattatattatcgcaaagacttgagtgatcgtcgtcaattgtcagatgatatcacgatgata

SEQ ID NO: 34008 - DNA, 2598 bp, Staphylococcus aureus
acgacattgccgaatggttggacatcaaatttaacaaaagcggataagaataatggctcattatctattacaggtagagtgagtatgaatcaggcatttaacagtgatattacatttaaagtgtcagcgacagacaatgtcaataatacgacaaatgatagtcaatctaaacatgtttcaattcatgtaggtaaaattagtgaagatgctcatccgattgtattaggaaatactgagaaagttgtagtagtcaatccgactgctgtatctaatgatgaaaagcaaagcataattactgcctttatgaataaaaaccaaaatataagaggatatttagcatcaactgatccagtaactgtcgataataatggtaatgtcacattacattaccgtgatggctcatcgacaacgcttgatgctacaaatgtgatgacatacgaaccagttgtgaaacctgaataccaaactgtcaatgctgctaaaacagcaacggtaacgattgctaaaggacaatcatttagtattggtgatattaaacaatattttactttaagtaatggacaacctattccaagtggcacatttacaaatattacatctgatagaactattccaactgcacaagaagttagtcaaatgaacgcaggcacgcagttataccatataactgctacaaatgcgtatcataaagatagtgaagacttctatattagtttgaaaatcatcgatgtgaaacaaccagaaggcgatcaacgtgtatatcgtacatcaacatatgatttaactactgatgaaatctcaaaagtaaaacaagcatttattaatgcaaatagagatgtaattacgcttgccgaaggtgatatttcagttacaaatacacctaatggtgctaatgtaagtactattacagtaaatattaataaaggtcgattaacgaaatcattcgcgtcaaacctagctaatatgaatttcttgcgttgggttaatttcccacaagattatacagtgacatggacgaatgcaaaaattgcaaacagaccaacagatggtggtttatcatggtctgatgaccataaatctttaatttatcgttatgatgctacattaggtactcaaattacgacgaatgatattttaacaatgttaaaagcaacaactacagtgcctggattgcgaaataacattactggtaatgaaaaatcacaagcagaagctggcggaagacctaactttagaacgactggttattcacaatcaaatgcgacaactgatggtcaacgtcaatttacgttgaatggtcaagtgattcaagtgttagacatcatcaacccttcaaacggttatggtgggcaacctgttacaaattcaaatactcgtgcaaaccatagtaactcaactgttgttaacgtaaacgaaccggcagctaatggtgctggcgcatttacaattgaccacgttgtaaaaagtaattctacacataatgcaagtgatgcagtttataaagcacagttatacttaacgccatatggtccaaaacaatatgttgaacatttaaatcaaaatacaggaaatactactgacgctattaacatttattttgtaccaagtgacttagtgaatccaacaatttcagtaggtaattacactaatcatcaagtgttctcaggtgaaacatttacaaatactattacagcgaatgataactttggtgtgcaatctgtaactgtaccaaatacatcacaaattacaggtactgttgataataaccatcaacatgtttctgcaacggcaccaaatgtgacatcagcaactaataagacaatcaatttattagcaactgatacaagcggcaatacagctacaacttcgttcaatgtaacagtgaaacctttgcgtgataaatatcgagttggtacttcatcaacggctgctaatcctgtgagaattgccaatatttcgaataatgcgacagtatcacaagctgatcaaacgacaattattaattcgttaacgtttactgaaacagtaccaaatagaagttatgcaagagcaagtgcgaatgaaatcactagtaaaacagttagtaatgtcagtcgtactggaaataatgccaatgtcacagtaactgttacttatcaagatggaacaacatcaacagtgactgtacctgtaaagcatgtcattccagaaatcgttgcacattcgcattacactgtacaaggccaagacttcccagcaggtaatggttctagtgcatcagattactttaagttatctaatggtagtgacattgcagatgcaactattacatgggtaagtggacaagcgccaaataaagataatacacgtattggtgaagatataactgtaactgcacatatcttaattgatggcgaaacaacgccgattacgaaaacagcaacatataaagtagtaagaactgtaccgaaacatgtctttgaaacagccagaggtgttttatacccaggtgtttcagatatgtatgatgcgaaacaatatgttaagccagtaaataattcttggtcgacaaatgcgcaacatatgaatttccaatttgttggaacatatggtcctaac

SEQ ID NO: 34009 - DNA, 753 bp, Staphylococcus aureus
atgaaaactttgaagggagctttatttatgtcaataaaacctaaagtagacatagatgtactgctatatatgtttcaagaatatgaaaaaggcgtgtcgtttcaatacttaatcgatacattacaattagatattaatgtcaatactttgtatcctaagtataaatattataaaacccatggtattgaaacactacttacacaaaaacaatacaatcactattcaaaggaactaaaattaaaagttgtaaatgaatatttgaattcaaatcaatcaacccaagacatcgcaatcaaatacaatattcgtagttcgacacaagtcaaaaattggataaaaatgtatactgtaggaaaagagattaagaatcaatctcctaaaactggggtgtatatcatgaaagcaagaaaaaccacatttgaagaacgtgtaacaattgttgaatattacttgaatcataaacaatcttatagagaagttgcagaacactttaatatctcatacggtcaaatttaccagtgggttcataagtatcaagcacatggtaaaaatggattagtagatggcagaggcaaaggaaaacccaaatctatgatgacgccagaagaacaaaaagaagctgaaattcaagcattaaaagcacaaaatcgattattagagatggaaaatgacgttttaaaaaagtttcaagcattggaaagagagatgattcaaagagaaaacaaatcacggcatacaaaacgatcgaagcgt

SEQ ID NO: 34010 - DNA, 726 bp, Staphylococcus aureus
atgtcaataaaacctaaagtagacatagatgtactgctatatatgtttcaagaatatgaaaaaggcgtgtcgtttcaatacttaatcgatacattacaattagatattaatgtcaatactttgtatcctaagtataaatattataaaacccatggtattgaaacactacttacacaaaaacaatacaatcactattcaaaggaactaaaattaaaagttgtaaatgaatatttgaattcaaatcaatcaacccaagacatcgcaatcaaatacaatattcgtagttcgacacaagtcaaaaattggataaaaatgtatactgtaggaaaagagattaagaatcaatctcctaaaactggggtgtatatcatgaaagcaagaaaaaccacatttgaagaacgtgtaacaattgttgaatattacttgaatcataaacaatcttatagagaagttgcagaacactttaatatctcatacggtcaaatttaccagtgggttcataagtatcaagcacatggtaaaaatggattagtagatggcagaggcaaaggaaaacccaaatctatgatgacgccagaagaacaaaaagaagctgaaattcaagcattaaaagcacaaaatcgattattagagatggaaaatgacgttttaaaaaagtttcaagcattggaaagagagatgattcaaagagaaaacaaatcacggcatacaaaacgatcgaagcgt

SEQ ID NO: 34011 - DNA, 726 bp, Staphylococcus aureus
atgtcaataaaacctaaagtagacatagatgtactgctatatatgtttcaagaatatgaaaaaggcgtgtcgtttcaatacttaatcgatacattacaattagatattaatgtcaatactttgtatcctaagtataaatattataaaacccatggtattgaaacactacttacacaaaaacaatacaatcactattcaaaggaactaaaattaaaagttgtaaatgaatatttgaattcaaatcaatcaacccaagacatcgcaatcaaatacaatattcgtagttcgacacaagtcaaaaattggataaaaatgtatactgtaggaaaagagattaagaatcaatctcctaaaactggggtgtatatcatgaaagcaagaaaaaccacatttgaagaacgtgtaacaattgttgaatattacttgaatcataaacaatcttatagagaagttgcagaacactttaatatctcatacggtcaaatttaccagtgggttcataagtatcaagcacatggtaaaaatggattagtagatggcagaggcaaaggaaaacccaaatctatgatgacgccagaagaacaaaaagcagctgaaattcaagcattaaaagcacaaaatcgattattagagatggaaaatgacgttttaaaaaagtttcaagcattggaaagagagatgattcaaagagaaaacaaatcacggcatacaaaacgatcgaagcgt

SEQ ID NO: 34012 - DNA, 1278 bp, Staphylococcus aureus
atgcaaagtttagataagaatttccgacatttatctcgtcaacaaaagttacaacaattggtagataagcaatggttatcagaagagcaattcaacattttattgaatcatccattaattgatgaggaagtagcaaatagtttaattgaaaatgtcatcgcgcaaggtgcattacccgttggattattaccgaatatcattgtggacgataaagcatatgttgtacctatgatggtggaagagccttcagttgtcgctgcagctagttatggtgcaaagctagtgaatcagactggtggatttaaaacggtatcttctgaacgtattatgataggtcaaatcgtctttgatggcgttgacgatactgaaaaattatcagcagacattaaagctttagagaagcaaattcatcaaattgcggatgaggcatatccttctattaaagcgcgtggtggtggttaccaacgtatagctattgatacatttcctgagcaacagttactatctttaaaagtatttgttgatacgaaagatgctatgggcgctaatatgcttaatacgattttagaggctataactgcatttttaaaaaatgaatttccgcaaagcgacattttaatgagtattttatccaatcatgcaacagcgtccgttgttaaagttcaaggcgaaattgatgttaaagatttagcaaggggcgagagaactggagaagaggttgccaaacgaatggaacgtgcttctgtattggcacaagttgatattcatcgtgctgcaacacataataaaggtgttatgaatggcatacatgccgttgttttagcaacaggaaatgatacgcgtggtgcagaagcaagtgcgcatgcatacgcgagtaaagatggtcaatatcgtggtattgcaacatggagatacgatcaagaacgtcaacgtttaattggtaccatagaggtgcctatgacattggcaatcgttggcggtggtacaaaagtattaccaatagctaaagcatcattagagctactaaatgtagagtcagcgcaagaattaggtcatgtagttgctgccgttggtttagcacaaaactttgcagcatgtcgcgcgctcgtttctgaaggtatccagcaaggccatatgagcttgcaatataaatctttagctattgttgtaggtgcaaaaggtgatgaaattgcgcaagtagctgaagcattgaagcaagaacctcgtgcgaatacacaagttgctgaacgcattttacaagatttaagaagccaacaa

SEQ ID NO: 34013 - DNA, 390 bp, Staphylococcus aureus
ttgaaaacggtcggtgaagcgctaaaaggtagacgtgaaaggttaggaatgactttaacagaattagagcaacgtactggaattaaacgtgaaatgctagtgcatattgaaaataatgaattcgatcaactaccgaataaaaattacagcgaaggatttattagaaaatatgcaagcgtagtaaatattgaacctaaccaattaattcaagctcatcaagatgaaattccatcgaaccaagccgaatgggacgaagtaattacagttttcaataataataaagacttagattataagagtaaatcaaaagagccaatacaattattagtaatcatgggtattacagttttaataactttattgttatggatcatgttagttttaatattt

SEQ ID NO: 34014 - DNA, 1563 bp, Staphylococcus aureus
atgaaaaatttccaagtagtaccttatttaaatatgaataacttttctgataacatattacgttatattgatgataattcattaaaaaagataaaaaattccctgatgaaaaataataaaagtgctttgctaataatcgatgatgttgaaagaatgagtgacaaagtaagttttgaagaatttttgggatttattagaaatgatttaattgattatttagactgtaaagtgctatttataggaaatttagatgagctaaataaaaaagcggattttcataagaatagtgagaaaataatttctagaatattaaagtttcctaataatagagaagtagcaatggatatagtaaaaagtaatttacctaagttatttgtaaagaacatctctactaaagagctatttaatggtttttttgatataagtgatgaaaaaaaagaaattattttcgaaaaatctaaacaaaataatttaaattataaatattaccatttgaatatgagaactttgaatttagtagtttcaaacttcaagttaattattaataaaatgcaagatgagattaaatataaatcaaaagattttaaaatcaccttgtacatttcattattcatttcattattcattctgtataatgaatttcgaagcggaaatttaggtgaatctgaaattaaggatcttcaatttacatataatgattttaacaatttaaatacgaaaacatctattgctttgtttaaatacttatacaaaaataatgaactagcaaattatgtcttttttgatatagagctaaagaacttattattatatggtatttttgatgaatcaatttttttgaaaaatataacgaataacttcaaagaagaagatgctaaagctgatttattaaatgtattaaaagaattctttaaattaagtgaaagtgaactacttgaaaaagaaattcaagctatagaaataataaaagataaaaacaatgaaaattttaattataaagtaaaagcttatttatctttattaaatttaaaaggaaaaaacttatatttaatagatggcattaaaattagcgaattagaagatgaattagtggataattacgatttgcatcagaataatttaatagttggagatacgataaatagactagatttagttagcttttcaaacgagcaactatatgaagaaatcaaaagtttaaaagaccgtttaataaataaaagaacaactttgatgacttctatatataaccaatacttagaaactattttaaatggtgactttacaaatagaactaaattaaaagaagcgtatattggaatgaaagatatagatactatagaaataatctataataatttaaacaaagtatcaaatgagcttaaaagtagtaatgagaaaattattaatttaagtgcattcattaaagataatcattgtaataatgatgataatattcaattagaatatattataggtgagatgaaaaaattaaaagatggtactaaagatagagttacacaaatgtgttttagcatgttgatcgatacactgaaagatata

SEQ ID NO: 34015 - DNA, 753 bp, Staphylococcus aureus; identical to SEQ ID NO: 34009

SEQ ID NO: 34016 - DNA, 618 bp, Staphylococcus aureus
ttgcaactacctgataatgaagtagcacaaatttctgattactaccctagaaattcaattgatactaaagaatatatgagtacattaacttatggattcaacggtaacgtgactggtgatgattctggaaaaattggcggtttgattggtgcaaatgtttcaattggtcatacactcaaatatgttcaaccagatttcaaaacaattttagaaagtccaactgataaaaaagtaggttggaaagttatatttaacaatatggtgaatcaaaattggggaccatatgacagagattcttggaacccagtatatggcaatcaacttttcatgaaaacaagaaacggttcaatgaaagcagcagagaacttccttgaccctaacaaagcaagttctttattatcttcaggattctcaccagactttgctacagttattactatggataggaaagcaaccaaacaacaaacaaatatagatgtaatatacgaacgagttcgtgatgactatcaactacattggacttcaacaaattggaaaggtaccaatactaaagataaatggacagatcgttcttcagaaagatataaaatcgattgggaaaaagaagaaatgacaaat

SEQ ID NO: 34017 - DNA, 849 bp, Staphylococcus aureus
atggatatatcattaaatttcaatcattatattgatttaaaaaagagtattaaaaatttatgcttaatgaaaaagtttgagccctatgtaaccaatgaaaattatgattttattgaaatgcctttggtagtagatggaaattatgtgctcttaaaaatttatcaagaaaaagacgctttaattaaacttcattatcaggaagtattaaactctaatcgaaaaagtgtaatacaagaaagtgatatagttagaatttcacgaagcatacttaatgaagctcttgatatcaatagtaatataaaatataaatctgatacttttggattaactattatatccgatgcagataattacacaacattaatacggactatacttgctcagcaagtgagcatagaacaatccaataaactatttttattatttattaatacttatggtgaaatttttgaactaaataataaagaatacacttttttaaattgggataaaatattcagtcgaatatataaagaacaaaaagttttagtaggtacgactaataatagaaagcaggctatcataactcttgctgaattacatataaaaaacggcttaagagaaaatgttttacaagttatttcaagtataaaaggtataggttcttggacagtgcaaatgtttatgctatttcaatttcctcacgtagcttttgaaaatattcctgtagcagacataggattgcacagggccatagaaaaaaatcatgatcttccacataaatcgattgataaaagtaagggagaatcttacttccaaaacatgaaatctatagatgtgtttaaatattggtatatatacatggttgaa

SEQ ID NO: 34018 - DNA, 528 bp, Staphylococcus aureus
atgtcaataaaacctaaagtagacatagatgtactgctatatatgtttcaagaatatgaaaaaggcgtgtcgtttcaatacttaatcgatacattacaattagatattaatgtcaatactttgtatcctaagtataaatattataaaacccatggtattgaaacactacttacacaaaaacaatacaatcactattcaaaggaactaaaattaaaagttgtaaatgaatatttgaattcaaatcaatcaacccaagacatcgcaatcaaatacaatattcgtagttcgacacaagtcaaaaattggataaaaatgtatactgtaggaaaagagattaagaatcaatctcctaaaactggggtgtatatcatgaaagcaagaaaaaccacatttgaagaacgtgtaacaattgttgaatattacttgaatcataaacaatcttatagagaagttgcagaacactttaatatctcatacggtcaatttaccagtgggttcataagtatcaagcacatggtaaaaatggat

SEQ ID NO: 34019 - DNA, 1899 bp, Staphylococcus aureus
gtggcattaattatgagttttaatgagattatatttaaaaatttccgccaaaatttatcacattatgccatttatcttttttcgctaattacaagtgtagttttattttttagcttcgtagcactaaaatatacgcatagcattaacataactgagacatatcccattattaaagaaggatcgcaagtaggtagttactttctattttttatcattgttgcctttttgctatatgccaatgtactatttcttaaacgtcgtagttctgaacttgcattatatcaaacattaggtttatccaaattcaacattatatatatattgatgtttgaacaattattaatattttcaataacagctatattgggcattacgattggtatctttggttctaaaattttattaatgatagtgtttactttattaggtatcaaagaaaaggttccaattattttcagctttagagcagtgtttgagacactattattaattggcgttgcttatttcctaactgcagctcaaaatcttatcttagtattgaaacaatctatttcagaactatcaaagcataatcaggctaagcaaatgaatcataataaaattacatttgaagaagttatactaggaattctaggtattattttaatcatcagtgggtattactactctttacgcattgtacattactatgatgcaattggcgtccttatgtttatattgtttgcgacagtaattggggcgtatttattttttaaaagttcagtatccttggtatttaaaattattaaaagctttaaaaaaggtgtaataagtgtaaatgatgtcatgttttcttcatctattatgtatcgtattcagaaaaatgcattttcacttactgttatggcaattatttcagctattactttatcagtactttgttttgctgctatcagtagagcaactttattaagtgaaattaagtatacgtcacctcatgatgttacgattaaagatcaacagaaagcgaatcagttagcaagtgaattgaacaaccgaaaaattcctcatttttataattataaagaagtgattcatacaaaactttataaggatgacttatttgatataaaagcaaaggaaccatataacgtaacaattactagtgacaaatatattcctaatacggatttgaaacgtggtcaggctgatttatttgtagcggaaggcgctattaaagatttagtgaagcataagaaacatggtaaggcagtaataggaacgaaaaagcaccatgtggatattaaattacgtaaagatatcaataaaatttactttatgactgatgttgacttaggtggaccgacgtttgtgttaaacgatcaagattatcaagagataagaaagtatactaagccaaaacacattgtttctcaatttggatttgatttaaaacataaaaaagaaatgttagcattggaaaaagcaacaaataaagttgacaaatctattgaaacaagaagtgaagccataagttcgatatcgagtttaacgggaatattgttatttgtaacctcatttttaggaattagtttcctaattgccgtatgttgtatcatatacattaaacaaatagatgaaactgaagacgagttagaaaattatagtattcttagaaaacttggatttacacaaaaagatatggcaaaaggattaaaatttaaaattgcgtttaattttgggttaccattagtcattgcactttcacatgcatactttacatcattagcatatatgaaattgatggggacaacgaatcaaataccgatatttatagtaatgggactatatatttgtatgtatgccatttttgcaatgacagcttataatcattctaagcgtacaatcagacattcaatt

SEQ ID NO: 34020 - DNA, 1236 bp, Staphylococcus aureus
atgagattaaataaatttattggcgattcgttcttaatgattttaagcagtggcatcgctcaagtcatattaatcatcactaccccaattattacaagactatattcacctacagaatttggtgagtttacaattttttcaaatatcgcaatgattttaataccaataataaatgcaagatacgatttgttgattgtgaatactaaaaatgaccgtagtgctaatatactttcacaaatcagttttttgatatcattgcttattttattaatactgataccaatatttgcgattagtgcatggttatacccaaactttatattagattttattttcattattattatgttgtttttggtaagtttaacaaacatttttacaaattatctaaataaggaaagaaaatataaagtgttaagtttgattaatgtgtttagagctggatcaatggctttacttcaaattattttcggacttttagcattaggaagtctaggattaattattggtttttcattatcctatatcgcaggcattacactaggatataaaacgtttaaaaagcactttaatattgtgagagataaagaagaaactaaagcattatttttagaaaataaaaatcagttagtttattcaacaccatcaatattattaaatagtttgtctttctcggttgttgtgttctttataggtattttgtataccaatacagaagtaggtatttatggtatggccataagagtactaggcataccagtgacaattatttcattagggttatcaaaaatatttatgcaacaagctaatgactattatattgaatatggtaacttccgaaatttattacttaaatttagttccatactggttatagtttctataattctttatgtgccactttatttgttcagtgaagaattagtcaatatattattaggacatagctgggttgacgcaattacagttataaaaattgttattccattatttgttataaggctgattgtatcaacggtatcactttctgtgattgtattacaaaaacaacagttagaattaatactgcaagcgttatttttaataggtactactgcaacatttgttatatcaaaaatgcttaatttaacttttttaaactttgtatctattaatacagttgttttaatcgtatcgtacatgatatttttcatagcactctattattttgctaaaaataaacagttcaaaaattct

SEQ ID NO: 34021 - DNA, 1668 bp, Staphylococcus aureus
atggggtacaaagttgatatgtctgaagtgcacaatatgcaaaagtctattgattcaagcttaagtgcaataaatacaaaggttagcacgcttagcagtagcataaacaaccttataaatactgaaggattcgaaggtcagacagcaagtagtgtcaaaaactatagtaagacatttcatttacaatcaataaaaaagattgaaacaataaacaaagattttaaatcagatattgcgaaatctatacgtaaattccaaagtgaagttgataataatgcttcagctatattggatgaagacgaaataaaaaaatacaaaaaagatattgatgatgcattaaaagatgttttcaaatcttctaaagatgcaaacggagctatttcagatgtttcagatttaacaacagccaaaaaaataaagacagaaaacttggccaataaaatgggagattttaataaagatattgatcaaacggtggaaagattaacgaccttcgacgccaacaattctatagatggtgataagacagataacttaataactgaattaagtggtgtaaattcatatgtcaaaaacatgaagccaaaccgtgcaagaattagttctacaagtggaaaaattgaaggtgcaattgcaaggcataaaacaagtgaagagttagtaagatggcaaacttacatggaaacgttaagtgaaaatctttataaaacaccaggtctaagtaaagcagcttctgacataattacccaagctggacgcgagtactatgctatcaaagctgtagggaatggcagtgctttaagaggatataaagaatatctgaaaacacgagatattaataaattaattaacaaaatgaataaaaaccaattaaaaagaatgtcattggtattaaatacagatagaggtaatattaaaataaaaaatgcagtaaaaatggcaagtgaatttgcccgtaataatccttttaaaaaaggaaatttagtaaattggatgagcaaagtccaagggtatcaaagtgtaagtgctcaaatattaaaaaaggggttgcaagataagaactttaaatatacatttggagatgcaaagaaattttttgatacagctgatatgaaaaaagcagcagtcacagaatttaaaaatacctttgtaccacaaaatataagagaaaccttctttaagaaagaaaatttaacatctaagacagcattaaagaaaaatatgagtaaattctggaatgaagatattaagggtggaatcaaagagtttaaattagactttgctaacaaaaatatcattggtaaactcggcaaattgttgaaactaggaggcaaggctttaaaaccattaggatttattactgcaattactgacaacataggaaagaaatcttggcaagaaaaattagttggtatgggggtagatttaagtgctattggtgcaagtgcagctgcaggtgcagctgttggaacggcaataccattacctgtagtaggaacagttgcaggtgcattagctggagcagcagtgggtatagctttagattataaaataccgtatcttgataagtctgcaacagaattagctaaagatggtattaactcgggtattaacaaagttaaaagtggatttggaaaagtaacttcaggatttaaaacagttttcgga

SEQ ID NO: 34022 - DNA, 1305 bp, Staphylococcus aureus
ttgtatcacaaggcattttacaagtttgtattatcggtattaagcttgccattatttttatatgcagtgataaagtttttcttttctgctaagagaaaaaatttttacgctaataattctgaaatttcagaaatcgaacaggcgttacatcaaaaatataaatatttatcgcagcaaaagtcatccacacaaatacataaagaagcattaaaaatattcaagacacaaagttctaatacgaattcaaagaatattgaacaagcacatttttcaacatactttgaaaatgtattatttcataagttcatcattatcaaagtgatattggcgttaccgatgttcatcttattgactatttatttacagccattagttagatatatttttgagcgaattgtcatggctgtgattgtcatcattggtgttattgtcagtgtgtttagcattctgtatttttcaccgcttgatgcggcttatagcatactgggacaaaatgcaacaaaggcacagatacatcaattcaatgtattacatcatcttaacgaaccttattttattcaattgtgggataccatcaagggtgtttttacctttgacttaggtacgacttacaaagggaatgatgttgtgactaaagcagttggcgaaagaattccaattacaataattgtcgcagtattagcgctaattgtggcattaattattgcaataccaattggtattatcagtgcgatgaagcgaaatagttggcttgatatcacgttaatgataattgcattaattggtttgtctattccaagtttctggcaagggttattattcattttagcgttctcattgaaattggatattttgccaccatcttatatgccagaacatccaatatcgttgattttacctgtacttgtcattggaacaagtattgctgcttctatcacgcgtatgacaaggtcttctgtacttgaagtaatgcgcagcgattatgttttaactgcttatgcaaaaggattatcgacgacacaagtggttattaaacatattttgaaaaatgccattattccaattgtaacgctagttggtcttctagtggcagagttactaggcggttcagcagtgacggagcaagtatttaacattaatggtatcggtcgttatatcgtccaaaaacaactaatacctgatatcccagcagtcatgggtggggtcgtatatatatcaattgtaatatctttagcaaacttaattattgatatattttatgctttaatcgatccaaaattacgtagtgaaattaacgaaaggaag

SEQ ID NO: 34023 - DNA, 609 bp, Staphylococcus aureus
gtgaacgatatgttaattagtcttgtaatcccagtttttgctttgttagttattggtggtattatttggatgattatagaaggtatagtacatatttcaaaaaagaataaagcaattgataacttttttaaccaagttaataaagtaagtgagacatataaattcgctactacttttttatttctaatcttggctacggcgggtatttctcaattttatctatattatatagtatcagcgttacttttttggcttgtcatacttacctttggtattgcaggtatcatttttttaatgccatatggattatgttttctaccgttttataagcaaaaaaagaaaaaacagacatttaaaaaatacatggtttacactacgattggtttgtcaatttgtctaggcttatctctagttttggttcacactacgaaaatttatatggacgaaggtggcgtaagatactattacggtagttttgtaatgaaacaagcgggcggttatgcttatttagctttagcagtactttcaacgttgttaattgttgcgaaaaaagctacaaataaaaataaagaaatcgaaaccgtcgacaatacaaatataatggaaaga

SEQ ID NO: 34024 - DNA, 1713 bp, Staphylococcus aureus
atggggaagcttattaaatatatttcaatacttcttattgtcgttttagtgttgagcgcttgcggaaaaagcagtaataaagatgaaggagtaaaagatgctactaaaacagaagcgtcaaaacataaaggtggtacgctaaatgtagcgttaacagcaccgccaagtggtgtttattcttcgttattaaatagtacacatgcggatgctgtagttgaaggatattttaatgaaaacttattaacaattgataaaaaaatacgtcctaaatcatatattgcttcatggaaggacatcgagccggctaagaaaatagaatttaaaattaaaaaaggtattaaatggcatgatggtaatgaattgaaaattgatgattggatttattcaattgaagtcttagctaacaaggattacgaaggtgcttattatccaagtgtagaaaatatccaaggtgcaaaagattatcatgaaggaaaagctgatcatattagcggattgaagaaaatagatgactacacaatgcaggttacatttgataaaaagcaagaaaattacttaacaggatttattactggacctttattaagtaaaaaatatttatcagatgtaccaattaaagatttagcgaaatcagataaaatccgaaaatatcctattggtattggaccatataaagttaagaaaatcgtcccaggtgaggctgttcaacttgttaaatttgatgattattggcaaggtaagcctgcattagacaaaatcaatttaaaagttattgatcaagctcaaattattaaggcaatggaaaaaggcgatattgatgttacgaatgatgctaccggtgcaatggcaaaagatgctaagtcatctaatgctggtctcaaggtattatctgcgccaagcttagactacggtttaataggattcgtatctcatgattacgataaaaaagctaataaaactggtaaagtgagaccaaaatatgaagacaaagaattacgtaaagcaatgctttatgcaattgatagagaaaaatggatcaaagcatttttcaatggttacgctagtgaaataaatagttttgtaccatcaatgcattggatagcagctgatcctaaggaactaaacgattataaatatgatcctgaaaaagctaaaaaaatcttagataagttaggttataaagatcgagatggtgacggatttagagaagatcctaaaggtaataaatttgagattaactttaaacattattcaggttcaaatcctacttttgaaccaagaactgctgcgataaaagatttctgggaaaaagttggcttgaaaacaaatgtgaagttagtagaattcggtaaatataatgaagacttagcaaatgcatcaaaagatatggaagtgtacttcagatcatgggcaggtggtacagatccagacccatcagatttataccacactgatagacctcaaaatgaaatgagaacagttttaccaaaatcagatcaatatttagatgatgcgttagacttcgataaagtaggcattgatgaaaagaaacgtaaagatatttatgttaaatggcaaaaatatatgaatgatgagttacctggattaccaatgttccaaggtaaatcgataactatagttaatgataaagtacgaaacttagacattgaaattggaactgatcaaagtttatataatttaactaaagaagct

SEQ ID NO: 34025 - DNA, 1137 bp, Staphylococcus aureus
gcgcaaaagggaaatccagtacaacgtttgatcaaattgttaggggatatttttataccaatattacctgcgattgtgacagctggtttgttaatggggatcaataatttacttacaatgaaaggtttatttggtccaaaagcacttattgagatgtatccacaaattgctgatatttcaaacatcattaatgtgattgcgagtacggcatttattttcttaccagcattaattggttggagtagtatgcgtgtatttggtggtagtccgattctaggcatagtcttaggtttgattttaatgcatccgcaattagtatctcagtatgatttggcaaaagggaatattccgacgtggaacttatttggcttagagattaagcagttgaattaccaaggtcaagtgttgccagttttaattgcagcttatgttctagctaaaattgaaaaaggattaaataaagtcgttcacgattcgataaaaatgttggtcgttggacccgtagcgcttttagttactggatttttagcatttattatcattggaccagttgcgttattgattggtacaggtattacatctggtgttacatttatattccaacatgcaggatggcttggcggagcaatatatggattgttatatgcaccacttgtaattacaggactacaccatatgtttttagcagtagatttccaattgatgggtagcagcttaggtggtacgtacttatggccaatcgttgcgatttccaatatttgtcagggctctgcagcatttggagcatggtttgtctataaacgtcgtaaaatggttaaagaagaaggcttggcattaacatcttgtatttctggtatgttaggtgttactgaaccagccatgtttggtgtgaacttacctctgaaatatccatttatcgctgcgatatcaacatcttgtgtattgggggcaatcgttggtatgaataacgtacttggaaaagttggtgttggtggcgtgccagcattcatttcaattcaaaaagaattttggccagtatatctcattgcgacagctattgctattgctgtaccatgtctactaaccattgtgatgtctcattttagtaaacaaaaagcgaaagtaattggtgaagat

SEQ ID NO: 34026 - DNA, 783 bp, Staphylococcus aureus
atgaaaatgaaacgttttatagctattgtaatggcattatttttagtattagctggttgctctaattctaacgataataatgaaagtaaaaaagatgacgcagacaatggtaagaaacaagagattcaagttgcagcggcagcaagtttaacagatgtaaccaagaaattagcttcagaatttaaaaaagagcataaaaatgctgatattaaatttaactatggtggatcaggggcattaagaaaacaaattgaatcaggcgcacctgttgacgtatttatgtctgcaaatactaaagatgtagatgcattaaaagacaagaataaagcgcatgatacatataaatatgcgaaaaatagtctagtattaattggtgataaagattcaaattacacttcagtaaaagacttaaaagacaatgataaattagcattaggtgaagtgaaaactgtaccagcaggaaaatatgcgaaacagtatttagataacaataacttatttaaagaagtcgaaagtaaaatcgtttatgctaaagatgtaaaacaagtattaaattatgttgaaaagggtaatgcgaaacaaggttttgtgtataaaactgacttatataaacaaaacaaaaaaattgatactgtaaaagtaattaaagaagtagaacttaagaaaccaatcacatacgaagctggtgctacatcagatagtaaattagcaaaagagtggatggaattcttaaaatcagataaagctaaagaaatattaaaagaataccactttgcagcataa

SEQ ID NO: 34027 - DNA, 1287 bp, Staphylococcus aureus
atgttagacattagattattcagaaatgagcctgacacagttaagagcaaaattgaattacgtggagatgatccaaaagttgtagatgaaattttagaattggatgagcaacgacgtaaattaattagtgcaacagaagaaatgaaagcacgtcgtaataaagtaagcgaagaaatcgcattaaaaaaacgtaataaagaaaatgctgatgatgtgattgctgaaatgcgcacattaggtgacgatattaaagaaaaagatagtcaattaaatgaaattgataataaaatgacaggtatcctttgtcgtattccaaatttaataagtgatgatgtacctcaaggtgaatctgatgaagataacgttgaagttaaaaagtggggtacaccacgtgagttttcatttgaaccaaaagcacattgggatattgtagaagaattgaaaatggctgattttgatcgtgcagcaaaagtttcaggtgcgcgttttgtatatttaacaaatgaaggtgcgcaattagagcgtgctttaatgaactatatgattacaaaacatacaacacaacatggttatacagaaatgatggtaccacagcttgtgaacgcagatacaatgtatggtacaggtcaattacctaaatttgaagaagatttatttaaagtagaaaaagaaggattatatacaattccaactgctgaagtaccattaacgaatttctaccgtaatgaaattattcaaccaggtgtacttcctgaaaaattcactggtcaatctgcatgtttccgtagtgaagcaggatcagcaggtagagatacaagaggattaattcgtttacatcaattcgataaagtggaaatggtacgttttgaacaacctgaagattcatggaatgctttagaagaaatgacaacaaatgcagaagcaattctagaagagttaggtttaccataccgtcgtgttattttatgtacaggtgatattggatttagtgcaagcaaaacatatgatatagaagtttggttaccaagctacaatgattataaagaaattagttcatgctcaaactgtacggatttccaagcgcgtcgtgctaacatccgcttcaagcgtgacaaagcagctaaaccagaattagcacatacattaaatggtagtggtttagcagttggacgtacatttgctgctattgttgaaaattaccaaaatgaagatggaacagtaacaattccagaagcattagtaccatttatgggtggtaaaacacaaatttcaaaaccagttaaataa

SEQ ID NO: 34028 - DNA, 744 bp, Staphylococcus aureus
atgctaactgtatatggacatagaggattacctagtaaagctccggaaaatacaattgcatcatttaaagctgcttcagaagtagaaggtataaactggttggagttagatgttgcaattacaaaagatgaacaactgattatcattcatgatgattatttagaacggactacaaatatgtccggggaaataactgaattgaattatgatgaaattaaagatgcttctgcaggatcttggtttggtgaaaaattcaaagatgaacatttgccaactttcgatgatgtagtaaaaatagcaaatgaatataatatgaatttaaatgtagaattaaaaggtattactggaccgaatggactagcactttctaaaagtatggttaagcaagtggaagaacaattaacaaacttaaatcagaatcaagaagtgctcatttcaagctttaatgttgtgcttgttaaacttgcagaagaaatcatgccacaatataacagagcagttatattccatacaacttcgtttcgtgaagactggagaacacttttagattactgtaatgctaaaatagtaaacactgaagatgccaaacttactaaagcaaaagtaaaaatggtaaaagaagcgggttatgaattgaacgtatggactgtaaacaaaccagcacgtgcaaaccaacttgctaattggggagttgatggtatctttacagacaatgcagataaaatggtgcatttgtctcaatag

SEQ ID NO: 34029 - DNA, 2022 bp, Staphylococcus aureus
atggctgaaactactaaaatatttgaatcacatttggtcaaacaggctctaaaagacagtgtattgaagctctatcctgtttatatgattaaaaatccgattatgtttgttgtagaagtgggcatgctgcttgccttaggattaaccatttatccggatttatttcaccaagaaagtgtatcacggctatatgtgttcagtatctttatcatattattactgacacttgtctttgcgaacttctctgaagcattagctgaaggtcgcggtaaagcacaagccaacgctttacgccaaacacaaactgaaatgaaggcacgtcgtattaaacaagacggcagttatgaaatgattgacgctagtgacctgaaaaaaggacatatcgtacgtgtcgcgacaggtgaacaaatcccaaatgacggtaaagttattaagggcctcgcaacagtggatgaatctgcgattacaggtgaatctgcacctgtaatcaaagaaagcggtggagatttcgataatgtaattggaggaacttctgtagcttcagactggttagaagttgagattacttcagaaccaggtcattcatttttagataaaatgattggtttggttgaaggggctacaagaaagaaaacacctaatgaaattgcgttatttactttattgatgacattaacgattatcttcttggtcgttattttaacgatgtatccattggcgaaattcctgaatttcaatttatccattgcgatgctgattgctttggctgtgtgtttaattccaacaaccattgggggattattatcggctatagggattgcagggatggatcgtgtgacacagtttaatatcttggctaaaagcggacgttctgtagagacttgtggtgatgtgaatgtcttgattttagataaaacaggtaccattacctacggcaaccgtatggcagatgcgtttattccggtgaaatcatcaagctttgaacgtttagttaaagcggcctatgaaagttctatcgcagatgacacaccagagggacgtagtattgtgaaattagcttataaacaacatatcgacttaccgcaagaggtcggagaatatattccgtttactgctgaaacacgtatgagcggtgtgaaatttacgacacgtgaagtatataaaggtgcaccgaatagtatggttaagcgtgtgaaagaagcagggggacatattccagttgatttagacgctcttgtcaaaggggtgtctaaaaaaggtggcacaccgctggttgtgcttgaagataatgagattttaggtgttatttatttgaaagatgtcattaaagatggactcgtagaacgtttccgtgaattacgtgagatggggattgaaacggtgatgtgtacaggagataacgaattgacagctgcgacaatagcgaaagaagcgggtgtggatcgctttgtggcagagtgtaaacctgaagataaaatcaatgtgattagagaagaacaagcgaaaggtcatattgttgcgatgacgggtgacggtacgaatgacgcgccagctttagcagaagctaatgtaggtttggcaatgaactcaggaaccatgagtgccaaagaagcggcgaatttaattgatttagattctaatccaaccaaactgatggaagtcgttctaattgggaaacaattattaatgacacgtggctcactcactacatttagtattgcgaatgacattgcgaaatactttgcgattttaccagccatgtttatggcggctatgcctgcgatgaatcatttgaatattatgcatctgcattcacctgaatcagcagtattatctgcgttaatctttaatgcgttgattattgtattattgattccgattgcgatgaaaggcgtgaaatttaaaggtgcctcaacgcaaaccatattgatgaaaaatatgttagtttacggcttaggcggtatgatcgtgccatttatcggcattaagctcattgatctcatcatccaactctttgtctaa

SEQ ID NO: 34030 - DNA, 771 bp, Staphylococcus aureus
atgataaaacgtgtaaataaattagtgctaggtattagttttctgtttttaatcatcagtatctttgctggttgtggtacagggaaagaagcggaaataaagaaaagttttgaaaaaacgttgagtatgtatccgattaaaaatctagaggatttatacgataaagaaggatatcgtgatgatcaatttgataaaaatgataagggaacatggattgttcgttcgtcaatgtcgattcaatctaatggaaaagatatgaatataaaaggcatggttttatatatgaatagaaatacaagaacaacaaatggctattactatgttgatgttatagaaagagaagataaaggtatacatcgtgataacgaaaaaagatatccggttaaaatggtcgataataaaatcattccaactaaagaaattaaagatgaaaaaataaaaaaagaaatcgaaaactttaagttctttgttcaatatggcgactttaaagatttgtcgaagtacaaagacggcgatatatcatacaatccagaggtgccgagttattcagcaaaatatcaattaactaatgatgactataatgtaaaacaattacgaaaaagatataatataccaacgaataaagcaccaaagctattgttgaaaggtacagggaatttaaaaggttcatcaattggctacaaaaaaattgaatttactttcgtagagaaaaagggagaaaatatatactttagtgatgggctacattttaatccaagtgaggataaataa

SEQ ID NO: 34031 - DNA, 771 bp, Staphylococcus aureus
gtgatgaaacgtttaaataaattagtgttaggtattagtttcttatttttagtcattagtattactgctggttgtggcatgggtaaagaagcggaaattaagaaaagttttgaaaagacaatgagtatgtatccgattaaaaacctagaggatttatatgacaaagagggctatcgagatgatcaatttgataaaaatgataagggaacatggattgtaaattctcaaatggcaattcaaaataaaggagaacctatgaaatcaaaaggcatggttctgtatatgaatagaaatacaagaacaacaaatggctattattatgttaatgtgattaagggcgaggataaaggtaaacatcaagacaatgaaaaaagataccctgttaaaatggtcgacaataaaataatccttactaaagaaattaaagatgaaaacataaaaatagaaatcgaaaactttaagttttttgttcaatatggaaactttaaagatttggaaaattataaagatggagatatatcatataatccagaggtgccaagttattcagctaaatatcaattaactaatgatgattacaatgtaaagcaattacgtaaaagatatgacataccaacaaataaagcaccgaagttgttgttgaagggtacagggaatttaaaaggttcatcagttggatataaagacattgaatttacgtttgtagagaaaaaagaagagaacatttactttagtgatgggttaatttttaaaccaagtgaggataaataa

SEQ ID NO: 34032 - DNA, 768 bp, Staphylococcus aureus
atgaaacgattaaacaaattggtattgtatattagttttttgatattagtcattagtttcactgctggttgtggcatgggtaaagaagcggaaataaagaaaagttttgaaaaaacattgagtatgtatccgattaaaaatctagaggatttatacgataaagaaggctatcgtgatgatcaatttgataaaaacgataaaggcacatggattattaattctgaaatggttgttcaacctaaaggggaacgtatgaaatcaaaaggtatggttctatatatgaatagaaacactaagactacaaccgggaagtatatagtgagtgaaacacttcatgatgaagatggtagacctaagagtaaagataaagaatatccggttaaaatggtagacaataaaatcattccaactaaaggtatcaaagacgaaaatataaaaaaagaaatcgagaattttaagttcttcgcgcaatatggcagctttaaagatttgtcgaagtacaaagacggcgatatatcatataatccagaggtaccgagttattcagcaaaatatcaattaactaatgatgactataatgtaaaacaattacgaaaaagatataaaataccaacgaataaagcaccaaagttattgttgaaaggttcgggagacttaaaaggttcatcagttggatataaagacattgaatttacttttgtggagaaaaaaggtgaaaatactttttttactgatagtctacatcttgaaccaagtgaggataaataa

SEQ ID NO: 34033 - DNA, 1668 bp, Staphylococcus aureus
atggaaatgtcggttacagaagtcattttctcctttttaggtggtttaggtattttcctttacggcttaaaaatcatgggagacgggcttcaagcatcagcaggagacaggctacgagatattttaaacaaatttacatcaaatccagtattaggtgttattgcaggtatcgttgtaactattttaatacaaagtagttcaggtacgaccgttatcacaatcggactggtaacagctggatttatgacgttaaaacaagctattggagtgataatgggtgccaatatcggaacaacggtaactgcatttattatcggtatagatttaggcgaatatgcaatgccaattttagcattaggtgcatttttaatctttttctttaaacgctctaaaatcaataacattggccgcatactattcggtttcggttctctattcttcggtctagaatttatgggtgatgccgttaaacctttagcatcattagatggatttaagcaattaatgcttgatatgtcatcaaatccaatacttgctgtcattgtcggcgcagggttaacagcactagttcaaagttcaagtgcgacgattggtattttacaagaattttatcaacaagatttaatcagcttaaacgcagcaatccctgtgttactaggtgataacattggtacaacaattacagctatcttagctagtttagccggctcaatcgctgcaaaacgtgcggcgcttgtacacgtcatctttaatttaatcggggtaattatcttcacaattttcttgccagttgtgattcatttgattagtttgttacaagatgtatggcacttaaaaccagcgatgacgattgcagtatcacatggtatcttcaacataacaaatactttgattcaattaccatttgtagcaggtttagcatggatagttacaaagcttgtcccaggtaaagatattgctgatgactataaacctcagcacttaaacaaagatcttgtttatcacgcacctggtgttgcattacaagaaactcaaaaagaattacaaaatgtgggtcagattgtcttatcaatgtttgaagacattcgcgaaattacaaaagacgataaaaaattgatcaagaagcttgaacaaaagcaccaagctgttgaaacaatcaatgatagcattcgaaattatttagttagaatttctacaaaagccattacgaaggcagacgttgagcgtttagcagttatgtttgatgtcaatcgctctattttaaaagtagcagagctaacagaagagtatgtcgctcaattaaaacgccaacatgatgaagatattcgcattacagaagatgcacaacgcggtatggataaattattcaaccatgttgctgagtcatttgataaagccatcgacatgttagatgtttatgacaaaacgaaaaaagatgaaattgtagaacgtagtagagaatcatttaatattgaacataaactacgcaaaggtcatattaaacgccttaatcgtggcgaatgtacaacaaaaggcggattactatatatcgatatgattggtgttcttgaacgtatcggttatcattcacgaaatgtttctgaagcacttgttggtcttaacgatgatgtacctacagatgaagaaattgcaacaactgaaatttaa

SEQ ID NO: 34034 - DNA, 873 bp, Staphylococcus aureus
atgaataaacttcgagacactacttttctatcatatttatttactatcatattgtggggatctgcatttccaatgataaagattgcgttaaatgattttagtgcagaatcattgtcggcatttcgtttaattttagcaacaataattctcttgccgttcgtaattataaagaaattgcctacccctgaactaagagatatccctgttatttttattttaggattttgtggatttgtgatatatcacacagctttaaattttggtgaaactttgattagtgcgggtatatctggaattctagtctctacaacgcctattttttctagtgctttagcttatatatttttaaaagagcatttttcaaaatggaattggttaagttcactcgtcgcatttataggaatatccattatttcaataagtaaagatgattacacaactattaatgtattaggtgtttttattattttacttgcatcttttagtgaaagtttgtattttactttccagaaaaaatacatagaaaaatacggcttcatcgctttcacactatatacaataatggcaagctcaccatttatgcttatttttattcctgaaatcatcaacgatatacacggcgccacttttacatcaatagtatcggtactttatttagctatattccctactataattccatacgttttgcttgcttatattgtgaagtcagttggtgtctctgatgcaacaatgtctctttatttaacacctatcgtttctttattattatcttatctgttattagacgagctaccaacaacccttgctattataggcggaattatcactctactaggcgttagtttaagtaacttctttcaaaatacataa

SEQ ID NO: 34035 - DNA, 1329 bp, Staphylococcus aureus
atgaagatacctccacagaggcagttggcgatacaatacaacgtaaatagagtgacgattattaaaagtattgagttattagaggctgaaggatttatctatactaaagtggggagtggaacatatgttaatgactatttgaatgaagcacatattacaaataagtggtctgaaatgatgttatggtcctctcaacaaagaagtcagtatacggtgcaattaattaataaaattgagacagatgattcgtatatacatataagtaaaggtgaattgggtatatcgttaatgccacatattcaattgaaaaaagccatgtctaatacagccagtcatattgaagacttatcttttggttataataatggctatggttatatcaagttaagagatattatcgttgaacgaatgtcaaagcaaggtataaatgtaggtagagaaaatgtaatgatcacttcaggcgctttacatgccattcaacttttatctattgggtttttaggtcaagatgccataataatttcgaatacaccatcatatattcactctacaaatgtttttgagcaattgaattttagacatattgatgttccttataatcaaattaatgaaattaataccatcattgatagatttattaattttaaaaataaagcgatttatatagaacctaggtttaataacccgacaggtcgttctttaacgaatgagcaaaagaaaaatataattacttatagcgaaagacataatattcctatcattgaagatgatatctttagagatattttctttagcgatccaactcctgctatcaaaacttatgataaattgggaaaagttatacatataagcagtttttcaaaaacgattgcaccagcaataagaataggttggattgttgcttctgaaaaaataatagagcaattggcagatgtaagaatgcaaattgactatggatccagtattttgtcacaaatggttgtatatgagatgttgaaaaataagtcttatgataaacacttagtaaagttaaggtatgttttaaaagataaacgagactttatgttaaacatcctcaataatttatttaaggatatagcacattgggaggttccaagtggaggttattttgtatggttagtctttaaaatagatatagatattaaatatttattttacgaattgttaagtaaagaaaaaatattaatcaatccgggttacatttatggcagtaaagaaaagagtataaggctatcttttgcctttgaatcaaatgaaaatattaagcatgcgctctataaaatttatacatatgtgaaaaaggtttaa

SEQ ID NO: 34036 - DNA, 1257 bp, Staphylococcus aureus
atgattaatcagtctatatggcgcagtaactttcgcattttatggctcagtcagtttatagcgattgctggactgacagtacttgtgccattattgccaatttatatggcatcactacaaaatctatcagtcgtagaaatacagttgtggagtggtatagcgattgctgctccagctgtaacgacgatgatagcttcgccgatatgggggaagctaggtgataagatcagccgaaaatggatggtcttaagagcgttacttggtttggcggtatgcttatttttaatggcattgtgtacgacaccattacagtttgtacttgtgaggttattgcagggactatttggtggtgttgttgatgcatcaagtgcgtttgcgagtgcagaggcgccagctgaagatcgtggaaaggtattaggaagactgcaaagttcagtcagcgcagggtctcttgtggggccattaattggcggtgttacagcttcgatattaggttttagtgcgttactgatgagtattgccgttattacttttattgtctgtattttcggtgcattaaaattgattgaaacgacacatatgccaaaatcacaaacaccaaatattaataaaggtattcgccgttcatttcaatgtctattatgcacacaacaaacatgtcgatttattatcgttggcgttttagcaaactttgctatgtatggcatgctaactgcattatcaccacttgcttcatcagtgaatcatacagcgatagatgaccgtagtgtgattggatttttacagtccgcattttggacggcttcgatattaagcgcgcctttatggggacgctttaatgataaatcatatgttaaatcagtatatatatttgccacgattgcatgtggttgtagtgcgatactgcaaggtttagcgacgaatatagagtttttaatggctgcaagaatacttcaaggattaacatatagtgcattgattcaaagtgtcatgtttgttgtcgtgaatgcgtgtcatcaacaacttaaaggcacatttgttggaacgacgaacagtatgttagttgttggtcaaattattggcagtcttagtggcgctgccattacaagttatactacaccagctactacgtttatcgttatgggcgtagtatttgcagtaagtagtttatttttaatttgttcaaccatcactaatcaaatcaacgatcacacattaatgaaattatgggagttgaaacaaaaaagtgcaaaataa

SEQ ID NO: 34037 - DNA, 1431 bp, Staphylococcus aureus
atgaagagtgattcactaaaagaaaatattatttatcaagggctataccaattgattagaacgatgacaccactgattacaatacccattatttcacgtgcatttggtcccagtggtgtgggtattgtttcattttctttcaatatcgtgcaatactttttgatgattgcaagtgttggcgttcagttatattttaatagagttatcgcgaagtctgttaacgacaaacggcaattgtctcagcagttttgggatatctttgtcagtaaattatttttagcgttaacagtttttgcgatgtatatggtcgtaattactatatttattgatgattactatcttattttcctactacaaggaatctatattataggtgcagcactcgatatttcatggttttatgctggaactgaaaagtttaaaattcctagcctcagtaatattgttgcgtctggtattgtattaagtgtagttgttatttttgtcaaagatcaatcagatttatcattgtatgtatttactattgctattgtgacggtattaaaccaattacctttgtttatctatttaaaacgatacattagctttgtttcggttaattggatacacgtctggcaattgtttcgttcgtcattagcatacttattaccaaatggacagctcaacttatatactagtatttcttgcgttgttcttggtttagtaggcacataccaacaagttggtatcttttctaacgcatttaatattttaacggtcgcaatcataatgattaatacatttgatcttgtaatgattccgcgtattaccaaaatgtctatccagcaatcgcatagtttaactaaaacgttagctaataatatgaatattcaattgatattaacaatacctatggtctttggtttaattgcaattatgccatcattttatttatggttctttggtgaggaattcgcatcaactgtcccattgatgaccattttagcgatacttgtattaatcattcctttaaatatgttgataagcaggcaatatttattaatagtgaataaaataagattatataatgcgtcaattactattggtgcggtaatgaatttagtattatgtcttgttttgatatatttttatggaatttacggtgcggctattgcacgtttaattacagagtttatcttacttatttggcgatttgttgatattactaaaatcaatgtgaagttgaatattgtaagtacgattcaatgtgtcattgctgccgttatgatgtttattgtgcttggtgtggtcaatcattatttgccccctacaatgtacgctacgctgctattaattgcgattggtatagtagtttatcttttattaatgatgactatgaaaaatcaatacgtatggcaaatattgaggcatcttcgacataaaacaatttaa

SEQ ID NO: 34038 - DNA, 1206 bp, Staphylococcus aureus
atggttaagaaagtttttattatggatagcgtaaagacaataattggtacgttgcttatagctttaggattacaatttttagcttatccaattattaatcaacgagtaggtaatgaagcgtttggttctattttaacgatttatacaataataacaatcacgagtgttgtattaggcaatacgcttaacaatatacgattaattaatatgaatctatacaaatccaatcattactactggaaatttgtgtcgatacttttaatttcaattctgattgagagtatagctttaattattgtatttctttacttttttaatttgaacaccatcgatattatctttttaattctacttaatattttaatgtgtttaaggatttatctgaatgtattttttaggatgactttaaaatataatcagattttgtatattgctcttattcaatttttaggtttgctgataggactatttctatattatttaatccaaaactggattgtttgttttattaccagtgaattgtttgcaacgatatatacattggttaaattacggggattaactataggcgagtatcaaagtgaagataataatgtggtcaaagattatgtgatgctactgagtacaaatagccttaataatttgaatctctacttagatagattaatcttattaccaattataggtggaacagctgtaactatatcatttctttcaacatttattgggaaaatgttagctacatttctgtatccgattaataatgtagtactttcatatatttctgtaaatgaaagcgacaatataaagaagcaatatttgaaaactaatctatttgctatagctgcactatgtttagtcatgattatatgttatccaattacattaattattgtctctttactgtataacattgattcaagtttatattcgaagtttattattttaggtaatataggtgttttattcaatgcagtgagtattatgatccaaactttaaatacaaaacacgcatcaataacattacaagcgaattatatgacgcttcacacgattacatttatattcataactattttaatgacaattgcgtttggtctaaatggattcttttggacaacgctgttcagcaacattattaagtatgtgattttaaatattataggtttaaagtctaaattcattaataaaaaggacgtcgattag

SEQ ID NO: 34039 - DNA, 1488 bp, Staphylococcus aureus
atggcagtaaacgttcgagattatattgcagagaattatggtttatttatcaatggggaatttgttaaaggtagcagtgacgaaacaatcgaagtgactaatccagcaactggagaaacactatcacatattacaagagcaaaagataaagatgtcgatcatgcagtcaaagtggcgcaagaggcatttgaatcatggtcattaacttctaaatcagaacgtgcacaaatgttgcgtgatattggtgataaattaatggcacaaaaagataaaattgcaatgattgaaacattaaataatggtaaaccgattcgtgagacaacagcaattgatattccatttgctgcaagacatttccattatttcgcaagtgttattgaaacagaagaaggtacagtaaatgatatcgataaagacacaatgagtatcgtacgacatgagccgattggcgtcgtaggtgctgttgttgcttggaacttcccaatgctattagctgcatggaagattgcgccagccattgctgcaggtaatacaattgtgattcaaccttcgtcttcaacaccattaagtttattggaagttgctaaaattttccaagaggtattacctaaaggtgttgtcaatatactaacgggtaaaggttcagaatcaggtaatgcaattttcaatcatgatggtgtagataaattatcatttacgggctcaactgatgtaggttatcaagttgccgaagctgcagcaaaacatctagtacccgctacattagagcttggtggtaaaagcgccaatatcatattagatgatgctaatttagaccttgcagttgaaggtattcagttaggtattttattcaaccaaggtgaagtatgtagtgcaggttctcgattattagttcatgaaaaaatttatgatcaattggtgccacgtttacaagaggcattttcaaatattaaagttggagatccacaagatgaagctacacaaatgggtagtcaaactggtaaggatcaattagataaaattcaatcatatattgatgcagcaaaagaatcagatgcacaaattttagcaggtggtcatcgcttaactgaaaatggattagataaagggttcttctttgagccgacattaattgctgtgccagacaatcatcacaaattagcacaagaagaaatatttggaccagtgttaacagtgattaaagtgaaggacgatcaagaagcaattgatatagctaatgattctgagtatggtttagcaggcggtgtattttctcaaaatatcacacgtgcattaaatattgctaaagctgtacgtacaggacgtatttggattaacacttacaaccaagtaccagaaggcgcaccatttggtggttataaaaaatcaggtatcggtcgagaaacttataaaggtgcgttaagtaactatcaacaagttaaaaatatttatattgatacaagcaatgctttaaaaggtttgtactag

SEQ ID NO: 34040 - DNA, 1251 bp, Staphylococcus aureus
atgaaacgcttaagtacgactttgaaagtacgattgattagcaattttttacagctaattattacgacagcatttataccgtttatagcactatatttaacagatatgttaagtcaatcaattgtcggtatatatcttgttggtttagtggttctaaaatttccattgtccattatatctggttaccttattgagatttttccgaaaaagttgctagtacttatttatcaagcgacgatggtgataatgcttgtgttcatgggcgtatttgggtcacatcaattgtggcaaattattggtttttgtgttgcatatgccatatttacaatcgtttggggattacaatttccagttatggacacattaattatggatgcaattaccgaagacgtggaacattatatttacaagattagctattggatgacgaacttatcggtagctattggggcattgttaggtggcttgatgtatggctacagtatgttactacttttcttaatagcagcttgtatatttttaattgtactctttattttatatatttggttacctcaagaccgaaatcaagtaaagcaaagtgatgacaagaggcatgcaagtcgttatcaaaaattacaaataatgaatatatttcgcagttataaattagttttgaaagaccgtaattatatgttattgatttcggggttcagtatcatcatgatgggtgaattttcaatctcctcatatattgctattagactaaaggatcagtttgaaacaataagtataggttcatatgatattacaggtgctaagatgttagcaatcttgctaatgattaatacggtcgtcgtcattttactcacgtattcaatctcgaaagttgtattgaaaatagattttaaaaaagctttaatcactggtttgctgatttatattgttggctatagtggtctaacctatcttaatcagtttggcttattagttgtttttatgataattgcgactgtaggtgagattatttattcgcctatagtttcagaacaacgctttaaaattattcctaaagctaaaagaggaacatatagtgcagttaatgcattaggtattcatttttcagaaacactagctaggttagggattgtgttgggtgttttcttaacgtcattacaaatgggactgtatatgtttatcgttttaacaattggtgctagcatgcttgttgctggtgtattcgggggacaaaaacaagtgaatacaaattga

SEQ ID NO: 34041 - DNA, 1113 bp, Staphylococcus aureus
ttgaggcgtaaaaggaaatggctaattgttatttgtgtattattagtattgattacgatatcacaaattttgaaacattttaactatggaactgagagtaaagaagcatacaatacatatacggttgaaaaagaaagacaattagatttacaaggtaaggcatatccacgtgaagttaaaacatattataaaaataatcaggttggaacatatttgggtgtgcaagtagcggacgggcaaacagtcaaaaaaggagacatgttaattaattataaaataaatagtaataaacgacagcaacttgttgataagataaatgatactcaacatattattacagaagtttatttaaacattactaaaggtttaaacaatcgagagatacagaagaagttaattgaatataagcagacattatatgaagctcaacagcaattgtatcagtatgatagtcaaaatagggatagtatgtatgcatcatttgatggcaagattatgatcaagaatatagataatgacagtgataatcaacctatactgtatctcatttcaaaggagtctcatattaaaacgtctgttacggagtttgatttaaacaaagtcaaaaaaggagacaaagttaacttaagtattacgagtacgggtaaaacaggagcggggattataaaacaaatctctgagttgcctattagttatgaagagaatttaagtcttcacgaaaatgatgccctgcatttaccagaaagtaacaacgatggggaattagcaaattcaaaatcgatttcggcatctccaatatttaagagtaataacaactctgaattatcaaagtatggagttataattgatgatcttagtctaccaatacgtgcaggttattcgttggaaattaaagtcccattaaatgcgattaaaatacctaaatcagtattaacaaaaggcaataatgtttttattgttaataaaaatagtattgtggaaaaacggaatattcgtataaaaagaatcaatggtgacattattgtagaaaaggggttaaaacctggagacaagttaattaaacaacctaaaagtacaatgaatgatggtgataaggttgagatttcgtcatga

SEQ ID NO: 34042 - DNA, 1164 bp, Staphylococcus aureus
atggtaaaacttacaacaaagatagcttccttaaaactattcgcaagttatgctatagcaacttatattttagttatgttaacgagtgcattaaatctttttaaaggttatgtggccgatacgttctatattgctgaaacattgctaatcattttaaccatcattttaattatcattttaacaacggaacaaacatggaagcatcatgacctatggcgacgtatcgtcgaagtgttgttattgttgatggcattaacaggcaacgtatttacattattaatgtttgtaagtattagacgttaccaacgtacatcgcaaatacatagttataacgggtgggaatcgtttatacgaaaaactactagacatcgtattgcgattatcgggttacttattttagtctacatgctgacattatcaattgtgtcacaatttacatttgatacgacattggctactaaaaatcagttcaatgcactgttacatggaccgagtctagcctatccgtttggtactgatgatttcggtagagacttatttacacgcgtagttgtaggaacgaagctgacattttcaatttcaattatttcagtagttattgcagttatttttggtgtgttactaggcactatcgcaggttattttaatcatattgataatttaataatgcgaattttagatgtagtgtttgcaattccatcattattgttagcggtggcaattattgcatcatttggagcaagtattccaaatttaattattgctttaagtatcggtaatataccatcatttgcacggacaatgcgtgccagtgttttagaaattaaacgcatggaatatgtagatgcagcacgtatcactggtgaaaacacttggaatatcatatggcgttatattttaccgaatgcgattgcgcctatgattgtacgtttttcattaaatataggtgtggttgtattaacaacaagtagtttaagtttcctaggacttggtgttgcacctgatgtagctgaatggggcaacattttacgtaccggtagtaactacttggaaacgcacagtaatttagctattgtacctggtgtttgtattatgttcgtcgttttagcatttaattttataggtgatgcagtgcgtgatgcactagatccaagaattcattaa

SEQ ID NO: 34043 - DNA, 579 bp, Staphylococcus aureus
atgacaaagcgaccaaaacgtattttggcaacaattatcatttttctttcactattatttacgattatttatatagatgacattcaaaaatggtttaaccaatataccgataaattgacacaaaatcataaaggacaaggacactcaaaatgggaagacttttttagagggagtaggattactgagacttttggcaaatatcaacattcaccatttgatggtaagcattatggcattgattttgcattgccaaaaggtacaccaattaaagcgccgacgaatggtaaagtaacacgtatctttaataatgaattaggcggcaaggtattacagattgccgaagacaatggagaatatcaccagtggtatctacacttagacaaatataatgtcaaagtaggtgatcgagttaaagcaggtgatattattgcatattcaggcaatacaggtaaacaaacgacaggcgcacatttacattttcaaagaatgaagggtggcgtaggtaatgcatatgcagaagatcctaaaccgtttatcgagcagttacctgatggggaacgtagcctatatgatttgtag

SEQ ID NO: 34044 - DNA, 1272 bp, Staphylococcus aureus
atgtctaaaattttaaaatgtatcacgttagccgtggtaatgttattaatcgtaactgcatgtggccctaatcgttcgaaagaagatattgataaagcattgaataaagataattctaaagacaagcctaaccaacttacgatgtgggtggatggcgacaagcaaatggcgttttataaaaaaattacggatcaatatactaaaaaaactggcatcaaagtaaagcttgtaaatattggtcaaaatgatcaactagaaaatatttcgctagacgctcctgcaggaaaaggtccagatatctttttcttagcacatgataatactggaagtgcctatctacaaggcttagctgctgaaatcaaattatcaaaagatgagttgaaaggtttcaataagcaagcacttaaagcgatgaattatgacaataagcaactagcattgccagctatcgtagaaacaaccgcacttttctataataaaaaattagtgaaaaatgcaccgcaaacgttagaagaagttgaagctaatgctgccaagctaactgatagtaaaaagaaacaatacggtatgttatttgatgctaaaaatttctattttaattatccgtttttattcggcaatgatgattatattttcaagaaaaatggcagtgaatatgatattcatcagctaggactaaattcaaaacatgtcgtcaaaaatgctgaacgattacaaaaatggtacgacaaagggtatcttcctaaggcagcaacacatgatgtcatgattggtctttttaaagaaggaaaagtaggacaatttgtcactggaccgtggaacattaatgaatatcaagaaacgtttggtaaagatttaggagtaacaacattacctacagatggtggcaaacctatgaaaccatttctcggtgtacgtggttggtatttatctgaatatagtaaacataagtattgggctaaagatttaatgctgtatatcactagtaaagatacattacaaaaatatacagatgaaatgagcgaaattactggacgtgttgacgtgaaatcatctaatccaaatttaaaagtgtttgaaaagcaagcacgtcatgctgaaccgatgcctaatattcctgaaatgcgacaagtttgggaaccgatgggcaatgcaagcatatttatctcaaatggtaagaatcctaaacaagcgttagatgaggcgacgaatgatataacgcaaaatattaagattcttcatccatcacaaaatgataagaaaggagattag

SEQ ID NO: 34045 - DNA, 756 bp, Staphylococcus aureus
atgcttaagggacacttacattctgtcgaaagtttaggtactgtcgatggaccgggattaagatatatattatttacacaaggatgcttacttagatgcttgtattgccacaatccagatacttggaaaattagtgagccatcaagagaagtcacagttgatgaaatggtgaatgaaatattaccatacaaaccatactttgatgcatcgggtggcggtgtaacagtcagtggtggcgaaccattgttacaaatgccattcttagaaaaattatttgcggaattaaaagaaaatggtgtgcacacttgcttagacacatcggctggatgtgctaatgatacaaaagcatttcaaaggcattttgaagaattacaaaaacatacagacttgatattattagatataaaacatattgataatgacaaacatattagattgacaggaaagcctaatacacacatccttaacttcgcgcgcaaactgtcagatatgaaacaacctgtatggattcgacatgtccttgtgcctggttattctgatgataaagacgatttaattaaactaggggaattcattaattctcttgataacgtcgaaaagtttgaaattctgccatatcatcagttaggtgttcataagtggaaaacattgggcattgcatatgaattagaagatgtcgaagcgcccgatgatgaagctgttaaagcagcctaccgttatgttaacttcaaagggaaaattcccgttgaattataa

SEQ ID NO: 34046 - DNA, 1530 bp, Staphylococcus aureus
atgaaatctttatttgaaaaagcacagcagttcggcaagtcctttatgttacctatcgcaatcttaccagctgcaggtctattgttgggtatcggtggtgcattaagtaatccaaacaccgttaaagcataccctattttagatattaccttattacaaaatatttttacattaatgtcagctgcaggtagtattgttttccaaaatttaccggtcatctttgcaattggtgtcgcaatcggattatctagaagcgataaaggtactgcaggtttagctgcgctgctcggtttcttaattatgaacgcaactatgaatggcttattaactatcacgggcacattggcaaaagatcagcttgcacaaaatggacaaggcatggtgctcggtatacaaacggttgaaaccggtgtttttggcgggattatcacaggtattatgaccgcaatacttcacaacaaatatcacaaagtggtattaccaccgtatttaggtttctttggtggctctagatttgtccctattgtcacagcatttgccgcaatctttttaggtgtattgatgtttttcatttggccaagcatacaagccggcatttatcatgttggtggatttgtaacgaaaacaggtgccatcggtacttttgtttatggcttcatcttaagattgttaggtccactcggtttacaccatattttttacttaccgttttggcagacggcacttggtggtactttagaagtcaaagggcacttagttcaaggtacgcagaacatcttctttgctcaacttggtgatccagatgtgacgaagtattattcaggtgtgtcacgctttatgtcaggccgttttattacgatgatgttcggcttatgtggtgccgcacttgcaatttatcacacagctaaacctgaacataaaaaagttgtcggcggtttaatgttatccgctgcactcacttcatttttaacaggtattaccgaacctttagagtttagtttcttgtttgtcgcacctattctttatgtaatccatgccttctttgatggattagcatttatgatggcagacattttcaacattacaattggtcaaaccttcagtggaggctttatcgatttcttactctttggtgtgctacaaggtaatagtaaaacaaactacctatacgtcatacctattggaattgtgtggttctgtttgtattacatcgttttcagattcttaattacgaaatttaatttcaaaacacctggtcgagaagataaagctgcagcacaacaagttgaggctactgaaagagcacaaactattgttgctggtttgggaggcaaagataacattgaaatcgttgactgttgtgcaacgagactacgcgtcacacttaatcaaaatgacaaagtcgataaagtattactcgaaagtactggtgccaaaggtgtaatccagcaaggcactggtgtgcaagtaatttatgggcctcacgttacagttatcaaaaatgaaattgaagaattgctcggggattaa

SEQ ID NO: 34047 - DNA, 936 bp, Staphylococcus aureus
atgaaaagaaagattattatggattgtgatccaggacacgatgatgcaatagcattaattttagcgggggcaattgacagtccactagagatattagctgtaacaacagtcgcaggtaatcaatcagttgacaagaatacgacaaacgccttgaacgtattggatattatgggacgccaagatatagcagtagcgaaaggtgcggataggccgttaattaaaccagctgcctttgcttctgaaatacatggggaatctggattagatggtccgaaactaccgtcgacaccatcacgtcaagcagttgcaatgccagcatcagatgtgattataaacaaagtgatgacgagtgatacacctgtaacaattgtagcgacaggtcctcttacgaatgtagcaacggcattgattcgtgagccaagaatcgctgagcatattgaatctattactttgatgggtggtggtacatttggaaattggacgcctacagcagaattcaatatttgggtagatgctgaagcagcgaagcgtgtttttgaaagtgggattactataaatgtgtttggtttagatgtaacacatcaagttttagccgacaatcacgtgattgaacgctttgaaagtatcaataatcctgttgcacagttcgtcgtagaattattgcaattctttaagaagacatacaagactcactttaatatggatggtggtccaatacatgatgcttgtacaattttgtatttgttacaaccagaattgtttacaatggtacccgttaatatcgacattgaacatcaaagtccactaacttatggcactatggctgtcgatttaaatcatgttacaggtaagcctgccaatgcttattttgctacagcagttgatgttgaagaagtgtggaacttgatagaccataagttacgtacatacgaataa

SEQ ID NO: 34048 - DNA, 1260 bp, Staphylococcus aureus
atgagttacttcactgattttgtaaggggatttttagatttaggtgcaactgttattttaccggttgtcatattcttgcttggcctattctttaggcagaaaattggagcggcatttaggtctggtttaacaataggtgtggcttttgtagggattttcttagtcatcgatttattagttaaaaatttagggccagcagcacaagcgatggttaaaaatttaggcgtcagtctgaatgtgattgatgtaggttggccagcaacatcatctatcgcttgggcatcatctgtcgcagcatttattattccactcggaatcatagttaacgttgtattgctagtaactaaagtgacaaagacgatgaatgtagatatttggaatttttggcattatacgtttacagcagcaatggtttatgccgtatcaggcagtatttggcaagcgttattagcagcagttattttccaagttatctgtttgaaagtagcagattggacagcaccgatgatgagtgagttctttgatttaccaggtgtatcgattgcgacaggaagcacgatttcttatgcaccaggtatttacttagttaaattgttacaaaaagtacccggtctgaataagttagatgctgatcctgaaacaattcaaaaacgttttggcgcatttggagagtctatatttgtcggcttaattttaggtttaggtattggtgtgttagcaggttacaaacctggagacatcattaatttaggaatgtcaatggctgcagtaatggtattaatgcctagaatggtaaaaatcttaatggaaggtttaatgccagtttcagagtctgcaagaacatggctaaataaacgttttggcgaacgtgaaatttatattggattggatgcggctgtagcattaggtcatccagcggttatttcgacagcattaattttagtacctatcactgttttattagccgttattttaccaggaaaccaagtactaccttttggtgacttagcaactataccatttgttgtcgcgtttattgttggtgcagcaagaggaaacattattcattctgtcattgtgggtacgattatgattgcaatttcattatatattgcaacagacgtagcacccattttcacagatatggcgaaaggtacgaatgtacaaatgccaaaaggttcatctgaaatttcaagtattgatcaaggtggtaatatcgttaactatcttatctttaaactatttagtctattcaattaa

SEQ ID NO: 34049 - DNA, 405 bp, Staphylococcus aureus
atgaaaaaatcagctgttttaaatgaacatatttcaaaagcaatcgcgacaattggtcattttgatttattaacgattaatgacgctggcatgccaattccaaatgatcatcgccgtatcgacctagctgtcacaaaaaacttaccacgctttattgatgtcttagctacagtgttagaagaaatggaaatccaaaaaatatacttagcagaagaaataaaagaacataaccctacacaattgcaacaaattaaacaattgatttcatcggaaatcgaaatcattttcattcctcacgaagaaatgaaaagtaacttagctcacccattaaataaaggtaatattcgtactggtgaaacaacgccctactctaatattgcattagaatcgaatgttactttttaa

SEQ ID NO: 34050 - DNA, 390 bp, Staphylococcus aureus
atggcatttacattatctgcaattcaacaagcacatcaacaatttactggtgttgactttccaaaactattcaaagcttttaaagatatggggatgacttacaatatcgtcaacattcaagatggcactgcaacatacgtacatcaatcagaagatgatatcgttacgtcatctgtgaaaagtaatcatcctgttgctcaaaaatcaaacaaaacaatagttcaagatgtattaactagacatcaacaaggacaaacagatttcgaaacattttgtgatgaaatggctgaagctggcatttataaatggcatatcgatattcaagctggtacttgtacttatatcgacttgaaagaacaagctattatttcagaattaatacctcagtaa

SEQ ID NO: 34051 - DNA, 297 bp, Staphylococcus aureus
atgagaacatatgaagttatgtacatcgtacgcccaaacattgaggaagatgctaaaaaagcgttagttgaacgtttcaacggtatcttagctactgaaggtgcagaagttttagaagcaaaagactggggtaaacgtcgcctagcttatgaaatcaatgatttcaaagatggcttctacaacatcgtacgtgttaaatctgataacaacaaagctactgacgaattccaacgtctagctaaaatcagtgacgatatcattcgttacatggttattcgtgaagacgaagacaagtaa

SEQ ID NO: 34052 - DNA, 252 bp, Staphylococcus aureus
atgtttggatttattggaatgttaattgtcggtggcttaattggatgggctgctggtgctattatgggtaaagatatcccaggtggtattttaggcaatattatcgcaggtattattggatcatgggtaggtggcaaactattcggacaatggggtcctgaattaggaagtatttacatcttgccagcattaattggttcaattatcttaattgcaatcgtaacgttaattttaagagctatgcgtaaataa

SEQ ID NO: 34053 - DNA, 2028 bp, Staphylococcus aureus
atgacacaaaaacaaaagaaatttcttcactatagttggataacgctcctttgtgtgggcgttattttacttttattaggcacgctgggcaatgcagtacaagcgacaggcttagttgatgaaaccattgatacaagcaatgaatactccaagtatggtttgaatcaatatcagcttgattattatgtggacaatagctggggctggcttccatggaattggagtgatggcataggacaatcggtgatgtatggattgtatgccattactaattttatttggacaatttctctttatctatcgaacgccacaggttatttggtgaaagaagcctatgccttagatttcattagtcaaacatcccaagcaattggcgaaaacatgcagacgattgcaggcattacaccgaatggcttttccagttcagggttttatgtcggtttcctccttctttttattctcattgttggaatctatgttgcctatacaggattggttaagcgagaaacgacgaaagtgatacgagctgttttaaactttgtcgtggtgtttattctatcggcttcctttattgcgtatgcacccgattatattgcgaaaatcaatgatttttccaaagatgtcagtaccgccagtctgaatattgggacaaaaattgttcttcctaacacggatagtcaagggaaagacagtgtggacatgatacgtgacagcttattctctgttcaagtaaagcaaccatggctattgcttcaatatggctccactgatgtagaagcgttaggggaagaacgtgtggaaagtttattgtctaccagtccagatacaaacaatggtgaagatagagaaaatgtagtgattgaagaaattgaagatcatgacaatacctatttaaccctaccgaagacgatttccagattaggaacagtcttctttttgtttgtattcaatattggtatctcgatttttgttttccttctaacaggaatcatgattttttcgcaagtgctatttattattttcgctatgtttttgccaatcagtttcctattaagtatgttgccgagttttgatggcatgggcaggcatgccattaccaagttatttaatgtgattatgacaagggctggtattaccttgattattaccgttgcctttagtatttccactatgctttattcgctgtcagcaagttctccctttttcatgattatgtttttacaaattgtgacctttgcagggatttattttaaactgggcgatttaatgagcctattcactttacaaagcaacgactctcaaaacatgggcagacaagtgtttcgcagacctcgtcaaatgatgaatcgacaaaccagaagatttcaacgcagtatgagtaagatttttcgtggaaaagcagggtcaacgaagcaaaagacaatgacaacaaagcagaatcaaaccaataaagctaaccatactcgtcaaaatgaacggactacaccaaagaaagaaacagcactttccaatgtgaaaaagcaacaaggcggtatcgggcaacgattaggtgaaaagacagcccatgtattggacacgaaaaatcgtctagtcaataaaagaaagcaggcaaaacaacagatacaggcgacaccaacccatgtcaaatatgcccttcatcaaggaaaagagaatgtcactcataatgtaacagactttaaacaatctatggcagataccaaagctcaacgcaaacaacagcgtatgaaccagcaggagcaaaaacgaaagaacattgctcaaaagcgtttggagctggataaagcaaaagaaaaaagacgaaaagaaaacccatcatctcctgttcagaataaccagcagcatgttcgcaagcgtcagcaaaccgtcacgcctgttttgtcacaaaacactaaacgtgaaaatcatcagcgaccattgaaaaaagagcaaaaacaaaagacaccaccgaagcaattcaatcagaggaagctaaataaaagaacggataagcgaggacaacaaacatga

SEQ ID NO: 34054 - DNA, 696 bp, Staphylococcus aureus
atgaaaatgaaaaatattgcaaaaataagtttgttattaggaatattagcaacaggtgtaaacactacaacggaaaaaccagttcatgccgaaaagaaacctattgtaataagtgaaaatagcaaaaaattaaaagcttattatactcaacctagtattgaatataaaaatgtgacaggttatatcagtttcattcaaccaagtattaaatttatgaatatcatagatggtaattctgttaataaccttgctttaattggcaaagataagcaacattatcatacgggtgtacatcgtaatcttaatatattttacgttaatgaggataagagatttgaaggtgcaaagtactctattgggggtatcactagtgcaaacgataaagctgtcgacctaatagcagaagcaagagttattaaagcagatcatattggtgaatatgattatgactttttcccatttaaaatagttaaagaagcgatgtcattgaaagagattgattttaaattaagaaaataccttattgataattatggtctttacggtgaaatgagtacagggaaaattaccgtcaaaaagaaatactatggaaagtatacatttgaattggataaaaagttacaagaagaccgtatgtccgatgttatcaatgtcacagatattgatagaattgaaatcaaagttagaaaagcttaa

SEQ ID NO: 34055 - DNA, 705 bp, Staphylococcus aureus
atgaaaatggcagcaattgcgaaagcaagtttagcattaggtattttagcaacaggaacaataacgtcattgcatcaaactgtaaatgcgagtgaacatgaagcaaaatatgaaaatgtgacaaaagatatctttgacttaagagattactatagtggcgcaagtaaggaacttaaaaatgttactggttatcgttatagcaaaggtggcaagcattaccttatctttgataaaaatagaaaattcacaagagtacagatatttggtaaagatattgaaagatttaaagcacgcaaaaatccgggattagacatatttgttgttaaagaagcagaaaatcgcaacggcacagtgttttcatatggtggtgtcactaagaaaaatcaagacgcttattatgattatataaacgcaccaagatttcaaatcaagagagatgaaggtgacggtattgctacgtacggtagagtacactacatttataaagaagagatttcacttaaagaactcgactttaaattgagacagtatttaattcaaaattttgatctgtataaaaagtttcctaaagatagtaagataaaagtgataatgaaagatggcggctattatacgtttgaacttaataaaaaattacaaacaaatcgcatgagtgatgtcattgacggtagaaatattgaaaaaatagaagccaacattagataa

SEQ ID NO: 34056 - DNA, 696 bp, Staphylococcus aureus
atgaaattaaaaacgttagctaaagcaacattggcattaggcttattaactactggtgtgattacatcagaaggccaagcagtccacgcaaaagaaaagcaagagagagtacaacatttatatgatattaaagacttatatcgatactactcatcagaaagttttgaattcagtaatattagtggtaaggttgaaaactataacggttctaacgttgtacgctttaaccaagaaaaacaaaatcaccaattattcttattaggaaaagataaagataaatataaaaaaggccttgaaggccagaatgtctttgtggtaaaagaattaattgatccaaacggtagactatctactgttggtggtgtgactaagaaaaataacaaatcttctgaaactaatacacatttatttgttaataaagtgtatggcggaaatttagatgcatcaattgactcatttttaattaataaagaagaagtttcactgaaagaacttgatttcaaaattagaaagcaattagttgaaaaatatggtttatataaaggtacgactaaatacggtaagatcactatcaatttgaaagacgagaaaaaggaagtaattgatttaggtgataaactgcaattcgagcgcatgggtgatgtgttgaatagtaaggatattcaaaatatagcagtgactattaatcaaatttaa

SEQ ID NO: 34057 - DNA, 699 bp, Staphylococcus aureus
atgaaatttacagcgatagctaaagcgatatttgtattaggaatattaacaacaagtgtaatgataacagaaaatcaatcggttaatgcaaaaggaaagtatgaaaaaatgaaccgtttatatgatacaaacaagttacatcaatactattcaggacctagttatgagttaacaaatgttagtggccaaagtcaaggttattatgactctaacgttttgctttttaaccaacaaaatcaaaagttccaagtatttttattgggaaaagatgaaaataaatacaaagaaaaaacacatggtttagatgtctttgcggtaccagaattagtagatttagatggaagaatatttagtgttagtggtgtaacgaagaaaaacgtaaaatcaatatttgagtctctaagaacgccgaacttactagttaaaaaaatagacgataaagacggtttttctattgatgaatttttctttattcaaaaggaagaagtgtcattgaaggaacttgattttaaaataagaaaactgttgattaaaaaatacaaactgtatgaagggtcagctgataaaggtagaattgttattaatatgaaagatgaaaataagtatgaaattgatttaagtgataaattagatttcgagcgtatggcagatgtcattaatagtgaacaaattaagaacatcgaagtgaatttgaaataa

SEQ ID NO: 34058 - DNA, 699 bp, Staphylococcus aureus
atgaaattgactgcattagcaaaagcaacattagcattaggaatattaactacaggtgtgtttacagcagaaagtaaagctgttcacgcgaaagtagaacttgatgagacacaacgcaaatattatatcaatatgctacatcaatactattctgaagaaagttttgaatcaacaaacattagcgttaaaagtgaagattactatggttctaacgttttaaactttaaccaacgaaataaaactttcaaagtgtttctgcttggtgacgataaaaataaatataaagaaaaaacacatggccttgatgtctttgcagtacctgaattaatagatataaaaggtggcatatatagcgttggcggtataacaaagaaaaatgtgagatcagtgtttggatttgtaagtaatccaagtctacaagttaaaaaagttgatgctaaacatggcttttcgataaatgagttgttctttattcaaaaggaagaagtatcgttgaaggaactggattttaaaataagaaaaatgttagtcgaaaaatatagattgtataaaggcgcgtcagataaaggtagaatcgttattaatatgaaagacgaaaagaaatatgtaattgatttaagtgaaaaattaagttttgatcgtatgtttgatgtaatggatagtaagcaaattaaaaatattgaagtgaatttgaattag

SEQ ID NO: 34059 - DNA, 684 bp, Staphylococcus aureus
atgaaatttacagcattagcaaaagcaacattagctttaggaattttaacaacaggaactttaacaacagaagttcattcaggtcatgcaaaacaaaatcaaaagtcagtaaataaacatgacaaggaggcactataccgatactacactggaaagactatggaaatgaaaaatattagtgctttgaaacatggtaaaaataacttgcgttttaagtttagaggtattaagattcaagttttactgcctggaaatgataaaagtaaatttcaacagcgtagttatgaggggttagatgtgttttttgttcaagaaaaaagagataagcacgatatattttatactgttggtggtgtaatacagaataataaaacatctggagttgtcagtgcaccaatattaaatatttcaaaagaaaagggtgaagatgcttttgtgaaaggttacccttattacattaaaaaagaaaaaataacactaaaagagctggattataagttgagaaagcatctaattgaaaaatacggactttataaaacaatctcaaaagatggtagggtcaaaattagcttgaaagatggcagtttttataaccttgatttaagatctaaattaaaatttaaatatatgggggaagtcatagaaagcaaacaaattaaagatattgaagttaacttaaagtaa

SEQ ID NO: 34060 - DNA, 684 bp, Staphylococcus aureus
atgaaattaaaaaatattgctaaagcaagtttagcactagggattttaacaacaggtatgattacaactactgctcagccagtaaaagcaagtacattagaggttagatcacaagctactcaagacttgagtgaatattataaagggagaggatttgaattaacaaatgtaacaggatataaatacggaaataaagttacatttatagataattctcaacaaattgatgttacattgacaggaaatgaaaaattaactgttaaagatgatgacgaagtttctaatgttgacgtgtttgtagtaagagaaggtagtgacaaatcagctatcacaacatcgattggtggaattacaaagacaaatgggactcaacataaagatactgttcaaaacgttaatttgtcagtttctaagagtacaggtcaacacactacttctgtgacttcagaatactatagcatctataaagaagaaatctcattaaaagaacttgattttaaattaagaaagcatttaattgataaacatgatctttataagacagaacctaaagacagtaaaattagaattactatgaaaaacggtggctattatacatttgaattaaataaaaaattacagcctcatcgcatgggtgatacgattgatagtagaaatatagagaaaattgaagtgaatttataa

SEQ ID NO: 34061 - DNA, 1203 bp, Staphylococcus aureus
atggctaaaattccagttacggtattaagtggttatttaggctcggggaaaacaacattgttaaatcatattttacaaaatcgtgaaggtcgacgtatcgcggtaattgtaaatgatatgagtgaagttaatatcgataaagatcttgtcgcagatggtgggggactatcgcgtacagatgaaaaattagtcgaactctctaatggttgtatctgttgtacacttagagatgatttattaaaagaagttgagcgtttagtgaaaaaaggtggcatcgatcaaattgttattgagtcaacagggatttcagagccagtacctgttgcacaaactttctcatatattgatgatgaacttggcattgatcttacagcgatttgccgtttagatacaatggttacagttgttgatgctaaccgcttcgtacatgacatcaactcagaagatttattgatggatcgtgatcaaagcgttgatgaaacagatgaacgttcgattgctgatttattaattgaccaagttgaattttgtgatgtattgattattaataaaattgatttaattagtgaagaagaacttgcaaagttagaaaaagtgttaagcgcattgcaacctattgctaaaattattaagacaacaaattctgaagtagatttaaaagaagtcttaaatacgcagcgttttgattttgaaaaagcgagcgagtcagcaggatggatcaaagaacttgagtcgggtggtcatgcatcgcatacgcctgaaacagaagaatatggcatatcatcatttgtatataaacgtcgtctacctttccatgctaaaaggttcaatgattggttagaaagcatgtcaaataatgtcgttcgatcaaaaggtatcgtatggttagcacaatacaatcatgtagcatgtttattatctcaagcagggtcatcttgcaatattcacccagttacatattgggtggctagtatgtctgaagcgcaacaaacacaaatattagcagaacgtcaagatgtcgcagctgaatgggatccagaatatggcgatcgtcatacacaatttgtcattattggtacagaattagatgaagaaaaattaacaaaagaactcgatgcatgcttagtcaatgcgcaagaaattgatgcagattggcaacaatttgaagatccatatcaatggcaaattagaccagcacgataa

SEQ ID NO: 34062 - DNA, 927 bp, Staphylococcus aureus
atggatgaacagcaacaattgacgaatgcatatcattcaaataaattatcgcatgcctatttatttgaaggtgatgatgcacaaacgatgaaacaagttgcgattaattttgcaaagcttattttatgtcaaacagatagtcaatgtgaaacaaaggttagtacatataatcatccagactttatgtatatatcaacaactgagaatgcaattaagaaagaacaagttgaacaacttgtgcgtcatatgaatcaacttcctatagaaagcacaaataaagtgtacatcattgaagactttgaaaagttaactgttcaaggggaaaacagtatcttgaaatttcttgaagaaccaccggacaatacgattgctattttattgtctacaaaacctgagcaaattttagacacaatccattcaaggtgtcagcatgtgtatttcaagcctattgataaagaaaagtttataaatagattagttgaacaaaacatgtctaagccagtagctgaaatgattagtacttatactacgcaaatagataatgcaatagctttaaatgaagaatttgatttattagcattaaggaaatcagttatacgttggtgtgaattgttgcttactaacaagccaatggcacttataggtattattgatttattgaaacaggctaaaaataaaaaactgcaatctttaactattgcagctgtgaatggtttcttcgaagatatcatacatacaaaggtaaatgtagaggataaacaaatatatagtgatttaaaaaatgatattgatcaatatgcgcaaaagttgtcgtttaatcaattaattttgatgtttgatcaactgacggaagcacataagaaattgaatcaaaatgtaaatccaacgcttgtatttgaacaaatcgtaattaagggtgtgagttag

SEQ ID NO: 34063 - DNA, 966 bp, Staphylococcus aureus
atgttaaataatgaatataagaattcgtcattaaagattttttcattgaaaggaaacgaagcattagcgcaagaagttgctgaccaagtaggaattgaactaggtaaatgttcagttaaacgttttagtgatggagaaattcaaattaatatcgaagagagtattcgtggttgtgacgtatttattattcaaccaacatcatatcctgtgaatctacatttaatggaattattaattatgattgatgcttgtaaacgtgcttctgcagcaacaatcaatattgtagtgccatattatggatatgcaagacaagatagaaaagcccgtagccgtgagccaatcactgctaaattagttgcaaacttaatcgaaacagctggcgcaactcgtatgattgcgttagacttacatgcaccacaaattcaaggattctttgatattccaattgaccacttaatgggtgtgccaattcttgctaaacatttcaaagatgatccgaatattaacccagaagaatgtgtcgttgtttcaccagaccatggcggtgttacacgtgcacgtaaattagctgacattttaaaaactccaattgcaattatagataaacgtcgtcctagaccaaatgttgctgaagtgatgaacattgttggtgagattgaaggacgtacggcaattattattgacgatattattgatacagcaggtacaatcactttagctgcacaagcattaaaagataaaggtgctaaagaagtatatgcttgttgtacacaccctgttttatcaggaccggctaaagaacgtatcgaaaattctgctataaaagaattaatcgtaacaaactcaattcatttagatgaagatcgcaaaccatctaacactaaagaattatctgttgctggtttaatcgcacaagctatcattcgtgtatacgaaagagaatcagttagcgtattatttgactaa

SEQ ID NO: 34064 - DNA, 654 bp, Staphylococcus aureus
atggcttcattaaagtcaatcatccgtcaaggtaaacaaacacgttcagatcttaaacaattaagaaaatctggtaaagtaccagcagtagtatacggttacggtactaaaaacgtgtcagttaaagttgatgaagtagaattcatcaaagttatccgtgaagtaggtcgtaacggtgttatcgaattaggcgttggttctaaaactatcaaagttatggttgcagactaccaattcgatccacttaaaaaccaaattactcacattgacttcttagcaatcaatatgagtgaagaacgtactgttgaagtaccagttcaattagttggtgaagcagtaggcgctaaagaaggcggcgtagttgaacaaccattattcaacttagaagtaactgctactccagacaatattccagaagcaatcgaagtagacattactgaattaaacattaacgacagtttaactgttgctgatgttaaagtaactggcgacttcaaaatcgaaaacgattcagctgaatcagttgtaacagtagttgctccaactgaagaaccaactgaagaagaaatcgaagctatggaaggcgaacaacaaactgaagaaccagaagttgttggcgaaagcaaagaagacgaagaaaaaactgaagagtaa

SEQ ID NO: 34065 - DNA, 477 bp, Staphylococcus aureus
atgattcaagcatacttaggattaggtagtaatattggtgatagagaaagccagttaaacgatgctataaagattttgaatgaatatgatggtattagcgtatctaatatttctccgatttatgaaacagcaccagttgggtatactgagcaacctaactttttaaatttgtgtgttgaaattcaaacaacactcacagtattacaactgttggaatgttgtttgaagacagaagaatgtttacaccgtattagaaaggaacgatggggtcctagaactttagatgtggatattttgttgtatggagaagaaatgatagatttaccaaaactgtcggtgccacatccgagaatgaatgaacgtgcatttgttttaatcccattaaatgatatagcagcaaatgtcgtagaaccacgttcgaaattgaaagtgaaagatttagtttttgtcgatgacagtgtaaagagatataaataa

SEQ ID NO: 34066 - DNA, 1077 bp, Staphylococcus aureus
atgtcacaagcagttaaagttgaacgacgagaaacattaaaacaaaaaccaaatacatctcaactaggttttggtaaatattttactgattatatgttgagttatgattatgatgcagataaaggatggcatgatttgaagatagtaccttatggtcctattgaaatttcacctgctgcacaaggtgttcattatggtcaatcggtattcgaaggattaaaagcatataaaagagatggggaagttgcacttttccgtcctgaagaaaattttaagcgtcttaataactcgttagcacgattagaaatgcctcaagtagacgaagcagaattgttagaggggctaaaacaattagttgatatagaaagagattggattcctgaaggggaaggtcaatcattatatattcgtccatttgtttttgcaacagaaggggcacttggcgttggtgcatcacatcagtataaattattaattattttatctccttcaggtgcatattatggtggtgagactttaaaaccaactaaaatctatgtagaagatgaatatgtgcgtgctgttcgtggcggtgtaggctttgcaaaagttgcaggtaactatgcggcaagtttattagcacaaacaaatgcaaataaattaggttatgaccaagtattatggcttgatggtgttgaacagaaatatatcgaagaagttggtagcatgaatattttcttcgttgaaaatggaaaagtaattacaccagagttgaatggcagtattttacctggtattacacgtaaatctattatcgaattagctaaaaacttaggatatgaagtcgaagagcgccgcgtttcaatcgatgaattattcgaatcatatgataaaggtgagttaacagaagtatttggtagtggtactgcagcagttatttcacctgtgggtacattgagatacgaagatcgtgaaatcgttattaataataatgagactggtgaaattactcaaaaattatacgacgtctatactggtattcaaaatggtactttagaagataaaaatggttggagagtcgttgtaccaaaatattaa

SEQ ID NO: 34067 - DNA, 3426 bp, Staphylococcus aureus
atgattaacagggataataaaaaggcaataacaaaaaagggtatgatttcaaatcgcttaaacaaattttcgattagaaagtatactgtaggaactgcatcgattttagtaggtacgacattgatttttggtctagggaaccaagaagctaaagctgctgaaaacactagtacagaaaatgcgaaacaagatgatgcaacgactagtgataataaagaagtagtgtcggaaactgaaaataattcgacaacagaaaatgattcaacaaatccaattaagaaagaaacaaatactgattcacaaccagaagctaaagaagaatcaactacatcaagtactcaacaacagcaaaataacgttacagctacaactgaaactaagcctcaaaacattgaaaaagaaaatgttaaaccttcaactgataaaactgcgacagaagatacatctgttattttagaagagaagaaagcaccaaattatacaaataacgatgtaactacaaaaccatctacaagtgaaattcaaacaaaaccaactacacctcaagaatctacaaatattgaaaattcacaaccgcaaccaacgccttcaaaagtagacaatcaagttacagatgcaactaatccaaaagaaccagtaaatgtgtcaaaagaagaacttaaaaataatcctgagaaattaaaagaattagttagaaatgataacaatacagatcgttcaactaaaccagttgctacagctccaacaagtgttgcaccaaaacgattaaatgcgaaaatgcgttttgcagttgcacaaccagcagcagttgcttcaaataatgtaaatgacttaattacagttacgaaacagacgatcaaagttggcgatggtaaagataatgtggcagcagcgcatgacggtaaagatattgaatatgatacagagtttacaattgacaataaagtcaaaaaaggcgatacaatgacgattaattatgataagaatgtaattccttcggatttaacagataaaaatgatcctatcgatattactgatccatcaggagaggtcattgccaaaggaacatttgataaagcgactaagcaaatcacatatacatttacagattatgtagataaatatgaagatataaaagcacgtttaactttatactcatatattgataagcaagcagtacctaatgaaactagtttgaatttaacgtttgcaacagcaggtaaagaaactagccaaaacgtttctgttgattatcaagacccaatggttcatggtgattcaaacattcaatctatctttacaaagttagatgaaaacaaacaaactattgaacaacaaatttatgttaatcctttgaaaaaaacagcaactaacactaaagttgatatagctggtagtcaagtagatgattatggaaatattaaactaggaaatggtagtaccattattgaccaaaatacagaaataaaagtttataaagttaaccctaatcaacaattgcctcaaagtaatagaatctatgattttagtcaatacgaagatgtaacaagtcaatttgataataaaaaatcatttagtaataatgtagcaacattggattttggtgatattaattcagcctatattatcaaagttgttagtaaatatacacctacatcagatggcgaactagatattgctcaaggtactagtatgagaacaactgataaatatggttattataattatgcaggatattcaaacttcatcgtaacttctaatgacactggcggtggcgacggtactgttaaacctgaagaaaagttatacaaaattggtgactatgtatgggaagacgttgataaagacggtgtccaaggtacagattcgaaagaaaagccaatggcaaacgttttagttacattaacttacccggacggtactacaaaatcagtaagaacagatgctaacggtcattatgaattcggtggtttgaaagacggagaaacttatacagttaaattcgaaacgccagctggatatcttccaacaaaagtaaatggaacaactgatggtgaaaaagactcaaatggtagttctataactgttaaaattaatggtaaagatgatatgtctttagacactggtttttataaagaacctaaatataatcttggtgactatgtatgggaagatacaaataaagatggtatccaagatgctaatgaacctggtatcaaagatgttaaggttacattaaaagatagtactggaaaagttattggtacaactactactgatgcctcgggtaaatataaatttacagatttagataatggtaactatacagtagaatttgaaacaccagcaggttacacgccaacggttaaaaatactacagctgaagataaagattctaatggtttaacaacaacaggtgtcattaaagatgcagataatatgacattagacagtggtttctataaaacaccaaaatacagtttaggtgattatgtttggtacgacagtaataaagacggtaaacaagattcaactgaaaaaggtatcaaagatgttaaagttactttattaaatgaaaaaggcgaagtaattggaacaactaaaacagatgaaaatggtaaatatcgtttcgataatttagatagcggtaaatacaaagttatttttgaaaagcctgctggcttaacacaaacagttacaaatacaactgaagatgataaagatgccgatggtggcgaagttgacgtaacaattacggatcatgatgatttcatacttgataacggatacttcgaagaagatacatcagacagtgattcagactcagacagtgattcagactcagacagcgactcagattcagacagtgattcagactcagatagcgattcagattcagacagcgactcagactcagatagcgactcagactcagacagcgactcagactcagatagcgactcagattcggacagcgattcagactcagatagcgactcagattcagacagcgattcagactcagatagcgactcagattcagacagtgactcagactcagatagcgactcagactcagacagtgactcagactcagacagcgattcagattcagatagcgactcagattcggacagtgattcagactcagatagcgactcagattcagacagcgactcagactcagatagcgactcagactcagacagtgattcagactcagatagcgattcggactcggatgcaggaaaacatacacctgttaaaccaatgagtactactaaagaccatcacaataaagcaaaagcattaccagaaacaggtagtgaaaataacggctcaaataacgcaacgttatttggtggattatttgcagcattaggttcattattgttattcggtcgtcgcaaaaaacaaaacaaataa

SEQ ID NO: 34068 - DNA, 759 bp, Staphylococcus aureus
atgaaagtattaaacttaggatcgaaaaaacaagcatcattctatgttgcatgtgagttatataaagagatggcatttaatcagcactgtaaactaggtttagcaactggtggtacaatgacagatttgtatgaacaacttgttaagttattaaataaaaatcagttaaacgtagacaatgtatccacgtttaatttagacgaatatgtaggtttaaccgcatcacatccgcaaagttatcactattatatggatgacatgcttttcaaacaatatccttattttaatagaaagaacattcatattccaaatggagatgccgatgatatgaatgcggaagcgtcaaaatataatgacgttttagaacaacaaggtcaacgtgatattcaaattttaggtattggtgaaaatggtcatattggatttaatgaacctggtacgccgtttgatagcgttactcatatcgttgatttgactgaaagtactattaaggctaatagtcgatattttaaaaacgaagatgatgttccaaagcaagccatttcgatgggacttgctaatattcttcaagccaaacgtatcattttactcgcatttggtgaaaagaaacgtgctgctattacacatttattaaatcaggaaatttctgttgatgttccagccacattacttcacaaacacccgaatgttgagatatatttagacgacgaagcttgcccgaaaaatgttgcgaaaattcatgtcgatgaaatggattga

SEQ ID NO: 34069 - DNA, 621 bp, Staphylococcus aureus
ttgctgtgcgaatctaaaatcatcaataaaaacccaaaatatagaattattaaatataatgatgagtacttaatgatcgatataataagcacttggattagtttattttttccttttattaattggttcatccccaaaagatacgtcaaaattagtagagaagagtttgaaaatttaaatattgttaaacctgctaaaaagaatgttttttggccagttgctagtatctctactttattcgcagttacattaagaaagtatacgcttttacttgacactcaacttgataaaaaattagttattgccatatgttgcaccacatttatagggattttaatattttatgtacgcctaattaaaaaatcatctttaaatatttataatactaaaaataaaaggtcgaaaatcatcttaataccaacactaaaaaatttttgtttcacattgttcggatatgtttttttaattttttggacagtgattttctcatatgctctattatcaatgagttatcaaaacataatagtatattttgcttggattacagcaataataggtttttttctagtgaatatagctttaattatagataaaaacattcatgtcatacttaaaaattaa

SEQ ID NO: 34070 - DNA, 888 bp, Staphylococcus aureus
gtgaagaaatcgttaattgcttttattttgatttttatgcttgtcctgagtggctgtggtatgaaagataatgataaacaaggtagcgatgataatggctcgtctaaatcgccgtaccatagaattgtttcgttaatgcctagtaatactgaaattttatatgaattaggattaggtaaatacatagttggtgtttcaacggttgatgattatccaaaagatgtgaaagagggtaagaaacaatttgatgctttgaatctaaataaagaggaacttttaaaggcaaagccagatctaattcttgcgcatgagtcgcaaaaggcaactgctaataaagtattgtcatcattagagaaacaaggcatcaaagtagtgtatgttaaagatgcacaatcaattgatgaaacatacaacacatttaagcaaattgggaaattaacgcatcatgataagcaggctgaacaacttgttgaggaaactaaagataatatcgataaagtcatagattcaattcctgctcatcataaaaaatcaaaagtatttattgaggtttcatcaaagcctgaaatatatacagcagggaagcatacattttttaatgatatgttagaaaaattagaagcccaaaatgtttatagtgacattaatggttggaaccctgtaacgaaggaaagtattattaaaaagaacccagatatattaatttcgacggaagctaagacaagatcagattatatggatatcatcaaaaaaaggggtggattcaataaaattaatgctgtcaagaatacacgtattgaagttgtaaatggtgatgaagtatcaagaccaggtccacgtattgatgaaggattaaaagaattaagagatgcaatttatagaaaataa

SEQ ID NO: 34071 - DNA, 789 bp, Staphylococcus aureus
atgaataaagtcacaattaatcctcaaatccaattaacttatcaaattgaaggtaaaggggatcctataatattacttcatggattggatggtaatttagctggatttgaagatttgcaacatcaactagcatcatcatataaagtacttacttacgatttaagaggtcatggcaagtcttctaaaagtgaatcatacgatttaaacgatcacgttgaggatttaaaaattctaatggagaagttaaatattcatgaggcacatattctaggacatgatttaggtggggtagttgctaagttatttacagataaatatgcttatcgtgtaaaatcattaactaccattgcatcgaagaaagatgacttaatacacagctttactcaattgttaatacaatatcaagatgatatagcgggttttaataagtctgaagcgtatattcttttattttctaaattgtttagaaatcaagagaagacgatgaaatggtatcaaaaacaaagaatatatagcattaagtctgaggatgatagtgcggtggcaattcgttcattaattttgcataaagatgaacctatgtatttaaaaaaacgtacatgtgtacctactttgttaattaatggggaacatgatcctttgattaaagataagaatcattttaaattggaagcgcattttttaaatgttacgaaaaaaatcttcgaacattcaggacatgcaccgcatattgaagaaccagaagcatttatgaattattatttaaattttttaaaaagcgtatcataa

SEQ ID NO: 34072 - DNA, 2043 bp, Staphylococcus aureus
ttggaaatatttgaaacaattcttatatttatagctgttgtgatactaagttcgtttgtccatactttcatacctaaagtacccctagcatttatacaaattttcttgggcatgttactatttattaccccaatccctgttcaatttaattttgattctgaattgtttatggtaacaatgattgcgcctttgttatttgtagaaggtgttaatgtttctagagtccatttaaggaaatatattaagccagtgatgatgatggcattaggattagtcattactactgtgataggtgtaggtttatttattcattggatttggccagatttacctattggagcagcatttgcaattgctgccattctttgtcctactgatgcagtagcagtgcaagcaatcactaaaggaaaggtcttgccaaaaggagcaatgacaattcttgaaggtgagtcattattgaatgatgctgctggtattatttcatttaaaatagctgttggagtattagttacaggtgctttttcacttgttgatgctgttcagttgtttttaattgcatcaattggtggcgcagtggttggtttacttataggtatggcattagtaaggttccgattaacattgatgcgtcgaggatatgaaaacattaatatgtttacaattattcaattgttaacaccatttgttacgtatttaattgctgaattgtttcacgcatcaggaatcattgcagcagtagttgcaggacttgtacatggtttcgaacgtgacagaattatgcaagtacgtacacaactgcaaatgagttacaatcatacatggaatatactaggttatgttttaaatggctttgttttttcaatattaggatttttagtacctgaagttattattaaaattatcaaaacagaaccgcacaatttaatctttttaataggcatcactattgttgttgctttagctgtctatctatttagatttgtttgggtttatgtcttatatccttatttttatttagccatcagtccattccaaaaaatgatgactaaaaatgatgatgataatccaacgactgagaaaccaccaaagcgaagtttatacgctttaattatgacgttatgtggtgtgcatggaacaatttctttagcaatcgcattaacgttaccttattttttagcagggcatcatgcttttacgtatagaaacgacttattatttattgcatctggtatggttattattagtttggtagttgcgcaagtattattgccattattaacgaaacctgcacctaaaacagtaattggcaatatgtcgtttaaagttgctagaatttatatattagaacaagttattgattatctaaatcaaaaatctactttcgaaacaagttttaaatatggtaacgtgattaaagaatatcatgataaattagcatttttaaaaactgtagagaaagatgatgaaaactctaaagaattagaacgtctacaaaaaattgcttttaatgtagaaacaaaaacattagagtctttagtagatgaaggacaaataacgaatagtgtacttgaaaactatatgcgttatgctgaaagaacacaggtatatagacaagcatcattaataagaagaatgattgtattattacgaggtgctttattaaaacgaagagtacaaacgagagtgaactccgcatcttcacttagtgttacggataacttaatggaattaaataaaattaataaattagtccattataatgtggttagtcgtttgtctaaggaaacaacaaaagataatacacttgaaattggaatggtttgtgacggttatttaatgcgaattgaaaacttaacaccatcaaatttcttcaactcagcaagtgaagatacgattactaaaattaaattaaatgcattgagagaacaacgtcgcattttacgtgagttgattgatacagatgaagtatcagaaggtacagcgttaaaactaagagaagccatcaattatgatgaaatggttattgtagatagtatgacgtag

SEQ ID NO: 34073 - DNA, 765 bp, Staphylococcus aureus
atgactgttgaagaaagatccaatacagccaaagttgacattttaggggtcgattttgataatacaacaatgttgcaaatggttgaaaatattaaaaccttttttgcaaatcaatcaacgaataatctttttatagtaacagccaaccctgaaatagtgaattacgcgacgacacatcaagcgtatttagagttaataaatcaagcgagctatattgttgctgatgggacaggagtagtcaaagcttcgcatcgtttaaagcaacctctagcgcatcgtatacctggtattgagttgatggatgaatgtttgaaaattgctcatgtaaatcatcaaaaagtatttttgctaggggcaactaatgaagttgtagaagcggcacaatatgcattgcaacaaagatatccaaacatatcgtttgcacatcatcacggttatattgatttagaagatgagacagtagtaaaacgaattaaactgtttaaacctgattacatatttgtaggtatgggattccctaaacaagaagaatggattatgacacatgaaaaccaatttgaatctacagtgatgatgggcgtaggtggttctcttgaagtatttgctggggctaaaaagagagcgccttatatatttagaaaattaaacattgaatggatatatagagcattaatagattggaaacgtattggtagattgaagagtattccaatatttatgtataaaatagccaaagcaaaaagaaaaataaaaaaagcgaaatag

SEQ ID NO: 34074 - DNA, 798 bp, Staphylococcus aureus
atgaatcgtttgcatggacaacaagttaaaattggttacggggataacacgattataaataaattagatgttgaaataccagatggcaaagtgacgtcaatcattggtcctaacggctgcgggaaatctactttgctaaaggcattgtcacgtttattggcagttaaagaaggcgaagtatttttagatggtgaaaatattcatacacaatctacgaaagagattgcaaaaaaaatagccattttacctcaatcacctgaagtagcagatggcttaactgttggggaattagtttcatatggtcgttttccacatcaaaaaggatttggtagattaactgctgaggataagaaagaaattgattgggcaatggaagttacaggaactgatacattccgacaccgttcaatcaatgatttaagtggtggtcaaagacaacgtgtttggattgcaatggcattagcacaaagaactgatattatctttttagacgaaccaacaacatatttagatatctgtcatcaattagaaatactagaattagttcagaagctaaatcaggaacaaggttgtacaattgtcatggttcttcatgatatcaaccaagcgattcgtttctcagatcatcttattgcgatgaaagaaggggatatcatcgctacaggttcaacagaagacgtattaacacaggaaatattagaaaaagtttttaatattgatgttgttttaagtaaagatcctaaaactggaaaacctttactggtaacttatgacttatgtcgcagagcttattcttaa

SEQ ID NO: 34075 - DNA, 1008 bp, Staphylococcus aureus
atgtcatatataatcatcgtcactatagctgtagttattttctcgctgatatttgactttatcaatggattccatgatacagccaatgcagtagctactgctgtatctactagagcgttaacgcctaaaacggcaattttaatggcagcagtgatgaactttataggtgctttaacatttacgggcgttgcaggcaccattactaaagacattgtcgatccatttaaattggaaaatggattagttgttgtgttagctgcaatacttgcggctattatttggaatttagctacttggttttacggaattccaagttcgtcttcacatgcacttataggttcaattgcgggtgcagcaatcgcatctgaaggctcatttggagtgttacattaccaaggtttcacaaaaattattattgtattaatcgtttcaccgataatcgcattttgtgttggtttcttgatgtattcaatttttaaagttatctttaaaaatgcaaatttaacaagagcgaatcgtaactttagatttttccaaattttcacggcagcgttacaatcattctctcacggtacgaatgatgcgcaaaaatcaatgggtattattacgttggcattgattgtcgctaatgtacagaatgatggcagtgttgaaccacagttatgggtaaaatttgcctgtgcgacagcaatggggcttggtactgcaattggtggctggaaaattatcaaaactgtaggtggtaatattatgaaaatacgtccagcaaatggtgctgcggccgatttatcatctgcattaacaatttttgttgcatcatcgctacatttcccattatcaacaactcacgttgtgtcatcatcaatcttaggtgttggtgcttctaaccgagctaaaggtgtaaaatggagcactgcgcaacgaatgatcattacatgggtgattacattacttatttcagcattgttagcaggtttactattctatatacttaacttatttttctaa

SEQ ID NO: 34076 - DNA, 441 bp, Staphylococcus aureus
atgctaattgttgatgcgttaacaaataatgtaaatcgtactgcctctgatgtgcgagctgcttttggtaaaaacggcggtaatatgggtgtatctggatcagttgcttatatgtttgatcatgtggcaacatttggtattgaaggaaagtctgttgacgaaatacttgaaacattaatggaacaagatgtagatgtaaatgatgtgattgacgataatggattgacaatagtctatgctgaaccagatcaatttgcagtcgttcaagatgcgcttcgtgcagcaggtgttgaagaatttaaagttgctgaatttgaaatgttacctcaaacagatattgaactttctgaagcggaccaagtaacatttgaaaaattaatcgatgcattagaagatttagaagatgtacaaaacgtattccataatgtggatttgaaataa

SEQ ID NO: 34077 - DNA, 1215 bp, Staphylococcus aureus
atgtttgcagcgttattacaaataaagaattataaactctttgttgctaatatgtttctactaggtatgggtattgcggttacggtcccatatcttgttctttttgcaactaaagatttaggtatgacaacaaatcagtatggattacttctagcatctgcagcgattagccagtttacagtaaattcaattattgctagattttcggatacgcatcactttaatagaaaaattattattattctcgcattattaatgggtgcgcttggtttttcaatatacttttttgtagatacaatctggttattcatattactatatgcgattttccaaggattatttgcaccagcaatgccccaactttacgcatctgctagagaatctatcaatgtttcaagctctaaagatagagctcaatttgccaacacagtattacgttcaatgttctcattgggctttttatttggtccatttattggtgcccaattaatcggtttaaaaggctatgctggattgtttggtggaacaataagtatcattttatttactttagtacttcaagtgtttttctataaggatttaaacattaaacaccctattagtacgcaacaacatgttgaaaaaattgctcctaatatgtttaaagacaaaacgcttttattaccatttattgcatttattttattacacattggacaatggatgtatacgatgaatatgcctttatttgttactgattatttaaaagaaaatgagcaacatgtcggttatttagctagtttatgtgctggtttagaagtgccatttatgatcattcttggcgttttatcatctagattacatactcgaacattgttgatttatggagcgatttttggtggtttattctacttcagcattggggtatttaaaaacttctatatgatgttagcaggacaggtatttttagctattttcttagcggttcttttaggaattggtattagttatttccaagatatcttaccagattttccaggatacgcctcaacactattttctaatgcaatggttattggacagttaggcggtaacctattaggtggtgctatgagtcactgggtaggtttggaaaatgtattttttgtatcagcagcatcaatcatgttaggtatgatacttatattctttactaaaaatcaaaaaattacaaaagaggatatgatatcaacatga

SEQ ID NO: 34078 - DNA, 1350 bp, Staphylococcus aureus
ttggaaacttcgaccataattagtttgattatatttattctattaattgcattaaccactgtatttgttggttcagaatttgcattagtaaaaattagagcaacaagaattgaacagctagcagatgaaggaaataaacctgctaaaatagtaaaaaagatgattgctaatctagattattatctttctgcttgtcagttaggtataacagtaacatctttagggttaggttggcttggtgaaccaacgtttgaaaagctattacacccgatatttgaagcaatcaatttaccaactgcattaacgacgacgatttcgtttgcagtgtcatttataatcgttacgtatttgcatgtagtacttggtgaattagcgcctaaatctatagcgattcaacatactgaaaagcttgctttagtatatgcaagaccattgttctatttcggtaacattatgaaaccattgatttggctgatgaatggttctgcacgtgttattattagaatgtttggtgtaaatcctgatgcccaaactgatgcaatgtcagaagaagaaatcaaaattattattaacaatagttataatggtggagaaatcaaccaaactgaattggcatatatgcaaaatatcttttcattcgatgaaagacatgcaaaagatataatggtacctagaactcaaatgattacactaaatgaaccttttaatgtagacgaattactagaaacaataaaagaacatcaatttacgcgttatccaattactgatgatggtgataaagaccacattaaaggatttattaacgtcaaagaatttttaactgaatacgcttctggaaaaacgattaaaatagcaaactatatacatgagttgccaatgatttcagagacaacacgtatcagtgatgcattaattagaatgcaacgtgaacatgtacatatgagtcttattatagatgaatatggtggaacggcaggtattttaacgatggaagatattttagaagaaatcgttggagaaattcgtgatgaatttgatgatgatgaagtgaatgatatcgttaaaattgataataagacattccaagtaaatggcagagtactattggatgatttaactgaagagttcggtatagaatttgatgactctgaggatattgatacgataggtggatggttacaatctcgtaataccaatttacaaaaagatgattacgtggatacaacttatgatcgctgggttgtttcagaaatcgataaccaccaaattatttgggtgatattaaactatgaatttaatgaagcgagacctactatcggacagtctgatgaagatgaaaaatcagaatag

SEQ ID NO: 34079 - DNA, 420 bp, Staphylococcus aureus
atgttacaacaaatctatcctagtacaacgcatccatatcaattcgaattaaataaagattttaatttttcggctgcacatcacattccttgtgaagaagcaggtatttgtcaaaatgtccatggtcatacttactttgttaatttaacaattgtcggtgataaactagatgacactggcttcttagtgaactttagccatttgaaaaagatgatacacggtaaatttgaccatcaactgttaaataacttacctgcttttaaaaacaaaatcccttcaactgaaatcgtagcggaaacaatttatcaaattgttaaagaaaatttggcatcgctcgaacaccaaccaaaatgtattcaagtatttgtaagagaaacaccaacaagttatgttgtatttagaccaaaggaacaggtgtaa

SEQ ID NO: 34080 - DNA, 1782 bp, Staphylococcus aureus
atgatgcaacaaacattatcgcattactttgggtatgaaacatttcgaccaggacaagaagaaattattagcaaagtattagaccatcgtaatgtgcttggtgtcttaccaactggtggaggtaagtctatatgctatcaagtaccaggtttattgttaggtggtacaacaattgtaataagtccactaatatcattaatgaaagatcaagtggatcaattaaaagcgatgggaattcaagctgcttttttaaatagtagtttgactcaaaaagagcaacaacgtattgaaaaagcattatcaaatggagaaattcaatttttgtatgttgcaccagaacgatttgaaaaccgatattttttaaatatgcttcagcgtataaagattcacttagtcgcgtttgatgaagcgcattgtatttctaaatggggtcatgatttcaggccgagttaccaaaatgttatttcaaaagtatttacgttacctcaagattttacaataatagcgttgacagcaactgccacggttgaagtacagcaagatattagagaaaagttaaatatcgctcaaactgatcaaattaaaacgagtactaagcgtagaaacttaatttttaaagtaaatcctacttatcaacgtcaaaaatttatattggattatattaaaacacatgatgaagatgcaggtattatttattgttctacacgtaagcaagttgaagagcttcaagaagccttagaaagtcagaaaattgaaagtgttatatatcatgcaggtttgagcaataaagaaagagaagaagcgcagaatgatttcttatttgatcgtgttaaagtagtcgttgctacaaatgcttttggtatgggtattgataaatccaatgtacgttttgttattcattataatatgcctggagatttagaatcttattatcaagaagcgggtcgtgcaggtcgtgacgggttgaaaagtgaatgtattttgttatttagcgaacgcgatatcaatttacacgagtattttataacagtctctcaagctgatgatgactataaagataaaatgggcgaaaagttaactaaaatgattcaatatacaaaaacaaaaaaatgtctagaagcaacaattgtccattattttgaaccgaatgaaaaattagaagaatgtgaacaatgtagtaattgtgttcaacaagataaatcatataatatgacacaagaagctaagatgattattagttgcatcgctcgtatgaaacaacaagagagttatagtgttatcattcaagtgttaagaggagagtcaacagattatattaagtataaaggttatgaccaaatttcaacccatggtttaatgaaaggttacacaacatcagaattaagtcacttaatagatgaattaagattcaaagggttcttaaatgaaaatgacgaaatattaatgtgtgatacttcaattaaaaaattactcagtaatgaagtagaagtattcacaacaccatttaagcaaaaagcgactgaaaaagtatttataaatacggttgaaggggttgaccgagtattattcagtcagttggtagaagttcgtaaaaagttaagtgacaaattaacgatagcacctgtaagtatattttctgattacacgttggaggaatttgctaaacgtaagcctgcttcgaaacaagatatgattaatattgatggcgtaggtagttacaaattaaaacattattgtccagcatttttagaaacgattcaaaattataaagccaaagtatag

SEQ ID NO: 34081 - DNA, 1515 bp, Staphylococcus aureus
atgactaactttttcgacatattgagtgaacgtaaggggcaactcttttcgacaatgatagaacatattcaaatatcatttattgcattattgattgcaactgctattgcggtaccattaggtattttattaacgaagactaaaacgatatctgaaatcgtaatgaatattgcggcaattcttcaaaccataccatcgttggcattattaggtttaatgattcctttatttggtatcggtcgtgtgccagcaattattgcacttgtagtgtatgcgttgttaccaattttaaggaatacgtatactggaattaaagaagttgatccatcactcattgaagcggctaaaggtataggtatgaaaccatttagacgtttaactaaagtcgaacttccgatagcaatgcctgttataatggctggtgtaagaacggctatggtattaattataggtacagcgacactagcagcattaattggtgcaggcggactaggagatttaattttattaggtatagaccgtaacaatgcgtcattgatattattaggtgcaattccagcagccttattggcaattatatttgatttaattttaagatttatggctaaattatcttataaaaagttattgatgacgttaggtgttatagtgatgattattatactggccatcgctattcctatgtttgcacaaaaaggtgataaaattacgttagctggaaagcttggctccgagccttcgattattacaaatatgtataaaattttaatagaagaagagaccaaaaatactgtagaagtgaaagatggtatggggaaaacagcatttttatttaatgctttaaaatctgatgatatagatgggtatttagagtttactggaacagttttaggtgaattaacaaaagaaccattgaagtcaaaagaagagaaaaaagtttatgaacaagctaagcaaagtcttgaaaagaaatatcaaatgactatgttaaaaccaatgaagtataacaatacgtatgctttagctgtaaaacgtgattttgctaaacaacataatatacgtacaattggtgatttaaataaggttaaagatcaacttaaaccaggatttacattggaatttaatgatcgtccagatggttacaaagctgttcaaaaggcttataatttaaatttagataacatacgtacaatggaacctaagttgagatatcaagcgatcaataaaggtaatattaatttaatagatgcatattcaactgacgctgaattaaaacaatatgatatggttgtgttaaaagatgataagcacgtatttccaccatatcaaggagcaccattatttaaagaaagctttttaaagaaacatccagaaattaagaaaccgttaaacaaactagaaaacaaaatatctgatgaagatatgcaaatgatgaactataaagtaacagttaaaaatgaagacccatatacagttgcgaaagattatttaaaagcaaaagggttaatcaaataa

SEQ ID NO: 34082 - DNA, 399 bp, Staphylococcus aureus
atgaaaataatatatttttcatttactggaaatgtccgtcgttttattaagagaacagaacttgaaaatacgcttgagattacagcagaaaattgtatggaaccagttcatgaaccgtttattatcgttactggcactattggatttggagaagtaccagaacccgttcaatcttttttagaagttaatcatcaatacatcagaggtgtggcagctagcggtaatcgaaattggggactaaatttcgcaaaagcgggtcgcacgatatcagaagagtataatgtccctttattaatgaagtttgagttacatggaaaaaacaaagacgttattgaatttaagaacaaggtgggtaattttaatgaaaaccatggaagagaaaaagtacaatcatattga

SEQ ID NO: 34083 - DNA, 2157 bp, Staphylococcus aureus
atggaaaaaacaaagacgttattgaatttaagaacaaggtgggtaattttaatgaaaaccatggaagagaaaaagtacaatcatattgaattaaataatgaggtcactaaacgaagagaagatggattctttagtttagaaaaagaccaagaagctttagtagcttatttagaagaagtaaaagacaaaacaatcttcttcgatactgaaatcgagcgtttacgttatttagtagacaacgatttttatttcaatgtgtttgatatttatagtgaagcggatctaattgaaatcactgattatgcaaaatcaatctcgtttaattttgcaagttatatgtcagctagtaaatttttcaaagattacgctttgaaaacaaatgataaaagtcaatacttagaagactataatcaacacgttgccattgttgctttatacctagcaaatggtaataaagcacaagctaaacaatttatttctgctatggttgaacaaagatatcaaccagcgacaccaacatttttaaacgcaggccgtgcgcgtcgtggtgagctagtgtcatgtttcttattagaagtggatgacagcttaaattcaattaactttattgattcaactgcaaaacaattaagtaaaattgggggcggcgttgcaattaacttatctaaattgcgtgcacgtggtgaagcaattaaaggaattaaaggcgtagcgaaaggcgttttacctattgctaagtcacttgaaggtggctttagctatgcagatcaacttggtcaacgccctggtgctggtgctgtgtacttaaatatcttccattatgatgtagaagaatttttagatactaaaaaagtaaatgcggatgaagatttacgtttatctacaatatcaactggtttaattgttccatctaaattcttcgatttagctaaagaaggtaaggacttttatatgtttgcacctcatacagttaaagaagaatatggtgtgacattagacgatatcgatttagaaaaatattatgatgacatggttgcaaacccaaatgttgagaaaaagaaaaagaatgcgcgtgaaatgttgaatttaattgcgcaaacacaattacaatcaggttatccatatttaatgtttaaagataatgctaacagagtgcatccgaattcaaacattggacaaattaaaatgagtaacttatgtacggaaattttccaactacaagaaacttcaattattaatgactatggtattgaagacgaaattaaacgtgatatttcttgtaacttgggctcattaaatattgttaatgtaatggaaagcggaaaattcagagattcagttcactctggtatggacgcattaactgttgtgagtgatgtagcaaatattcaaaatgcaccaggagttagaaaagctaacagtgaattacattcagttggtcttggtgtgatgaatttacacggttacctagcaaaaaataaaattggttatgagtcagaagaagcaaaagattttgcaaatatcttctttatgatgatgaatttctactcaatcgaacgttcaatggaaatcgctaaagagcgtggtatcaaatatcaagactttgaaaagtctgattatgctaatggcaaatatttcgagttctatacaactcaagaatttgaacctcaattcgaaaaagtacgtgaattattcgatggtatggctattcctacttctgaggattggaagaaactacaacaagatgttgaacaatatggtttatatcatgcatatagattagcaattgctccaacacaaagtatttcttatgttcaaaatgcaacaagttctgtaatgccaatcgttgaccaaattgaacgtcgtacttatggtaatgcggaaacattttaccctatgccattcttatcaccacaaacaatgtggtactacaaatcagcattcaatactgatcagatgaaattaatcgatttaattgcgacaattcaaacgcatattgaccaaggtatctcaacgatcctttatgttaattctgaaatttctacacgtgagttagcaagattatatgtatatgcgcactataaaggattaaaatcactttactatactagaaataaattattaagtgtagaagaatgtacaagttgttctatctaa

SEQ ID NO: 34084 - DNA, 1056 bp, Staphylococcus aureus
atggttacattattactagttgcagtaacaatgattgtcagtttgacgataacaccaattgttattgcaatatcgaaaagattaaatttagttgataaaccaaattttagaaaagtacacactaaacctatttcagttatgggtggtacagtgattctcttttcatttttaataggtatttggattggtcatcctattgaaacagaaatcaaaccacttattattggtgcgattattatgtacgtacttgggcttgtagatgatatctacgatttgaaaccgtatataaaattggctggtcaaattgccgctgccttagtagttgctttttatggtgtgactattgattttatttcgttgccaatgggtacaacgattcattttggatttcttagtattccaattactgtgatttggattgttgctattacaaatgcaattaacttaattgatggactcgatggtttggcgtcgggtgtttctgcaatcggactcattacaataggattcattgcaattttacaagctaatattttcataacgatgatttgttgtgttttattaggctctttaattgggtttttattttacaatttccatcctgccaaaatatttttaggtgatagtggggctttaatgattggatttatcatcggattcctttctttactcggattcaaaaatattacaattattgcattgttcttcccaattgttatcttagcagttccattcattgatactttgttcgcaatgattcgacgtgtgaaaaaagggcagcatataatgcaagctgataaatcgcatttgcatcataaactattagctttaggctacacacatagacaaacagtattattaatctattcaatctctattttatttagtctttcgagcattattttgtatgtatcgccaccattaggtgttgtattaatgtttgtattaatcatatttagtattgaattaattgttgaatttacaggattaatagataacaactaccgaccaatattaaatttaattagtcggaaatcgtcacacaaagaagattag

SEQ ID NO: 34085 - DNA, 993 bp, Staphylococcus aureus
atggcagaacctaatttttgggataaccaaacgaaagcgcaagatattatagataaaaataatgcgttaaaagcaatagttaatggttataaaacactacaagcagaagtagatgacatggatgctacttgggatttattacaagaagaatttgatgaagaaatgaaagaagacttagagcaagaggtcattaattttaaggctaaagtggatgaatacgaattgcaattattattagatgggcctcacgatgccaataacgcaattctagagttacatcctggtgcaggtggcacggagtctcaagattgggctaatatgctatttagaatgtatcaacgttattgtgagaagaaaggctttaaagttgaaactgttgattatctacctggggatgaagcggggattaaaagtgtaacattgctcatcaaagggcataatgcttatggttatttaaaagctgaaaaaggtgtacaccgactagtacgaatttctccatttgattcatcaggacgtcgtcatacatcatttgcatcatgcgacgttattccagattttaataatgatgaaatagagattgaaatcaatccggatgatattacagttgatacattcagagcttctggtgcaggtggtcagcatattaacaaaactgaatcggcaatacgaattacccaccacccctcaggtatagttgttaataaccaaaatgaacgttctcaaattaaaaaccgtgaagcagctatgaaaatgttaaagtctaaattatatcaattaaaattggaagagcaggcacgtgaaatggctgaaattcgtggcgaacaaaaagaaatcggctggggaagccaaattagatcatatgttttccatccatactcaatggtgaaagatcatcgtacgaacgaagaaacaggtaaggttgatgcagtgatggatggagacattggaccatttatcgaatcatatttaagacagacaatgtcgcacgattaa

SEQ ID NO: 34086 - DNA, 903 bp, Staphylococcus aureus
atgaaacaatacttaattactggtgggactggtatggttggatctcaattagttaatgaaattaaaaaatcagattcacatatcacgatattaacgcgacacgaccaaatttcaaatgataagaaaatttcatatgtcaactgggctaaatctgggtgggaacacaaagttcctcaaaatatcgatgtggtcatcaacttagcaggtgctacactgaataaacgatggacaccggaatataaacaaacgctaatgctaagtagaattcaatctacgcaagctttatatgaattgtttaaatcacgtaataaagcacctaaagttttatttaatgctagcgccactggttactatcctcctgatttatttatgagttacacagaagtttataaaactttaccatttgatttcttatcagatattgtgtatcaatgggaacgtttcgcacaacaatttgaacaattaggtacgcgagttgtcatcggtcgtttcggtatgattttatcgaatgaaggcggtgcgttacaaacaatgaaactaccatacaaatattacattggtggtaaattaggttctggtcaacaatggtattcatggattcatatcaatgatttaattcaagctattttatttttaataaataacgagtcagctagtggtccgtttaatttaactgcacctatacctgagcgtcaaaatttatttggctacactttagcaagagctatgcataagccccatgaaacttgggcaccaagtcttgcaatgcgtctcatacttggtcaaatgtcaacagtagtattggatactcaaaaagtattacctaataaaattcaagcattgggattccaatttaaatatagtaatttaaaaatggcacttgaagatttaatcaaagaataa

SEQ ID NO: 34087 - DNA, 1191 bp, Staphylococcus aureus
atggctaaaaaaattgtttctgatttagatcttaaaggtaaaacagtcctagtacgtgctgattttaacgtacctttaaaagacggtgaaattactaatgacaaccgtatcgttcaagctttacctacaattcaatacatcatcgaacaaggtggtaaaatcgtactattttcacatttaggtaaagtgaaagaagaaagtgataaagcaaaattaactttacgtccagttgctgaagacttatctaagaaattagataaagaagttgttttcgtaccagaaacacgcggcgaaaaacttgaagctgctattaaagaccttaaagaaggcgacgtattattagttgaaaatacacgttatgaagatttagacggtaaaaaagaatctaaaaatgatccagaattaggtaaatactgggcatctttaggtgatgtgtttgtaaatgatgcttttggtactgcgcatcgtgagcatgcatctaatgttggtatttctacacatttagaaactgcagctggattcttaatggataaagaaattaagtttattggtggcgtagttaacgatccacataaaccagttgttgctattttaggtggagcaaaagtatctgacaaaattaatgtcatcaaaaacttagttaacatagctgataaaattatcatcggcggaggtatggcttatactttcttaaaagcgcaaggtaaagaaattggtatttcattattagaagaagataaaatcgacttcgcaaaagatttattagaaaaacatggtgataaaattgtattaccagtagacactaaagttgctaaagaattttctaatgatgccaaaatcactgtagtaccatctgattcaattccagcagaccaagaaggtatggatattggaccaaacactgtaaaattatttgcagatgaattagaaggtgcgcacactgttgtatggaatggacctatgggtgtattcgagttcagtaactttgcacaaggtacaattggtgtatgtaaagcaattgcaaaccttaaagatgcaattacgattatcggtggcggtgattcagctgcagcagcaatctctttaggttttgaaaatgacttcactcatatttcaactggtggcggcgcgtcattagagtacctagaaggtaaagaattgcctggtatcaaagcaatcaataataaataa

SEQ ID NO: 34088 - DNA, 1503 bp, Staphylococcus aureus
ttgaaaaataaattgctagttttatcattgggagcattatgtgtatcacaaatttgggaaagtaatcatgcgagtgcagtggtttctggggagaagaatccatatgtatcaaaagctttagaattgaaagataaaagtaataaatccaattcttacgaaaattatagagatagtttagaaagtttgatttcatcattatcttttgctgattatgaaaaatatgaagagccagaatatgaaaaggctgtaaaaaaatatcaacaaaaatttatggctgaagatgatgcattaaaaaattttttaaatgaagaaaagaagataaaaaatgcagatattagcagaaaatcgaataatttattaggtttaacacatgaaagatattcttatatttttgatacattaaagaaaaataaacaagagtttttaaaagatattgaagaaatacaactgaaaaatagtgatttaaaggactttaacaatacagagcaacataatgccgacgtagaaataaacaatttagaaaataaagtattaatggtagggtatacattctataatacaaataaggacgaagttgaagaattatatagtgagttagatttgattgttggagaagttcaagataagtcggataaaaaaagagcagtaaatcaaaggatgttaaatagaaaaaaagaggatttagaatttattatagataaattttttaaaaaaattcaacaagaacgtccagagagtataccagcattaactagtgaaaaaaatcataatcagactatggcattaaagttaaaagcagatacagaagctgctaaaaatgacgtatcaaaaagaagtaaaagaagtttaaatactcaaaataataaatctacaacacaagaaatttctgaagaacaaaaagctgaatatcaaagaaagtcagaggcattaaaagaaagatttataaacagacaaaaatctaaaaatgagtctgtggtttcactaatcgatgacgaagacgacaacgaaaacgacaggcaacttgtggtttctgcgccatcaaagaaaccaacaacaccgactacatatactgaaacaacgactcaggtaccaatgcctacagttgagcgtcaaactcagcaacaaatcgtttacaaaacaccaaaaccattagctggattaaatggtgaaagtcatgatttcacaacaacgcatcaatcaccaacaacttcaaatcatacgcataataatgttgttgaatttgaagaaacgtctgctttacctggtagaaaatcaggatcactggttggtataagtcaaattgattcttctcatctaactgaacgtgagaagcgtgtaatcaagcgtgaacacgttagagaagctcaaaagttagttgataattataaagatacacatagttataaagaccgattaaatgcacaacaaaaagtaaatactttaagtgaaggtcatcaaaaacgttttaataaacaaatcaataaagtatacaatggcaaataa

SEQ ID NO: 34089 - DNA, 201 bp, Staphylococcus aureus
atgaataacggtacagttaaatggtttaatgcagaaaaaggttttggtttcatcgaaagagaagatggtagcgacgtattcgtacacttctcagcaatcgctgaagatggatacaaatcattagaagaaggccaaaaagttgaattcgacatcgttgaaggcgaccgtggcgagcaagctgcaaacgtagttaaaatgtaa

SEQ ID NO: 34090 - DNA, 195 bp, Staphylococcus aureus
atggcagacgaaagtaaatttgaacaagcaaaaggtaatgttaaagaaacagtaggtaatgttactgataataaaaatttagaaaacgaaggtaaagaagataaagcttctggtaaagcgaaagaattcgttgaaaatgcaaaagaaaaagcaactgattttattgataaagtaaaaggtaacaaaggcgagtaa

SEQ ID NO: 34091 - DNA, 426 bp, Staphylococcus aureus
atgttaaacagaacagtattagtaggacgattaacaaaagacccagaattaagaagcacgccaaatggtgtaaatgtagggacattcacattagcagtaaacagaacattcacgaatgctcaaggcgagcgtgaagcagattttataaacgtagtagtgttcaaaaaacaagctgaaaacgttaaaaactacctttctaaaggatcgttggcaggtgtagacggacgactacaaacacgtaactatgaaaacaaagacgggcaacgtgtatttgttacagaagtagtagcggacagtgttcaattcttagaaccgaagaataacaaccaacaacaaaacaacaattatcaacaacaaagacaaactcaaactggtaataatccttttgataacaacgcagactctatagaggatcttcctttttag

SEQ ID NO: 34092 - DNA, 582 bp, Staphylococcus aureus
atggcgaatatgaaaaatagtaatgaccgtattattttgtttagaaaagctggcgaaaaagtagatgctactaaaatgctttttttaactgaatacggcttatcacatgaagctgatacagatacagaggatacgatggatgggtcttataacactggtggttcagttgaatcaacaatgtctggtactgctaaaatgttttatggtgacgattttgcagatgaaattgaagatgcagttgtagatcgcgtattgtatgaggcttgggaagttgaaagtagaataccaggcaaaaatggagatgctactaaatttaaagcgaaatatttccaaggtttccacaataaatttgaattaaaagcagaagctaacggtattgatgaatatgaatatgaatatggagtgaatggtcgtttccaacgtggatttgcaacactacctgaggctgtaacaaagaaacttaaggcgactggatacagattccatgacactacaaaagcagatgcgttaactggcgaagatttaacagcaattccacaacctaaggtagattcatcaacggttacaccaggagaggtataa

SEQ ID NO: 34093 - DNA, 1320 bp, Staphylococcus aureus
ttgaggcttacaatttatcatacgaacgatattcatagtcatttacatgaatacgaacgcattaaagtatatatggcagaacaacggccacgacttaatcatccttctttatatgttgatctaggtgatcatgtagatttatccgcacctataactgaagcaactttaggtaaaaagaatgtggcattactaaatgaagcaaaatgtgatgttgcaacaatcggtaataatgaagggatgaccatttcacacgaagctttaaatcacctttacgacgaagcaaaatttatagtgacatgtagcaatgttatagatgaatcaggtcatttaccaaataatatcgtttcttcttatattaaggatatggacggtgtgaaaatactattcgttgcagcgacagcaccttttaccccattttatcgtgcactagattggattgttaccgatccacttgaatctataaaagaagaaattaaacatcaacgaggtaaatttgatgtaataatcgtgctaagtcattgtggcattttcttcgatgaaacattatgccaagaattgcctgaaattgatgtcatttttggtagtcatacgcatcattattttgaacatggtgagatcaataatggtgtactgatggcggcagctggaaagtatggtaattatcttggagaggttaatttaacttttgaggcacataaagtagtacataaaactgcaaagattattcctttagaaacattacctgaagttgaaacttcatttgaagaagaaggaaaaacgttaatgtccaattcagtaattcaacatccagtagtgcttaagcgtagtatgaatcacataactgaagctgcatacttattagctcaaagtgtttgtgagtatacacatgcacaatgtgccatcatcaatgctggcttactcgttaaagatattgtaaaagatgaagtgacagaatatgacattcatcaaatgttaccgcatccgattaatatggtaagggttagactttctggtgtgaaattaaaagagattataactaaaagtaataaacaagaatatatgtatgaacatgcacaaggtttgggtttcagagggaatatatttggaggatatattctttataatttagggtacattcattctacagggcgttactatctgaatggagaagaaatcgaagacgacaaagaatatgtattaggtacgatagacatgtatacgttcggtcgttatttcccaacactgaaagaattaccaaaagagtatttaatgccagagtttttaagagatatatttaaagaaaaattattggaatattaa

SEQ ID NO: 34094 - DNA, 1209 bp, Staphylococcus aureus
atggctcaagatcgtaaaaaagtacttgtacttggtgctggttatgcaggtttacaaactgtaactaaattgcaaaaagcgatatcaacagaagaagcagaaattacgcttattaataaaaatgaatatcactatgaagcaacatggttacatgaagcatcagcaggtacactaaactatgaagatgtattatatcctgtggaaagtgtcttgaagaaagacaaagtgaactttgttcaagcagaagtaacaaaaattgaccgtgatgctaaaaaggtagaaacaaatcaaggtatttatgactttgatattttagtagtagcattaggtttcgttagtgaaacattcggcatcgaaggtatgaaagatcatgctttccaaattgaaaatgttatcacagcacgtgaattatcacgtcatatcgaagacaaatttgctaactatgcagcatcaaaagaaaaagatgataacgatttatctatcttagttggtggtgctggattcactggtgttgaattcttaggtgaattaacagacagaattcctgaattatgtagcaaatatggtgtggatcaaaataaagttaaaatcacttgtgttgaagcagcacctaaaatgttaccaatgttctcagaagaattagttaaccacgcagttagctacttagaagaccgcggtgttgaatttaaaattgctacaccaatcgttgcttgtaacgaaaaaggttttgtagttgaagtagatggtgaaaaacaacaattaaatgcaggtacttcagtatgggcagctggtgtacgtggtagtaaattaatggaagaatcatttgaaggcgttaaacgtggacgtatcgttacaaagcaagatttaacaatcaatggttacgacaacatttttgttattggtgactgttcagcgtttatcccagctggagaagaacgtccattaccaactacagcacaaattgcaatgcaacaaggtgaaagtgttgctaaaaacattaaacgcatcttaaacggtgaatcaactgaagaattcgaatatgttgatcgtggaactgtttgttctttaggttcacatgacggtgtaggtatggtatttggtaaacctatcgctggtaaaaaagcagcattcatgaaaaaagtgattgatacacgtgcggtattcaaaatcggtggtatcggtttagcattcaaaaaaggtaaattctag

SEQ ID NO: 34095 - DNA, 1191 bp, Staphylococcus aureus
atgactaaatctgaaaaaattattgagttaacaaatcattacggagcacataattatttaccattgccaattgtcatttcagaagctgaaggggtatgggttaaagatcctgaaggcaataaatatatggatatgttatctgcatattccgctgttaaccaaggtcatagacatccgaaaattattcaagcattaaaagatcaagctgataaagtgactctagtttcacgtgcttttcatagtgataacttaggtgaatggtacgaaaaaatttgtaaactggcaggtaaagataaagctttaccaatgaatacaggtgctgaagcagtagaaacagctttgaaagcagcacgacgctgggcatacgatgttaaaggaattgagccaaataaagcagaaatcattgcatttaatggtaacttccatggtcgaacaatggcgccagtttcattatcttcagaagcagaataccaacgtggttatggtccgttattagatggatttagaaaagttgattttggagatgtagatgcattgaaagctgcaattaatgaaaatactgcagcagttttagtagaaccaattcaaggtgaagcgggtataaatataccgccagaaggatatttgaaagcaattagagaattatgtgatgaacataatgtcttatttattgctgacgaaatccaagcaggattaggtcgttcgggtaaattatttgctacggattgggataatgtaaaacctgatgtctatattttaggtaaagcactaggtggtggtgtcttcccaatttctgttgtattagcagataaagaagtattagatgtctttacacctggctcacatggttcaacatttggtggtaatccacttgcttgtgctgcatcaattgctgcattagatgttatcgttgatgaggatttaccagggcgctctttagaattaggagattattttaaagaacaattaaagcaaattgatcatccatcaattaaagaagtccgtggacgtggtttgtttataggtgtggaacttaatgaaagtgctagaccatattgtgaagctttgaaagaagaaggcttattatgtaaagaaacgcatgatactgtcattcgttttgcaccaccattaattattactaaagaagaattggaccttgcacttgaaaaaataagacatgtatttcaataa

SEQ ID NO: 34096 - DNA, 1245 bp, Staphylococcus aureus
atgactgagaacaataatttagtaacttctactcaaggaattattaaagaagcattgcataaattgggatttgacgaaggaatgtacgatttaattaaagaacctttaagaatgttacaagtgcgtatccctgtacgaatggatgatggcacagttaaaacattcacaggttaccgtgcgcaacataatgatgctgttggaccaacaaaagggggcgtgcgtttccacccagatgttgatgaagaagaagtaaaagcattatcaatgtggatgactttgaaatgtggcattgtaaacttaccatacggtggtggtaagggtggtatcgtttgtgatccacgtcaaatgagcattcatgaagttgaacgtttatcacgcggatatgtaagagcaatttcacaattcgtaggtccgaacaaagatattccagcaccagatgtatttacaaactcacaaattatggcttggatgatggatgaatatagtgcattagataaatttaattcaccaggtttcatcacaggtaaaccaattgtattgggtggttctcatggacgcgacagatcaactgcactaggtgtagttattgcaattgaacaagctgcaaaacgtcgtaatatgcaaattgaaggtgccaaggttgttattcaaggtttcggtaatgccggaagtttcttagctaaattcttatatgatttaggtgcaaaaattgtaggtatctctgatgcttacggtgcattacacgatccaaatggcttagatatagattatttattagaccgtcgtgatagttttggtacggtaacaaatttatttgaagaaacaatctcaaataaagaattgtttgaattagattgtgacattttagtaccagcggctatttcaaaccaaattacagaagacaatgcacatgatattaaagctagtatcgttgttgaagctgctaatggacctacaacaccagaagcaacacgtattttaactgaacgtggtatattattagttccagacgtattagcaagtgctggtggtgtaacggtttcttacttcgaatgggtacaaaataatcaaggttattattggtctgaagaagaagtaaatgaaaagctacgtgaaaaattagaagcggcatttgacacgatttacgaattgtctcaaaatcgaaaaatagatatgagacttgcagcatatatcataggtattaaacgtacagcagaagcagctagatatcgtggttgggcataa

SEQ ID NO: 34097 - DNA, 930 bp, Staphylococcus aureus
atgactaactcttcgaaaagcttcactaaatttatggctgcttctgctgtttttactatgggatttttatcagtacctactgctggcgctgaacaaacaaatcaaattgcaaataaacctcaggctattcaatggcatacaaatttaacgaatgagcgattcactactatcgcacatcgtggcgcaagtggctatgcaccagagcatacgtttcaagcatatgataagagtcataatgagttaaaagcatcttatatcgaaattgatttacaacgtaccaaagatggacatttagttgctatgcatgatgaaactgttaaccgtacaacaaatggacacggtaaagttgaggattatacccttgatgaattaaaacagttagatgcaggaagttggtttaataaaaaatatccaaaatacgcaagagcaagttataaaaatgctaaagtacccactttagatgaaattttagaacgttatggcccgaatgcaaactattatattgaaacaaagtcacctgatgtatacccaggaatggaagaacaattattagcttcattgaaaaagcatcaccttttaaataacaataaattaaaaaatggacatgtaatgattcaatcattttctgacgaaagtttaaagaaaattcatcgtcaaaataagcatgtgccattagtaaaattagttgataaaggtgaactacaacaatttaacgaccaacgcttaaaagagatacgctcttatgcgattggattaggtcctgattatacagatttaactgaacaaaatacccatcatttaaaagacttaggatttatagtacatccttatacagtgaatgaaaaagctgatatgttacgattaaataaatatggcgttgatggtgtctttacaaatttcgctgataaatataaagaagtcattaagtag

SEQ ID NO: 34098 - DNA, 1380 bp, Staphylococcus aureus
atgagcaataaagcttggggcggtagatttgaagtacaacctgaagagtgggttgacgactttaacgcatccattacttttgaccaaacgctcatagatcaagatatcgaaggcagcattgcgcatgcaactatgcttgcgaatcaaggcattattagtcaacaagacagcgaacaaattatacaaggactaaaatctattcaacatgattatcatcaagatcaaattcaatttagtgcatcattagaagatattcatttaaatattgaacatgaattaattaaacgtattggtgatgctggtggtaagttgcatactggacgcagtagaaacgatcaagttgcaacagatatgcacttgtacactaagaaacaagtgcaagatatcatcgcattaattaagtcgttacaaagtgtaattgtagacatcgcttccaataatgttgatacaattatgcctggttatactcatttacagcgtgcacagccaatttcatttgcacatcatattatgacttatttttggatgttacaacgagaccaacaacgatttgaagatagtttaaaacgaatcgatattaatcctttaggtgcagcagccttaagtggtaccacataccctatcgatagacacgagacaacagcattgttgaactttggcagtctctatgagaatagcctagatgctgttagtgacagagactatattattgaaacattgcataatatttctttaacgatggttcacttatcacgctttgcagaggaaattattttctggtccacagacgaagctaaattcattacattatcagatgcattttcaactggctcatctattatgccacaaaagaaaaatcctgatatggcagaattaattagaggtaaagttggtcgaacgactggtcatttaatgagcatgcttatgactttaaaaggattacctctagcatataacaaagatatgcaggaagataaagaaggtttattcgatgctgtccatacaattaaaggttctttacgtattttcgaaggtatgattcaaacgatgacaattaataaagaacgactcaatcaaactgttaaagaagatttttcaaatgcaacggaactagcagattatttagtaactaaaaatattccatttagaactgcacatgaaattgtaggaaaaatcgtcttagaatgtatacaacaaggtcattatttattagatgttcctttagcaacatatcaacaacatcattctagtatcgatgccgatatttacgattatttgcagcctgaaaattgcttgaaacgacgtcaaagttacgggtcaacggggcaatcatcggtcaaacaacaacttgatgttgctaaacaattactatcacaataa

SEQ ID NO: 34099 - DNA, 942 bp, Staphylococcus aureus
atgaacgtgggtattaaaggttttggtgcatatgcaccagaaaagattattgacaatgcctattttgagcaatttttagatacatctgatgaatggatttctaagatgactggaattaaagaaagacattgggcagatgacgatcaagatacttcagatttagcatatgaagcaagtgtaaaagcaatcgctgacgctggtattcagcctgaagatatagatatgataattgttgccacagcaactggagatatgccatttccaactgtcgcaaatatgttgcaagaacgtttagggacgggcaaagttgcctctatggatcaacttgcagcatgttctggatttatgtattcaatgattacagctaaacaatatgttcaatctggagattatcataatattttagttgtcggtgcagataaattatctaaaataacagatttaactgaccgttctactgcagttctatttggagatggtgcaggtgcggttatcatcggtgaagtttcagaaggcagaggtattataagttatgaaatgggttctgatggcactggtggtaaacatttatatttagataaagatactggtaaactgaaaatgaatggtcgagaagtatttaaatttgctgttagaattatgggtgatgcatcaacacgtgtagttgaaaaagcgaatttaacatcagatgatatagatttatttattcctcatcaagctaatattagaattatggaatcagctagagaacgcttaggtatttcaaaagacaaaatgagtgtttctgtaaataaatatggaaatacttcagctgcgtcaatacctttaagtatcgatcaagaattaaaaaatggtaaactcaaagatgatgatacaattgttcttgtcggattcggtggcggcctaacttggggcgcaatgacaataaaatggggaaaatag

SEQ ID NO: 34100 - DNA, 1083 bp, Staphylococcus aureus
atgactgaaagaatattagaagtaaatgatttgcatgtttcctttgatattacagcaggggaagtgcaggcagtgagaggtgtagatttttatttaaacaagggggaaacattggcaattgttggtgaatcaggttcaggtaaatctgtaacaacaaaagcaattacaaaattattccaaggggacacaggaagaattaaaaagggagaaattttatttttaggggaagatttagcaaaaaaacctgaaaatgagttaattaaattacgtggcaaagatatttcaatgatctttcaagatccaatgacatctttaaacccaacgatgcaaattggtaaacaagtcatggaaccattaattaagcacaaaaattatagtaaagcacaagctaaaaagcgcgcattggaaatactaaatcttgtaggtttaccaaatgcagaaaaaagatttaaagcatatcctcatcaattttcaggtggacaaaggcaaagaattgttattgcaaccgcattagcttgtgaacctaaagtgctcattgctgatgaaccaacgactgcattagacgtaacgatgcaggcacaaattttagatttaatgaaagaactacaacaaaaaatcgatacagcaattatttttataacgcatgatttaggggttgttgcgaatattgctgatagagtggcagttatgtatggtggtcaaatggttgaaacaggagatgttaacgaaatattttatgatccaaagcatccatatacatggggattattatcgtcaatgcctgatttatcaacaacaaatgacacaccattactagcgattcctggagcgccacctgatttattacacccacctaaaggtgatgcatttgcgagacgtagtcaatatgcattagatattgattttaaagtagaaccaccgtggtttaaagtttcaccgacacattttgtgaaatcttggttattagacgcacgtgcaccaaaagttgaactacccgagctggtaaaacaacgtatgaaaccgatgcctaataattatgaaaaaccactcaaggtagaaagggtgtcgttcaatgaaaaatga

SEQ ID NO: 34101 - DNA, 981 bp, Staphylococcus aureus
atggaaaatattttagaagtcaaccaaataaaaaaatactacaaaattaaaactggattattacaaaaaactcagtacgttaaagctgttgatgacgtatcgttttcaataaaaaaaggacaaacttttggattagtaggagaatcgggttgtggtaagtcaacgttaggtaaagtgattatcaggcttgaagatgcaacttcaggttcaataattgttaatggtgaagatataacaagattacaaggtaaaaaactcagaaaatcacgacaacaatatcagatgatatttcaagatccgtatgcatcattgaatccgatgcaaatggttggagatatcatttcagaacctattttaaattataaaaaattgccaaaagaagaaataaaaaaagaagtactatatttattaaaatgtgttggcctaagtgaagatgcatattataaatatgcacatgaattttcaggtggacagagacaaagagtgggaattgcaagagcattggctttgcgtccgagtttaattgttgctgatgagcctgtaagtgcattagatgtatctgttcaatctcaagtactgaatttattaaaagatttacaagagcaatttaagttaagctatttatttatcgcgcatgatttaagtgtagtgaaacatattagtgatgtaattggagttatgtatttaggtcatatagttgaaattgcatctgataaagaaatttatgaaaatcccaaacatccatatacaaaagcattaatttcatcaataccacaaattgataaacataataacaatagaattatattaaaaggagaattaccttcgccaagtaatccgccgcaaggttgtccttttcatacaagatgtccgattgcaaaagataaatgtaaagaaaatataccacaattaaaggacattggtaacgaacatcaagttgcttgtttctacgtagataaagtaggtgatttaaatgcttaa

SEQ ID NO: 34102 - DNA, 636 bp, Staphylococcus aureus
atgaatcaatgggatcagttcttaacaccttataagcaagcggttgatgagttgaaagtgaaacttaaaggcatgcgcaaacaatatgaagttggtgaacaagcgtcgccaatagaatttgttactggtcgtgttaaaccgatcgctagtattatagataaggcaaacaaacgacaaataccatttgataggttaagagaagaaatgtacgatatcgctggtttaagaatgatgtgccaatttgtagaagatattgatgttgtcgtcaatattttaagacaaagaaaagattttaaagtaattgaagaacgagattatattcgtaacactaaagaaagtggttaccgctcgtatcatgtcattattgaatatccaattgaaacattacaaggccaaaaatttatattggctgagattcagattcgtacattagcaatgaatttctgggcaacgattgaacatactttacgatataaatatgatggtgcttatccggatgaaattcaacatcgtttggaaagagcggcagaagcagcgtatttacttgatgaagagatgtctgaaattaaaaatgaaattcaggaagctcaaaaatattacacgcaaaaacgttctaaaaaacatgaaaatgattaa

SEQ ID NO: 34103 - DNA, 1386 bp, Staphylococcus aureus
atgtcaatgaacacagatgaaaaagagcgtgttcaagaggaattatatgatgagacattattagatcaatacttagaaaatgatgatattgatcaatttagagatgaatttctagcattacacacatatgaacaaagtgagtattttgaagatactaccgatgaaaatagacaaaagatttttcaatatttatcacctgaagaggttgcaaatttctttgatcaattagatattgatgacgatgaatatgagttgctatttgataaaatgaatgcgacatacgcaagtcacatattagaagaaatgtcatacgataatgcagtagatattttaaatgagttgactaaaccaaaagttgctagtcttttaacattgatgaataaagatgacgcgaatgaaatcaaagcattacttcactatgatgaggatacggccggcggtattatgacgacggagtatttatcacttaaagcgcatacgcctgttaaagaagcgttattattggtcaaagcgcaagcgccagacgcagaaacaatatatgttatatttgtcgttgatgatgatggtaaattagtaggtgttttatcactaagagatttaattgtagctgaaaatgatgcttatattgaagatattatgaatgaacgtgtcattagtgtgaatgtagcagacgaccaagaagatgttgctcaagttatgagagactatgatttcatggctgtacctgttatagattaccaagaacatttgcttggtatcatcacgattgatgatattttagacgttatggatgaagaggctagtgaagactactctcgtttagccggggtatcagatatcgattcgactaatgattcaatcattaaaacagcattaaaacgtttaccatggttgattattttaacatttttaggaatgattactgcgacaattttagggagatttgaaaaaacattagaaaatgtagcgctactcgcagcgtttattcctattattagtggtatgtcaggaaattcaggtacacaatctttagccgtttcagttcgtaacattacgacaggggaaattaatgagcaaagtaaatttagaattgcattaagagaagcgggaagtggtgtattatcgggcgttgtatgttcaacaatattatttacaattattgttgcaatatatcatcagccacttttagcattaatcgttgcaggaagtttaacttgtgcgatgacggtggggacgtttgtaggttcgatgattccattattgatgaataaattaaatatcgatccagcagtggctagtggaccatttattacaacaattaatgatattattagtatgttgatttattttggtttagctacatcatttatggcttacttaatttaa

SEQ ID NO: 34104 - DNA, 1359 bp, Staphylococcus aureus
gtgtcaatttttagccagtttttaaaaagatcaagccctcaacaaggtattgtattgtactatatcgtcgcaattgtcattgcatttttattattaaacttaccgtatgttcataaaccaggtgtagaagtaaatccaattgacacattatttgttgccgtatccggaattagtgttactggattgtctccgataagtattgtcgatacctattctacatttggacaattaattatcctcgtgatattaaatattggtggaattggcgtcatggcaattggtacgatgttatgggtggtactaggtaaacatattggaattagagaacgtcagttaattatgttagataataacaaaaacacaatgagtggtaccgtcaaattgattattgatattgtaaaatcaatatttgtaatcgaactcgtaggagccatgttattagcattttacttttatcgagataatccagatttaaaatatgcaatcatgcaaggtgtttttgtttctatttctgccactaccaatggtggattagatattacaggtaagtcattaattccttatgcacatgattattttgtacaagcgatagttatatttttaataattttaggatcaatcggcttcccagtattattagaagttaaagcttatattcaaaatagggttactaattttagattttcattatttactaaaattacgacatcaacatatttattcctatttattgttggggtattagccattctattatttgaacataaccatgcgttcaaaggtttaagttggcatcaatcgttattctattcgctgtttcaatcagcgactacaagaagtgcgggtcttcaaacaattgatgtgacaacactaagtgaccccactaatattatcatgggtattttaatgtttataggatcttcgccaagttcggttggtggcggtattcgtacaacaactttcgctattttaattttgtttttaattaactttagtaataatgccgataaaacatccattaaagtttacaatagagaagtacacattatggatattcaacgttcatttgcagtatttacaatggcgacaattttaacatttttaggaatgctaattatatcagctactgaaaatggtaagcttacatttttacaagtattttttgaagtcatgtctgcatttggaacttgtggactatcgcttggtgtcacaagtgatattagtgatatttctaaggtcgtactaatggtactcatgtttataggacgtgttggcttaatatcatttatcattatgatagcaggacgtcgagaaccagataaattccattatccaaaagaacgtattcaaataggataa

SEQ ID NO: 34105 - DNA, 1194 bp, Staphylococcus aureus
atgaaatttaataaagtaaaactagttatacatgcgtgtgtactattatttatcattatttctatagcgttaatttttcatcgattacagacgaagacacattctatagacccaatacataaggaaacaaaattatcagacaatgaaaaatatttagtggatcgtaataaggaaaaggttgcgccgtctaaactaaaagaggtatataatagcaaggatcctaaatataagaaaattgacaagtatttacaaagttcattatttaacggttcagtagctatatatgaaaatggcaaattgaaaatgagtaaaggttatggatatcaagattttgaaaaaggtattaaaaacacaccgaatacgatgtttttaataggttcagctcaaaaattttcaacagggttactgttaaaacagttagaagaagaacataaaataaatatcaatgatccagtaagtaaataccttccatggtttaaaacatctaagcctatcccattgaaagatttaatgttgcatcaaagtggattatataaatataaatcctcaaaagattataaaaatttagatcaagcagttaaagcgattcaaaaacgtggtattgatcctaagaaatacaaaaagcatatgtataacgatgggaattatttagtacttgcgaaagttattgaagaagttacaggtaaatcttatgctgagaattattatacaaaaataggagatcctttaaaacttcagcacacagcattttatgatgaacaaccttttaaaaaatatctagcaaaaggttatgcttataatagtacaggactttcattcttaagacctaatattttggaccaatactatggtgcaggtaatttatatatgacaccaacagatatgggtaaattaattactcaaatacaacaatataaattattcagtcctaaaataaccaatccattattacatgagtttggtacgaaacagtatccagatgaatatcgatatggtttctatgctaagccaacattgaatagacttaacgggggattctttggacaagtctttactgtttactataatgataagtatgtagttgtacttgcattaaatgtaaaaggaaacaatgaagttcgaatcaaacatatttataatgatattttaaaacaaaataaaccttacaatacgaagggtgttattgttcaataa

SEQ ID NO: 34106 - DNA, 2190 bp, Staphylococcus aureus
atgtctaaatttatcgaaccaagcgttgaagaaattaaacttgaaaaagtatatcaagatatgggattaagtgatcaagaatatgaaaaagtttgcgatattttaggcagacaacctaactttacagaaacaggtatcttttctgttatgtggagtgaacattgctcttataaacattctaaaccgtttttaaagcaatttcctacgtcaggtgagcatgtgcttatgggtccaggtgaaggtgcaggggtagtcgatataggtgataatcaagccgtagtatttaaagtagagtctcacaatcatccatcagcaattgaaccatatcaaggggctgctacaggcgttggtggaatcattcgtgacattgtttctattggggctagacctattaatttgttaaacagtcttagatttggagaattagataataaacaaaaccaaagattacttaaaggggttgtaaagggtatcggaggttatggtaactgcattggtattccaacaactgctggtgaaatcgaatttgatgaacgttatgatggcaatccacttgttaatgcaatgtgtgttggtgttatcaatcacgacatgattcaaaaaggcacagcaaaaggtgtaggtaattcggtcatttatgttggtttgaaaactggtcgagatggtattcatggtgctacttttgcatctgaagaattgacggaagaaagcgaaagtaaacgaccttctgtacaaatcggtgatccatttgtaggtaaaaaattaatggaagcaacacttgaagcaattacatttgatgaattagttggtattcaagatatgggtgctgctggtttaacatcttcatcgtctgaaatggcggcaaaaggtggtagtgggttacatttgagattagaacaagtgccaacacgtgagccaggtatttctccttatgaaatgatgctttcagaaactcaagaacgtatgttactagttgttgaaaaaggtaatgaacaaaaattcttagatttatttgataagcacgaattggatagtgctgttataggtgaagttacagatacaaatcgttttgttttaacatatgatgatgaagtttatgctgacattccagttgaaccactagctgatgaagcacctgtatatattttagaaggagaagaaaaagattataatacttctaaaaatgattatacacacatcgatgttaaagatactttctttaaattacttaagcatccgactatagcatctaaacactatttatatgatcaatacgaccaacaagttggtgccaatacgataattaagccaggacttcaagcatcggtagtacgtgtggaaggcacaaataaggcaattgcttcaacaattgatggtgaagcgcgttatgtatataacaatccatatgaaggtggaaagatggtagtagctgaagcttatcgaaatttaattgccgtgggtgcaacaccattagcaatgacagattgtttaaattatggttctcctgaaaagaaagaaatctatcaacagttgatagattcaacgaaaggtatggcagaagcatgcgacattcttaagacaccagtagtttctggaaatgtatctttatataacgaaacgaaaggtacttctattttcccaacaccagttgttggaatggtaggtttgattgaaaatgtaaattatttaaatgattttgaacctcaagttggagataaattatatttaatcggtgatactaaggacgactttggtggtagtcaacttgaaaagttaatttatggcaaagttaatcatgaatttgagtcattagatttgagttcagaagttgaaaaaggtgaatcaatcaagaccgctattcgtgaaggactattatcacatgttcaaacagttggtaaaggtggcttactgattaccttagctaaactaagtgcgcattacggtttaggattaaaatcttcaatagatataacaaatgcacaattgtttagtgagacacaaggccgatatgttgtttctgttaaatcaggtaaaactttaaatattgataatgcaatagaaattggacttttaacagatagtgataatttcaaagtaacaacaccatatacagagattagtgaaaatgtttcagatattaaacaaatatgggaaggggcaattgctcaatgtttaactactcaggattaa

SEQ ID NO: 34107 - DNA, 1362 bp, Staphylococcus aureus
atggatacagttgaaatcagtcggtttttgacagctatgactttagcagttcatatcatttttgcaacgattggtgttggtatgcctttaatgttcgcaattgcagaatttttaggtattcgcaaaaatgatcttcaatatatagctatggccaaaagatgggctaaagcttatacaattactgtagcagtgggagttgttacaggtacaattataggacttcaattatcattgatttggcctacatttatggaaatgggtggacacgttattgcacttccattatttatggaaacatttgcgttcttctttgaagctattttcttaagtatatatttatatacttgggatcgttttaaaaataaatggacacatttcttaattagtataccagtaattattggtggctctttctcagccttcttcattacttcagtgaattcatttatgaatacgcctgcaggttttgagttgaagaatggaaagatggtcaatgttcaacctatagaagcgatgtttaacccatcgtttatagttcgatcatttcacgtaattactacagccggtatgacgatggcatttgttattgcatcaatagcagcttttaaattattgcgtaatcgtcaacctaaagatactgtctaccataagaaagctttgaaaatgtctatgattgttggattcttttcaactttactttctatgttggcaggggatttatctgcaaaatttttgcataaattccaacctgaaaaattagcagcttatgaatggcatttcgatacatcttcccatgctaaattattattatttggtgtgttagatgaaaagactcagcaagttaaaggtgcgattgaattacctggactattgagtttcttagcagataatagtgtcaaaactaaagtgcaagggttaaatgattttccaaaaagtttacatccgcctatgattgtccattatttctttgatttaatggtaacgatgggaattttatgttttgtcatttcaggtgtttatgttttaactttaatgtttaaaaagcttagaaagttttctactcataaatggatgctttacggaatattattaacaggaccagcttcaatgctagctatagaatttggatggttcttaacagagatgggtagacagccttggattgttcgtggttatatgcgcgtggcagaagcagcaacacaagcaggcggaataaccttcgttacaattttatttggcatattgtacatcattttaatgtatacatgtgcatacgtattaattcgtatgtttaaaaataaaccggcgtatgaagatgtaaatcgtttagccaagaagcaaggaggagaaatagaaaaatga

SEQ ID NO: 34108 - DNA, 1074 bp, Staphylococcus aureus
atgaaacgttttttacaactcattataggtgcattagttgtgggtatgctttgtcttactttaagtcattggtttaaatctaaagaacaagtgcatacaaatcaaaaaatttacgtatacaattggggcgaatatattgatccagagttaattaagaaatttgaaaaagaaactggcattcaagtcgtttatgaaactttcgattcaaatgaagcgatggaagccaaaattcgcaatggcggtacacattatgatgttgcttttcctagtgaatatacagttcaaaaattgaaaagagatcatttattgttaccaatagatcataataaggtacctaatattaaaaatttagattcagattatatgaatatgtcatttgataaaggcaataaatattctttaccttatttctttggaactgtaggtattttatataataaagaaaagtatccaaatgaatcatttgatagttggaagtcattgtataatcctaaatttaaaaaccaaattttactagttgacggtgctagagagattataggcatgagtttgaataaacttgggtataatcttaatgaccgtaattcgcaccatttaaaagaagcagagcgagatttaaccaaactagcaccacaagtaagaggtgtcgtaggtgatgaaattaccatgatgcttcaacaaaatgaaggtaacatagcggttgtttggagtggtgttgcagcacctctagtgcaagaaggggataaatataattatgttattcctaaagaaggatcgaatttatggttcgacaatatggtaattccaaaaacggcacaaaataaagagggtgcatataaatttatgaattttttattagatgctaaaaataacaagcaaaatacagaattcgtaggctatgcaacgccaaacaaggctgctcgacaattgttgcctaaagagattaaagacgaccatcgtttttatccgactaagaaagagcaagaacgccttgaagtttataaagatttaggacctgaagttttaagtgaatacaatgaaaactttttgaatttcaaaatgtcattaaaataa

SEQ ID NO: 34109 - DNA, 276 bp, Staphylococcus aureus
atggcgaaacaagcaacaatgaaaaatgcagctttgaaacaattgactaaagatgctgatgaaatcttgcatctgattaaagttcaactagataatttaacattaccttcatgcccattatatgaagaagtactagatacacaaatgtttggacttcaaaaagaagttgattttgctgttaaattaggtttagttgaccgcgaagatggcaaacaaattatgttacgtcttgagaaagaactttcaaaattacatgaagcttttacacttgtttaa

SEQ ID NO: 34110 - DNA, 1938 bp, Staphylococcus aureus
atgaacaaacagcaaaaagaatttaaatcattttattcaattagaaagtcatcactaggcgttgcatctgtagcgattagtacacttttattattaatgtcaaatggcgaagcacaagcagcagctgaagaaacaggtggtacaaatacagaagcacaaccaaaaactgaagcagttgcaagtccaacaacaacatctgaaaaagctccagaaactaaaccagtagctaatgctgtctcagtatctaataaagaagttgaggcccctacttctgaaacaaaagaagctaaagaagttaaagaagttaaagcccctaaggaaacaaaagcagttaaaccagcagcaaaagccactaacaatacatatcctattttgaatcaggaacttagagaagcgattaaaaaccctgcaataaaagataaagatcatagcgcaccaaactctcgtccaattgattttgaaatgaaaaaagaaaatggtgagcaacaattttatcattatgccagctctgttaaacctgctagagttattttcactgattcaaaaccagaaattgaattaggattacaatcaggtcaattttggagaaaatttgaagtttatgaaggtgacaaaaagttgccaattaaattagtatcatacgatactgttaaagattacgcttacattcgcttctctgtttcaaatggaacaaaagccgttaaaattgtaagttcaactcacttcaataacaaagaagaaaaatacgattacacattaatggaattcgcacaaccaatttataacagtgcagataaattcaaaactgaagaagattataaagctgaaaaattattagcgccatataaaaaagcgaaaacactagaaagacaagtttatgaattaaataaaattcaagataaacttcctgaaaaattaaaggctgagtacaagaagaaattagaggatacaaagaaagctttagatgagcaagtgaaatcagctattactgaattccaaaatgtacaaccaacaaatgaaaaaatgactgatttacaagatacaaaatatgttgtttatgaaagtgttgagaataacgaatctatgatggatacttttgttaaacaccctattaaaacaggtatgcttaacggcaaaaaatatatggtcatggaaactactaatgacgattactggaaagatttcatggttgaaggtcaacgtgttagaactataagcaaagatgctaaaaataatactagaacaattattttcccatatgttgaaggtaaaactctatatgatgctatcgttaaagttcacgtaaaaacgattgattatgatggacaataccatgtcagaatcgttgataaagaagcatttacaaaagccaataccgataaatctaacaaaaaagaacaacaagataactcagctaagaaggaagctactccagctacgcctagcaaaccaacaccatcacctgttgaaaaagaatcacaaaaacaagacagccaaaaagatgacaataaacaattaccaagtgttgaaaaagaaaatgacgcatctagtgagtcaggtaaagacaaaacgcctgctacaaaaccaactaaaggtgaagtagaatcaagtagtacaactccaactaaggtagtatctacgactcaaaatgttgcaaaaccaacaactgcttcatcaaaaacaacaaaagatgttgttcaaacttcagcaggttctagcgaagcaaaagatagtgctccattacaaaaagcaaacattaaaaacacaaatgatggacacactcaaagccaaaacaataaaaatacacaagaaaataaagcaaaatcattaccacaaactggtgaagaatcaaataaagatatgacattaccattaatggcattactagctttaagtagcatcgttgcattcgtattacctagaaaacgtaaaaactaa

SEQ ID NO: 34111 - DNA, 741 bp, Staphylococcus aureus
atggaacaaattacttctgcacaaaataatagaattaaacaagcgaacaagctaaaaaagaaacgtgagagggataaaactggattagctttaattgaaggtgtgcatttaattgaagaagcttatcaaagtggaattgtaattacacaattatttgcaattgaaccggcaagattagatcagcaaattatcgcatacgcgcaagaagtttttgaaataaacatgaaagttgctgaatctttatcaggtacagtgacaccacaagggtttttcgcaatcattgagaagccgcattatgatatttctaaagcacaacaagtattgctcatcgatcgtgttcaagatcctggaaatttaggcacattaattagaactgcggatgctgctggaatggatgctgtaataatggagaagggtacgacagatccttatcaagataaagtgttgcgagcgagtcaaggtagtgttttccatttgccagttatgacacaagatctcgatacgtttattactcaatttaatggtcctgtttatggtacagcacttgaaaacgcagtggcatacaaagaagttacttcaagtgattcttttgcattactattaggtaatgagggagaaggtgttaatcctgaattattagcacatactacacaaaatttaatcatacctatttatggtaaagctgaaagtttaaatgtagcgattgcaggtagtattttactttatcatttgaaaggttga

SEQ ID NO: 34112 - DNA, 306 bp, Staphylococcus aureus
gtgaaaaacactccacaacatgaaacacaatctaaaccgaaacaaaaaacagtaaaattaattattaaacgacaagatacaagtgattctaagccttatgaagaaacatttgaaattccatatcgtgaaaatttaaacgtcattgcttgtttaatggaaattagacgtaacccagttaatattaaaggtgaaaaaacaacacctgttgtctgggatatgaactgcttagaagaagtatgtggagcatgttctatggttatcaatggtcgtgcaagacaatcttgtctgcgattgttgatcaattag

SEQ ID NO: 34113 - DNA, 960 bp, Staphylococcus aureus
atgaaaacacgtatagtcagctcagtaacaacaacactattgctaggttccatattaatgaatcctgtcgctaatgccgcagattctgatattaatattaaaaccggtactacagatattggaagcaatactacagtaaaaacaggtgatttagtcacttatgataaagaaaatggcatgcacaaaaaagtattttatagttttatcgatgataaaaatcacaataaaaaactgctagttattagaacgaaaggtaccattgctggtcaatatagagtttatagcgaagaaggtgctaacaaaagtggtttagcctggccttcagcctttaaggtacagttgcaactacctgataatgaagtagctcaaatatctgattactatccaagaaattcgattgatacaaaagagtatatgagtactttaacttatggattcaacggtaatgttactggtgatgatacaggaaaaattggcggccttattggtgcaaatgtttcgattggtcatacactgaaatatgttcaacctgatttcaaaacaattttagagagcccaactgataaaaaagtaggctggaaagtgatatttaacaatatggtgaatcaaaattggggaccatatgatagagattcttggaacccggtatatggcaatcaacttttcatgaaaactagaaatggttctatgaaagcagcagagaacttccttgatcctaacaaagcaagttctctattatcttcagggttttcaccagacttcgctacagttattactatggatagaaaagcatccaaacaacaaacaaatatagatgtaatatacgaacgagttcgtgatgactaccaattgcattggacttcaacaaattggaaaggtaccaatactaaagataaatggacagatcgttcttcagaaagatataaaatcgattgggaaaaagaagaaatgacaaattaa

SEQ ID NO: 34114 - DNA, 717 bp, Staphylococcus aureus
atgagtaagaacatcacgaaaaatataattttaacgacaacattattactattaggtactgtattacctcaaaatcaaaaaccagtatttagtttttactctgaagctaaagcttatagcattggtcaagatgaaactaacatcaatgaattaattaaatattacacacagcctcatttttcattttcaaataaatggctatatcaatatgataatggaaacatttatgttgaacttaagagatattcatggtcagcacatatatctttatggggcgctgaaagttggggaaatattaatcagttaaaagatcgttacgtagatgtgtttggactaaaagacaaagatactgatcagttatggtggtcttatagagagacatttacaggtggcgttacaccagccgcaaaaccttctgataaaacttataatctttttgtgcaatacaaagataaactacaaacgattattggtgcgcataaaatataccaaggcaataaaccagtattaacattgaaagaaatcgatttccgtgcacgagaagcgttaataaaaaataaaatattatataccgaaaatcgtaataaaggtaagcttaagatcaccggtggcggtaataactacactattgatttaagcaaaagattacattcagatctagcaaatgtttatgttaaaaatcctaataaaataactgttgacgtcctctttgattag

SEQ ID NO: 34115 - DNA, 726 bp, Staphylococcus aureus
atgaacaataacatcacgaaaaaaattattttatcaacaacattgttactattaggtacagcatttacacaatttcctaatacacctatcaattcttcatctgaagcgaaagcttattatataaatcaaaacgaaactaacgttaatgagttaactaaatattactcgcaaaaatatttaaccttctctaacagtacgttatggcaaaaagataacggtacgattcatgcaacgtcgttacagttttcttggtatagtcatattcaagtttatggacctgaaagttggggcaatatcaaccaattaagaaataaaagcgttgatatttttggcataaaagaccaagaaaccattgattcttttgcattatctcaagaaacgtttactggtggtgttactcctgcagcaacatctaacgataaacactataaactgaatgtaacatataaagataaagcagaaacgtttactggcggatttccagtttatgaaggcaataagcctgttttaactttaaaagaattagattttcgtattcgtcaaacattaattaaaagtaaaaaattatataataattcttataataaaggacaaattaaaataacaggtacagacaataactacacaatagatttaagtaaaaggttgccatcaactgatgcaaatagatatgttaaaaaacctcaaaatgcaaaaattgaagttatcctcgaaaaatcaaactaa

SEQ ID NO: 34116 - DNA, 726 bp, Staphylococcus aureus
atgaaaaagaacatcatgaataaattagttttatcaacagcattgttacttttaggaaccacatcaacacaacttcctaaaacaccaatcagtttttcatctgaagcaaaagcctataatatcagtgaaaacgagactaatatcaatgagttaatcaaatattacactcagccgcatttttcattatctggaaaatggctatggcaaaagcccaatggtagcattcatgcaacattgcaaacgtgggtttggtatagtcatattcaagtgtttggatccgagagttggggaaacattaatcagttaagaaataaatacgttgatatatttggaactaaagatgaggacacagttgaaggttactggacttatgatgaaacatttactggtggtgttacgccagcagctacttcatctgataaaccttatagactatttttaaaatatagtgataaacaacaaactatcatcggtggacatgaattttacaaaggaaataaaccagtattaactttaaaagaattagatttccgtattcgtcaaacattaataaagaataaaaagttatataacggagaatttaataaaggtcaaattaagataactgctgatggaaataattacacgattgatttaagtaaaaagttaaaattaactgacacaaaccgttatgttaaaaatcctaaaaatgcacaaattgaagtcatactcgaaaaatctaactaa

SEQ ID NO: 34117 - DNA, 1002 bp, Staphylococcus aureus
atgaaaaatttacgaaacagaagttttttaactttattagacttttcacgacaagaggtagaattcttattaacactctccgaggatttaaaacgtgctaaatatattggcactgaaaagcctatgttaaaaaataaaaatattgcactgttatttgaaaaagattctacaagaacgcgatgtgcatttgaagttgcagcgcatgatcaaggtgcaaatgtaacttatttaggcccaactggatcacaaatgggtaaaaaagaaacaactaaagatactgcacgtgtgcttggtggaatgtatgatggcattgaataccgtggtttttcacaaagaacagtagaaactttagctgaatattcaggcgtaccagtgtggaatggtttaactgatgaagatcatcctactcaagttcttgctgatttcttaacagcaaaagaagtcttaaaaaaagattatgcagatattaactttacatatgttggagatggtcgtaataacgttgcaaatgcattaatgcaaggtgctgccattatgggtatgaacttccatttagtttgtccaaaagaattaaatccaacagatgaattattaaatcgctgtaaaaatattgccgctgaaaatggtggcaacatattaatcacagatgatattgaccaaggtgtaaaaggttcggatgtaatttacactgatgtttgggtatcaatgggtgaacctgatgaagtatggaaagaacgacttgaattattgaaaccatatcaagtaaataaagaaatgatggataaaactggtaatccaaatgttatttttgagcattgcttaccatctttccataatgctgatacgaaaattggtcaacaaatttttgaaaaatatggtattcgagaaatggaagttacagatgaagtattcgaaagtaaagcttcagttgtattccaagaagctgagaacagaatgcatacaatcaaagcagtcatggttgctacattgggtgaattttaa

SEQ ID NO: 34118 - DNA, 1557 bp, Staphylococcus aureus
gtggaaaatacaattaatgaaagtgaaaagaaaaaacgatttaaattaaaaatgccaggtgcatttatgattttattcattttaacggttgttgcagttatagcaacatgggttattcctgctggtgcatattctaaactttcttacgaaccttcatcccaagaactaaagatagttaaccctcataaccaagtgaaaaaggttccgggtacgcaacaggaactagacaaaatgggggttaaaattaagattgaacaatttaaatcaggtgcaattaataagccagtatcaattccgaatacttatgaaagattaaagcaacatccagctggaccagaacaaataacaagtagcatggttgaaggtacgatagaagcggtcgatatcatggtattcattcttgtactagggggacttattggcgtagttcaagccagtggttcttttgaatcgggattgttagctttaacgaagaaaacaaaagggcatgaatttatgctaattgtgtttgtatcaatactaatgattatcggcgggacgttatgtggtattgaagaagaagctgtagcattctatccgattttagtccctatatttatagcgttaggatacgattctatcgtttcagttggtgccatattccttgccagctctgtcggtagtacattttcaactattaacccgttctcggttgtaattgcctctaatgccgctggtacaacttttacggatggcttgtattggagaataggtgcttgtattgtcggtgcgatttttgttattagttatttatattggtactgtaaaacaattaaaaacgatcctaaagcgtcatattcttatgaagacaaagatgcttttgaacagcaatggtctgtattaaaagatgacgatagtgcccattttactttgcgtaagaagataatccttacattatttgtactaccatttccaattatggtatggggagttatgacgcaaggttggtggttcccagttatggcttcagcatttttaatatttacaattataataatgtttattgctgggacaggtaaatctggattgggagaaaaaggaactgtagatgcatttgtcaatggtgcatcaagtttagtaggtgtatctttaattattggtttagctcgaggtattaatttagtgttgaatgaaggtatgatttcagatacaatcttacacttttcatcatctttagttcaacatatgagtggaccattatttatcatcgtattactatttattttcttctgtttaggttttatcgtgccatcatcttctggattagcggtattatcaatgcctatctttgcaccactagctgatacagtaggtataccaagattcgtcatcgttacgacatatcaatttggtcaatatgcgatgttattcttagcgccgactggacttgttatggccacactacaaatgttaaacatgcgatattcacattggttccgatttgtatggccggtagttgcttttgtattgattttcggtggcggagtactaattacgcaagtactaatttattcataa

SEQ ID NO: 34119 - DNA, 432 bp, Staphylococcus aureus
atgttcatgggagaatacgatcatcaattagatacaaaaggacgtatgattataccgtccaagtttcgttatgacttaaatgagcgttttattatcacaagaggccttgataaatgtttattcggttacactctagacgaatggcaacagattgaagagaaaatgaaaaccttacctatgacaaaaaaagacgcacgtaagtttatgcgtatgttcttctctggtgctgttgaagtagaacttgataagcaagggcgtattaacatccctcaaaacttgaggaaatacgctaatttaactaaagaatgtacagtaatcggtgtttcaaatcgtattgagatttgggatagagaaacttggaatgatttctatgaagaatctgaagaaagtttcgaagatattgctgaagatttaatagattttgatttttaa

SEQ ID NO: 34120 - DNA, 1101 bp, Staphylococcus aureus
atgcaaagcaaacgttatctagtgttagaagacggttctttttacgaaggctaccgtttaggatctgataacttaactgtaggagaaattgtatttaatacagctatgacaggttatcaagaaactatttcagatccatcatatacaggtcagatcattacttttacgtatccattaatcggtaattatggtatcaatagagacgattttgaatcattagtacctacattaaacggtattgtagtgaaagaagcgagtgcgcatccaagtaattttagacaacaaaagacacttcatgacgttttagaattgcatcaaattccagggattgcaggtgttgatacaagaagtattacgcgtaaaattcgacaacacggtgtgttaaaagctggttttactgatcgaaaagaagatattgatcaacttgtcaaacatttacaacaagtagaattacctaaaaacgaagtagaaatcgtttcgactaaaacaccgtatgtttcgacaggtaaggatctaagtgtcgtacttgtagactttggtaagaagcaaaatattgttcgagaattaaacgtcagaggttgtaacgtcacagttgtaccatatacaactactgccgaagaaattttagcaatggctccagatggcgttatgctatcaaacggaccaggtaatcctgaagttgtagaatgtgcgattccaatgattcaaggaattttagggaaaattccgttctttggtatctgtctaggacatcaactttttgcattatctcaaggagcaagctcatttaaaatgaagtttggtcatcgtggtgcgaaccatccagttaaaaatttagagactggaaaagttgatattacgagtcaaaaccatggatatgcaatagatatagattcgttaaaaagtactgatttagaagttactcatcttgcattaaatgatggtactgtagaaggtttaaaacataaaacattaccagcattttctgttcaataccatcctgaagcaaatccaggaccgtcagattcaaactatctatttgatgattttgtagcaatgatgactaattttaaggaaaaggagcgtcatatcaatgcctaa

SEQ ID NO: 34121 - DNA, 3174 bp, Staphylococcus aureus
atgcctaaacgtaatgatatcaaaacaattttagtaatagggtctgggccaattatcataggtcaagcagctgaatttgattatgctggaacacaagcatgtctagctttaaaagaagagggatatcgagttattcttgtaaattcaaatccagcgacaatcatgactgataaggaaattgcggataaagtatatatcgaaccgttaactcatgattttatagcgcgaattatacgtaaagagcaacctgacgctttacttccaactttaggtggtcaaacaggtttaaacatggcgattcaactacacgaaagtggtgtgcttcaagataataacgtccaattattaggaactgagctaacatcaattcaacaagcagaagaccgtgaaatgtttagaacattaatgaatgatttaaacgttcctgtaccagagagtgacattgtaaatacagtagagcaagcctttaaattcaaagagcaagtgggatacccgctaattgttagaccggcatttacgatgggtggtaccggaggcggtatttgtcataatgatgaagaattacatgaaatcgtctcaaatggtcttcattatagtccagcaacgcaatgtttattagaaaaatctatcgcaggttttaaagaaatcgaatacgaagtaatgcgtgataaaaacgataatgccatcgttgtatgtaacatggaaaatattgatccagttggtattcatactggcgattcaattgttgtggctcctagtcaaacattatcagatgttgagtatcaaatgttacgtgatgtttcattaaaagttattcgagctttaggtatcgaaggtggttgtaatgttcaattagcattagatccccattcattcgattattatattatagaagtaaatccgcgtgtatcacgttcatcagcgttagcttcaaaagcaacaggatatcctattgcaaaattagctgctaaaatcgcggttggtctaacattagatgaaatgttaaatccaattacaggaacatcttatgcagcgtttgaaccaactttagactatgtgatttcaaaaataccaagatttccttttgataaatttgaaaaaggagaacgagagcttggcacacaaatgaaagcaacaggtgaagttatggccattggtcgaacttacgaagaatcattgttaaaagcaattcgatcacttgagtatggtgtgcatcacttaggattaccaaatggtgaaagcttcgatcttgattatattaaagaacgtatttcacaccaagatgatgaacgattatttttcatcggcgaagcaattagaagagggacaacattagaagaaattcataatatgactcagattgattacttcttcttacacaagttccaaaacattattgatattgagcatcaattaaaagagcatcaaggtgatttagaatatcttaaatatgcaaaagattatggatttagtgataaaacaatagcgcatcgctttaatatgacggaagaagaagtatatcaattgcgtatggaaaatgatattaaacctgtttacaagatggttgatacttgcgcagctgaatttgaatcttcaacaccatattattatggtacatacgaaactgaaaatgaatccatagttactgacaaagaaaaaatcttagtattaggctctggaccaattcgaatcggccaaggtgtagaatttgactatgcgacagttcacgccgtttgggcaattcaaaaagcagggtacgaagcgataattgtgaataacaatccagaaacagtttcaacagacttctcaatttctgacaaattatactttgaacctttaactgaagaagatgtgatgaatatcattaatttagaaaaacctaaaggtgtcgttgtacaatttggaggacaaacagcgattaatttagcagacaaattggctaaacatggtgttaaaatacttggtacttcactagaaaatctaaatcgtgctgaagatagaaaagaatttgaagcactattaagaaaaattaacgtgccacagccacaagggaaatcagctacatcacctgaggaagcattagcgaatgctgcagaaatcggatatccggttgtagtaagaccttcttatgtattaggtggtcgcgcaatggaaattgtagacaatgacaaagagttagaaaactatatgacccaggctgtaaaagcgagtccggaacatccggtactagtcgatagatatttaactggtaaagaaattgaagttgatgcgatttgtgatggagaaacggtcattattccaggaatcatggaacatattgaacgtgctggtgtacatagtggtgactcaatcgctgtatatccgccacaaactttgacagaagacgagttagcaacacttgaggactatactataaaattagctaaaggtttaaacatcattggcttaatcaacattcaattcgttatagctcacgatggtgtatatgttttagaagtaaacccacgttctagtagaacggtaccattcttaagtaaaattactgatattccaatggcacaattagctatgcgagcaatcattggggaaaaactaacagatatgggttatcaagaaggggttcaaccatatgctgagggtgtatttgtgaaagcaccggtatttagttttaataaattgaaaaatgttgatattactttaggacctgaaatgaagtctacaggtgaagtaatggggaaagatactacattagaaaaggcgttattcaaagggttaacaggtagtggtgttgaagttaaagatcacggtacagtattaatgaccgtcagtgacaaagataaagaggaagttgttaaattggcacaacgcttaaatgaagttggctataaaattttagcaacgtctggaacagctaataaattagctgagtatgacatacctgcagaagtagtaggcaaaatcggtggcgaaaatgatttattaacacgtattcaaaatggtgatgttcaaatcgttataaatacaatgactaaaggtaaagaagtagaaagggatggcttccaaattagacgtactacagttgaaaatggtattccatgtttgacatctttagatacagctaatgccttaacgaatgtaattgaaagtatgacatttacaatgcgtcaaatgtaa

SEQ ID NO: 34122 - DNA, 402 bp, Staphylococcus aureus
atggatattccaaaaatcacgacatttttaatgtttaataacaaagctgaagaagctgttaaactatacacaagcttatttgaagatagtgagattataacaatggctaagtatggtgaaaatggacctggtgatcacgggactgtacaacactcaatatttacattaaatggacaagtattcatggcgattgatgctaatagtggcacagaattaccaatgaatcctgcgatttcattatttgttacagtaaaagatactattgaaatggaacgactatttaatggattaaaagatgaaggtgccattttaatgccaaaaacgaatatgccaccatacagagagtttgcttgggttcaagataagtttggagtaagttttcaattagcattacctgagtaa

SEQ ID NO: 34123 - DNA, 1386 bp, Staphylococcus aureus
attagctgggaaaaagagaatgttagctgccaattatttaagtggtgcgcaaaacacactagtagggaagaaacttatatgatcgaaaacgtgagaagtcttgcttttgacacgattcaagatatattaaatgaaggtgcgtatagtaacttgcgtatcaatgaagtgttgtcagaaaatgaattaaatgcaatggataaggctttatttacagaaattgtctacggaaccgttaaaagaaaatatacgttagatttttatttaaagccttttgtgaaaacaaagattaaggcatgggttaggcaattattatggatgagtatttatcaatatgtatatttagataaagttccaaatcatgccattattaatgaagcagttgaaatagcaaaagaacgcggtggctatcataatggtaatgtcgtaaatggtattttacgtacaatgatgcgtagtgacttacctgattttaatgaaattgcagatcctaaaaaaagaatggcaatcgagtatagtatgccgaagtggattatagatcattgggcaacacattatggtctcgaagaaactgaaacaattttacagtcatttttagaaacgacatcaacaactgtgcgtgccaacctgacgcgagcatcattagatgatattattgaaaagttgcaagacgaaggttatgacgttgaaaaagatcatgacttaccttattgtctccatataggaggacaaccaattattcattctcgttcatttaaagatggattcgtttcaattcaagataaaagctcaatgtttgttgcacacattatgaatgtagaccgacatgatcacgtattagatgcatgtagtgcacctggcggtaaagcttgtcacattgctgaagttttaatgccagaagggcaagttgacgcttcagatatacatgatcacaaaatagacttaattaattttaatataaaaaaattacgattaacaaatattaaggcttttcaacatgatgcgacaaaaccttatgataaaacatacgataagatacttgttgatgcaccatgtagcggattaggtgtaatgagacataagccggagattaagtatactcaaagcaaacaacatattgagtcactagttgaattacagcttgaaatattggaaaatgtaaaaaacaatgtaaaaataggtggcgaaatcatctattcaacatgtacaattgagcaactagaaaatgaaaacgtgatttatacgtttctgaaaaataataaaaacttcgaatttgaaccgtttcaacatccgataactggagagttggtcaaaacgttacaaatcatgccgcaagactttaattcagatggattctttatcactaagataaaaagaaaggacaattag

SEQ ID NO: 34124 - DNA, 189 bp, Staphylococcus aureus
atgggtaaacaatgtttcgtaacaggtcgtaaagcttcgactggtaacagacgttcacacgctttaaactctactaaacgtagatggaacgctaaccttcaaaaagttagaatcctagttgacggtaaacctaaaaaagtttgggtttctgcacgtgctttaaaatctggtaaagtaactagagtttaa

SEQ ID NO: 34125 - DNA, 504 bp, Staphylococcus aureus
atgagagttgaagttggtcaaattgttaacacacatggtattaaaggtgaaattaaagtaaaatccaattcagactttacagacgttcgttttcaacccggtcaagtgctgacagttgtgcataacaataacgaccttgaatatactgttaagtcacatagagtgcataaagggcttcatatgcttacatttgaaggtattaataatattaatgatattgagcatttaaaagggagttctatttatcaagagcgtgatcatgaagatatcgtacttgaggaaaatgaattttattattcagatattataggatgtacagtttttgatgatcaagaaacaccaataggtcgtgtaattaatatatttgaaacaggtgcgaatgatgtgtgggtgattaaaggatctaaagaatatttgattccttatattgctgatgttgtaaaagaagtggatgttgaaaataaaaaaattatcatcacgccaatggaaggattgttggattaa

SEQ ID NO: 34126 - DNA, 768 bp, Staphylococcus aureus
atgacgctaacaattaaagaagttacgcagttgattaatgcggttaatacaatagaagaattagaaaatcatgaatgctttttagatgagcgaaaaggtgttcaaaatgccatagctaggcgcagaaaagcgttagaaaaagaacaagctttaaaagaaaagtatgttgaaatgacttactttgaaaatgaaatattaaaagagcatcctaatgctattatttgtgggattgatgaagttggaagaggacctttagcaggtccagtcgttgcatgcgcaacaattttaaattcaaatcacaattatttgggccttgatgactcgaaaaaagtacctattacgaaacgtctagaattaaatgaagcactaaaaaatgaagttactgcttttgcatatggtatcgcgacagctgaagaaatagatgaatttaatatttataaagctactcaaatcgccatgcagcgagctattgatggattatcagtacaaccaacgcatttattgatagacgcgatgacgcttgataatgcactgcctcaagtatctttaatcaagggtgatgcaagaagtgtgtccattgcagctgcaagtatcatggcgaaggtttttcgtgatgattatatgacacagttatctaaagattatcctgaatacggttttgaaaaaaacgcgggttatggtaccaaacaacatttactagcaatcgatgatattggcattatgaaagagcatagaaaaagctttgaacctataaaatcgttactgtaa

SEQ ID NO: 34127 - DNA, 2070 bp, Staphylococcus aureus
ttggcagataatttagtcattgttgaatcgcctgcaaaagcaaaaaccattgaaaagtatttaggtaagaaatataaagttatagcttcaatgggacacgtcagagacttaccaagaagtcaaatgggtgtcgacactgaagataattacgaaccaaaatatataacaatacgcggaaaaggtcctgttgtaaaagaattgaaaaaacatgcaaaaaaagcgaaaaacgtctttctcgcaagtgaccccgaccgtgaaggtgaagcaattgcttggcatttatcaaaaattttagagcttgaagattctaaagaaaatcgcgttgttttcaacgaaataactaaagacgctgttaaagaaagttttaaaaatcctagagaaattgaaatgaacttagtcgatgcacaacaagcgcgtcgaatattagatagattggttggctataacatctcgccagttctatggaaaaaagtgaaaaaaggtttgtcagcgggtcgagttcaatctgttgcacttcgtttagtcattgaccgtgaaaatgaaattcgaaactttaaaccagaagaatattggactattgaaggagaatttagatacaaaaaatcaaaattcaatgctaaattccttcattataaaaataaaccttttaaattaaaaacgaaaaaagatgttgagaaaattacagctgcactagatggagatcaattcgaaattacaaacgtgactaaaaaagaaaaaacgcgtaatccagcaaacccatttacaacttctacattacaacaagaggcggcacgtaaattaaactttaaagcaagaaaaacaatgatggtcgcacaacaattatatgaaggtatagatttgaaaaaacaaggtacgattggtttaataacatatatgagaaccgattctacacgtatttcagatactgccaaagctgaagcaaaacagtatataactgataaatacggtgaatcttacacttctaaacgtaaagcatcagggaaacaaggtgaccaagatgcccatgaggctattagaccttcaagtactatgcgtacgccagatgatatgaagtcatttttgacgaaagaccaataccgattatacaaattaatttgggaacgatttgttgctagtcaaatggctccagcaatacttgatacagtctcattagacataacacaaggtgacattaaatttagagcgaatggtcaaacaatcaagtttaaaggatttatgacactttatgtagaaactaaagatgatagtgatagcgaaaaggaaaataaactgcctaaattagagcaaggtgataaagtcacagcaactcaaattgaaccagctcaacactatacacaaccacctccaagatatactgaggcgagattagtaaaaacactagaagaattgaaaattgggcgaccatcaacttatgcaccgacaatagatacgattcaaaagcgtaactatgtcaaattagaaagtaagcgttttgttcctactgagttgggagaaatagttcatgaacaagtgaaagaatacttcccagagattattgatgtggaattcacagtgaatatggaaacgttacttgataagattgcagaaggcgacattacatggagaaaagtaatagacggtttctttagtagctttaaacaagatgttgaacgtgctgaagaagagatggaaaagattgaaatcaaagatgagccagccggtgaagactgtgaagtttgtggttctcctatggttataaaaatgggacgctatggtaagttcatggcttgctcaaacttcccggattgtcgtaatacaaaagcgatagttaagtctattggtgttaaatgtccaaaatgtaatgatggtgacgtcgtagaaagaaaatctaaaaagaatcgtgtcttttatggatgttcgaaatatcctgaatgcgactttatctcttgggataagccgattggaagagattgtccaaaatgtaaccaatatcttgttgaaaataaaaaaggcaagacaacacaagtaatatgttcaaattgcgattataaagaggcagcgcagaaataa

SEQ ID NO: 34128 - DNA, 723 bp, Staphylococcus aureus
atggctcaaatttctaaatataaacgtgtagttttgaaactaagtggtgaagcgttagctggagaaaaaggatttggcataaatccagtaattattaaaagtgttgctgagcaagtggctgaagttgctaaaatggactgtgaaatcgcagtaatcgttggtggcggaaacatttggagaggtaaaacaggtagtgacttaggtatggaccgtggaactgctgattacatgggtatgcttgcaactgtaatgaatgccttagcattacaagatagtttagaacaattggattgtgatacacgagtattaacatctattgaaatgaagcaagtggctgaaccttatattcgtcgtcgtgcaattagacacttagaaaagaaacgcgtagttatttttgctgcaggtattggaaacccatacttctctacagatactacagcggcattacgtgctgcagaagttgaagcagatgttattttaatgggcaaaaataatgtagatggtgtatattctgcagatcctaaagtaaacaaagatgcggtaaaatatgaacatttaacgcatattcaaatgcttcaagaaggtttacaagtaatggattcaacagcatcctcattctgtatggataataacattccgttaactgttttctctattatggaagaagggaatattaaacgtgctgttatgggtgaaaagataggtacgttaattacaaaataa

SEQ ID NO: 34129 - DNA, 1176 bp, Staphylococcus aureus
gtgtcaagtaatgaattattattagctactgagtatttagaaaaagaaaagaagattcctagagcagtattaattgatgctattgaagcagctttaattactgcatacaaaaagaattatgatagtgcaagaaatgtccgtgtggaattaaatatggatcaaggtactttcaaagttatcgctcgtaaagatgttgttgaagaagtatttgacgacagagatgaagtggatttaagtacagcgcttgttaaaaaccctgcatatgaaattggtgatatatacgaagaagatgtaacacctaaagattttggtcgtgtaggtgctcaagcagcgaaacaagcagtaatgcaacgtcttcgtgatgctgaacgtgaaattttatttgaagaatttatagacaaagaagaagacatacttactggaattattgaccgtgttgaccatcgttatgtatatgtgaatttaggtcgtatcgaagctgttttatctgaagcagaaagaagtcctaacgaaaaatatattcctaacgaacgtatcaaagtatatgttaacaaagtggaacaaacgacaaaaggtcctcaaatctatgtttctcgtagccatccaggtttattaaaacgtttatttgaacaagaagttccagaaatttacgatggtactgtaattgttaaatcagtagcacgtgaagctggcgatcgctctaaaattagtgtcttctctgaaaacaatgatatagatgctgttggtgcatgtgttggtgctaaaggcgcacgtgttgaagctgttgttgaagagctaggtggcgaaaaaatcgacatcgttcaatggaatgaagatccaaaagtatttgtaaaaaatgctttaagcccttctcaagttttagaagttattgttgatgaaacaaatcaatctacagtagttgttgttcctgattatcaattgtcattagcgattggtaaaagaggacaaaacgcacgtctagctgctaaattaaccggctggaaaattgatattaaatcagaaacagatgcgcgtgaagcgggtatctatccagtagttgaagctgaaaaagtaactgaagaagatattgctttagaagatgctgacacaacagaatcaaccgaagaggtaaatgatgtttcagttgaaacaaatgtagagaaagaatctgaataa

SEQ ID NO: 34130 - DNA, 918 bp, Staphylococcus aureus
atgtataatgggatattaccagtatataaagagcgcggtttaacaagtcatgacgttgtattcaaattgcgtaaaatattaaaaactaaaaaaataggtcacacgggtacgcttgatcccgaagttgcaggcgtgttaccggtatgtataggtaatgcaacgagagttagtgattatgttatggatatgggcaaagcttatgaagcaactgtatcgataggaagaagtacaacgactgaagatcaaacgggtgatacattggaaacaaaaggtgtacactcagcagattttaataaggacgatattgaccgattgttagaaaattttaaaggtgttattgaacaaattccgccaatgtattcatcagtcaaggtgaatggcaaaaaattatatgaatatgcgcgtaataatgaaacagttgaaagaccaaagcgtaaagttaatattaaagacattgggcgtatatctgaattagattttaaagaaaatgagtgtcattttaaaatacgcgtcatctgtggtaaaggtacatatattagaacgctagcaactgatattggtgtgaaattaggctttccggcacatatgtcgaaattaacacgaatcgagtctggtggatttgtgttgaaagatagccttacattagaacaaataaaagaacttcatgagcaggattcattgcaaaataaattgtttcctttagaatatggattaaagggtttgccaagcattaaaattaaagattcgcacataaaaaaacgtattttaaatgggcagaaatttaataaaaatgaatttgataacaaaattaaagaccaaattgtatttattgatgatgattcagaaaaagtattagcaatttatatggtacaccctacaaaagaatcagaaattaaacctaaaaaagtctttaattaa

SEQ ID NO: 34131 - DNA, 972 bp, Staphylococcus aureus
atgaaagtcatagaagtgacacatcctatacaatctaaacagtatattacagaggatgttgcaatggcattcggatttttcgatggcatgcataaaggtcatgacaaagtctttgatatattaaatgaaatagctgaggcacgcagtttaaaaaaagcggtgatgacatttgatccgcatccgtctgtcgtgttgaatcctaaaagaaaacgaacaacgtatttaacaccactttcagataaaatcgaaaaaattagccaacatgatattgattattgtatagtggttaatttttcatctaggtttgctaatgtgagcgttgaagattttgttgaaaattatataattaaaaataatgtaaaagaagtcattgctggttttgattttacttttggtaaatttggaaaaggtaatatgactgttcttcaagaatatgatgcgtttaatacgacaattgtgagtaaacaagaaattgaaaatgaaaaaatttctacaacttctattcgtcaagatttaatcaatggtgagttgcaaaaagcgaatgatgctttaggctatatttattctattaaaggcactgtagtgcaaggtgaaaaaaggggaagaactattggcttcccaacagctaacattcaacctagtgatgattatttgttacctcgtaaaggtgtttatgctgttagtattgaaatcggcactgaaaataaattatatcgaggggtagctaacataggtgtaaagccaacatttcatgatcctaacaaagcagaagttgtcatcgaagtgaatatctttgactttgaggataatatttatggtgaacgagtgactgtgaattggcatcatttcttacgtcctgagattaaatttgatggtatcgacccattagttaaacaaatgaacgatgataaatcgcgtgctaaatatttattagcagttgattttggtgatgaagtagcttataatatctag

SEQ ID NO: 34132 - DNA, 2367 bp, Staphylococcus aureus
ttggcacaagcaaaaaagaaatcgacagctaagaaaaaaacagcatcaaaaaaaagaacaaattcaaggaaaaagaagaatgataatccgatacgttatgtcatagctattttagtagttgtattaatggtgttgggtgttttccaattaggaataatcggtcgtctaattgacagcttctttaattatttatttgggtacagtagatatttaacatatattttagtactcttagcaactggttttattacatactctaaacgtattcctaaaactagacgaacggctggttcgattgtattgcaaattgcattgctatttgtatcacagttagtttttcattttaatagtggtatcaaagctgaaagagaacctgtactttcttatgtatatcagtcataccaacacagtcattttccaaattttggtggcggtgtattaggtttttatttattagagttaagcgtacctttaatttcattatttggtgtatgtattattactattttattattatgctcaagtgttattttattaacaaaccatcaacatcgtgatgttgcaaaagttgcactggaaaatataaaagcttggtttggttcatttaatgaaaaaatgtcggaaagaaaccaagaaaaacaattgaagcgtgaagaaaaagcgagacttaaagaagaacaaaaggcacgtcaaaatgaacagccacaaataaaagatgtgagtgattttacggaagtgcctcaagaaagagatattccaatttatgggcatactgaaaatgaaagtaaaagccagtgtcaaccaagtcgaaaaaaacgagtgtttgatgcagagaatagttcgaataacatcgtaaatcatcaagcagatcagcaagagcaattaacagaacaaactcataacagtgttgaaagtgaaaacactattgaagaagctggtgaagttacgaatgtatcgtatgttgttccaccgttaactttacttaatcaacctgcaaaacaaaaagcaacatctaaagctgaagtacaacgtaaaggacaagtactagagaatacattaaaagattttggggtaaatgcaaaagtgacacaaattaaaattggtcctgcagtaactcaatatgaaattcaaccagctcaaggggttaaagtgagtaaaattgtaaacttgcataatgatattgcattagctttagcagcaaaagatgttagaatcgaagcaccaatacctggtcgctctgcagtaggtattgaagtgccaaatgagaaaatttcattagtttcactaaaagaagttttagatgaaaaattcccgtctaataataaactagaagttggattaggaagagatatatcaggtgatccaattactgttccactaaatgaaatgccacacttattggtggcaggatcgacgggtagtggtaaatctgtttgtataaatggtattattacaagtattttattaaatgctaagccgcatgaagttaaacttatgttaatcgatccgaaaatggttgaactaaatgtttataacggaattccacatttattaattccggttgttacaaatcctcataaagctgctcaagctttagaaaaaattgtagctgagatggaaagacgttatgatttattccaacattcatcaactagaaatattaaaggttataacgaattaatccgtaagcaaaatcaagaattagatgagaagcaaccagaattaccttatatcgttgttattgtagatgagcttgcagatttaatgatggtagctggtaaagaagttgaaaatgcgattcaacgtatcacacaaatggcacgtgcagcaggtatacatttgattgtagcaacacaaagaccttctgtggatgtaattacaggtatcattaaaaataacattccatctagaattgcttttgctgtgagttctcaaacagattcaagaactattattggtactggcggtgcagaaaagttacttggtaaaggtgacatgttatacgttggaaatggtgattcatcacaaacacgtattcaaggggcgtttttaagtgaccaagaggtgcaagatgttgtaaattatgtagtagaacaacaacaggcaaattatgtaaaagaaatggaaccagatgcaccagtggataaatcggaaatgaaaagtgaagatgctttatatgatgaagcgtatttgtttgttgttgaacaacaaaaggcaagtacatcattgttacaacgccaatttagaattggttataatagagcatctaggttgatggatgatttagaacgcaatcaggtaatcggtccacaaaaaggaagcaagcctagacaagttttaatagatcttaataatgacgaggtgtaa

SEQ ID NO: 34133 - DNA, 579 bp, Staphylococcus aureus
atgaatattccgaaccagattacggtttttagagtagtgttaataccagtttttatattgtttgcgttagttgattttggatttggcaatgtgtcatttctaggaggatatgaaataagaattgagttattaatcagtggttttatttttatattggcttcccttagcgattttgttgatggttatttagctagaaaatggaatttagttacaaatatggggaaatttttggatccattagcggataaattattagttgcaagtgctttaattgtacttgtgcaactaggactaacaaattctgtagtagcaatcattattattgccagagaatttgccgtaactggtttacgtttactacaaattgaacaaggatttgtaagtgcagctggtcaattaggtaaaattaaaacagcagttactatggtagcaattacttggttgttattaggtgatccattggcaacattgattggtttgtcattaggacaaattttattatacattggcgttatttttactatcttatctggtattgaatacttttataaaggtagagatgtttttaaacaaaaataa

SEQ ID NO: 34134 - DNA, 1044 bp, Staphylococcus aureus
ttggataacgatcgtcaaaaagctttagatacagtaattaaaaatatggagaaatctttcggtaaaggtgccgtaatgaagttgggtgacaatataggtcgccgagtttcaactacatcaactggttcagttacattagataatgcgctaggtgtaggtggctatcctaaaggacgaattattgaaatttatggtcctgaaagttctggtaagacaacagtagcgcttcacgctattgctgaagtacaaagtaatggcggggtggcagcatttatcgatgctgaacatgctttagatccagaatatgctcaagcattaggcgtagatatcgataatttatatttatcgcaaccggatcatggtgaacaaggtcttgaaatcgccgaagcatttgttagaagtggtgcagttgatattgtagttgtagactcagttgctgctttaacacctaaagctgaaattgaaggagaaatgggagacactcacgttggtttacaagctcgtttaatgtcacaagcgttacgtaaactttcaggtgctatttctaaatcaaatacaactgctattttcatcaaccaaattcgtgaaaaagttggtgttatgttcggtaatccagagactacaccaggtggacgtgcattaaaattctatagttcagtaagactagaagtacgtcgtgcagaacagcttaaacaaggacaagaaattgtaggtaatagaactaaaattaaagtcgttaaaaataaagtggcaccaccatttagagtagctgaagttgatattatgtatggacaaggtatttctaaagagggtgaacttattgatttaggtgttgaaaacgacatcgttgataaatcaggagcatggtattcttacaatggcgaacgaatgggtcaaggtaaggaaaatgttaaaatgtacttgaaagaaaatccacaaattaaagaagaaattgatcgtaaattgagagaaaaattaggtatatctgatggtgatgttgaagaaacagaagatgcaccaaagtcattatttgacgaagaatag

SEQ ID NO: 34135 - DNA, 798 bp, Staphylococcus aureus
atgagaataatgtttataggggatatcgtaggtaaaattggacgagacgcaattgaaacgtacatacctcaactgaagcaaaagtataaaccaacagttacaattgtaaatgctgaaaatgcagcacatggtaaaggtttgactgaaaaaatatataaacaattactaagaaatggtgtagatttcatgactatgggtaatcacacatatggtcaacgtgaaatttatgattttatagatgaagcaaaacgactagtaagaccagcgaattttccggatgaagcgccgggaattggtatgagatttatacaaattaatgatattaaacttgcagttattaatctgcaaggaagagcgtttatgccagatattgatgatccttttaaaaaggcagatcaattagtcaaggaagcacaagaacaaactccgtttatatttgttgattttcatgcagaaacaacttctgaaaagtatgcaatgggatggcatttagatggtagagctagcgctgttgttggaacgcatacacacattcaaacagcagatgaacgtattttaccaaaggggacagggtatataacggatgttggtatgacaggtttttatgacggcattttaggaataaataaaacagaggtaattgagcgttttatcactagtttgccacaaagacatgttgttccaaatgaaggtagaagtgtattatctggtgttgttattgatttagacaaagaaggtaaaacaaagcacatcgaacgtatattgataaatgatgaccatccattttcaacattttaa

SEQ ID NO: 34136 - DNA, 819 bp, Staphylococcus aureus
atgaatgtatatttagcagaattcctaggaactgcaatcttaatcctttttggtggtggcgtttgtgccaatgtcaatttaaagagaagtgctgcgaatggtgctgattggattgtcatcacagctggatggggattagcggttacaatgggtgtgtttgctgtcggtcaattctcaggtgcacatttaaacccagcggtgtctttagctcttgcattagacggaagttttgattggtcattagttcctggttatattgttgctcaaatgttaggtgcaattgtcggagcaacaattgtatggttaatgtacttgccacattggaaagcgacagaagaagctggcgcgaaattaggtgttttctctacagcaccggctattaagaattactttgccaactttttaagtgagattatcggaacaatggcattaactttaggtattttatttatcggtgtaaacaaaattgccgatggtttaaatcctttaattgtcggagcattaattgttgcaatcggattaagtttaggcggtgctactggttatgcaatcaacccagcacgtgatttaggtccgagaattgcacatgcgattttaccaatagctggtaaaggtggttcaaattggtcatatgcaatcgttcctatcttaggaccaattgccggtggtttattaggtgcagtggtatacgctgtattttataaacatacatttaatattggttgtgcaattgcaattgttgtagttattattactttgattttaggttacattttaaataaatcatcaaaaaaaggtgatatcgaatcaatttactaa

SEQ ID NO: 34137 - DNA, 1383 bp, Staphylococcus aureus
atgaaagtttccaaattcggtggtagctccgtctccaatgctactcaaattaaaaaggttttaaatattgttaattctgatccagagcgaaagattgttatcgtttctgctccaggtaaaagacatgataatgatattaaaacaactgatttgttaatcagattatatgaaaaggtcattaatcatcttgattatcatgataaaaaaagagaaattattcagcgttatgatgatattgtaaaagaattgcaaatggatgaaagtattttacggacgatagatgtgactttggaacattatattaatcaattaaaaaatgaaccaaagagactattagatgcattactttcttgtggtgaagattttaatgcgcaattgatagctttatataataatagtcaaggtataccaacaaaatatatatcaccgaaggaagcgggtatttttgttactgacgtcccacaagaagcacaaatattagatagtgcttactctgaaattaaaaaattaagagattatgatgaaaaactaattatcccaggattttttggcgtatctcatgaaggatatatagttacatttccacgtggcggatcagatataactggcgccatcatatcaagtggtgttagagccacaatttatgaaaatttcaccgatgtgtctggtatttataaagctaatccaaatatcatcaaagatcctgaattaatcgaagaaatcacttatcgagaaatgcgtgaattatcttatgctggttttagtgttttccatgatgaagccttacaaccactttataaagatcgcatccctgtggtgattaaaaatacgaaccgccctcaagataagggtacatttatagtgcatgatagagaaataaatgcgaaaaatgtgattagcggtataagttgtgataaagattttactgtcattaatatcaaaaagtatttaatgaatagacaagtcggctttactagaaagatattaggtgtcttagaggataataatatttcatttgatcatatgccttcaggtattgatactatcagtatcgttatgcgttcaaaacaaattcaaaataaagaaacaaaagtattaaatgaaattcgtcaaaaatgtgatgttgatgagctaagtattgagcatgatttagcaatattaatgattgtcggcgaaggtatgaataaagtcatcggtactgcaaataaaattacacatgccttagctgaatcaaaaattaacttaaaaatgattaaccaaggtgcttcggaaatctcgatgatgtttggaattcatgtagatgatgctgaaaaagctgtattatctacatatgagttttgctatcacggggttgcattaaaaaacttgtgtgataaaaactaa

SEQ ID NO: 34138 - DNA, 1524 bp, Staphylococcus aureus
atgactatgtcacaacaagacaaaaagttaactggtgtttttgggcatccagtatcagaccgagaaaatagtatgacagcagggcctaggggacctcttttaatgcaagatatttactttttagagcaaatgtctcaatttgatagagaagtaataccagaacgtcgaatgcatgccaaaggttctggtgcatttgggacatttactgtaactaaagatataacaaaatatacgaatgctaaaatattctctgaaataggtaagcaaaccgaaatgtttgcccgtttctctactgtagcaggagaacgtggtgctgctgatgcggagcgtgacattcgaggatttgcgttaaagttctacactgaagaagggaactgggatttagtagggaataacacaccagtattcttctttagagatccaaagttatttgttagtttaaatcgtgcggtgaaacgagatcctagaacaaatatgagagatgcacaaaataactgggatttctggacgggtcttccagaagcattgcaccaagtaacgatcttaatgtcagatagagggattcctaaagatttacgtcatatgcatgggttcggttctcacacatactctatgtataatgattctggtgaacgtgtttgggttaaattccattttagaacgcaacaaggtattgaaaacttaactgatgaagaagctgctgaaattatagctacagatcgtgattcatctcaacgcgatttattcgaagccattgaaaaaggtgattatccaaaatggacaatgtatattcaagtaatgactgaggaacaagctaaaaaccataaagataatccatttgatttaacaaaagtatggtatcacgatgagtatcctctaattgaagttggagagtttgaattaaatagaaatccagataattactttatggatgttgaacaagctgcgtttgcaccaactaatattattccaggattagatttttctccagacaaaatgttgcaagggcgtttattctcatatggcgatgcgcaaagatatcgattaggagttaatcattggcagattcctgtaaaccaacctaaaggtgttggtattgaaaatatttgtccttttagtagagatggtcaaatgcgcgtagttgacaataaccaaggtggaggaacacattattatccaaataaccatggtaaatttgattctcaacctgaatataaaaagccaccattcccaactgatggatacggctatgaatataatcaacgtcaagatgatgataattattttgaacaaccaggtaaattgtttagattacaatcagaggacgctaaagaaagaatttttacaaatacagcaaatgcaatggaaggcgtaacggatgatgttaaacgacgtcatattcgtcattgttacaaagctgacccagaatatggtaaaggtgttgcaaaagcattaggtattgatataaattctattgatcttgaaactgaaaatgatgaaacatacgaaaactttgaaaaataa

SEQ ID NO: 34139 - DNA, 150 bp, Staphylococcus aureus
gtgcgcgtaaacgtaacattagcatgcacagaatgtggcgatcgtaactatatcactactaaaaataaacgtaataatcctgagcgtattgaaatgaaaaaatattgcccaagattaaacaaatatacgttacatcgtgaaactaagtaa

SEQ ID NO: 34140 - DNA, 270 bp, Staphylococcus aureus
atggctaagaaatctaaaatagcaaaagagagaaaaagagaagagttagtaaataaatattacgaattacgtaaagagttaaaagcaaaaggtgattacgaagcgttaagaaaattaccaagagattcatcacctacacgtttaactagaagatgtaaagtaactggaagacctagaggtgtattacgtaaatttgaaatgtctcgtattgcgtttagagaacatgcgcacaaaggacaaattccaggtgttaaaaaatcaagttggtaa

SEQ ID NO: 34141 - DNA, 978 bp, Staphylococcus aureus
gtgaaaatatttgattacgaagatattcaattaatacctaataaatgcatagttgaaagtaggtctgaatgtgatacaactatccaatttggtccgaaaaaattcaagctacctgtagttcctgcaaatatgcaaacagttatgaatgagaaattagcgaaatggtttgctgaaaatgattacttttatatcatgcatcgttttgatgaagaagcaagaataccttttataaaacatatgcaaaattcaggcttatttgcatctatttcagttggtgtaaagaaagcggaatttgattttattgaaaagttagctcaagaaaaattaatccccgaatatattacaatagatattgcgcatggtcactcagattcagtgataaacatgattaaacatataaaaaaccatatacctgatagttttgttattgctggtaatgttggtacgccagaaggtgttagagaattagaaaatgctggtgctgatgctaccaaagtcggtataggtcctggtagagtttgtattacaaagattaaaacaggttttggtactggtggttggcagttagcggcattaaacatatgtagtaaagcagctcgtaaacctttgattgccgatggtggtataagaacgcatggcgacatcgctaaatcaattagatttggtgcatcaatggtcatgattggttcattatttgcggcacacgaagaatcacctggtgaaactgtagaacttgatggtaaacagtataaagaatattttggtagtgcatctgaatttcaaaaaggcgaacataaaaatgtagaaggtaaaaaaatgtttgtagaacataagggttcattaatggataccttaaaagaaatgcaacaagatttacaaagctcaatttcatatgccggtggaaaagacttgaaatcattacgtactgtagattatgttattgttagaaactctattttcaacggtgatagagattaa

SEQ ID NO: 34142 - DNA, 1122 bp, Staphylococcus aureus
atgaaaattatacatacagcagactggcacttagggaaaatattaaatggcaaacagcttttagaagatcaagcgtatattttagatatgttcgtagaaaaaatgaaagaagaagaacctgatatcattgtgatagctggagatttatatgacacaacatatccaagtaaagatgcaatcatgttattagaacaagcgattggaaagttaaatttagaactgcgtataccaataattatgattagtggaaatcacgatggtaaagagaggttaaactatggggcgagttggtttgaacataatcagttatttataagaacagattttacatcgattaattcaccaatagagataaatggggttaatttttatacactcccttatgctactgtgagcgaaatgaaacactactttgaagatgacaccattgaaacacatcaacagggaattacgcgctgtattgaaacaatagcaccggaaattgatgaagatgccgtcaatattttaattagtcatctgactgttcaaggtggaaagacatctgattctgaaagaccattaactattggaacggttgaatcagttcagaaaggtgtttttgatatatttgattatgtcatgctaggtcacttgcatcatccatttagtatagaagacgacaaaattaaatatagtggctccttattgcagtattcattttcggaagcgggtcaagctaaagggtatagacgtttaacaattaatgatggcattattaacgatgtatttattcctcttaagccacttagacaattggaaattatctcaggcgaatataatgatgttattaatgaaaaagttcatgtgaaaaataaagataattatttacattttaaacttaaaaatatgtctcatattactgatccaatgatgagtttaaaacaaatttatcctaatactttagcgctgacgaatgaaacttttaattataatgaagaaaataatgctatagaaataagtgaaaaagatgacatgtcaattatcgaaatgttttataaacatataactgataaagaattatcggatatccaatctaaaaagataaaaaatattttagaaaacgaattgagaaaggaggattaa

SEQ ID NO: 34143 - DNA, 999 bp, Staphylococcus aureus
atgacattactaacaagaataaaaactgaaactatattacttgaaagcgacattaaagagctaatcgatatacttatttctcctagtattggaactgatattaaatatgaattacttagttcctattcggagcgagaaatccaacaacaagaattaacatatattgtacgtagcttaattaatacaatgtatccacatcaaccatgttatgaaggggctatgtgtgtgtgcggcacaggtggtgacaagtcaaatagtttcaacatttcaacgactgttgcttttgttgtagcaagtgctggcgtaaaagttataaaacatggtaataaaagtattacctcaaattcaggtagtacggatttgttaaatcaaatgaacatacaaacaacaactgttgatgatacacctaaccaattaaatgaaaaagaccttgtattcattggtgcaactgaatcatatccaatcatgaagtatatgcaaccagttagaaaaatgattggaaagcctacaatattaaaccttgtgggtccattaattaatccatatcacttaacgtatcaaatggtaggcgtctttgatcctacaaagttaaagttagttgctaaaacgattaaagatttaggtagaaaacgtgcaatcgttttacatggtgcaaatggtatggatgaagcaacactatctggtgataatttgatatatgaattgactgaagatggagaaatcaaaaattacacattaaatgcgactgattatggtttgaaacatgcgccgaatagtgattttaaaggcggttcacctgaagaaaatttagcaatctcccttaatatcttgaatggtaaagatcagtcaagtcgacgtgatgttgtcttactaaatgcgggtttaagcctttatgttgcagagaaagtggataccatcgcagaaggcatagaacttgcaactacattgattgataatggtgaagcattgaaaaaataccatcaaatgagaggtgaataa

SEQ ID NO: 34144 - DNA, 783 bp, Staphylococcus aureus
atgacgattttagcagaaattgttaaatataaacagtcacttttacaaaatggctattatcaagacaaacttaataccttgaaaagtgtgaagattcagaataaaaaatcttttataaacgcaattgagaaagaaccaaagctagcaattattgcagaaattaaatcgaagagtcctacagttaatgacttacctgaacgagatttatcgcaacaaatctcagattatgaaaagtacggtgcaaatgccgtgtccattttaactgatgaaaagtactttggtggtagttttgaaagattacaagcattgacaacaaaaacaacattacccgtattatgcaaagactttattatagacccgcttcaaattgatgttgctaaacaagctggtgcatctatgattttattgatcgttaacatcttatcggataaacaattgaaagatttatataactacgctatatcgcaaaatctagaagtgttaattgaagtacatgatcgccatgaattagaacgtgcctataaggttaatgctaaattgattggtgtaaataacagggacttaaaacgatttgtcacaaatgtggaacatacaaatactattttagaaaataaaaaacccaatcatcattatatttctgaaagtggtattcacgatgcatctgatgtaagaaaaatcttgcatagtggtatcgatggcttactaataggtgaggcgcttatgcgttgtgacaatctatctgaatttttaccacaactgaaaatgcaaaaggtgaagtcatga

SEQ ID NO: 34145 - DNA, 1215 bp, Staphylococcus aureus
atgaataaacaaatacaaacagaagcagatgaattaggtttctttggtgaatatggagggcaatatgttccagaaacattaatgccagcaattattgagttgaaaaaagcttataaagaggcaaaagcagacccagagtttcaaagagaactggaatactatttatcagagtatgtaggacgcgcgacaccacttacatatgctgcatcatatactgaaagcctaggtggcgctaaaatatatttgaaacgagaggatctaaatcatacaggcgcccataaaattaataatgcgttaggtcaagcgttgcttgctaaaagaatgggcaagaagaagcttgttgctgaaactggtgcgggtcaacatggtgtagctagtgctacggttgctgcattatttgatatggaacttgttgtctttatgggaagtgaagatattaaaagacaacaacttaatgtatttagaatggaattacttggtgcaaaggttgtggcagttgaagaaggtcaagggactttatcggatgcagttaataaagcattgcaatattgggtaagtcatgtagatgatacacattatttattaggttctgcattaggtccagacccattcccaacgattgttagagattttcagagtgtcattggtaaagaaataaaatcacagatattgaagaaagaaggtcgacttccggatgcaattgtagcatgtatcggtggtggctcaaatgcaatcggtacattttatccatttattaaagatgatgttgcattatacggtgttgaagccgcaggtcaaggcgaggatactgataaacatgcacttgcaattggcaaaggatcacctggcgtattacatggtactaaaatgtatttaattcaagatgaaggtgggcaagtgcaactagcacattctatttcagcaggacttgattatcctggtattgggcctgaacattcttattaccacgacattggtagagtaacttttgaaaatgcaagtgatacacaagcaatgaatgctttaatcaactttacaaaacatgaaggtattatacctgcaattgaaagtgcacatgcactgagttatgttgaaagactagcgcctacgatgtcgaaagaagatattattgtagtaactatttctggacgtggcgataaagatatggaaacaattagacaatatatggcagagcgaggtcttgcaaatgactaa

SEQ ID NO: 34146 - DNA, 852 bp, Staphylococcus aureus
atggcgcaaacacttgcacaaactaaacaaatatctcaaagtcatacgtttgatgtctcacaaagtcatcataaaacaccagatgatacaaactcacattctgttatatattcaacacaaaatttagacttatggtatggcgaaaatcatgcattacaaaatattaatttagatatttatgaaaaccaaattactgccattataggtccatctggttgtggcaaatcaacatatattaaaactttgaatcgaatggttgagttagtaccttctgtgaaaacagctggtaaaatattatatcgagatcaagacatttttgatcaaaaatattctaaagaacaattacgtacaaatgtgggcatggtctttcaacaacctaatccatttccaaaatcaatatacgataatattacttacggtccaaagattcacggtattaaaaataaaaaagttcttgatgaaatcgttgagaaatcattacgtggcgctgcaatttgggatgaattaaaggataggttgcacacaaatgcatatagtttatccggtgggcaacaacaacgtgtttgtatcgcgcgttgtttagcaattgaacctgaagtcattttaatggatgaaccgacatcagcattagatccaatctcaacattaagagtagaagagttggttcaagaactaaaagaaaagtatacaattattatggttacacataatatgcaacaagcagctcgtgtatcagataaaactgcatttttcttaaatggttatgtcaatgaatatgatgatactgataaaattttctctaacccatcaaacaagaaaacagaagattatatttcaggaaggtttggttga

SEQ ID NO: 34147 - DNA, 720 bp, Staphylococcus aureus
atggtacaacatttaacagctgaagaaattattcaatatataagtgatgctaaaaagtctacaccaataaaagtatatttaaatggtaattttgaaggcatcacatacccagaaagttttaaagtatttggttcagaacaatctaaagtaatcttttgtgaagcggatgattggaaacctttttacgaagcatatggtagtcaattcgaagatatagaaattgaaatggatcgtcgcaattctgccattccattaaaagacttaacaaatacgaatgcacgtattgaaccaggtgcatttattagagaacaagccattattgaagatggtgctgtcgttatgatgggcgcaacaattaatattggcgcagtcgttggcgaaggtacaatgattgatatgaatgctactctcggtggtcgtgctacaactggtaaaaatgtacatgtaggggctggcgcagtattggcaggtgtgattgaaccccctagtgcatcaccagttataatcgaggatgatgtattaatcggtgcaaatgcagttattttagaaggtgtacgtgttggtaaaggtgctattgttgcagctggcgcgattgtgacacaagatgtaccagctggtgcagttgttgctggtacacctgcaaaagtgattaagcaagcttctgaagtacaagatactaaaaaagagattgtagcagcattaagaaaactgaatgactag

SEQ ID NO: 34148 - DNA, 1356 bp, Staphylococcus aureus
atgacaaaacgtaaattgcgcaataactggattattgttaccacgatgattacgtttgtcacgatatttttgttttgtttaattattatttttttcttgaaagatacactgcataatagtgagcttgatgatgcagaacgaagctcaagcgatattaataatttatttcattctaagcctgttaaagatatatctgcattagacttgaatgcatctttaggtaattttcaagagataattatttatgatgagcataataataaattatttgagacatcgaatgataacacagtgagagttgaaccaggttatgaacaccgttattttgaccgcgtaataaaaaaacgctataaaggcattgaatatttaattattaaagaaccaattacaacgcaagatttcaaagggtatagcttgttaattcattcactagaaaattatgataacatcgtaaaatcattgtatatcattgcgctggcatttggagtgattgcaacaattataactgccacaatcagttatgtattttcaacacaaattactaaaccgcttgtcagtttatcaaataaaatgattgagattcgacgagatggttttcaaaataaattgcaattaaatacaaattatgaagaaatagataatttagcaaatacgtttaatgagatgatgagccaaattgaagaatcatttaatcaacaaagacaatttgttgaagatgcgtcacatgaattacgaacaccattacaaattattcaaggtcatttaaatttgattcagcgatggggaaaaaaagacccagcagtattagaagaatcgttaaatatttctattgaagaaatgaatcgtatcataaaattagtcgaagaattacttgaattgactaaaggagatgtaaatgacatttcttctgaagcgcagaccgtgcatattaatgatgaaattcgctcgcgaatacactcattaaaacaattgcatcctgattatcaatttgatacggatctgacatctaaaaatctagaaattaaaatgaaacctcatcaattcgaacaattatttttaatctttattgataatgcaatcaaatatgatgtgaagaataagaaaattaaagttaagacaaggttaaaaaataagcaaaaaataattgaaattacagatcatggaattggtattccagaggaagatcaagatttcatttttgatcgcttttatcgagtggataaatctcgttcaagaagtcaaggcggtaatggactcggattatctattgctcaaaaaatcattcaattaaacggaggatcgattaaaattaaaagtgaaattaataaaggaacaacgtttaaaatcatattttaa

SEQ ID NO: 34149 - DNA, 615 bp, Staphylococcus aureus
atgagtcaatggaaacgtatctctttgctcatcgtttttgcattggtttttggaattatcgcgtttttccacgaatcaagactagggaaatggattgataatgaagtttatgaatttatatattcatcagagagctttattacgacatctatcatgcttggggctactaaagtaggtgaagtctgggcaatgttatgtatttcattacttcttgtggcatatctcatgttaaagcgccacaaaattgaagcattattttttgcattaacaatggcactatctggaattttgaatccagcattaaaaaatatattcgatagagaaagacctacattgctgcgtttaattgatataacaggatttagttttcctagcggtcatgctatgggatcaactgcatattttggaagtggtatctatctattaaatcgattaaatcaaggtaattcaaaaggtattcttatagggttatgtgcagctatgattttattgatttccatatcacgtgtatatctaggtgtacattatccaacagatattattgccggcattattggtggcgtattttgcattattttatcaacgttattacttagaaataaattaataaattaa

SEQ ID NO: 34150 - DNA, 1071 bp, Staphylococcus aureus
atgacgaaaatcgcatttaccggagggggaacagttggacacgtatcagtaaatttaagtttaattccaactgcattatcacaaggttatgaagcgctttatattggttctaaaaatggtattgaaagagaaatgattgaatcacaactaccagaaattaagtattatcctatttcgagtggtaaattaagaagatatatttctttagaaaatgccaaagacgtatttaaagtattgaaaggtattcttgatgctcgtaaagttttgaaaaaagaaaaacctgatctattattttcaaaaggtggatttgtatctgtgcctgttgttattgcagccaaatcattaaatataccaactattattcatgaatctgacttaacaccaggattagcgaataagatagcacttaaatttgccaagaaaatatatacaacatttgaagaaacgctaaactacttacctaaagagaaagctgattttattggagcaacaattcgagaagatttaaaaaatggtaatgcacataatggttatcaattaacaggctttaatgaaaataaaaaagttttacttgttatgggtggaagcttaggaagtaaaaaattaaatagcattattcgcgaaaacttagatgcattattacaacaatatcaagtgatacatttaactggtaaaggattaaaagatgctcaagttaaaaaatcaggatatatacaatatgaatttgttaaagaggatttaacagatttattagcaattacggatacagtaataagtagagctggatcaaatgcgatttatgagttcttaacattacgtataccaatgttattagtaccattaggtttagatcaatcccgaggcgaccaaattgacaatgcaaatcattttgctgataaaggttatgctaaaacgattgatgaagaacaattaacagcacaaattttattacaagaactaaatgaaatggaacaggaaagaactcgaattatcaataatatgaaatcgtatgaacaaagttatacgaaagaagctttatttgataagatgattaaagacgcattgaattaa

SEQ ID NO: 34151 - DNA, 957 bp, Staphylococcus aureus
atgttgaattcatttgatgcagcatatcacagtctttgtgaagaggttttagaaataggaaatacacgaaatgatcgcacaaatacaggtacgatttcgaaatttggtcatcaacttcgctttgacttatctaaaggatttccactattaacgacaaagaaagtttcttttaaattagtagcaaccgaattattatggttcattaaaggagatacaaacatccaatacttattaaaatataataataatatttggaacgaatgggcttttgaaaattatataaaatcagacgagtataacggtccagatatgacagatttcgggcatcgtgcattgagtgatcctgaatttaacgaacaatataaagaacaaatgaaacaatttaagcaacgtattcttgaagatgatacttttgcgaagcaattcggtgatttaggaaatgtttatggtaaacaatggcgagattgggttgataaagatggtaatcattttgatcaacttaaaacagtaattgaacaaattaagcataatccagattcaagacgacacatcgtatctgcatggaatccaacagaaattgatacaatggcacttccgccttgtcataccatgttccagttttatgtccaagatggtaagttaagttgccagttataccaacgtagcgcagatatctttttaggtgtgccatttaatatcgcaagctacgctttattgacacaccttattgccaaagaatgtggacttgaagtaggagaatttgtgcatacatttggagatgcacatatttattcaaatcatattgatgcgattcaaacacaattagcacgtgaaagcttcaatcctccaacattaaaaattaacagtgacaagtctattttcgacataaattatgaagatttggaaattgttgactatgaatcacatccagcaataaaagctccaatagcagtgtag

SEQ ID NO: 34152 - DNA, 186 bp, Staphylococcus aureus
attttaactttttcagagcaaaatacactcgcgaaaatagatgatttaatgaatacttattgcaatcaatgtccaatcaaaactcgtctgcgtaaattagaggggaaaacgaaggcgcatcatttttgtatcaatgagtgttcaatagggaaagaaataaaacaattaggaaatgaacttcaatag

SEQ ID NO: 34153 - DNA, 705 bp, Staphylococcus aureus
atgtataatgaaattttaggactagttacgtttattgcaacgttcgtacttatggtacttatgtatcgcttttttggtaaacaaggtttaattgcatgggttgcaattggcacaatcattgccaacatacaagtgattaaaactgtagaaatctttggtatttcagcaactttaggtaatgtcatgtttgcttctatttatttagcaacagatattttaaatgatatttatgggcgtagagttgcaaaaagagcagtttggttaggcttttcatcaacattaattatgattattgttatgcaattgtcattacattttattcctgcaccagaagatatggcacaaaaagcattacacgcaatctttgatgttgtgccacgtattgctttaggctcaattgtcgcatatattattggtcaacatattgatgtatttatcttttcactaattaaaaaagtatttagttctgataaaacgtttttcatccgtgcatatggtagtacatttttaagctcaataattgatacagctttatttgtagctatcgcttttatcggaagtttacctggtacagttgtatttgaaatatttattacaacttacgtattaaaattagcttcaacagttttcaatgtaccatttggatatattgctaaatcattttatcgtaaaggtaagattgataagttagatcaaggctattaa

SEQ ID NO: 34154 - DNA, 1323 bp, Staphylococcus aureus
atgtcaaatggtaaagaattacaaaaaaatataggtttcttctcagcgtttgctattgttatggggacagttattggttcaggagtattctttaaaatatcaaacgtaacagaagtaacaggaacagcaggaatggccttgtttgtatggttcctaggcggcatcattaccatttgtgcggggttaacagcagcagaacttgctgctgcaatccctgaaacaggtggcttaacgaagtatatagaatatacatacggtgatttctggggcttcctatcaggttgggcgcaatcatttatttattttccagctaacgtagcagcattgtctatcgtatttgcgacacagctaattaatttattccatttatctataggttcgttaataccaatagcaatcgcatctgcgttatctattgtgttgataaatttcctaggttcaaaagcaggcggaattttacaatcagttactttagtaattaaactgattccaatcatcgttattgtaatttttggtatttttcaatctggagatatcactttttcattaattccaactacaggtaattcaggaaatggtttctttacagcaattggtagtggtttattagcaactatgtttgcatatgatggttggattcatgtaggaaatgttgcgggggaacttaaaaatcctaaacgcgatttacctttagcgatttcagttggtatcggttgtattatggctgtgtatttattaattaacgctacatttttattaacgttgccaatagaactacttgctggtaacttaaatgcagcttcagatacatcaaaaatattatttggtgaaaatggcggtaaaattattacaatcggtatattaatttctgtttatggtacgatcaatggctatactatgactggtatgcgcgtaccatatgcaatggctgaaagaaaattattgccatttagccacttattcgcaaaattaacaaaatctggcgcaccatggtttggcgcaattatacaacttataatcgctatcatcatgatgtcaatgggagcatttgatacaataacaaacatgttaatctttgttatttggttgttctattgtatgtcatttgttgctgtaataattttaagaaaacgtgaaccaaatatggagcgtccatataaagtaccgttatatccgatcatacctttaattgctattttggcaggatcatttgtattgattaatacactgtttacacaatttatattagcaatcattggaattctaataacagcacttggtataccagtttattactataagaagaaacaaaaagcagcataa

SEQ ID NO: 34155 - DNA, 1341 bp, Staphylococcus aureus
atgaaaaatacatttaatccattacaaagattacatttctatgcagcaatatttattgctccactgttaatcactttaaccatttcgggcattggttacttgttctttccagaagttgaaaataatatttataagaatgagttttttggtgacagtgatgtaaaaacgcatcaaacattaaatgatgcagtacatcaagttgaacaacaatatgaaggattctttgtaagtaaagttagcatacttgatgaaccatataacaaacgaattacactgagtgatatggcaggaaatcaacgttacgtctttctagatcataacaatcaatttgttgcagatcaaaatgcgaaacatacgtattctaatgtgatgcgaagtatacatagttctttgtttactgaaaatactattattaattatttagtagagttaaccgcatgttggacgatattcatgattttatctggtacttatttactcattaagaagcatttaatttctaacaaaagtaaggcacttcgttggcaaaagtggcacgcaatgattggagttatcattgcaattccagtatttgtattagttttaactggattgccatggtctggttttatgggcagtaaaattgccggtatgatggacacaaacggtgaccttggtcaaggtgaattagcgattaatccacctaaatcagatttgaacgaattaccttgggctacacgtaaaaataaacagccagcttcatccgaaaaaggttcaagtggtcatcatggtaatgcagcaatgcctcaaaccaaattagattatcaaatatctattgataaggtcgttgtacaagcgcaaaaagctggtattaaaaagccgttttcaatcgtatatccaagtgataaaaatggtacctttattgtatctaatactagtaattcaggtgttactgggctagatgtatcaccttacaaggaacaaacactttatttcgaccaatatagcggtaaaaagctaggtacgattaaatatgatgactacggtattattgctaaatggtttacatggggcattccgcttcacgaaggtcatttattcggcattttaaataaaatcattaatttatttgtatgtatcactttattagtagccattggcatggggtttgtctcttggataaagcgtacaaaaaatactgcagtaaaagtaccacatcgcgtaaaaaaaccagcatctatatcactcataatatgtttaattgtattaggattattaatgccattatttggattatcacttatccttgtatttataattgaattaatattatatattaaagatcgtcgtgctaaacaataa

SEQ ID NO: 34156 - DNA, 345 bp, Staphylococcus aureus
atgtcagatgtttcattgaaattatcagcaaaagatatttatgaaaaagattttgaaaaaacgatggctcgtggctatagaagagaagaagtagatgcatttttagatgacattattgctgattatcaaaaaatggccgatatgaataatgaagttgtaaaattatcagaagagaatcataaacttaaaaaagaattagaagaattaagactacgtgtagcaacatcaagacctcaggacaataaaagtttttcttcgaataatacaacaacaaatacatcttcaaataatgtagatattttaaaacgtatttcaaacttagaaaaagctgtatttggtaaataa

SEQ ID NO: 34157 - DNA, 1293 bp, Staphylococcus aureus
atgaaaacaacgattaaacaagcgaaagatcatttaaaccaagacgttacaattggtgcttggttaacaaataaacgttcaagtggtaaaatcgcctttttacaattacgtgatggaacaggctttatgcaaggcgtagtagttaaatcagaagttgatgaagaggtattcaaacttgcgaaagaaattgctcaagaatcatctctatacgttacaggcacaattacagaagataatcgttctgacttaggatacgaaatgcaagtgaaatcaattgaagttatttcagaagcgcatgactatccgattacacctaaaaatcatggtacagaattcttaatggatcaccgtcatttatggttacgttctaaaaaacaacatgctgtaatgaaaattagaaatgaagttattcgtgcaacgtatgaatttttcaacaaagatggatttacaaaggttgatccaccaattttgacagcaagtgcaccagaaggtacaagtgaattattccatactaaatactttgatcaagatgcgtttttatctcaaagtggtcagttatacttagaagctgcagcaatggcacacggaaaagtattttcatttggtccaactttcagagctgaaaaatcaaaaacacgtagacacttgatcgagttctggatgattgaaggggaaatggctttcacaaatcatgctgaaagtttagaaattcaagaacaatatgtaacacatgtagtaaaatcagttttagaaaattgtaaactagagttgaaaattttagagcgtgatacatcaaaacttgaaaaagttgcgacaccattccctagaatttcatatgatgatgcaattgaattcttaaaagcagaaggctttgatgatattgaatggggtgaagattttggtgcgccacatgaaactgccattgctaatcattatgatttaccggtgtttattactaattatccaactaaaattaagcctttctatatgcaaccaaatcctgagaatgaagaaactgtcttatgtgcagacttaattgcacctgaaggatacggtgaaattatcggtggatctgaacgtgtggatgacttagaattgttagaacaacgcgttaaagaacatggattagacgaagaagcatatagttactacttagacttacgtcgttatggtagtgtgccacactgtggatttggtttaggtttagagcgcacagtagcatggatttctggtgttgaacacgttcgtgaaactgcgccattcccaagattattaaaccgtttatatccataa

SEQ ID NO: 34158 - DNA, 999 bp, Staphylococcus aureus
atgactaaaattaccgtttttggtatgggaagttttgggacagcccttgccaatgttcttgcagaaaatggacatgatgttttgatgtggggtaaaaatcaagatgctgttgatgaattaaatacatgtcatacaaataaaaagtatttaaaatacgcgaaattagatgttaacatcatcgctacttcagatatgaccaaagcaattcaatttgcagatatttacttaatggctttacctactaaagcaatgcgagaagttgctactcaaattaatgataagctgacctctaaaaagacttttatacatgttgctaaaggtattgaaaatgggacgtttaaacgtgtgtcagaaatgattgaagattctatttcacccgaatataatgcaggtattggcgtgttgtcagggccaagtcatgcggaagaagttgtagtcaagcaaccaactacagttgctgcatcatcaaaagataaaagtgtaagtaaattaacgcaagatttatttatgaatgattatttgcgtgtgtacacgaatgatgacttgattggtgttgaacttggtggtgcattgaaaaatatcatcgcagtagcaagtggtatcgtagctggaattggctacggtgataatgcaaaagctgcgttaatgactcgtggtttagcggaaattagtagattaggtgaaaagttaggtgccgatcctatgacatttctaggtttaggtggtatcggtgacttaatcgttacttgcatatcaacacattctcgaaatttcacattaggatataaacttggacaaggtgaatcaatggatcaagcattatctgaaatgaatatggttgttgaaggtatttatacaactaaatcagtttatcatttagctaaagaaaaaaatgtggatatgccaattacaaatgcattatatagagtattatttgaaaatatctcagtaaaagaatgcgtaaaagatttaatggagcgcgataaaaaatctgaataa

SEQ ID NO: 34159 - DNA, 660 bp, Staphylococcus aureus
atgaaagccattaatattgcattagatggtccagctgctgccggaaaaagtacaattgcgaaacgtgtagccagcgaactatcaatgatttatgtcgatacaggagcaatgtatcgtgcattaacatacaaatatttaaaattaaacaaaactgaggactttgcaaaactagttgaccaaacaacattagatttaacttataaagcagataaaggtcaatgtgtcattttagataacgaagatgtaacagactttttaagaaataatgatgtgacgcaacatgtttcatacgttgcatctaaagagccagtacgttcattcgccgttaaaaaacaaaaagagttagctgcagaaaaaggtatcgtaatggatggtcgcgatatcggaactgtagtgctaccagatgcagatttaaaagtatatatgattgcatcagttgaagagcgagcagaaagaagatataaagataatcaattaagaggtatcgaatcaaattttgaagatttaaaacgtgatattgaagctcgtgatcaatatgacatgaaccgtgaaatatcaccattaagaaaagcagatgatgcagtgacattagatacgacaggcaagtcgattgaagaagttactgacgaaattttagcgatggtgagtcaaattaaataa

SEQ ID NO: 34160 - DNA, 957 bp, Staphylococcus aureus
atgcttaaaaaagcaaaattaatcttaatagcagtactagtactgtcagggtgctccacgattgaaaatgaatcaaaaaaagacagaaatacagaaacaaatacagaaacgaaatctgtaccagaagaaatggaagcttcaaaatatgtaggccaaggattccaaccacctgcagaaaaagatgcgattgaattttcgaagaagcataaagataaaattgctaaacgtggcgaacaattttttatggataactttggactaaaagttaaagctacaaatgttgtaggtagtggcgacggtgtagaagtattcgtgcattgtgatgaccacgacatcgtatttaatgcaagtattccatttgacaaatcaataattgagagtgatagctcattaagaagtgaggataaaggcgatgatatgagtactttagttggtacagtgttgagtggctttgaatatcgagcacataaggaagagttggataatttaacagaagttttaaaagaatataaaagtaaatataaatatactggttatactgaaaatgcaattatgaaaacgcagaatagtggttttagaaatgagtattattatttgactgcaattccatatactttagatgaatataaaaggtattttcaacccttaatcaaagaggatgataagtcttttagggacggtatgagaaactcaaaaaaacaacttaaagataaatcacgtccatatgttgttacaactttatttagtactaaagataattttactaaagataatacaatagacgagatgattgatttttctgaagtactaaaaaagaaaaagaatattcctcatgatttgaatgtttctcttcaaatttctaataaatatataaatacaaaaagacctaactatagtaagaaggaagtaatagaagtaggtgtatttaatcatgaaaaagctaacacgaatgattaa

SEQ ID NO: 34161 - DNA, 906 bp, Staphylococcus aureus
atgtttaaaagaacaaaactaatcttaatagcaacgatactactatcaggatgttcaactaccaataacgaatccaacaatgaaacaaaatcagtgccagaagaaatggaagcttcaaaatatgtaggacaaggcttccaaccacctgcagaaaaagatgcgattgaattttcgaagaagcataaagataaaattgctaaacgtggcgaacaattttttatggataactttggactaaaagttaaagctacaaatgttgtaggtagtggcgacggtgtagaagtattcgtgcattgtgatgaccacgacatcgtatttaatgcaagtattccatttgacaaatcaataattgagagtgatagctcattaagaagtgaggataaaggcgatgatatgagtactttagttggtacagtgttgagtggctttgaatatcgagcgcaaaaagaaaagtatgataatttatataaatttttaaaagaaaatgaaaagaaataccaatatacaggatttactaaagaggcaattaacaaaacacaaaatagtggatatgaaaatgaatatttttatatagttgctaatataccgacgctccaagaatataggaaatattacgaacccctaataaagaaaaataatctgaattttaaaaaaggtatgaaacaagcaaggaaaggagtaggctataaagctgcaatagaagtacatacaacattgttttcgagaagtagtaacttttcaaaggacaaaaaattagatgatgttttagatttgtctgaaagtacgaaaaagttacaccttaattttgaaaatacgaaaatatttttacaactagcaaaatctactattagcactaatcgagttaattacagtgataatgagtctataaggattgaggtcgaatga

SEQ ID NO: 34162 - DNA, 888 bp, Staphylococcus aureus
atggaaacaattattgaagaatatttgcgttttatacaaattgaaaaaggactaagttctaacacaattggtgcttatagacgtgatttgaaaaagtatcaagattatatgactgaacatcatatctcgcatattgattttatagatcgacaattaattcaagagtgtttggggcatttaatagaccaagggcaatctgctaaatctattgcgcgatttatttcaacaatccgtagttttcatcaatttgctataagagaaaaatatgcggcgaaagatccaacggtattattagattcaccaaaatatgacaaaaaattgcctgacgttttaaatgttgacgaagtattggctttattagaaacgccagatttaaataaaattaatggatatcgtgatcgtacgatgttagaacttctgtacgcaacgggaatgcgtgtatctgaattgatacatttagagttagaaaacgtgaacttaataatgggatttgtacgcgtatttggtaaaggcgataaagaaagaattgtaccattaggcgacgcagtcattgagtacttaactacttatattgaaacgattagaccgcaacttttaaaaaagactgttactgaagtcttatttttaaatatgcatggtaaacctttatcacgacaagcaatatggaaaatgattaaacaaaatggcgtaaaggcaaacattaaaaagacgttaacgccacatacgttacgccactcttttgcgacacatttattggaaaatggcgcagatttaagagcagtgcaagagatgttaggtcactctgacatatctactacccaactctatacacatgtttcgaaatctcaaattagaaaaatgtataaccaatttcatcctagagcataa

SEQ ID NO: 34163 - DNA, 390 bp, Staphylococcus aureus
atgagtcgtaaagaatcccgagtgcaagcttttcaaactttatttcaattagaaatgaaggacagtgatttaacgataaatgaagcgataagttttattaaagacgataatccagatttagactttgaatttattcattggctagtttctggcgttaaagatcacgaacctgtattagacgagacaattagtccttatttaaaagattggactattgcacgtttattaaaaacggatcgtattattttaagaatggcaacatatgaaatattacacagtgatacacctgctaaagtcgtaatgaatgaagcagttgaattaacaaaacaattcagtgatgatgatcattataaatttataaatggtgtattgagtaatataaaaaaataa

SEQ ID NO: 34164 - DNA, 465 bp, Staphylococcus aureus
atgaactttaaagaaatcaaagaattaattgaaattctggataaatcaactttaacggaaatcaatattgaagatactaaaggcaaagtgacgcttaagaaagaaaaagaaactgagattatcacgccacaaatctcacaaatgccagttgaagctgcggcaatgcctatgcctcaagcacaatcaactgatagcaataaaactgaagctccaaagccaacttcagataatcacaaaacaattaatgcacctatggtaggtacattttacaaatcgccatctccagacgaagaagcatatgtgcaagttggggacactgtttcaaatgaaacaacagtgtgtattttagaggcaatgaaactatttaatgaaattcaagcagaaatttcaggtgaaattgttgaaatcttagtagaagacggacaaatggtagagtatggccaaccgttatttaaggtgaaataa

SEQ ID NO: 34165 - DNA, 582 bp, Staphylococcus aureus
atgaaaaaattggtttcaattgttggcgcaacattattgttagctggatgtggatcacaaaatttagcaccattagaagaaaaaacaacagatttaagagaagataatcatcaactcaaactagatattcaagaacttaatcaacaaattagtgattctaaatctaaaattaaagggcttgaaaaggataaagaaaacagtaaaaaaactgcatctaataatacgaaaattaaattgatgaatgttacatcaacatactacgacaaagttgctaaagctttgaaatcctataacgatattgagaaagatgtaagtaaaaacaaaggcgataagaatgttcaatcgaaattaaatcaaatttctaatgatattcaaagtgctcacacttcatacaaagatgctatcgatggtttatcacttagtgatgatgataaaaaaacgtctaaaaatatcgataaattaaactctgatttgaatcatgcatttgatgatattaaaaatggctatcaaaataaagataaaaaacaacttacaaaaggacaacaagcgttgtcaaaattaaacttaaatgcaaaatcatga

SEQ ID NO: 34166 - DNA, 387 bp, Staphylococcus aureus
atgagtgctagtttgtacatcgcaataattttagttatagcaattattgcttatatgattgttcaacaaattcttaacaagcgagctgttaaagaattagatcaaaatgaattccataatgggattagaaaagctcaagtcatcgatgttagagagaaagttgactatgactacggtcacattaatgggtctcgcaatattcctatgacaatgttcaggcaacgattccaaggattaagaaaagatcaaccggtatacttatgtgatgccaatgggattgctagctatagagccgctcgtattttgaaaaagaatggatatacagatatctatatgttaaaaggcggctataaaaaatggactggaaaaataaagtctaaaaaatag

SEQ ID NO: 34167 - DNA, 1473 bp, Staphylococcus aureus
atgactagtaaatcaagtccattaatttttgaaagatctcgtgaaggcagatatgcatattcattaccaaaaagtgatattaaaacaaattctgttgagtcattgttagatgataaatttattcgtaaaaacaaagcggagtttcctgaagttgctgaactagacttagtacgtcattatactgaactttcaaataaaaatttcggtgtagacaacggattttatccattgggttcatgtacgatgaagtataatcctaaaattaatgaaaaggttgctagaataccaggattcagtgaatcacatccattacaagatgaagaccaagttcaaggttcattagaaattatttatagtttgcaagaagaattaaaagaaattactggtatggatgaggtaacattacaaccagctgctggtgcacatggtgaatggactgcattgatgatatttaaagcttatcatgagaataatggtgaaggtcatcgtgatgaagtcattgtgccagattctgcgcatggtacgaatccagcctcagcttcatttgcaggatttaaatcagttactgtaaaatcaaacgaacgtggcgaagttgatattgatgacttgaaacgtgttgtaaatgaaaatacagcagctattatgttaactaatccaaatactttaggtattttcgaaaaaaacattatggaaatccgtgaaatcgtccataatgctggtggtctattatattatgatggtgcgaatttaaacgctattatggacaaagttcgcccaggagatatgggatttgatgctgttcatttaaacttgcataaaacatttactggtccacatggtggcggcggtcctggttcaggtccagtcggtgtagtaaaagaactagcaagttacttaccaaagccaatggttattaaagatggcgacaaatttaaatatgataatgacattaaaaattctatcggacgtgtaaaaccattttatggtaactttggtatttacttaagagcttatacgtatattcgaactatgggagcaactggacttaaagaggtttcggaagcagcggttcttaatgcgaattatattaaagcacgtttatctgaacactttgaaataccttataaacaatattgtaaacatgagtttgtgttaagtggtgtgcgtcaaaaagaatttggtgtacgtactttagacatggctaagcgattattagatttcggtgtacatccaccaacaatatacttcccattaaatgttgaagaaggtatgatgattgaaccgactgagacagagtctaaagaaacacttgattattttatcgatacattaattagtattgctgaagaagctaaaaatgatcctgataaagtgctagaagcaccacatacaactgtgattgatcgattagacgaagctacagctgctcgtaaaccaatattaaagtttgaaaatcttaaacaggaaaaataa

SEQ ID NO: 34168 - DNA, 540 bp, Staphylococcus aureus
gtgactaaaaatgagattagaaaatacattttacataaaatgaagaattttaataaagctgaaaagcgaaaagcagacacatggttaagaaatcaattttttgcaactgaagaatacaaagaagcaaacgcaattgcgctagttctttcttttaatcatgaagtagatactttttctattattgaacaagccttaatggatcataaacgtatttttgtaccgaaaatggattatttaaatcatcaaatgacttttaaagaaatatttaatctcaaagatattgatgtcgataataaggggatttactatccaacttcaaaaggtgaaacaacgaataacctagatttaattgttgttcctggtgttggatttcaagacgatggatatagaattgggtatggtggtggctattacgacaggtttttagctaattatcagacaaagacaataagcttattatacgattttcaaataacatcatttgaaccggaatcattcgatcaaccagtcgataaattgattatatatcaatcagcatag

SEQ ID NO: 34169 - DNA, 1107 bp, Staphylococcus aureus
atgtctgataacacagttaaaattaaaaaacaaacaattgatccgacattaacattagaagatgttaagaagcaattaattgaaaaaggtaaaaaagagggtcatttaagtcatgaagaaattgctgaaaaacttcagaattttgatatcgactctgatcaaatggatgatttctttgatcaattaaatgataatgatatttcactagttaatgaaaaagatagttcagatactgacgagaaactgaatccaagtgatcttagtgcccctccaggtgttaaaataaatgacccagttcgtatgtaccttaaagaaattgggcgtgttaacttattaagtgcacaagaagaaatcgaattagccaaacgtattgaacaaggtgatgaagtagcaaaatcaagacttgcagaagcgaacttacgtttagttgtaagtattgctaaaagatacgtaggtcgtggtatgttattccttgatttaatccaagaaggtaatatgggtcttattaaagctgttgaaaaatttgactttaacaaaggatttaagttttcaacatatgcaacatggtggattagacaagcaatcactcgtgcaattgctgaccaagcacgtacgattcgtatccctgtgcatatggtagaaacaattaataaattaattcgtgttcaacgtcaattattacaggacttaggtcgagatccagcaccagaagaaattggtgaagaaatggatttaccagcagaaaaagttcgtgaaattttaaaaattgcgcaagaacctgtttcattagaaacaccaattggtgaagaagatgatagtcatttaggagactttattgaggatcaggaagcacaaagtccttcagatcatgctgcttatgaattattaaaagagcaattagaagatgtgcttgatacattaactgatagagaagaaaatgtattacgattaagatttggtcttgatgacggcagaacaagaacacttgaagaagttggtaaagttttcggtgttacacgtgaacgtattcgacaaattgaagcaaaagcacttagaaaattaagacatccaagtcgtagtaaacgtttgaaagactttatggattaa

SEQ ID NO: 34170 - DNA, 1818 bp, Staphylococcus aureus
ttgcgaatagatcaatcgatcattaatgaaataaaagataaaaccgacattttagacttggtaagtgaatatgtaaaactagaaaagagaggacgcaattatataggtttgtgtccttttcatgatgaaaagacaccttcatttacagtttctgaagataaacaaatctgtcattgttttggttgtaaaaaaggtggcaatgtttttcaatttactcaagaaattaaagacatatcatttgttgaagcggttaaagaattaggtgatagagttaatgttgctgtagatattgaggcaacacaatctaactcaaatgttcaaattgcttctgatgatttacaaatgattgaaatgcatgagttaatacaagaattttattattacgctttaacaaagacagtcgaaggcgaacaagcattaacatacttacaagaacgtggttttacagatgcgcttattaaagagcgaggcattggctttgcacccgatagctcacatttttgtcatgattttcttcaaaaaaagggttacgatattgaattagcatatgaagccggattattatcacgtaacgaagaaaatttcagttattacgatagatttcgaaatcgtattatgtttcctttgaaaaatgcgcaaggaagaattgttggatattcaggtcgaacatataccggtcaagaaccaaaatacctaaatagtcctgaaacgcctatctttcaaaaaagaaagttgttatataacttagataaagcacgtaaatcaattagaaaattagatgaaattgtattactagaaggttttatggatgttataaaatctgatactgctggcttgaaaaacgttgttgcaacaatgggtacacagttgtcagatgaacatattacctttatacgaaagttaacatcaaatataacattaatgtttgatggggattttgcgggtagtgaagcaacacttaaaacaggtcaacatttgttacagcaagggctaaatgtatttgttatacaattgccatctggcatggatccggatgaatacattggtaagtatggcaacgacgcatttactacttttgtaaaaaatgacaaaaagtcatttgcacattataaagtaagtatattaaaagatgaaattgcacataatgacctttcatatgaacgttatttgaaagaactgagtcatgacatttcacttatgaagtcatcaattctgcaacaaaaggctataaatgatgttgcgccatttttcaatgttagtcctgagcagttagctaacgaaatacaattcaatcaagcaccagccaattattatccagaagatgagtatggcggttatgatgagtatggcggttatattgaacctgagccaattggtatggcacaatttgacaatttgagccgtcaagaaaaagcggagcgagcatttttaaaacatttaatgagagataaagatacatttttaaattattatgaaagtgttgataaggataacttcacaaatcagcattttaaatatgtattcgaagtcttacatgatttttatgcggaaaatgatcaatataatatcagtgatgctgtgcagtatgttaattcaaatgagttgagagaaacactaattagcttagaacaatataatttgaatgacgaaccatatgaaaatgaaattgatgattatgtcaatgttattaatgaaaaaggacaagaaacaattgagtcattgaatcataaattaagggaagctacaaggattggcgatgtagaattacaaaaatactatttacagcaaattgttgctaagaataaagaacgcatgtag

SEQ ID NO: 34171 - DNA, 819 bp, Staphylococcus aureus
atggaaaaaattaaaattatcgtagcctcagattctataggtgaaacggcagagttagttgctagggcaggtatttcacaatttaatcctaagcaatgtaaaaatgaattattaagatatccatatattgaatcttttgaagatgttgatgaagtgattcaagttgcaaaagatacaaatgctatcattgtttatacacttattaaacctgaaatgaagcaatatatgagtgagaaagtagcagaattccaattgaagtccgttgatatcatggggccattaatggatttattatcagcatcggttgaagaaaaaccttataatgagccaggtatcgttcatagattagatgatgcatatttcaagaaaattgatgcgatagagtttgcggttaaatatgatgatggtaaagatcctaaaggattacctaaagctgatattgttttacttggtatttcgagaacttcaaagacaccattatctcagtatttagcgcataagagttacaaagttatgaatgtaccgattgtaccagaagtgacaccgccagatggcttatatgatattgatcctaagaaatgtatcgcacttaaaataagtgaagaaaaattaaatcgcattagaaaagagcgattaaaacaattgggactaggtgacacagctcgttatgcaacagaagctcgaatccaagaagaattgaattactttgaagaaatcgtaagtgaaattggatgtcctgtcattgatgtttctcaaaaagcaatcgaagaaacagcaaacgatataatccattatattgaacaaaataaatcgaaatga

SEQ ID NO: 34172 - DNA, 345 bp, Staphylococcus aureus
atgaaaaggtttaaatatgcacttgatgggctgaaaatcttaattcaaaaagactataaatttcttttacatgtgtttgcaatgattgttgctattgtctttggtctcgtactaaatattaatcgtattgagtggatatttatactcattgctattgcattagttctcactgttgaagctttaaacactgctattgaatatgttgtcgatttagtgaccgttgaatatcatgatttagctaaatacgcaaaagatatagcggcttttagtgtacttatagtttcaatattagcatttattataggtttaatagtatttttaccacattttatagcgttattttag

SEQ ID NO: 34173 - DNA, 177 bp, Staphylococcus aureus
atgtctaaaacagtagtacgtaaaaatgaatcacttgaagatgcgttacgtagatttaaacgttcagtttctaaaagtggaacaatccaagaagtacgtaaacgtgaattttacgaaaaaccaagcgtaaaacgtaaaaagaaatcagaagctgcacgtaaacgtaaattcaaataa

SEQ ID NO: 34174 - DNA, 753 bp, Staphylococcus aureus
gtgcaacgttatttcatagaccaaaacgctgatgtaagtcagcgtttttttattacaaaaaaagaagatattcatcatataacaaatgtaatgagatatgatgttggtagtaaaattattttaacttttaatgatcaaacagtttatttatgtgaaattgctgacataacaagtgataaaattgcagttgatttaaaagaaaaacaaaatattaatacagaattgccagttgatgttacgatttgcagtggactaattaaagctgacaaatatgagtggttgctacaaaaagctactgaattgggtgcttcatcatttatagctgtgagcatggaacgctcaattgttaaattaaacgaggcgaaagttgtcaaaaagatagagcgttggcaaaaaataattaaagaagctgctgaacaaagctatcgtttagtgattccatctattcaattcgagtcgaatttaaaattaatttgtgatactattgataattatgactatattcttattgcatatgaagaggaagcaaaagatggtgagttaagcaatttcaagcaaactttacaacaattcaaggctcaggataaagtgttgatgatttttggtcctgagggtggtttgtcagaaaatgaaatttcattatttagtaatactagtacagttgttggtcttggaccgagaattttacgggcagaaactgcgccattgtatgcgttaagtgcaataagttatgaaaaagaattaatggggtga

SEQ ID NO: 34175 - DNA, 252 bp, Staphylococcus aureus
atggcaaatatcaaatctgcaattaaacgtgtaaaaacaactgaaaaagctgaagcacgcaacatttcacaaaagagtgcaatgcgtacagcagttaaaaacgctaaaacagctgtttcaaataacgctgataataaaaatgaattagtaagcttagcagttaagttagtagacaaagctgctcaaagtaatttaatacattcaaacaaagctgaccgtattaaatcacaattaatgactgcaaataaataa

SEQ ID NO: 34176 - DNA, 1269 bp, Staphylococcus aureus
atgaagacaatagaagagattaaatcaactcctaaaacagttatgaagaaaccagaattattagcacctgctggaaacttagaaaagttaaaaatagcagtacattatggcgctgatgccgtatttttaggtggtcaagaatatggattacgttcaaatgctgataatttcacgatggaagaaatagctgaaggtgttgaatttgcgaaccgttacggtgccaaaatttatgttacgacaaatattattgcacatgatgagaatattgaaggtctagaatcatatttgcgtaatttggaaaagactggtgcgacaggtatcattgttgcagatcctttaattatcgaaacatgtaaagaagttgcgccaaaacttgaaattcatttatctactcaacaatcactttctaattacaaagctgtagaatattggaaagaagaaggattggatcgtgttgtattagcacgtgagaccggcgcgatggaaatgcgtgaaatgaaggaaaaagtagatattgaaatcgaagcatttattcatggtgctatgtgtatcgcctattcaggtagatgtacattaagtaatcatatgactgcaagggattccaacagaggcggttgctgtcaaagttgccgttgggattatgaattattagaagttgatgataatggtgaacttgatgtattttataatcaaggtgaagttacaccgtttgcgatgagtcctaaagatttaaaattaatcgaatcaattcctcaaatgatggatattggtgtggactcattaaaaattgaaggacgtatgaagtcaattcattatattgcaacagttgtctcagtatatcgtaaagtcattgatgcgtatgcggcagatcctgacaactttaagattaatccggaatggttaattgagttagataaatgtgcaaatagagacactgcaccagcattctttgagggaacacctggttatgaagaacagatgtttggtcaacaacaatctaaaaaatcaccatttgatttttgtggtttggtattagactataatgaagatacaaaaattgcgactattcaacaacgaaataactttaaaccaggtcaagaaatagaattctttggtccagaaattgaaacatttacacaagtagtagaagcaatttatgatgaagaaggtaacagcttagacgcggcgcgccatccattacaaatcgttcaaattaaagtggatcgcccgatatatccaaacaacatgatgagaaaggaaattggctaa

SEQ ID NO: 34177 - DNA, 1275 bp, Staphylococcus aureus
gtgagtacagaaccattagcatcgagaatgcgcccaaaaaatatagatgaaatcatttcccaacaacatttagttggaccaaaaggcattatcagaagaatggttgacacaaaaaaattaacttcaatgattttttatggtccacctggtataggcaaaacaagtattgccaaagcaatttcgggcagtacgcaatataaattcagacaattgaatgctgtaactaacactaaaaaagatatgcaacttgttgttgaagaagctaaaatgtctggtcaagttatcttgttgttagatgaaatacatcgactagataaagctaaacaagactttttattacctcatttagaaaatggcaaaatcgtcttgattggtgctacaacttcaaatccttatcatgctatcaatccagcgattcgttcaagagcgcaaattttcgagttatatcctttaaatgacgaagatgtgcgccaagcgttaactcgtgcaatagaagatgatgagaatggtttgaaaacatatcaacccaaaattgatgaagatgccatgacctacttttctacacaaagccaaggtgatgttcgtagtgcgttaaatgcattggaattagctgtattaagcgcagataatgacaaagacggttatcgacatgttacattgcaagatgctaaagactgtttacaaaaaggtgcatttgtaagtgataaggatggtgacatgcattacgatgttatgagcgctttccaaaaatctatccgtggtagcgacgtcaatgccgctttacattatttagcacgattaattgaagctggagatttacctacaatagttcgacgattacttgtaattagctatgaggatataggcttagcctcacctaatgctggtcagagaacacttgctgctattgaatcagcagaacgtctaggtttaccagaagctagaattccactaagccaagcagtaatcgaactatgcttatcacctaagtcaaattcagcaatgagtgccattgatagtgcattgtccgatattagaaacggtcatgtgggtcaaattccaaatcatttaaaagatggacattatcaaggtgctaaagatctaggccgatctattggttacaaatatccacaccaatatgttaatggctatgtttcacagcaatatttacctgataaacttaaaaacaaaatttattatgaaccaaaaacgacatctaaaagtgaacaacaactcaaagaaatatataacaacttacttaaacaaaggccgtaa

SEQ ID NO: 34178 - DNA, 2190 bp, Staphylococcus aureus
atgaacaacgaatatccatatagtgcagatgaagttcttcacaaagcaaaatcatatttgtcagcagatgaatatgagtatgttttaaaaagctatcatattgcttatgaagcacataaaggtcagttccgaaaaaacggattaccatacattatgcatcctatacaagttgcaggtattttaacagaaatgcgattagacggaccgacgattgtcgcaggttttttgcatgatgtaattgaagatacaccgtatacatttgaagatgtaaaagaaatgttcaatgaagaagttgctcgaattgttgatggtgtgacgaagcttaaaaaagtaaaataccgctcaaaagaagaacaacaagctgaaaatcatcgcaagttatttattgcgattgccaaagatgtacgcgtaattttggtgaaattagcagacagattacataatatgcgtaccttgaaagccatgccgcgtgaaaaacaaattagaatttctcgagaaacattagaaatttatgcacctttagcacatcatcttggtattaatacaattaaatgggaactagaagatacggctcttcgttatattgataatgtgcaatattttagaatagtcaatttaatgaagaagaaacgtagtgaacgtgaagcgtatatcgaaacggctattgatagaatacgtactgaaatggaccgaatgaatatcgaaggcgatataaatggtagacctaaacatatttacagtatttatcggaaaatgatgaagcagaaaaaacaatttgatcaaatttttgatttgttggcgatacgtgttattgtcaattctattaatgattgttatgcgatacttgggttggtgcatacgttatggaaaccgatgccaggacgttttaaagattatattgcaatgcctaaacaaaatttgtatcagtcattgcatactacagtagtaggtccaaatggagacccgctcgaaatccaaatacgaacgtttgatatgcacgaaattgctgagcatggtgttgcagcacactgggcttacaaagaaggtaaaaaagtaagtgaaaaagatcaaacttatcaaaataagttaaattggttaaaagaattagctgaagcggatcatacatcgtctgacgctcaagaatttatggaaaccttaaaatatgacttacagagtgacaaagtatacgcatttaccccagcgagtgatgttattgagttgccatatggtgctgtgccgattgattttgcttatgcgattcacagtgaagtaggtaataagatgattggtgccaaggtgaatggcaaaattgtaccaattgactatattttacaaacaggcgatattgttgaaatacgtactagtaaacattcatatggaccaagtcgtgattggttgaaaattgttaaatcgtctagtgccaaaggtaaaattaaaagtttcttcaaaaaacaagatcgttcatctaatattgaaaaaggccgaatgatggttgaagttgaaataaaagagcaaggatttagagtcgaagatattttgacagagaaaaatattcaggttgttaatgaaaaatataactttgcaaatgaagatgatttattcgcagctgtaggatttggcggcgtgacatccttacagattgttaataaattaactgaaagacaacgtattttagataaacaacgtgctttaaatgaagaacaagaagttacgaaatcattgcctattaaagacaacatcattactgatagtggtgtctatgtagaaggtttagaaaatgtacttatcaagttgtcaaaatgttgtaatcctataccaggtgatgatattgtaggttatatcaccaaaggtcacggtattaaagtacatcgcactgattgcccaaatattaagaacgaaactgaacgactaattaatgttgaatgggtaaaatcaaaagacgcaactcaaaaatatcaggttgatttagaggtaactgcgtatgaccgaaatggcttgttgaatgaagtactacaagctgttagctcgacagccggcaatttaattaaagtttcaggacgttcagatattgataaaaatgcaataataaatattagtgtcatggtgaaaaacgtgaatgatgtttatcgtgtggtagaaaagatcaaacaacttggtgatgtttatacagtaacaagagtttggaactag

SEQ ID NO: 34179 - DNA, 1140 bp, Staphylococcus aureus
atgcctgcagtaacatacgaacacattaaaacttgtaaacaatcaggtgcgcgtttaggtatcgtgcacacaccacacggttcatttgaaacacctatgtttatgccagttggtactaaagcaaccgttaaaacaatgagtccagaagagttaagacaaattgaagcaaaaatcattttgggcaacacatatcatttgtggttacaacccggaaatgatattatcaaacacgctgggggattacataaattcatgaattgggatggtccgattcttacagattcaggcggtttccaagtgtttagtttaagtaatttacgtaaaattacagaagaaggcgtggaatttagacatcatactaatgggtctaaattatttttgagtcctgagaaatcaatgcaaattcaaaatgatttaggatctgatattatgatggcatttgatgaatgtccaccgatgcctgctgaatatgattatgtaaaaaaatctattgaacgtacaacacgttgggcgaaaagatgtctagatgcacaccaaagacctgaagatcaagcattgttcggcattatacaaggtggcgaatatgaagatttaagagaacaaagtgcaaaggatttagtagaattagattttcctggttatgcaatcggcggtttgtcagttggtgaacctaaaccggttatgtataaaatggttgaacatacagagcagtttatgcctaaagataaaccaagatatttaatgggtgtaggatctccagatgcgttaatcgaatgtagtattcgcggcatggatatgtttgattgtgtcttaccgacacgtattgccagaaatggtacttgtatgacatcgcaaggtcgtttagttattaaaaatgcaaaatttgcagatgatttaagaccgttagatgagaattgtgactgttatacatgtcaaaactattcaagagcgtatatacgtcatttaatcaaggcagaggaaacttttggtattcgtcttactactattcataatttacattttctgctaaaattaatggaagatataagacaagccattcgagaagatcgtcttttagatttcaaagaagaattcttcgagcaatatggattaaatgttgagaacccaaaaaacttttaa

SEQ ID NO: 34180 - DNA, 1026 bp, Staphylococcus aureus
gtgaatattgaagaatttgactatgacttaccagaatcattaattgctcaaacgcctttaaaagatcgtgatcatagtcgtttattagtcatggatagagaaactggtgaaatgaaacatttacatttcaaagatatcattgagtattttagacctggtgatacattagtgcttaacgatacgcgagtaatgccagctagactttttggtttaaaagaagaaactggtgcaaaagttgaaatgttaatgttaactcaaattgaaggtaatgattgggaagtcttactgaaaccagctaagcgtattaaagttggtaataaattgaattttggtaatggcaaaattatagctgagtgcataaaagaaatggatcaaggtggacgcatcatgcgtttacattatgaaggtattttacaagaaagattagatgaattaggggaaatgccactgccaccatacatcaaagaacgtttagatgatccagatcgttatcaaacagtttacgctaaagaaagtggttcagcggcagcaccaacagcaggattacattttactgatgagttattaactgaaattaaaaataaaggcgttaatatcgcatttgttacattacatgttgggttaggtacgtttagaccggtgagcgtcgatgatgtgaatgaccacgaaatgcatagtgaatattatcaaatgacacaagaaacagctgatttattaaatgatactaagtccaaaggacatcgcattatatcagttggtacaacttcaacacgtacacttgaaacaattcgacgcgatcatgataaatttgttgaaacgagtggctggactaatatatttatttatccaggatttgattttaaagcaattgatggccagattactaattttcatttaccaaaatcaacattagttatgctagtatcagcgtttagtactcgtgaaaatgttctgaatgcttataaaacagcagtaaatttagaatatagattctttagttttggcgatgcaatgttaattatataa

SEQ ID NO: 34181 - DNA, 555 bp, Staphylococcus aureus
ttgaaaattaaagaaatggtaacttcagaaatgccaagagaacgtttgttaagccatggtgcaaaaagtctttcgaatacagaattattagctatattaattaacaccggaagaaaaggattctcgagcatagacattagtaatgaactgcttaaatctgcttcgaatctgaatgaattgaaaaaatcttcaattaacgatttgataaaagttaaagggattggattacaaaaagcaattactttaaaagcagcatttgagttaggggaaaggatggggagaagagctgaaaataatcgtataaaaataacgcaaccaagtgatgttgctgattatatgattccaacaatgaaagatttaacacaagaacattttgtcattttattgttaaattcaaaaaatgtagtgattaaagaaacctgtgtttttaaaggtacattaaatagttcgattgtacatccacgtgaaatttttagtattgcggtgagagaaaatgccaatgcaatcatcgcagttcataatcatccatccggtgatgtattaaccatagtataa

SEQ ID NO: 34182 - DNA, 1347 bp, Staphylococcus aureus
atgcattttattgcaattagtataaatcatcgcacagctgatgttgcactaagagagcaagttgcttttagagatgatgccttacgaattgcccatgaagatttatatgaaactaaatctattttagaaaatgtcatattatcaacatgtaatcgaactgaagtatatgctgttgttgatcaaattcacacaggtcgttactatattcaacgatttctagctcgtgcatttggatttgaagtagatgatattaaagcaatgtcagaagtaaaagtgggggacgaagcagtagaacatttattgcgtgtcacttctggtttagattcaatcgtacttggagaaactcaaattttaggtcaaataagagatgcatttttcttagcgcaaagcacaggtacgacaggaacaatttttaatcatctatttaaacaggcaattacttttgcaaaaagagcacataatgaaacagatatagctgataatgctgtaagtgtgtcttatgctgcggtcgagttggcgaaaaaagtatttggcaaattgaaaagtaagcaagctatcattattggtgcaggggaaatgagtgaattatcactattaaatcttcttggttctggaattactgatattacagtagtaaatagaacaattgaaaatgctatgaaattagcagcaaagcatcaagtgaaatatgatgaactatcatcattaccaaatttacttgaaagtgcagatattgtgattagttcaacgagtgcacaatcttatatcattacaaatgaaatgatagaaagaattgcagaaaatagaaagcaagattcactagtattgattgatattgcagttcctcgagatattgaacctggtattagtgccatcacaaacatctttaattatgatgttgatgacttaaaaggtttagttgatgcaaacttacgtgagcgacaattagcggctgcaacaatttcggaacaaattcctgcagaaatacatgcacacaatgagtggattagtatgttgggtgttgttccagtgattagagctttacgtgaaaaagctatggcaattcaagcagaaacgatggacagtattgatcgtaaattgccagggttaagcgaaagagaacgtaaaattatatctaaacatacaaaaagtatcatcaatcaaatgttgaaagatcctattaaacaggccaaagaattaagtagtgataagaaaagtaatgaaaaattagagctatttcaaaatatatttgatatcgaagctgaatgtcctcatgagcaagcgaagcaacaaaaagaaagcaaggtcaaggaaatttcagcgcgacgtatctttagttttgaataa

SEQ ID NO: 34183 - DNA, 1263 bp, Staphylococcus aureus
atgtttaaattcaatgaagatgaagaaaatttgaaatgctctttctgcggaaaagaccaagatcaagtaaaaaaacttgtagcaggaagtggtgtatatatttgtaatgagtgtattgaattatgctcagaaatcgtcgaagaagaattagctcaaaacacttctgaagcgatgacagaattacctactcctaaagaaattatggatcatttaaacgaatatgttattggtcaagaaaaagctaaaaaatctttagctgtagctgtttataaccactataagcgtattcaacaattaggaccaaaagaagatgatgttgaattacaaaaaagtaacattgcattaattgggccaacaggtagtggtaaaacattattagctcaaacattagccaagacgttgaatgtaccatttgcaattgcagatgcgacaagtttaactgaagctggttatgtaggcgatgatgttgaaaatatcttgttgagattaattcaagcagctgactttgacattgataaagccgaaaaaggtattatttatgtagatgaaattgataaaattgcacgtaaatctgaaaacacatctataacacgtgacgtttcaggtgaaggtgttcaacaagcattgcttaaaatcttagaaggtacgactgcaagtgttccgccacaaggtggacgcaaacatccaaaccaagaaatgattcaaattgatacaacaaatatcttatttattcttggtggtgcctttgatggtattgaagaagtgattaagcgccgtcttggtgaaaaagttattggtttctcaagcaatgaagctgataaatatgacgaacaagcattattagcacaaattcgcccagaagatttgcaagcctatggtttgattcctgaatttatcggacgtgtgccaattgtagctaatttagaaacattagatgtaactgcgttgaaaaacatcttaacgcaacctaaaaatgcacttgtgaaacaatatactaaaatgctggaattagatgatgtggatttagagttcactgaagaagctttatcagcaattagtgaaaaagcaattgaaagaaaaacaggtgcgcgtggtttacgttcaatcatagaagaatcgttaatcgatattatgtttgatgtgccttctaacgaaaatgtaacgaaggtagttattacagcacaaacaattaatgaagaaactgaaccagaactatacgacgcagaaggcaatttaattaataatagtaaaacatcagcttaa

SEQ ID NO: 34184 - DNA, 873 bp, Staphylococcus aureus
atgcccgaattaccagaagtagaacatgtaaaaagaggaattgaaccctacgttataaatcaaaaaattgaacacgttatattttcggataaagtaatcgaaggtaaagctcaaggcaaggaaacaattataaaaggaattgaattagatacttttaaaactttatcggaaggctataccattacaaatgtagaacgaagaagtaaatatatcgtttttcagctagataataaacgagaacaacgtacattaattagtcatttaggtatggcgggtggttttttcattgtagatgaacttgaagatattatgatacctaattatcgtaagcattggcatgttatttttgagttgtcaaatgacaaaaagttaatttattcagatatacgtcgttttggagaaattagaaatgttgcgtctgtagcatcttatccttcatttttagaaatagcgcctgaaccttttacaaatgaagcattgacgtattatttaaatcgaattcatcaacagtctaataagaataaaccaatcaaacaagtgattttggatcataaagtaatcgcaggttgcggaaatatttacgcatgtgaagcgttgtttcgtgcaggtgttttaccagataaaaaagtaaaagacttaacacaccaacaacaagaaatggttttttattatgttagagaagtactagaagaaggtattaagcatggcggtacaagtatttcagattatcgtcatgctgatggaaaaactggtgagatgcaattgcatcttaatgtatataagcagccggtatgcaaagtgtgtggaagtcaaattgaaacaaaaatcatcgcgacaagaaatagtcattattgtccagtatgtcaaaaataa

SEQ ID NO: 34185 - DNA, 2631 bp, Staphylococcus aureus
gtgaataaattagtattaatcgatggtaatagcttaagttttagagctttttatgcattacctttgttatcaaacaaagcaggcattcataccaatgcagtatatggttttgcaatgttactagagaagattttaaaagaagaaaagccaaatcattttttagtagcgtttgatgcaggtaaaacaactttcagacatgaaaaatatagtgaatataaaggtggacgccagaaaacgccgcctgaactaagtgagcaatttccttatatacgccaattattagatgcttatcatattaaacgttatgaattagataactatgaggcagatgatattatcggaactttaagtaaagaagcagataaagcgggctttcagacaattattataacgggagaccgagatttaacacaacttgcaacggataatgtaaccatttattacactaaaaaaggtgttactgatgttgatcattatacacctgactttattgcggaaaaatacaacgggttaacacctaatcaaattattgatatgaaaggattaatgggagatacttctgataatataccaggtgttgcaggtgttggagagaaaacagcaataaaattgctaaaccaatttgacacagtagaaggtgtctatgaacatttagatgaaatttcaggtaaaaagttaaaagaaaaacttcaaaatagcaaagaagatgcattaatgagtaaagaattagcaacgattaatgtagatagtccgattgaagtaaaacttgaagatacgttaatgactcatcaagatgaacaacaagaaaaaatcgaattgtttaagaagttagaattcaaacaattgttgtctgacattgatcaatcagcaagcgttgaagatgcaatagaaaagacatttgaaattgaaacgtcttttgataatattgattttacttcattgaaagaagcggccatccatttcgaattagacggtggtaactatttgcgaaataatattttaaaattctctttatttacaggtgagaaacatattgtaattaatgcggatgacataaataattatgccgaactagtttcatggttagaaaatccgaatacgaaaaaagtcgtatatgatgctaaaaaaacatatgtagcatcacatagattgggaattgatattcaaaatatttctttcgatattatgttggccagttatataattgatccatctcgtacgattagtgatgttcaatcagttgtttcattgtacggtcaaagttttgtgaaagacgatgtaagtatatatggaaaaggtaagaaatttaaggtacctgaagatgatgttttaaatccatatgttgcttctattactgatgcaatttactttgcgaaaccaaatatggataaacaattagaagaatacaatcaggtagaactcttagctgatttagagctaccgctagctaagattttaagtgaaatggaagaaattggtatatttacagatgttcatgatttagaagaaatggaaaaagaaattcaagaaaaattagacgtcttgattcgaaatatccatgatgcagctggtgaagattttaatataaattctcctaaacaattaggtgttgtattgtttgagacattacaattacctgttattaaaaagacgaaaacaggatattctactgctgtagatgtcttagagcaattgcaaggtgaacatcctatcattgattatattttagaatatcgtcaattatctaagttacagtctacttatgttgaaggattgcaaaaggtaattagtgatgatcaacgtatccatacacgttttaaccaaactttagcgcaaactggacgtttatcaagtgtagatcctaatttacaaaatattccggttagacttgaagaagggcgtaaaataagaaaagcctttaaaccaacttcaaaagatagcgttatattatcagcagattattctcaaattgaattgcgtgtattagcacacattacacaagatgagagtatgaaagaagcatttatcaacggcgatgatattcatacagcaactgctatgaaagtatttggtgtagaggctgatcaagtcgatagtttaatgcgtcgtcaagcaaaagcggttaactttggaattgtttatgggataagtgattatggtttaagtcaaagtttaggtattactcgtaaaaaagcaaaagcattcattgatgattatttagctagtttcccaggtgtgaaacaatatatgtctgatattgtaaaagatgccaaagctttaggttacgtggaaacattgctacatcgtcgacgctatattcctgatattacgagtcgtaactttaatttacgcggctttgctgaacgtactgctatgaatacgccaatacaaggcagtgctgcagatatcattaaactggcaatggttaaatttgcacaaaaaatgaaagagacaacatatcaagctaaactattattacaagtacacgatgaattaatttttgaagtacctaagtcagaagtagattcatttagtgaatttgtagaagagataatggaaaatgcattgcaattagatgttccattaaaagtagactcaagttatggtgcaacttggtatgatgcaaaataa

SEQ ID NO: 34186 - DNA, 1119 bp, Staphylococcus aureus
atgaaaattggtataccaagggagattaaaaataatgaaaatcgtgttggtttatcaccgagtggtgtgcacgctttagtagaaagtgggcatactgttttagtggaaacaaatgcgggttcaggatcgttctttgaagatgtagattacaaagaagcaggtgctgagattgttgctgaacaagcaaaagtttgggatgtggatatggttattaaagttaaagaaccacttgaatctgaatatacatattttaaagaagggcttgtattattcacttatcttcatttagcaaatgaagaaaaattaacacaagctttgatagatagaaaagtaattagtattgcatatgagactgtgcagttaccagaccgatcttcaccattgttatcaccaatgagtgaggtagcaggaagaatgtcagctcaagttggcgcagagttcctacaaaaacttaatggtggtatgggaattctactaggtggtgtcccaggagtacctaagggtaaagtaactattatcggtggtggtcaagcaggaacaaatgcagctaaaattgcactaggactaggtgcagatgttacgattttagatgttaatccaaagcgtttacaacaattagatgatttattcggtggacgtgtacatacaattatgtcaaatccgttgaatattgagttgtatgttaaacaaagtgatttagtaataggtgcagttttaattccaggtgctaaagcgccaagacttgtaacagaagacatgattaaacaaatgaaaaatgggtcagttattattgacattgctattgatcaaggcggtatttttgaaacaactgataaaattacgacacatgatgatcctacatatattaagcatggtgtggttcattatgcagttgcaaatatgccaggtgcagtaccgcgtacttcgacgttagctttaaataatgctacgctaccttatgcgctcatgctagctaataaagggtatagagaagcatttaaatcaaatcaaccattatcattaggtttaaatacttacaaaggtcacgtaaccaataaaggcgttgcagaggcatttgaaatggaatataaatctgtagaagaagcattacaattataa

SEQ ID NO: 34187 - DNA, 1275 bp, Staphylococcus aureus
atgtcagattttaatcatacagatcattctacaacaaaccatagccaaacacctagatacagaagacctaaatttccatggtttaaaacagtcatcgttgcattgattgctggaattattggtgcacttctagtacttggtataggcaaagtattaaatagtacaattttaaataaagatggttcaactgttcagacaacaaataataaaggtggcaatcaattagacggtcaaagcaagaaattcggtaccgttcatgaaatgataaaatctgtctcccctacaattgttggagttattaacatgcaaaaagcatcaagtgtagacgacttattaaaaggcaaatcatctaaaccatctgaagctggagtaggttcaggtgttatctatcaaataaacaacaattcagcttatatcgttacaaacaatcatgttattgatggcgcaaatgaaattagagtccaattacataataaaaaacaagttaaagcgaaattagttggtaaagatgcagtaactgatattgctgtacttaaaattgaaaatacaaaaggtattaaagcgattcaatttgccaactcttcaaaagtacaaactggcgatagcgtattcgcaatgggtaacccattaggattacaatttgctaactctgtaacatctggtatcatttcagcaagcgaacgtacgattgacgctgagacaactggtggcaatacaaaagttagcgttcttcaaacagatgctgctattaacccaggtaactcaggtggcgcattagtagatattaatggtaatttagttggtattaactcaatgaaaattgctgcgacacaagttgaaggtatcgggtttgctattccaagtaatgaagttaaagtaacaattgaacaacttgtaaaacatggtaaaattgaccgcccttcgattggtattggtttaattaatttgaaagatattcctgaagaagagcgcgagcaacttcatactgatagagaagacggtatttatgtcgccaaagctgatagtgatattgatcttaaaaaaggtgatattattacagaaattgatggcaagaaaattaaagatgatgttgatttaagaagctatttatatgaaaataaaaaacctggtgaatcagtcactgttaccgttatccgtgatggtaaaacaaaagaagttaaagtgaaattaaaacaacaaaaagaacaaccaaaacgtcaaagccgatcagaacgtcaatcacctggccaaggcgatagagatttctttagataa

SEQ ID NO: 34188 - DNA, 1092 bp, Staphylococcus aureus
atgagtaataaattagaatcatacagaagtgagattgtctcactgaatcatcaaattttagatttattatctaaacgtggtgaactagcacaaaaaattggggaggaaaaattaaaacaaggtacacgtatctatgatccacaacgcgaaaaagaaatgcttaacgacttaattgatagcaacaaaggaccatttaacgataatacaattaagcaattatttaaagaaatttttaaagcctctacagatttacaaaaatctgaaaatgaaaaacacttatacgtatcacgtaagttgaaacctgaagatacgattgtaacatttgataatgggggcattattggagacggcaataaatcatttgtatttgggccatgttcagttgaatcatttgaacaagttgaagctgttgctaaaaacttacatgctaaaggtgaaaaatttattcgtggcggtgcatttaaaccacgtacatcaccatatgatttccaaggcctaggtgttgaaggacttaaaatacttaaacagattaaagataaatatgatttaaatgttgtcagcgaaatcgtaaatccaaatgattttgaagtggctgatgagtatttagacgtattccaaattggtgcacgtaatatgcaaaacttcgagttattaaaagaagctggccgtacgaaaaagcctattctattaaaacgtggtttatctgctacaatcgaagagtttgtttatgcagctgaatacattgcttcacaaggtaatcaaaacattattttatgtgaacgtggaatccgaacttatgaaaaggcgacacgtaacactttagatatttcagcagtaccaattttaaaacaaggtacacacttaccagtcatggtagatgttacgcatagtacaggtcgtaaagatatcatgttaccaactgcgaaagcagcattagcagttggtgctgatggagttatggctgaggtgcatccagatccatctgttgcacttagtgatgcgggtcaacaaatggatttagatgaattccaagcattttatgatgaattaaagcctttagctgatttatataacgctaaaaagttaaaataa

SEQ ID NO: 34189 - DNA, 402 bp, Staphylococcus aureus
atgattttatcactggaagatttacttgaaggtgcaaaagatactttgattcgacatgatgttaatgaagacaatattgatgtagcatttgttcctggtgcgtttgaaattcctttagtagctaaaaaattagcctcatcaggaaattatgatgcaataattacattaggatgcgtaattcgcggtgctacgtctcattatgattatgtttgtaatgaagtcgcgaaaggtgtttctaaagtaaatgatcaaactaatgtaccagtcatatttggtattttaacgactgaaagtattgaacaagctgtggaaagagcaggtacgaaagctggtaataaaggtgccgaagcagcagtaagtgcaattgaaatggctaatttattaaaatctataaaagcatag

SEQ ID NO: 34190 - DNA, 315 bp, Staphylococcus aureus
atgacgtataaagaactagcaacatttttaaaagttttatcagattcaagcagattagaaatactagatttactttcttgtggagagttatgcgcttgtgatttgttagcacattttcaattctctcaacccacacttagctatcatttgaaagcattagtaaaaaccaacttagttacgacacgaaaaatcggaaataaacatttataccagcttaatcataatatttttgagtccgtaattaataacttgtctaaggttcatacctctaaccaacgatgtttttgtcataaccttaagactggtgaatgctaa

SEQ ID NO: 34191 - DNA, 570 bp, Staphylococcus aureus
atgaaagctaaatacaaaaatcatcaaatagaaactaatgaaaaacgaattaaaaatcatttgaatcgcgcttttaatagagaacaaccaatggagacattagtaagtgatttgacatatgtaaaagtcggaggaacatggcattacatatgtttatttatagatctatttaatagagaaattgttggttacagtgcaggtaaaaataaggacgccaatttagtatcaaaagcaatcagcagaataaatcataatcttgaacaaatcaaactattccacactgatagagacaaagaatttgataatcatttgatagatgaagtcctagaaacatttaaaataaaacgttcattaagtaccaaaggttgtccttatgataacgcagttgcggaagcaacgatgaaagcaatgaaaacagaatttgtaaaacaaatgcaatttgaaaacttagaacagttagaaacagaattatttgattatgtaaattggtacaacaattttagaccacattcttcattacagtatttgacgccagtggcatttaaaaatatacacatgaaaactgtctaa

SEQ ID NO: 34192 - DNA, 1230 bp, Staphylococcus aureus
atgagtaatacacaaacgaaaaatgtgccagagttgagattcccaggatttgagggcgaatgggaagagaagaagttagggaatcttactaccaaaataggtagtggaaagactcccaaaggtggaagtgaaaactatacaaacaaaggcataccatttttaaggagtcaaaatattagaaatggtaaattaaatcttaatgacttagtttatattagtaaagatatagatgatgagatgaaaaatagtagaacgtactatggtgatgttcttttaaatattacaggagcatcaataggtagaacagccattaattcgatagttgaaacgcatgctaatttaaatcaacatgtatgtattattagattaaaaaaagagtattattataatttttttggacagtatctattatcaagaaaaggtaaaagaaaaattttccttgcacaaagtggaggtagtcgagaaggactaaacttcaaagaaattgctaatttaaaaatcttcaccccaactatatttgaagaacaacaaaaaataggacaattcttcagcaaacttgaccaacaaattgaattagaagaacaaaaacttgaattacttcaacaacagaaaaaatgctatatacagaaaatcttctcacaagaattacgattcaaagatgaagaaggtaattactataaaggatggaacaaaaagcaattaaaagatgtattagaatttagtaataaaagaactattaatgaaaatgaatatcctgttttaatatcgtcaagacaaggtttaatacttcagtcagactactataaagataggaaaacttttgcagagagtaatattgggtatttcatactccctaaaaatcatataacataccgttcaagaagcgacgatggaatttttaagtttaatttaaatctaatgattgatgtaggtattattagtaaatattaccctgtctttaaagggatagatgcaaatcaatattatttaacattacacttaaactatcaactgaaaaaagaatatattaaatatgcaactggtacatcacaattggtactctcacaaaaagacttgcaaaacataaagactaaattgccatcttatgaagaacaacaaaaaatcggtgattttttcagtgaaatagatagattggttgaaaaacaatcttcaaaagtcggacgattaaaagtacgtaaaaaagaactattacaaaaaatgtttgtttaa

SEQ ID NO: 34193 - DNA, 1557 bp, Staphylococcus aureus
atgtctattactgaaaaacaacgtcagcaacaagctgaattacataaaaaattatggtcgattgcgaatgatttaagagggaacatggatgcgagtgaattccgtaattacattttaggcttgattttctatcgcttcttatctgaaaaagccgaacaagaatatgcagatgccttgtcaggtgaagacatcacgtatcaagaagcatgggcagatgaagaatatcgtgaagacttaaaagcagaattaattgatcaagtcggttacttcattgagccacaagatttattcagtgcgatgattcgtgaaattgaaacgcaagatttcgatatagaacatctagcgacggcgattcgcaaagttgaaacatctacattaggtgaagaaagtgaaaatgactttatcgggctgttcagcgatatggatttgagttcaacgcgactaggtaacaatgtcaaagaacgtactgctttaatctctaaagtcatggttaatcttgacgacttaccattcgttcacagtgacatggaaattgatatgttaggtgatgcatatgaattcctaatcgggcgctttgcggcgacagcgggtaaaaaagcaggcgagttctatacaccacaacaagtatctaagatactggcgaagattgtcacagacggtaaagataaattacgtcacgtgtacgacccaacatgtggttccggttcattgttgttacgtgttggtaaagaaacgcaagtgtatcgttatttcggacaagaacgtaacaatactacatacaacttagcacgcatgaatatgttattacatgatgtgcgttatgagaacttcgagatccgtaatgatgacacattggaaaatccagcctttttaggcaatacatttgatgcggttattgcgaacccaccatacagtgcgaaatggacagcagattcaaaatttgaaaatgatgaacgattcagtggttacggcaagcttgcgccaaaatccaaagcagactttgcctttattcaacacatggtacattacctagacgatgaaggtaccatggcagtcgtactcccacatggtgtattattccgtggtgccgcagaaggtgtgattcgtcgctatttaatagaagaaaagaactacttagaagccgtgattgggttaccagccaatattttctatgggacaagtattccaacatgtattttagtatttaaaaaatgtcgccaacaagacgacaacgtactatttatcgatgcatccaatgattttgaaaaaggaaaaaatcaaaaccatttaagcgatgcccaagtcgaacgtattatagacacatataagcgtaaagcaacgattgataaatatagctacagcgcgacattacaagagatcgccgataacgattacaacttaaacataccgcgatatgttgatacattcgaagaagaagcaccaattgatttagatcaagtccaacaagatttgaaaaatatcgacaaagaaatcgcagaaattgaacaagaaatcaatgcatacctgaaagaacttggggtgttgaaagatgagtaa

SEQ ID NO: 34194 - DNA, 720 bp, Staphylococcus aureus
atgaataaaaatataatcatcaaaagtattgcagcattgacgattttaacatcagtgactggcgtcggcacaacaatggttgaaggtattcaacaaacagccaaagccgaaaatactgttaaacaaattacaaatacaaatgttgcaccatacagtggtgttacatggatgggcgctggaacaggatttgtagttggaaatcatacaatcattaccaataaacatgttacctatcacatgaaagtcggtgatgaaatcaaagcacatcctaatggtttttataataacggtggtggactttataaagttactaagattgtagattatcctggtaaagaagatattgcggttgtacaagttgaagaaaaatcaacacaaccaaaaggtagaaaattcaaagatttcactagtaaatttaatatagcatcagaagctaaagaaaatgaacctatatcagtcattggttatccaaatcctaatggaaataaactacaaatgtatgaatcaactggtaaagtattatcagtgaatgggaatatagtgtcatcggatgcaattattcagcctggtagctctggttcacctatattaaatagtaaacacgaagctattggtgtaatctatgccggtaataagccatcaggtgaaagcacaagaggatttgctgtttatttctctcctgaaattaagaaattcattgcagataatttagataaataa

SEQ ID NO: 34195 - DNA, 720 bp, Staphylococcus aureus
atgaataaaaatataatcatcaaaagtattgcggcattgacgattttaacatcaataactggtgtcggcacaacagtggttgatggtattcaacaaacagccaaagcagaaaatagtgtgaaattaattaccaacacgaatgttgcaccatacagtggtgttacatggatgggcgctggaacaggatttgtagttgggaatcatacaatcattaccaataaacatgttacttatcacatgaaagtcggtgatgaaatcaaagcacatcctaatggtttttataataacggtggtggactttataaagttactaagattgtagattatcctggtaaagaagatattgcggttgtacaagttgaagaaaaatcaacgcaaccaaaaggtagaaaattcaaagatttcactagcaaatttaatatagcatcagaagctaaagaaaatgaacctatatcagtcattggttatccaaatcctaatggaaataaactacaaatgtatgaatcaactggtaaagtactatcagtgaatggaaatatagtgacatctgatgcggttgtccaacctggcagctctggttcacctatattaaatagtaagcgagaagcaattggtgttatgtatgctagtgataaaccaacaggtgaaagtacaaggtcatttgctgtttatttctctcctgaaattaagaaatttattgcagataatttagataaataa

SEQ ID NO: 34196 - DNA, 720 bp, Staphylococcus aureus
atgaataaaaatatagtcattaaaagcatggcagcattagccattctaacctcagtaactggaataaatgctgcagtcgttgaagagacacaacaaatagcaaatgcagagaagaatgttacgcaagttaaagatacaaataattttccatataatggcgtcgtttcatttaaggatgcgacaggttttgtaattggaaaaaatacaattatcaccaataaacatgtatcaaaagattataaagttggcgatagaattactgcccatccaaacggtgacaaaggaaatggtggtatatataaaattaaaagcatttctgattatccgggtgatgaagacatctctgtcatgaatattgaagaacaagcagttgaacgtggaccaaaaggctttaattttaatgaaaatgtccaagcattcaattttgcgaaagatgctaaagttgatgacaaaattaaagttattggttacccattacctgctcaaaatagttttaaacagtttgaatctacaggaactataaaaagaatcaaagacaatattttaaattttgatgcatacattgaacccgggaattcaggatcaccagttctaaattctaacaatgaggtcataggtgtggtgtatggcggtattggaaaaattggttctgaatataatggtgccgtatactttacgcctcaaatcaaagattttattcaaaagcacattgaacaataa

SEQ ID NO: 34197 - DNA, 708 bp, Staphylococcus aureus
atgaataaaaatgtaatggttaaaggtttaactgctttaactattttaacatctcttggtttcgctgaaaatatttctaatcagcctcattcaattgccaaagcagaaaagaatgtcaaagaaattaccgatgcaactaaggcaccatacaattcagtggtagcatttgcgggtggtactggtgtagttgttggtaaaaatacaatcgtaactaacaaacatatcgctaaaagtaatgatatttttaaaaatagagtagcagcacattattcgagtaaaggtaaaggcggaggaaactacgacgttaaagacattgtagaatatcctggaaaagaagaccttgcgatagttcatgttcatgaaacaagtacagaaggtttgaattttaataagaacgttagttatacaaaatttgcagaaggagcaaaagcgaaagatagaatttctgttattggttatccaaagggtgcacaaacaaaatataaaatgtttgaatcgacaggaacgattaaccatatcagtggaacgtttatagaatttgatgcgtatgcacaaccaggtaattcaggatctcctgtattgaattctaaacatgaactgattggtattttatatgcaggtagtggaaaagatgaatctgaaaagaatttcggtgtttatttcacaccacaattaaaagaatttattcaaaataatattgaaaaataa

SEQ ID NO: 34198 - DNA, 936 bp, Staphylococcus aureus
atgtttaagaaaaaaatgttagctgcaactttgtcagtaggactgattgcgcctttagcatctccgattcaagaatctagagctaatactaatatagagaatattggtgatggtgctgaagtaatcaaacgtacggaggatgtaagtagtaagaaatggggcgttactcaaaatgttcaattcgactttgtaaaagataaaaaatataacaaagatgctttaattgttaaaatgcaaggttttattaattccagaacttcattttcagatgtgaagggtagtggatatgaattgactaaacgaatgatttggccattccaatataatataggactgacgactaaagatccaaatgttagcttaatcaattaccttcctaaaaacaaaatagaaactactgatgttggtcaaacattaggatataacattggaggtaatttccagtcagcaccatctataggtggcaatggctcatttaattattctaaaacaattagttatacccaaaagagttatgtcagtgaagtagacaagcaaaactcaaaatcagttaaatggggtgttaaagcaaacgaatttgttacgcctgatggtaaaaaatctgcgcatgatagatatttattcgtacaaagtccaaatggtccaacaggttcagcaagagaatattttgctcctgataatcaattgccacctttagttcaaagtggctttaatccatcatttatcactacactatcacatgaaaaaggttcaagtgatacgagtgaatttgaaatttcatatggtagaaacttagatattacatatgcgactttattccctagaactggtatttacgcagaaagaaagcataatgcatttgtaaatagaaactttgtagttagatatgaagttaattggaaaacacacgaaattaaagtgaaaggacataattaa

SEQ ID NO: 34199 - DNA, 471 bp, Staphylococcus aureus
atgacaaatcatatcgttttatatcaaccagaaatcccagctaatactggtaacattgcacgtacgtgtgcaggtacaaacacacatttacatttaattaaacctcttggatttagaactgatgataaaatgttaaaaagagccggtttagattattgggaatttgtgaatattacgtatcatgatagtattgaagcattttttgaagccacaaatggcgagtattacttattaacaaaatttggtaaaaagacttatagtgattttgatttttcaaatcatgacaaagatttttacttcatttttggaaaagagacgacaggattaccagactgggtgaaagagaaatatcaagacacagcgttaagaattcctatgagtgaacatattcgttcattaaatttatcaaatactgctgcgttgttaatttatgaagcgttacgtcaacaagattttccaggattgaattaa

SEQ ID NO: 34200 - DNA, 729 bp, Staphylococcus aureus
atgccagtgattaaaataaacaatcttaataaagtttttggagataatgaagttttaaaagatatcaatcttgaaatcaatcaaggggaagtagtagcaataataggtccatctggtagtggtaaaagtacattgttaagatgtatgaatttattagaagtacccactaaaggtcaagtgatttttgaaggcaatgacttaacggaaaaagggacacaagtagataaactacgtcaaaaaatgggtatggtatttcaaaacttcaacctatttccacataaaaaagttgtcgataatattattttagctcctaaattattaaagaaagataataacgatgaattacataaggaagcattgtcgttattagataaagtgggattaaaagaaaaagcagatgtatatccgaatcaattatcaggtggtcaaaagcaaagggttgcaattgcaagagctttagcaatgcatccagatgttattttattcgatgaaccaacttcagcattagatcctgaggtagttggtgatgtattaaaagtaatgaaagacctagccaaagaaggtatgaccatggtggttgtgacacatgaaatgggatttgccaaagatgtaagtgacaaagtcatatttatggcagatggcgttgtcgtagagtcaggcacaccagtcgaaatatttgaacaaccgcaacatgaaagaacacaaaatttcttagcaagagtattataa

SEQ ID NO: 34201 - DNA, 1737 bp, Staphylococcus aureus
atgattaaacgatatttgcaatttgttaagccatataaatatcgtatttttgcaacgattattgttgggataattaagtttggtataccaatgcttataccacttttaattaaatatgcaatagatggcgtgattaataaccacgcactaacgactgatgaaaaagttcatcatttaactattgccattggtatcgcattatttatttttgtaatagtgagaccaccaattgaatttatacgtcaatatttggcgcaatggacaagtaataaaatattgtatgatatacgtaaaaagttatataaccatttacaagctttaagtgcgagattttatgctaataatcaagtaggtcaagtaatatctagagtgattaatgatgttgaacaaacaaaagatttcattttaaccgggttaatgaatatttggttagattgtataacaattattattgcactatccataatgttctttttagatgtgaaattgactttagcagcactgtttatcttcccattttacattttaacggtgtacgttttctttggaagattaagaaaattgacgcgtgagagatcgcaagcattagctgaggttcaaggattcttgcatgaacgtgttcaaggtatttcagtcgttaaaagttttgcgattgaagacaatgaagcgaaaaactttgataaaaagaatactaatttcttaacacgtgcgttgaaacatacaagatggaatgcctattcctttgccgcaattaatacagttacagatattggaccaattattgtcatcggtgttggtgcatatcttgctatttctggatcaatcacagtaggtacacttgcagcatttgttggatacttagagttattgttcgggcctttacgtcgtttagtcgcatcatttacaactttaacgcaaagttttgcttcaatggaccgtgtattccaattaattgacgaagattatgacattaaaaatggtgttggtgctcaacctattgaaattaaacaaggtcgtattgatattgatcatgttagttttcaatataacgataacgaagctccaattttaaaagatattaatttgagtattgaaaaaggagaaacagttgctttcgtaggtatgagtggtggtggtaaatcaacattaattaacttaataccgagattttacgatgtaacttctgggcaaattttaatagatggtcacaatattaaagattttttaacgggaagtttaagaaatcaaataggattggtgcaacaggataatattttattctctgatacagttaaggaaaatattttacttggtcgtccaacagcaacagatgaagaagtagttgaagcggcgaaaatggctaatgcacatgactttattatgaacttgccacagggatatgacactgaagtaggtgaacgaggtgttaaattatcaggtggtcaaaaacaaagattatcgattgctagaatatttttaaataatccgccaattcttatcttggatgaagcaacaagtgcacttgatttagaaagtgaatccattattcaagaagcattagatgtgttgagtaaagatcgaacgacacttatcgtagcgcatcgcttgtccactattacacatgctgacaaaattgtcgtaattgaaaatggacatattgttgaaacaggtacgcatcgtgaattgattgcaaaacaaggtgcttacgagcatttatatagcattcaaaacttataa

SEQ ID NO: 34202 - DNA, 531 bp, Staphylococcus aureus
atgacaaatcaggacagaccaatgaaatctatgtcagaatcaaaatgttataaaaatagacaagttttccctcaagatacgaatcaccatcatacaatgtttggtggtacattgatggctaatattgatgaaattgcagcaatcacagctatgaaacatgctggtgcgcaagtagttaccgcatctacagactcagtagatttcttaaagccgattaaaacaggggacatattacaatacgtagcgatggtttcatacgctgggactagttcaatggaagtggtcgttcaaattagaattgacgatgtatttaataacaagcatgatttagctgcattaagttacttaacatttgttgcgttagatgatgaaggcaaacctaaacatgtacctggtgtatatccagaagatgatgttgaaaaatggttttatgatacagcaccacaacgtgttgaacgaagaaaagcacgtcgcattgaaagtaaacaaacaattgaatatttagctcaagcgcaacatattagagactaa

SEQ ID NO: 34203 - DNA, 465 bp, Staphylococcus aureus
atggtagatgtagcatttgtctgtcttggcaatatatgtcgttctccaatggcagaagcaatcatgcgacaaagacttaaagacagaaatattcatgatattaaagtacattcaagaggtactggtagctggaatttaggagagccgcctcatgaaggtacacaaaaaattctcaacaaacacaatattccatttgatggcatgattagtgaattattcgaagcgacagatgattttgattacattgtggctatggatcaaagtaacgttgataatattaaatctatcaatcctaatcttaagggacaattgttcaaactgttagaatttagtaatatggaagagagtgatgtaccagatccatactacacgaataattttgaaggtgtatacgacatggtattatcatcttgtgataatttaatagactacatcgtaaaagatgcaaatttgaaagaggggtag

SEQ ID NO: 34204 - DNA, 471 bp, Staphylococcus aureus
atgctaaacagaacaatattagttggtcgtttaactagagacccagaattaagaaccactcaaagtggtgtaaatgtagcatcattcacattagcagttaaccgcacatttacgaatgcacaaggagagcgcgaggcagactttattaatatcatcgtatttaaaaaacaagcagagaacgttaataaatacctatctaaaggatcgttggcgggcgtagatggtaggttacaaacgcggaactatgaaaataaggaaggtcaacgtgtatacgttacggaagttattgctgatagtattcaatttttagaaccgaaaaactcaaatgacactcaacaagatttatatcaacaacaagtacaacaaacacgtggacaatcgcaatattcaaataacaaaccagtaaaagataatccgtttgcgaatgcaaatggtccgattgaactaaatgatgatgatttaccattctga

SEQ ID NO: 34205 - DNA, 1056 bp, Staphylococcus aureus
atgaaaaataaaaaacgtgttttaatagcgtcatcattatcatgtgcaattttattgttatcagcagcaacgactcaagcaaattcagctcataaagactcgcaagatcaaaataagaaagaacatgttgataagtctcaacaaaaagacaaacgtaatgttactaataaagataaaaattcaacagtacctgatgatattgggaaaaacggtaaaatcacaaaacgaactgaaacagtatatgatgagaaaacaaatatactccaaaatttacaattcgactttatcgatgatccaacttatgacaagaatgtattacttgttaaaaaacaaggctcaattcattcaaatttaaagtttgaatctcataaagaagaaaaaaattcaaattggttaaagtatccaagtgagtaccatgtagattttcaagtaaaaagaaatcgtaaaactgaaatattagaccaattgccgaaaaataaaatttcaactgcgaaagtagacagtacattttcatatagctcaggtggtaaattcgattcaacgaaaggtattggacgaacttcatcaaatagctactccaaaacgattagttataatcagcaaaattatgacacaattgccagcggtaaaaataataactggcatgtacactggtcagttattgcgaatgacttgaagtatggtggagaagtgaaaaatagaaatgatgaattattattctatagaaatacgagaattgctactgtagaaaaccctgaactaagctttgcttcaaaatatagatacccagcattagtaagaagtggctttaatccagaatttttaacttatttatctaatgaaaagtcaaatgagaaaacgcaatttgaagtaacatacacacgaaatcaagatattttgaaaaacagacctggaatacattatgcaccttcaattttagaaaaaaataaagatggtcaaaggttaattgtcacttatgaagttgattggaaaaataaaacagttaaagtcgttgataaatattctgatgacaataaaccttataaagaaggataa

SEQ ID NO: 34206 - DNA, 705 bp, Staphylococcus aureus
atgaataaaaaattactaatgaatttttttatcgtaagccctttgttgcttgcgacaatcgctacagattttacccctgttcccttatcatctaatcaaataatcaaaactgcaaaagcatctacaaacgataatataaaggatttgctagactggtatagtagtgggtctgacacttttacaaatagtgaagttttagataattccttaggatctatgcgtataaaaaacacagatggcagcatcagccttataatttttccgagtccttattatagccctgcttttacaaaaggggaaaaagttgacttaaacacaaaaagaactaaaaaaagccaacatactagcgaaggaacttatatccatttccaaataagtggcgttacaaatactgaaaaattacctactccaatagaactacctttaaaagttaaggttcatggtaaagatagccccttaaagtattggccaaagttcgataaaaaacaattagctatatcaactttagactttgaaattcgtcatcagctaactcaaatacatggattatatcgttcaagcgataaaacgggtggttattggaaaataacaatgaatgacggatccacatatcaaagtgatttatctaaaaagtttgaatacaatactgaaaaaccacctataaatattgatgaaataaaaactatagaagcagaaattaattaa

SEQ ID NO: 34207 - DNA, 1617 bp, Staphylococcus aureus
atggttaaacaattgaaattctctgaagatgcacgtcaagcaatgttacgtggtgtagaccaattagcaaatgcagttaaagtaacgattggtcctaaaggacgtaatgttgtattagataaagagtttacagcacctttaattacgaacgatggtgtaacgattgctaaagaaatcgaattagaagatccatatgaaaatatgggggctaaactagttcaagaagttgcaaataagacaaatgaaattgctggtgacggtacgacaactgcaacagtattagctcaagcaatgattcaagaaggcttgaaaaatgttacaagtggtgcgaacccagttggtttacgtcaaggtatcgacaaagcagttaaagttgctgtagaagcattacatgaaaattctcaaaaagttgaaaataaaaatgaaatagcgcaagtaggtgcgatttcagcagcagatgaagaaattggacgttatatttctgaagctatggaaaaagtaggtaacgatggtgtcattacaattgaagaatcaaatggactaaacactgaactagaagtggttgaaggtatgcaatttgatcgtggttatcaatcaccatatatggttactgattcagataaaatggttgctgaattagaacgcccatacattttagtaacagataagaaaatctcgtctttccaagatatcttacctttattagaacaagtggttcaatctaatcgtccaatcttaattgtagctgatgaagttgaaggcgatgcattaacaaatatcgtgctaaaccgaatgcgtggcacatttacagctgttgcagtaaaggcgcctggtttcggtgatcgtcgtaaagcaatgttagaagatttagctattttaactggtgcgcaagtgattactgatgatttaggcttagatttaaaagatgcatcaattgatatgttaggtactgcaagtaaagtagaagtaactaaagataataccactgttgttgatggtgacggtgacgaaaacagcattgatgcacgtgtaagccaattgaaatctcaaattgaagaaactgaatctgactttgatcgtgaaaaattacaagagcgcttagctaaattagcaggtggtgttgcagttattaaagtaggtgcagcaagtgaaacagagcttaaagaacgtaaattacgtattgaagatgcattaaattctacacgtgcagcagttgaagaaggtattgttgcaggtggtggtactgcattagtaaatgtttaccaaaaagtaagtgaaattgaagcagaaggtgacattgaaacaggtgtaaatattgtacttaaagcactaactgcaccagttcgtcaaattgctgaaaatgcaggattagaaggttctgttattgtagaacgtttgaaaaacgcagagccgggtgttggttttaacgctgctacaaacgagtgggttaatatgttagaagcaggtatcgttgatccaactaaagtaacacgctcagcattacaacatgctgcaagtgttgcagcaatgttcttaacgactgaagcggttgtagcatcaattccagaaaaaaataatgaccaacctaacatgggtggcatgccgggaatgatgtaa

SEQ ID NO: 34208 - DNA, 951 bp, Staphylococcus aureus
atgaaaaatatatctgatattgccaaattggcaggcgtttcaaaaagcacagtatctagatttttaaataatggatctgtcagtaaaaaaacaagtgaaaaattaacaagaattatagcagaacatgactatcaaccgaatcaatttgctcaaagtttaagagcgagacaaacacaccttattggtgccattatacctagaatgaattcatatgcagtagatgaaacaatcaaaggattggcaaaacaatgccaaaaatatgaatcacaattaattttaaattacacaggtttaaatatcgaagcagaaatacaagcgcttgaaacattagcacgcagtaaagtagatggtattgttttaatggctacagacataacagagagacatattgaagtcattaataaaatgaatgtaccaatcgttattgttggtcaacaacatgaacaacttcatagtattgtgcatgatgattataaagcaggtcaaattataggcgaatggattggtcaacagggatatcaacaagttgaagtgtttagtgtaagtgaaaaagatattgcagttggtatacatagaaaacgtggtttacttgaccagttagctaaataccaaattaaacctaatatacatgaaacaaattttacttatgtggaagcacaaaaagatgttgcaaatgttttggaaaatgtggagcaagtagatgcggttgttggagcaactgatacgattgcattagctgcctataaatattattctgataaaaatgatgttatgaaaccacatcaaatatatggttttggtggtgacccaatgacacaattagtgtctccatcgataaaaacaattcattataattattttgaagctggccaatgcgcgatggaagagatacaacagatgcttaaaaagcaagatatgccatatagcgtcacagtagatgttaatatttag

SEQ ID NO: 34209 - DNA, 1689 bp, Staphylococcus aureus
atgcgaagcgacatgatcaaaaaaggagatcaccaagcaccagcaagaagtcttttacatgccacgggcgcgctaaaaagtccaactgatatgaacaaaccatttgtagctatttgtaactcttatattgatattgttcctggacatgttcacttgagagagcttgcagatatagctaaagaagcaattagagaagccggtgccattccatttgaattcaatacaattggtgttgatgatggaatagctatgggacatatcggaatgcgatattctctaccatcacgtgaaattattgcagatgcagctgaaactgtaattaacgctcattggtttgacggcgtattttacattcctaattgtgacaagattacacccggtatgattttagcagccatgaggacaaacgtaccagctatcttttgctctggtggaccaatgaaagctggcttatctgcacatggaaaagcattaacactttcatcaatgtttgaagcagtcggcgcatttaaagaaggatcgatttctaaagaagaatttttagatatggaacaaaatgcctgccctacttgtggttcatgtgctgggatgtttactgcaaattcaatgaactgtttgatggaagttttaggtctagcattaccatacaacggtactgcacttgcagtcagtgatcagcgacgcgaaatgattcgccaagcagcttttaaattagttgaaaatattaaaaatgatttaaaaccacgtgatatcgttactcgcgaagcaattgatgatgcatttgcacttgatatggctatgggtggttcaacaaacacggtactgcatacgttagccattgccaatgaagctggtattgattatgacttagagcgcattaatgctattgccaaacgcacgccatatttatcaaaaatagcacctagttcatcgtattcaatgcatgatgtgcatgaagctggtggcgtcccagcaattattaatgaattgatgaagaaagatggcacgttacacccagatagaatcacagttactggcaaaacgttacgtgaaaataacgaaggcaaagaaattaagaactttgatgtcattcaccctcttgatgcaccatatgatgcacaaggcggtttatctatcttatttggtaatatcgcccctaaaggcgcagttattaaagttggcggcgttgatccatctatcaaaacatttactgggaaagcaatttgtttcaattcgcatgatgaagctgttgaagcaatagacaatcgtaccgttcgtgcaggccacgtcgttgtcattagatatgaaggacctaaaggtggaccaggtatgcctgaaatgttagcacctacttcctctattgttggtcgcggcttaggtaaagatgttgcattaattactgatgggcgtttttccggtgccacaagaggtattgcagttggtcatatttcccctgaagctgcatctggtggaccaattgccttaattgaagatggagatgagattactattgatttaacaaatcgtacattaaacgtaaaccagcctgaagatgttctagcgcgtcgccgagaatctttaacaccgtttaaagcgaaagtaaaaacaggttatctagctcgttatactgccctagtaactagcgcaaatacaggtggcgtcatgcaagtccctgagaatttaatttaa

SEQ ID NO: 34210 - DNA, 363 bp, Staphylococcus aureus
atgattagacgaggagatgtttatttagcagatttatcaccagtacagggatctgaacaagggggagtcagacctgtagtcataattcaaaatgatactggtaataaatatagtcctacagttattgttgcggcaataactggtaggattaataaagcgaaaataccgacacatgtagagattgaaaagaaaaagtataaattggataaagactcagttatattattagaacaaattcgtacacttgataaaaaacgattgaaagaaaaactgacgtacttatccgatgataaaatgaaagaagtagataatgcactaatgattagtttagggctgaatgcagtagctcaccagaaaaattag

SEQ ID NO: 34211 - DNA, 1584 bp, Staphylococcus aureus
atgtctgaacctcaaaaattacatccgatttcatattttaatggcataatcaatgctatcaaacaaaacatagtcgtcttttttattttcattatctttcaattgaaagattttgattatacgaatcccgaatcatatttatggataggtattgtatttgtattctttttaatatcatacatttctcaaattgtcggaattatgaacacgcgatattggattgaggataattatttcattttaacaacaggtatttttaataaaaagcgtaaagaattaaatataaaacgtattcagtccgttgatatgacacaaggggtcgtcaatcaaattattggtggtgtggatttacaaatcaaaacaccaagtgatggtattgtcttaagtgttatttcgaaaaaacaaggtgaatatcttgaacgatatattgatcaattgcaaacagagttgaagacagaagtggcgcaaaagtctagtgctgagaagaatgacaactgtaatcatgacattgaaggtaatgtggaagacatcgcagaaggtcgcttagatgaagtgcagaacactgatagtatgcttaatcagaaaaataaacgcattcctatatatcagatgaattttaaagaatcactatttatggcaatgaccagtggcgccattggtgtaacgttagcagctttagtaccgatttacggggctgtaagagagttgatcccatggtcgaagctaaatcatgaaattagtcaatgggttcaaattgtaagtatttcagtattaatcatcattttactagtattaatagtggcatatattattggaacgattataacaatgataagattttatggcttttcggtgatgcttgaaaatgagcaacttaaaattgaatatggtctctttaacaagaagaaagtaactgtaccaacgaaacgattgcaagctgttgttgaacgtcagtcatatatacgaagattatttggctacacagcaatacattttatcatcacaagtgattttgaaaataaaaaaatcgaagatgatgacaatgattcaggtagtgtgccgatattgccgtttattaaacgagacaaagcatatcaaattatccagaatttagtaccagatttatcttatcaacaagttaatgaaggtatgcctttgtcaggtttccacagacactttttaatacctagtattattgtcatagctatggcaggtattggctgttatttttggaatcaattattattgttatttacgattataacaatagtcattattggtttatttgtgatcaaaggatatctttatgtcaaacatgcgggttttaaaatgacagaagaacaaattactatccagaatttcgagctattgaaacgaaatatttattattttaaagcgcatcacattataggatttgacacttggcaacatacattacttaaacgcaacaatttaaataattttagctttattgttgctaaaggtgtgggagcccaatcgattaacctaaaatacgcaagaagtgaagatgcaaataaattgaaatcatggtatttaagaggtgaaaatgatgagggattataa

SEQ ID NO: 34212 - DNA, 2658 bp, Staphylococcus aureus
atgtcaaacactgaatcgctaaacataggaaaaaagcgtggatctttaacaatttacatcggttacagtccaggtgttggtaaaacatttgagatgctttcaaatgccattgaactatttcaaagtaacgttgatattaaaataggatatattgaaccgcatcagcgtgatgaaacaaatgcattagctgaacaattacctaaaatcacaaccaattttactaaacatggtagtcatcattttcaatatttagatgtcgaccgcataatcgaagaatcgccgacaatagtacttatcgatgagttagcacatacgaatatttctagagatcgtcatgagaaacgatatatggatattgaagaaattttaaatcatggtatcgatgttcataccactttgaacattcaacatattgaaagtttaagtagtcaaattgaactgatgaccggtgtacatgttaaagaacgtgtacccgactatttcataatgagcgccgatgtattagaagtcgtagatatctcacctgaacaattaattaaacgcttaaaagctggcaaggtatataaaaaggataggctagatgtagcatttagtaatttctttacgtatgcccacctaagcgaactgcgtacattgacgttaagaacagttgccgacttgatgagtgataaagaaaaagtccgacacaaccataaaacgtcactcaaacctcatattgctgtggcaattagtgggagcatttataatgaagcagtaattaaagaggcattccatattgctcaaaaagaacatgcgaagttcactgctatttatatagatgtattcgaaaaaaacaggcaatataaagatagtcaaaagcaagtgcatcaacatctcatgcttgcaaaatcattaggagcaaaagtaaaagtagtttatagccaaaccgttgcattaggattagacgaatggtgtaaaaatcaagatgtaaccaaattaattatcggacaacatattagaaataagtggcgagactttttcaatacacctttaattgaccatttaatgtcctttgaacatagctataaaatcgaaatcgttccaatcaaacaaatacctgttgaattgaaaatgaacaaatcaccctatcgtcctaaaggcaaacgtttcgccatagatatgttaaaaatgattttgattcaaataatttgtgtaatgatgggactgtggatttatcaacttgataagcatgagtctagtacgattattttaatgatttttctcatcggcatcattttattatccatttggacgcggtccttcatcattggctttttagcagcaattattaacgtatttgtttttaattatttttttacggaacctagatatacatttgaagtatatcgctttgactatcctattacatttatcgttagcattttaacaagtattttaacgagtgctttattaaaacaaattaaattccaatactccattactaaaaagcaactttatcgtacagatttattatttcaatttaatgattcgattaaacaaacttatacagttgaaaacttactaataaatgctggataccaaattaatcaattattgcaacaatcaattactatatacgttatcaatcaatcgaaagtaattaaaacaataccattgcaaaaccatatcgataatacgactcaacagcatgaacaagcattaagctgggtaattaaaaatgaaagacaagctggtgcaacaacagatacatttccaggcattaataaatggttgataccaattggcacatctccgattaaaggcattctagccattgattaccaaagttctcaagtgattaatccatatgatgcatcaatattagaatcaatgttaaatgaactttctctcgccgttgaaaatgtgacgttacttaaacaaacgagagaatccatgttacaggctgaacgtcaactgacacattcaaattttttaagatcaatttcgcatgacatacgtacaccgttaacaacaattatgggaaatttagatattttagtatcacatagtaaagatatgtctatcatagaaaaggaacaattacttgtacatagttttcaagaaagtcagtatttatatctattagtgacaaatattttatcattaacaaaattacagtcatcaaatgttcagataaaattgcaaccttatctcgttagtgaattagtagaagaaatcgatatgattttagaacgtcgccatttaaaaaagcgtataactgtatcatcctccgtaaatttacagtttatacacattgacagtaagttgattttacaagctttattcaatttgattgaaaatgcagttaaacacacttctactgacaccaaaatcaatttatctattcgttatgctagctatgaacaaatcgaatttgccgttatagacgaaggacctggaattagtttagaagaacaacaaaagatattcgagcctttttacacaggatcaaataaatattttaaagataaccaaaaagaaagcatgggactaggcttatatttagtacagactatcctacacaaacatcaatcaaacttacaatataaaccgaaccaaccacacggcagtatattctatttcaatatatatacagactttaacgaaggagacgtataa

SEQ ID NO: 34213 - DNA, 213 bp, Staphylococcus aureus
atgaatttaatcgcagcagcaatcgcaattggtttatcagcattaggagcaggtatcggtaacggtttaatcgtttcaagaacagttgaaggtgtagcacgtcaaccagaagcacgtggtcaattaatgggtatcatgttcattggtgtaggtttagttgaggcattacctatcatcggtgtagtaattgcattcatgacatttgctggataa

SEQ ID NO: 34214 - DNA, 837 bp, Staphylococcus aureus
atggtgaattataaagaaaagttagatgaagcaattcatttaacacaacaaaaagggtttgaacaaacacgagctgaatggttaatgttagatgtatttcaatggacgcgtacggactttgtagttcacatgcatgatgatatgccgaaagcgatgattatgaagttcgacttagcattacaacgtatgttattaggagagcctatacagtatatagttggctttgcctcattttatggtagaacgtttgatgtaaactcaaattgtttgataccaagacctgaaactgaagaagtaatgttgcatttcttacaacagttagaagatgatgcaacaatcgtagatatcggaacgggtagtggtgtacttgcaattactttgaaatgtgaaaagccggatttaaatgttattgctactgatatttcacttgaagcaatgaatatggctcgtaataatgctgagaagcatcaatcacaaatacaatttttaacaggggatgcattaaagcccttaattaaagaaggtatcaagttgaacggcttgatatctaatccaccatatatagatgaaaaagatatggttacgatgtctccaacggttacgagattcgaaccacatcaggcattgtttgcagataaccatggatatgctatttatgaatcaatcattggagatttacctcacgttatggaaaaaggcagcccagttgtttttgaaattggttacaatcaaggtgaggcacttaaatcaataattttaaataaatttcctgacaaaaaaatcgacattattaaagatataaatggccacgatcgaatcgtctcatttaaatggtaa

SEQ ID NO: 34215 - DNA, 1611 bp, Staphylococcus aureus
atgacaaaatttatttttgtaacaggtggcgtagtttcatcattagggaagggtattacagcatcttctctaggtagattattaaaagatagaggtctaaatgtaacaattcaaaaattcgatccatacttaaatgttgacccaggtacaatgagtccttatcaacatggtgaagtattcgtaacggatgatggtgcagaaactgacctagacttaggacattacgaaagatttattgatattaatttaaacaagttttcaaatgtgacagccggtaaagtgtattcacacgtattgaaaaaagaacgtcgtggtgattacttaggcggaacagttcaagttattccgcatattacaaatgaaattaaagaacgtttattacttgcaggggaaagtacgaatgcagacgttgttatcactgaaattggcggtacaacaggtgatattgagtcattaccgtttattgaagcgattcgtcaaattcgtagcgatttaggtagagaaaatgttatgtatgttcactgtacattactgccttatattaaagctgctggagaaatgaaaacgaagccaacacaacatagtgttaaagaattacgaggcttaggtattcaaccagacttaatcgttgtaagaactgaatatgaaatgacacaagatttaaaagataaaattgcattattctgtgacattaataaagaaagtgttattgaatgtcgtgatgcagactctttatacgaaattccattacaattaagccaacaaaatatggatgatatcgttattaaacgtttacaattaaacgcgaaatatgaaacacagcttgatgaatggaaacagttgttagatatcgttaataatttagatggtaaaattacaattggtttagtaggtaaatatgttagcttacaagatgcatatttatcagttgttgaatcattgaaacatgctggatatccttttgccaaagatattgacattagatggattgattcaagtgaagtaacagatgaaaatgcagccgaataccttgcagatgtcgacggtattttagtaccaggtggatttggtttccgtgcaagtgaaggtaaaattagtgcaattaagtatgctagagaaaacaatgtaccattctttggtatttgtttaggaatgcaacttgcaacagttgaattttcaagaaacgtattaggacttgaaggcgcacattcagctgaattagacccagcaacaccatacccaattatagatttattaccagaacaaaaagatatcgaagatttaggtggtacattacgcttaggcttatatccatgttctattaaagaaggcacattggcacaagatgtttatggtaaagcggaaattgaagaaagacatcgtcatcgttatgaatttaataatgactatagagaacaattagaagcaaatggtatggtaatttctggtacaagtccagatggacgtttagtagaaatggtagagattccgacaaatgatttctttattgcttgtcaattccacccagaattcttatctagaccaaatcgtccgcacccgatttttaaatcatttattgaagcttcattaaaatatcaacaaaataaataa

SEQ ID NO: 34216 - DNA, 939 bp, Staphylococcus aureus
atgccattatttttacaaccaattttaaaaacaaaattatggggcggtcaacgtctaagtgagtttggatatcaattagacaatgatacaactggggaatgttggtgtgtgtcagcacatccaaatggtacgagcgagattattaatggaccatatcaaggtcaaacattagaccgtatttggtcagaacatcgtgaattgtttggtgatttcccaagcaaagattttccgcttctaactaaaatagtggatgcaagagaatcactttctattcatgtgcaccctgataattcttatgcttatgagcatgaaaacgggcaatatggcaaatctgaatgttggtatattatagatgcagaagaagatgcagaaatagttatagggacattagcagagtctagagaagaagttgcgaatcatgttcaacacggaacgatagagtcgatacttagatatattaaagtaaaacctggagaattctattttattccagcaggaacagtacatactatttcttcaggaatattagcatacgaaacgatgcaatcgtcagacattacatatagactttatgatttcaatcgtcaagataatcaatataatgatagaccgttaaatattgaaaaagctttagacgttattcagtacaatgcaccattacctaatattttgcctgaaagtgaaattattgaaaaccataagtgtacacacattgtatcgaatgatttctttacattggttaaatgggaaatttctggcacgttaaattatatgaagcctagagagttctgtttagttacagtgttggaaggtgaaggacaaatgattgtcgatggtgaaattttcaaactgactactggtacaaactttattttgacttctaaagatttggatagtgtctttgaaggcgatttcacattgatgattagctatgtgtaa

SEQ ID NO: 34217 - DNA, 909 bp, Staphylococcus aureus
atgacaaagacaaaagcaattgatattataggtgcaccatcaacatttggacaaagaaaattaggtgttgatttaggaccaacagcaattagatatgctggattaatttcaagattaaagcaattagaccttgatgtatatgacaagggggatattaaggtacctgctgtgaacattgaaaaatttcatagtgaacaaaaaggattaagaaattatgatgaaattatagatgttaatcaaaaattaaataaagaggtttcagcatcaattgaaaataacagatttcctctagttcttggtggtgatcattctattgcggtaggttcagtatcagcaataagtaaacattataataatttaggtgttatttggtatgatgcacatggtgatttaaatatacctgaagagtcaccaagtggaaatattcatggtatgcctctaaggattttgacaggcgaaggtcccaaagaacttttagaattaaatagtaatgtaatcaagccagaaaacatcgtactaattggtatgagagatttagataaaggtgaaagacaatttatcaaagatcataatattaaaacatttactatgtcagatattgataaattagggataaaggaagtaattgaaaatacaatagaatatttgaagtcacgcaatgttgatggcgttcatttatctttagatgttgatgctttagatccgcttgaaacgccaggcactggtactagagttttgggtggtcttagttatagagaaagccattttgcattggaattactgcatcaatcacatttaatttcctcaatggatttagttgaagtaaatccattgattgacagtaataatcatactgctgaacaagcggtttcattagttggaacattttttggtgaaactttattataa

SEQ ID NO: 34218 - DNA, 969 bp, Staphylococcus aureus
atgatgacaacgaaaattatacgtcgttatagtttaatcacaatccttttaattgtgagtatattcataagtttatgtgtagggtctgtcatgattcatccgattgatgctattaagggaatctttacacaagatgattttattttaaatgagtatcgtatacctagaacattacttggtattattatcggtagtagcttggctatatcaggtgcaattatacaagctgtaataagaaacccgttagcctcacctgatgttataggtatttctaaaggtgccagtttagctgctgtaattattattatgatctttccaacagcaccattgtttgttttacctataggttcattcttaggtgcctttgcagtaagtttatttttatcatttttaatttcaaaatatgatgttaaaggttcaaagcttgccttaattggtttagcaataggcgcaatatgtacggcgattgtgcagttcttattaatcagaaatccactggaagcaaacaaagcgcttgtttggttgacaggtagtctatatggacatgatatgtcgaatatttatactatattaccttggtttttaataacgataccaatcatcattttattgagttatcaattagatgtattgaatctaggtgatgctgttgcaaccgcactcggtttaaaagttaaaactattaaaatgctattgctaattttagcagtaatattagcaggatccgcaatttcagttgtcggtggtattagctttttaggattaattgcacctcatattgcgagacaattaataggaaataaaacattacacgttattatcatgtcggggttaattggtgctatattgttaacatttggagatggtttagcccgtggcattcatccgccactggatattcctgtaggggttatcattgcaattatcggtgcaccatacttcttaatattattacgaagaatgaaataa

SEQ ID NO: 34219 - DNA, 1017 bp, Staphylococcus aureus
atggagaaaattgagaatgaaatagttaataagacatatcttgcaattaattctttggaagaattaagaaatatgattggtattaaatcagactatttttataaatgtctttatgtgaatgaccatttttataatgttatcaaaatacctaaacgaaaaaaagatgaatatagagaattgatgattcctaatatggctctcaaaaatatccaaaggtggattttagataatgtattgtacagaaggcaagttcataaatgtgcaactggttttgttcctaggaaatcaatagtgaacaatgcaatcccacacgttgggcagaaatatatattgaaaatggatatagaaaacttttttccgagtatcacatttaagcaggttagaaaaatattttctgagatgggctataaatttgaacttgcgacagcactcgcaaatttgtgtacagtgaataatcagttgcctcaaggtgcaccaaccagtccatatatagctaatatcatcttttacaatatagataaaagaatcttttcttattgtcaaaaaaataatttgagatatactcgatatgctgatgatattactatttctggatctaataaagtaagttttagtaaagaaattatcagggaaatagtaaaccaatataattttagaattaatgaaagtaagacaattatgtttaaaccaggagacagaaaaaaagttactggtattatagttaatgaaaaaatatcggttcctaaaactttaataagagaggtcaggaagcaaatttattttgtaaataagtttggattagaagaacacttaattcgaaataattattcattggattatgagcagcaatttattatgagtatatatggaaaaatcagttttattaaaatgattgatttcaagaaaggcgttagtttacaaaagaaatttaatgaagtactaggtaatatagaatcgtctaacatgtacagagataatattgactttgatgatatagaactacattggataaattaa

SEQ ID NO: 34220 - DNA, 804 bp, Staphylococcus aureus
atgcgtatattagtagaaattgcgtatcaaggaaataattttctaggctttcaaattcaacagaatggacgtacggtacagcaacaatttgaaaagctattacaacgcatgcataaaagacatgtgagaatccatccttcaagtaggactgatagaggtgtacatgcgatacagcagtactttcatttcgacacagagctgaatatacctatgtcacaatggcaatatgcaatgaaccgaacgttaccagatgatatttatgtcaataatgtagttacagtcgatgacgattttcattgtcgttacgattgtgtcggtaaacgctatcgatataaagtatatcaagcacaacaccgcgatccatttcaaagtggtttgaaaacatttattcctgaaacgttggatttagacaaaatgaacagagcggcgcaacaattcataggtacacatgattttacggggttttgttcgcaaaaaactgaagtagaaagcaaagttagaacattataccaaagtgaaatcgtaaagacagatgatggctttgattatattgtcactggatctggatttttatataacatggtgcgtgtcttagttgcatttttaatagaagttggaaaagggcgacatgaaatttctgatgtgccgaagctacttgaatcaaagaatcgtaagaatgttcctttcactgcaccggctgaaggactatatttagagaagatttatttagatgaaaatgagttattaaaagactttggcaacgatataaaaatacatcgcaaaaaatcattacaaaatgactga

SEQ ID NO: 34221 - DNA, 807 bp, Staphylococcus aureus
atgaaaaataaattgattatagggcgatatttaccaattaattcttttgttcatcatcttgatccaagagcaaagttaatgtttgtttttctttttattatattaatatttttctgtcattcaccattaacatatctttgggtgtttgcacttatcttattcattatgagattagcaaaaattcaattatggttcctaatcaaaggtttaacaccaatatttttctttttaatcttcacattaatgatgcatatatttttaactaaaggtggatatgtattagttgaatggcatggcatcacgattgaaactaatggtattttagaagggctatatatatcattgcgtttaattgggattgtgatgattgcaacaattatgacactatctacaagtccaattgatttaacagatgcgtttgaaagattacttgcaccactaaagatgtttaaattaccagttcatcaattaagtatgataatgtccattgcgttacgattcatcccgacgttaatggatgagttagataaaattattttggcgcaaaagtcgcgtggttctgaaataagttcagggaacattgcaacacgtattaaatcatttattccattactagtgccactattcatctcagctttccaacgcgccgaagaattagcggtcgcaatggaagttaggggttatgatgccaatgttaagagaacgagctacagacagcttaaatggcaattgagagatacgatatctttaaccatgattatcccaattgcaattattttattcgtattaaaatattcaggagtgtaa

SEQ ID NO: 34222 - DNA, 210 bp, Staphylococcus aureus
atgaaagctaaggaaattagagacttaaccacttcagaaatcgaagaacaaatcaaatcttcaaaagaagagctttttaacctacgctttcagttagctacaggtcaattagaagaaactgcacgtattcgtacagtaagaaaaacgattgcacgtctaaaaactgttgctcgtgaaagagaaattgaacaaagtaaggctaatcaataa

SEQ ID NO: 34223 - DNA, 1023 bp, Staphylococcus aureus
atggtagaacaaataaaagataaactaggacgtcccatccgtgacttacggttatctgtgacagatcggtgtaactttaggtgtgattattgcatgcctaaagaggtatttggagatgatttcgtatttttacctaaaaatgaactgttaacgtttgatgaaatggctagaatcgctaaggtatatgcagaattaggtgtaaaaaaaatacgcattacaggtggagaaccattgatgcgacgcgatttagatgtacttatagctaaattaaatcaaatcgatggtattgaagatattggtttgactacaaatggtttgttattaaaaaagcatggacaagagttatatgatgctgggctacgcagaattaatgtcagtttggatgctattgatgatacgctatttcaatcaatcaataatcgtaatattaaagcgactacgattttagaacaaattgattacgcgacgtctattggtttgaatgtaaaagtaaatgttgttatacaaaaaggtattaacgatgatcaaatcataccaatgcttgaatattttaaagataaacatatagagattcgatttatagaatttatggatgttggtaatgataatggatgggatttcagtaaagttgtaactaaagatgaaatgcttacaatgatagagcagcactttgaaatcgatcctgtagaaccaaaatattttggggaagtagcaaaatattatcgccataaggataatggtgttcaatttggtttgattacaagtgtttcacaatcattttgttctacatgtacacgcgcaaggctgtcatcagatgggaagttttacggatgtttatttgcaactgtcgatggatttaacgttaaagcgtttattcgttctggcgtgaccgacgaagaattaaaagaacaatttaaagctttatggcaaataagagatgatcgatattcagatgagagaactgctcaaacagttgccaatcgtcaacgtaaaaagataaacatgaattatattggtggttaa

SEQ ID NO: 34224 - DNA, 606 bp, Staphylococcus aureus
atgcttaaaatcaatgtgaaatatcaattaaagaacactttaattcgcatcaatatagatgatactgaaccaaaaatttatgcagttcgtggtccatctggcattggtaaaactactgttttaaatatgattgccggattacgtaaagcagatgaagctattatcgaagtgaatgggcaattgcttactgatacgacaaaaaacgtgaatgttaaaattcaacaacgacgtattggatatctgtttcaagactaccaattgtttcctaatatgacggtttataaaaatattacttttatggctgaaccatctaaacacatcgatcaattaattcaaactttaaacattaatcatttgatgaaacaatatcctatgacattgtcaggtggagaggcacaacgtgtagcacttgcacgtgcacttagcacgaaaccagatttaattttattagatgaacctttttctagtttggatgatactacaaaagatgagagtattacattagttaaacgtattttcaacgaatggcaaataccaatcatatttgtgacacattcaaactatgaagcagaacaaatggctcatgaaattattacaattgggtaa

SEQ ID NO: 34225 - DNA, 1605 bp, Staphylococcus aureus
atgaatgcgataaagcgtttcggtagtgcaatgattgtaccggtattaatgttcgctttctttgggatagtgcttggctttgcgacattatttaaaaatcctacaatcatggggagtttagcagatcaacatacgttttggtttaaattttggtcagtgatagaatctggtggctgggttatttttacgcatatggaagttgtatttgttgtaggtttaccactttctttagctaaaaaagcaccaggtcatgcagcgcttgcagcattgatgggttacttaatgtttaatacatttataaatgccattttaacgcaatggccacatacatttggcgctaatttagaaaaaggcgttgaaaatgtacctggtttaaaatcaattgcaggtattgccacattggatacgaatattctaggtggtattattatttcagctattattacgtggattcacaatagatactacagtaaacgattaccagaaatggttggtgtattccaaggtttaacatttgtggttacaatttcattttttgtgatgttaccattagcagcaattacttgtgttatttggccaactgttcagcacggtattggttcaatgcaacactttatcatcgcttcaggctatatcggtgtttggctgtaccacttcttagaacgtgtattaataccaacaggattacatcactttatttatgcaccaattgaagttggaccagtagtagtcaatcatggcttgaaagctgaatggttacaacatttaaatgagtttgctaagagtactaagccattaaaagagcaattcccttatggctttatgcttcaaggaaatgggaaagtatttggatgtttaggtattgctttagcaatgtatgctacgacacctaaagaaaatcgtaaaaaagtagcagcattacttattcctgcaacattaacagcagtcgttgtaggtattactgagccattagaatttacattcttattcatcgcaccatacttatttgttttacacgcagttttagcagcatcaatggatactttaatgtacgcatttggtgttgtaggtaacatgggtggtggcttgttagactttatttcaacaaactggttgccattaggtaaagaacattggggtacttatgttgcacaagttattatcggtctgatatttgtagcgatttacttcttcttattcagattcttaattttgaaatttgatattccattacctggacgtaagaaaacagaagaggaagttaaattattttctaagcaagattacaaaaataaaaaaggtgatagcgtagattctaaacgtgcttcaacaggtaatgaatacgaagacaaagctgcgtattacctcgacggtttaggcggcaaagaaaatatcaaagatgttactaactgtacaacaagattacgcttaactgtttatgatgaaagtaaagttgcggatacggaatatttcacgcatcaacaaatggcacacggattagtaaagagtggtaagagtatccaagttgtagtaggtatgacagtaccacaagttcgtgaagcatttgaacaaatggttgaggatcaatcgtccgaagataaataa

SEQ ID NO: 34226 - DNA, 1932 bp, Staphylococcus aureus
atgactacgaccttcattattagctacattattttagcgctcattattgttggggttatcaatttatttttaataagatcaagaaaaaaaggcaaacgccaacaaaaggaacaacaatttacgacacgtcaatcaaatcaatctaaatttaaagctagtgatttagacaaaacaactgatcaatcgacacaacgtatgacgcatgaagagttgcgtgttgacaatcaagatgatcatagccaagttagtctaaatggttacacaaaggggtctgagaaagatcaagaagcattcactaataataatggtgaggaagcagttgctgctaaaaatcctgaatcagaagaatataaagtgaatgaaaaaataaaaaaagaacataaaaactttatttttggtgaaggtgtttcacgcggtaaaatattagcggcattattattcggtatgtttattgcgattttaaaccaaacattattaaatgttgctttgccaaaaattaatacggaatttaatatttctgcgtcaacagggcaatggttgatgacgggattcatgttagtaaacggtattttaataccaattacggcgtatctatttaataaatattcatatcgaaaattatttttagttgcgttagtactctttacaattggttcattaatctgtgcgatttcaatgaatttcccaatcatgatggttggacgtgtattacaagccattggtgcaggtgtactaatgccattaggttcaattgttattattacaatttatccacctgaaaaacgtggtgctgccatgggtacaatgggtatcgcaatgattttagcacctgcaattggtccaacattatcaggttatattgtacaaaattaccattggaatgtgatgttttacggtatgttcattatcggtattattgcaatcttagttggttttgtatggtttaagttatatcaatatacaacaaaccctaaagctgatatcccaggtatcatttttagtacgattggttttggtgctttgttatacggcttttcagaagcggggaacaaaggatggggttctgttgagatagaaacaatgtttgcgattggtattatctttattattctatttgtaataagagaattaagaatgaaatcaccaatgttgaatttagaagtattaaaattcccaacatttacattaacaacaattattaatatggttgtaatgttaagtttatatggtggtatgattttattaccgatttatttacaaaatttacgcggattctcagcattagattccggattgttattattacctggttctctaattatgggtctacttggaccatttgcaggtaaattgttagatactattggtttaaaaccattagctatctttggtattgctgtcatgacttatgcaacatgggaattaactaaattaaatatggatacaccatatatgacaatcatgggtatctatgtacttcgttcatttggtatggcatttataatgatgccaatggtaactgcagctattaatgcgttaccgggacgacttgcctctcatggtaatgctttcttaaatacgatgcgtcaattagcaggctctataggtacagcaatcttagttactgttatgacaacacaaacaacacaacatttatcagcttttggggaagagttagataaaacgaatcctgttgtacaagatcatatgcgtgaattagcatcgcaatatggtggtcaagaaggcgcaatgaaagtgttattacaatttgtaaataaactagcaacagttgaaggtattaatgatgcatttatagttgcaacgatatttagcatcatcgctttaattttatgtttatttttacaaagtaataaaaaagcaaaagctacagctcaaaagttagaagcaagctcaaataacaatcatgaataa

SEQ ID NO: 34227 - DNA, 648 bp, Staphylococcus aureus
atgaaaaagatgatattaattaatgtcattacggttgttgtactgttagcaattgggattgctggcttttatttctggaataaaacaacaagctatgtaacaactgataatgcaaaagtaaatggcgatcaaattaaaatagcaagtcctgcatctggacaaattaaatcacttaatgttaaacaaggtgacaaactcgataaaggtgacaaagtagcaactgttactgtacaaggtcaagatggcgaaacgaaagatatggatcttaaaatgcctcaaaaaggtacaattgccaaattagatggtatggaaggttcaatggtgcaagctggtaacccaatcgcttatgcatacaatttagatgatttatatgtaacagcaaatattgacgaaaaagatattaaagatgttgaagtaggtaaagatgttgatgtgactattgacggtcaaaaagcttctattaaaggtaaagttgatagtattggaaaagcaactgctgcaagcttttcattaatgccatcatcaaatagtgatggtaactacactaaagtttctcaagtaatacctgttaaaatcactctagaatcagaaccgtctaaacaagttgttcctggaatgaacgctgaagtaaaaatccataaaaattaa

SEQ ID NO: 34228 - DNA, 1209 bp, Staphylococcus aureus
atgaatgatttaacgcattttaacaagcgttcaccgatatttattattattttaggatctttgacggccattggagcattatcgatagatatgtttttgcctggattaccagatattagacatgattttcaaacaacgacgtctaacgcacaattaacattatcgatgtttatgattggtttagcgtttggtaatttgtttgctggtccaatttcagattcaactgggcgcagaaagccgcttattatagctatgattatttttacattagcaagtttaggtattgtttttgtacataatatttggctgatggttgcattaagatttcttcaaggagtgacaggtggcgcagcagcagttatttcaagagctatagcaagtgatatgtatagtggtaatgaactaactaagtttatggcattattgatgcttgttaatggtattgcaccagttgttgcgccaacaatagggggcataattttaaattattctgtctggcgtatggtctttgtcattctgactatctttggtttcgtcatggtcataggttctttattaaaagtacctgaatcattaacagtgacaaatcgtgagtcaagtagtggattaaaaacaatgtttaaaaacttcaaaatattattgaagacgccacgttttgtattaccaatgctcattcaaggtatgacatttgtaatattatttacttatatttctgcgtctccgtttattattcaaaaaatttatggcatgactgcaatacaatttagttggatgtttgcaggaattggtattacgctcattatatcaagtcaacttactgggtaccttgttgattttatagactcacaaaaattgatgagaggcatgacgatgattcagattatcggtgtaattttagtgacgattgtattgcttaatcattggaacttttggattttagcgataggatttatcattttaatagcaccagtgacaggtgttgcgacacttggttttacaatagctatggatgaaagtagtagtggtagagggagttcatcaagtttattaggtttagtgcagtttttatttggtggtgttgcatcgccattagtgggggtaaaaggtgaagataatcctataccttacataattattattatagctacagcagttatattaattattttacagatttataatatgaaggtatttaaaacaaatcgatga

SEQ ID NO: 34229 - DNA, 423 bp, Staphylococcus aureus
ttgaacttcaatcaattcgagaatcaaaacttttttaacggtaatccaagtgatacatttaaagatttaggtaaacaagtatttaattacttttcaacaccttcatttgtaacgaatatatatgaaacagacgaattatattacttagaagctgaactagcaggtgtaaataaagaagatattagtatcgatttcaataataatacgctcactattcaagctactagaagcgcaaaatacaaatctgaacaactcattttagatgagcgtaacttcgaatcattaatgcgtcaatttgattttgaagctgttgataagcaacatattactgctagttttgaaaatgggttattaaccattacattgcctaaaatcaaaccaagcaatgaaactacttcatcaacatctattccaatttcatag

SEQ ID NO: 34230 - DNA, 1170 bp, Staphylococcus aureus
atgtacaaaacaaaaggtggctttcaacttacattacaaacattaagtttagtggttgggtttatggcttggagtataattgcgccattaatgccctttattaaacaagatgtcaatgttactgaaggtcaaatatcaatcattttagcgataccagttattttgggatcagtgctccgtgtgccatttggttatttaacaaatattgttggtgctaaatgggtattctttacaagttttatcgtattgttattcccgatatttttcttaagccaagcacaaacgccgggtatgttaatggcatcaggatttttccttggcgtaggtggcgcaattttctctgttggtgttacatcagttcctaaatatttcccaaaagaaaaagtaggtctagcaaatggtatttatggtatggggaatatcggtacagcagtttcttcatttttagcaccaccgatagcgggtattattggttggcaaacaacagttagaagttacttaattattatcgctttatttgcattaattatgttcatttttggtgacacacaagaacgtaaaattaaagtgccattaatggcccaaatgaaaacattatctaaaaactacaaattatattacttaagttattggtatttcattacttttggtgcttttgtagcatttggtattttcttacctaactacttagtaaatcattttggaattgacaaagtagatgctggtattcgttcaggtgtattcattgcgctggcaacattcttgagaccaataggtggtatactaggtgataaatttaatgcagttaaagtactgatgattgattttgttattatgattatcggtgccgttattttaggtatttcagaccatatcgcattattcactgtaggctgtttaacaataagtatttgtgcaggtattggtaacggcttaatttttaaattagtaccatcctacttctcaaatgaagcaggatcagcaaatggtatcgtatcaatgatgggtggtttaggaggattcttcccaccgttggtcatcacatacgtagctaatttaacaggttcaagccatttagcatttattttcttagcggtatttggatgcattgcattatttaccatgcgccatttatatcaaaaagaatatggttcattgaaacacagttga

SEQ ID NO: 34231 - DNA, 1035 bp, Staphylococcus aureus
atgattaatgaggacagtatacagttagatactttattgaaaaaatattatgagcattcaatcgaaaagatagtttttgctgatgataacggcaaaattattgcaatgaatgatgctgctaaagatatattatctgaagaagataattacagtgctgtggcgaatgcgatttgtcacagatgtgaagggtatacaaatgcctatgatgtacaatcatgtaaagactgtttcttagaatcgatgcaagtacaagctacgaatttccaagtatttatgaagacgaaagatcaaaaagtgatgccatttacagcaacatatcagttgattgatcaagacaggggaattcatgcatttacgcttcaaaatgtttcatcacaaattgaacagcaagagaaattacatcaacaacatatgatgcgtaaaacaatctcagcccaagaaaatgaaagaaagcgaatttctagagagttacatgatagtgtgattcaagaaatgctcaatgtagatgttcaattgagattattaaaatatcaagaagatacaactaagcttttggaagacgcagaaaatattgaatatattgtcgctaaattaattgatgatatacgtaatatgtcggttgaattaagacccgcttctttggatgatctaggccttgaagcagcttttaaatcatattttaaacagtttgaagaaaattatggaataaaaatcatatatacatcaaatattaaaaatactcgctttgatagtgatattgaaacggttgtttatcgagtagtgcaagaagctattctaaatgcgttgaaatacgctgatgtaaatgaaataaatgtaggtatccgtcaaactgggcgccatttggtagcagaagtgatagatgcgggaaatggttttgatccaagttctaagcctaaaggttctggactcggtttatatggaatgaatgagcgagctgagttagtcagcggtagcgtcaatattgaaacgaaaattggtgagggtaccaatgttacattgaacattccaatttga

SEQ ID NO: 34232 - DNA, 678 bp, Staphylococcus aureus
atgcttaatcagtttttatgggttatatttccgtatttatgtttagttgtctttgtcgcaggtcatattgcacgttatcgttatgataaattttcttggacagctaaatctagtgaactaatagaaagaaaaaggttgatgtggggaagtttattatttcacttaggtattattccagtgttttttggacacgtagttggattgttaataccgaaatcatggatggatgcagtgggggtatctgagcatttatatcatataggcgctgtttatattggtagcatctttggtataataactttgatagggatgtttttattaacagcgagacgtgttactacgaaaagtattcgaagattaagttcagcgtcggatatatttgtaaatttcttattattacttatcgtatttatgggatgttacgcaacattagtaaccaatatacaacatccagattttaactacagaacttcattatcaatttggtttagacaattatttatgttaaaaccagatgcgtcattgatgagtggtgtgccgattgcatttaaaatgcatatattgttaggtttcactattatggcttgttggccatttacacgtttggtacatgtttggagtgtacctttgacatatataaatcgcagatatattatttaccgtaagaataaagtgtaa

SEQ ID NO: 34233 - DNA, 948 bp, Staphylococcus aureus
atgcttaaaaataaaatattagctacaactttatctgtgagcttacttgcccctcttgccaatccgttattagaaaatgctaaagctgccaacgatactgaagacatcggtaaaggaagcgatatagaaattatcaaaaggacagaagataaaacaagtaataaatggggcgtgactcaaaatattcaatttgattttgtgaaggataaaaaatataacaaagatgctctgatattaaagatgcaaggattcattagctctagaacaacatattacaactataaaaaaactaatcatgttaaagctatgcgatggccattccaatataatattggtttaaaaacaaatgataaatatgtttctttaattaattatttacctaaaaataaaattgaatctacaaacgtgagtcagacattaggatacaatatcggtggtaatttccaatcagccccatcactcggtggtaatggatcatttaactattctaaatcgattagctatacacaacaaaattatgtaagtgaagtagaacaacaaaactcaaaaagtgttttatggggcgtcaaagcgaattcattcgccactgaatcaggtcaaaaatcagcatttgatagcgatttatttgtaggctacaaacctcatagtaaagatcctagagattatttcgttccagacagtgagttacctcctcttgtacaaagtggatttaacccttcatttatcgccacagtatctcatgaaaaaggttcaagcgatacaagcgaatttgaaattacttacggaagaaacatggatgtcactcatgccattaaaagatcaacgcattatggcaacagttatttagacggacatagagtccataatgcattcgtaaatagaaactatactgttaaatacgaggtcaattggaagactcatgaaatcaaggtgaaaggacagaattga

SEQ ID NO: 34234 - DNA, 978 bp, Staphylococcus aureus
atgaaaatgaataaattagtcaaatcatccgttgctacatctatggcattattattactttctggtactgctaatgctgaaggtaaaataacaccagtcagcgtaaaaaaagtcgatgacaaagttactttatacaaaacaacagccacagcagattctgataagtttaaaatttcacagattttaacatttaatttcatcaaagataaaagttatgataaagatactttagtacttaaagctactgggaatattaactcaggctttgtgaaacctaatcctaatgactatgacttttcaaaattatattggggagctaaatacaatgtatctataagctcacaatctaatgattcagtaaacgtcgttgattatgcaccaaaaaatcaaaatgaagagtttcaagttcaaaatactttaggctatacatttggtggtgacattagtatctctaatggtttatctggtggacttaatggaaatacagctttttctgaaacaattaattataaacaagaaagttacagaacaacattaagtcgcaacacaaattataaaaatgttggctggggagttgaagcacataaaattatgaataatggttggggaccttatggaagagatagcttccacccaacatatggtaatgaactcttcttagctggcagacaaagcagtgcatacgctggccaaaacttcatagcgcaacaccaaatgccattattatctagaagtaacttcaatccagaatttttaagcgtactatcacacagacaagatggcgctaaaaaatctaaaattacagtaacttatcaacgtgaaatggatttataccaaatttgttggaatggcttctactgggcaggcgcaaattataaaaactttaaaactagaacatttaaatcaacatatgaaattgattgggaaaatcacaaagtgaaattgttagatacaaaagaaactgaaaacaataaatag

SEQ ID NO: 34235 - DNA, 774 bp, Staphylococcus aureus
atgatgcattcaaagaaattaatgctcggtatatgtttggtattactcattatattgattgtaggttatgtcattatgacaaaaataaatagtcgaagcgcccaaattaaagacacatttaatcaaacattaaaattatatccaaccaaaaatcttgaagacttttatgataaggaaggctttcgagatcaagagtttgaaaagggcgacaaaggcaattggattgttgattctgagatggtaattgagctgaaggataaaaaaatggaatctagaagtatggtgctctatataaatcgtaatactagaacaacgaaaggtaattttattgttagagaattgtgggaagatagtaaagggtatgcacaaagtaaagatacaaaatatccagtgaaaatggaacataatcgaattatcccaacgaaaccgatagctgatgataaattaagaaaagaaatagaaaactttaaattctttgtacaatacggtgactttaaagatattaatgattataaagatggtgacatttcatataatcctaatgttccaagttattccgcaaaatatcaattgaaaaacgatgattacaatgtgaagcaacttcgaaaaagatataatattccaaccaacaaagctccgaaactattattgaaaggtgatggtgatttaaaaggttcatcaataggatcaaaaaatctagaatttacctttgtagaaaataaagaagagaacatttatttttctgatagtattaatttcaaacctactgaatag

SEQ ID NO: 34236 - DNA, 867 bp, Staphylococcus aureus
ttgaaaaaaataaaaaaggcaatcattcccgctgctggtttagggactagatttttaccagcaactaaagcgatgccaaaggaaatgcttcctatcttagataaacccacaatacaatatatcgttgaagaagctgcaagagctggaattgaagatattattatagtgacaggtcgccacaaacgcgcgattgaagatcattttgatagtcaaaaagaattagaaatggtgttaaaagaaaaaggtaaatctgaattactagaaaaagttcaatactcgacagaacttgcgaatattttttatgtaagacagaaagaacaaaaaggtttagggcatgcgattagttctgcgcgtcaatttatcggcaatgaaccatttgcggtattattaggtgacgatattgttgaatctgaagtgccagcagtgaaacagttgattgacgtttatgaagaaacggggcactcagttataggtgtccaagaagttccggaagcagatactcatcgttatggaattattgatccattaactaaaaatggacgtcagtatgaagtgaaaaagtttgttgaaaagccagcacaaggtacggcaccatcaaacctagctattatgggccgatatgtattaacgcctgaaattttcgattatttaaaaacgcaaaaagaaggcgcaggtaacgaaattcagttaacagatgcgattgagcgtatgaacaatgataatcaagtgtatgcatatgacttcgaaggcgaacgttatgacgttggagaaaaattaggatttgtcaaaacaacaatagaatatgcgttgaaagatgacagtatgcgagaagaattaacacgatttattaaagcattaggtttataa

SEQ ID NO: 34237 - DNA, 1278 bp, Staphylococcus aureus
atgaaggaaaaacgaactaacgtaaggtggatgttcgcgcttgcgttcttctttattggggttattgcgtatatggatagagcaaacatttcatatatcgctaaacaaatgatggatgatttagggatgaccaaaccacaatttggtttattggcatcattcttctctctaggttatgcattaatgcaagtaccatcggggatgttggctgaaaaattcggtccacgtaagatgattacaattgcattagtttggtggagtgcatttacaatcttaacgggtatgattaagaaccacggtttaatttatttagtgagattcttatttggtgtgggtgaggcgccaatgtatccttctaatgctgtgtttaactcattttggttctctaaaaatgaaaaaggtagagcatcaagtgcattattagcaggatcatatttcggacctgtattagcaccaatagttacaattgctattgttaacgcatttaactggcaagcagtattttacatttttggtgcagtaggtattttaatggctgtattatgggcgattattgccaaagacttacctgagcaacatagaatggttaatgaagcggagaaacgtttcattatggaaaatcgtgatatcgtagctactgaaaagtcatcaccaccatggaataatttctttaaacgttttagcttctatgcaattgcaattcaatactttgttgtacaatttatcattacattattcttaatttggttaccgacgtatttaacagaagtattccacgttaactttaaagaaatgagcattagttcattaccttggttattaatgttcttcttaatcttatcagcaggtgcaatttctgaccgtgtattaggattaggtcgttcaaaattcgtagctagaggtgtaattgcaatcgcaggatttattgtgtttgcagtttcaattatctttgctgtacgtacaggaaatttatatgtaagtattttctggttatcactaggtcttggtggtatcggtatttcaatgggtatgagttgggctgcagcaactgacttaggacgtaacttctctggtacagtatcagggtggatgaacttatggggtaatataggtgcattaatcagtccgctattagcaggtctattcgtagaacatttaggttggacaatgacattccaattgttaatcgttccagcagtaatcgctgtgattatgtggttctatgtgaaaccagatcaacctttaattgttagtgatgataaagcaatagaaaaataa

SEQ ID NO: 34238 - DNA, 801 bp, Staphylococcus aureus
atggttaaggctattgcggtagatatggacgggacgtttttagattcgaaaaagacatacgataaaccgagatttgaagcgatttttactgaacttagaaatagagatattacatttattgctgcgagtggcaatcaatatgcgaagttgaagtctattttcggggatagagatatgtattttatttctgaaaatggtgcagttatttataaaggcaatgagttatataattataaaagctttaatcgtcaggtgtttcaacaggtcgtcgattacttaaatatgaaccaaagtattgatcaactcgtcatctgtggtttgaaaagcgcgtatattttaaaacatacttctgaagcatttaaagaagatacgagattttattatcatcagttaaaagaaattgacagtctacaacaattacctgaggatgattatgtcaaaatagcatttaatattaatcgtgagacgcatccaaatgttgacgaagaagtagcaacgcaattcagcaatgatattaaacttgtctcaagtgggcacgatagcattgatattattatgccaaacatgactaaagggcaggcattaaaacgattgttagataaatgggaaatgtctccttcagagctcatggcctttggagatgcgaataatgataaagatatgctagcgttcgctaagcatagttatgtgatggaaaatagtcatgatgaagaattgttcaatattgcctcggctgtcgctccaagtaatgataagcagggtgttttaacgattatcgaacaagaagtattgaacaagtag

SEQ ID NO: 34239 - DNA, 900 bp, Staphylococcus aureus
atgtttgattcaattagagagactatagattatgccgtagaaaataatatgtcatttgcggatatcatggttaaagaagaaatggaattaagcggtaaatcacgtgatgaagtgcgagcgcaaatgaaacaaaatttagatgtcatgcgagacgcagtaatcaaagggacgacaggtgatggcgttgaaagtgtaacgggctacactggtcatgacgctgctaaactacgtgattataatgaaacacatcatgctttgtctggatatgaaatgattgatgcagtcaaaggtgccattgcaacaaatgaagtcaatgctgcgatgggtattatttgtgcaacgccaacagctggttcctcgggtaccattcccggtgcactttttaaattagaaaaaacacatgatttaacagaagagcaaatgattgatttcttattcacttcagcattgtttgggcgtgtcgtagcaaacaatgcaagtgtagctggtgcaacaggtggctgccaagctgaagttggttcagcatctgcaatggccgcagctgcagcagtagctatattcggaggatcaccagaagcatccgggcacgctatggcattagcgataagtaatttattaggtttagtttgtgacccagtagccggacttgttgaaattccttgtgttatgagaaatgcaattggttcgggtaacgctttaatttcagcagatttagcattagcaggtattgaaagtagaatacctgttgatgaagttattgaagcaatggataaggttggtcgtaaccttcctgcatcattacgtgaaactggattgggtggactagcaggcacaccaactggcgaagcaattaaacgtaaaatctttggcacagctgaagatatggttaaaaataattaa

SEQ ID NO: 34240 - DNA, 927 bp, Staphylococcus aureus
ttggcgaataatcattcagctttgcgtttaaaaggaattatacttgccattgtcggtgcttgtttatggggattaggtggtactgtttctgatttcttgttcaaatataagaatattaatgtcgattggtacgtcactgctcgacttgtagtcagtggtgttttcttacttattatgtacaaaatgatgcaacccaaacgttcaatatttagcgtattccaagatcgacgtatgttaggcaaattacttatcttcagtatactgggcatgttagttgtacaatatgcttatatggcatctattaatacaggtaatgctgcgattgcaacattactacaatacattgcgccagtttatattattatttggtttgtcataagaggcgttgcaaaactaacattatttgatgtgcttgctattatcatgacactattaggaacatttttattattaacgaatggttcattttctaatttagtcgtcaatcctgcaagtttattctggggtattttagctggtgtagcactcgctttttacacaatttatccttcagacctacttaaccgcttcggttcgattctaattgtcgggtgggcaatgcttatttctggtgttgcgatgaatttacgccatccaatttggcacattgatatcactaaatgggacatatcaattatattatttttaatctttggtattatcggtggtaccgcactcgcattttatttctttatcgacagtttacaatacatatcagcgaaagaaacaacattattcggaactgttgaacctgtcgtagccgttatcgcaagcagtctatggttacatgtggcattcaaaccatttcaaatcgtaggcatcattcttattatgattttaattttattactatcacttaaaagacaacctgaagcattagatgaataa

SEQ ID NO: 34241 - DNA, 1155 bp, Staphylococcus aureus
atgatctctaacaaattagcaaatatccctgatagttatttcgggaaaacgatgggacgtaaaatcgaacatggaccattgccattaattaatatggcagttgggatccctgatgggcccacgccacaaggtattattgatcattttcaaaaagcactaactattcctgaaaatcaaaaatatggtgcttttcatggtaaagaagcgttcaagcaagctattgtagatttttatcaaagacaatataatgtgacgttagataaagaagatgaagtatgcattttatatggtacaaaaaatggattagtggcagtaccaacatgtgttatcaatccaggagactatgtattactacctgatccaggctacacggactatttagcaggtgtacttttagctgatggcaagccagttccgcttaatttagaaccgccacattatttgccagattggtccacagttgattcacaaataatagataaaacaaaactcatttatttaacgtatccaaataatccaactggatcgacagctacgaaagaagtttttgatgaagcgatagctaaatttaaaggtacagacactaaaatcgtgcatgattttgcttatggtgctttcggtttcgacgctaaaaatcctagtatacttgcttcggaaaatgggaaagatgttgcgattgaaatttattccttgtctaaaggttataacatgtcaggttttagagtcggttttgcagttggtaataaagatatgattcaagctttgaaaaagtaccaaacgcacacaaatgctgggatgtttggtgcattacaagatgccgcaatatatgctttgaatcattatgatgattttttagaagaacaaagcaatgtatttaaaacacgtcgtgaccgattcgaagccatgcttgcaaaagctgatttgccatttgttcatgctaaaggtggcatatatgtatggttggaaacaccgcctggttatgacagcgagcaatttgagcaatttttagtgcaagagaagtcaatacttgttgctccagggaaaccatttggagagaatggtaatcgttatgtgagaatttcattggcgttagatgaccagaaattagacgaagctgcaataagattaacagaactagcatatttatatgaataa

SEQ ID NO: 34242 - DNA, 1449 bp, Staphylococcus aureus
atgggaagttttttcaataaaatagcacgaaaagaggatccggctatctatcaaaataaagatggtcatttaaagcgtacacttcgggtgcgtgatttcttagctttaggtgtaggaacaattgtatcgacatctatctttacgctacctggcattgttgctgcagaacatgcaggaccggccgttgcgttatcattcttactcgctgctattgttgctggtttagttgcatttacttatgcagaaatggctgccgctatgccatttgcaggttcagcctattcttgggtcaatgtattatttggtgaattttttggatgggttgccggttgggctctattagctgaatattttatcgccgtagcctttgttgcatcaggattctcagcgaatttacgcggacttgtgaaaccaattggcatcgaattacctgcagcattatcaaatccatttggtacgaatggcggttttatcgatattattgctgctatcgttattttattaactgcattattactatcacgtggtatgtcagaagcagcacgtatggaaaacattttagttattttaaaagtattagctattattttatttgtcatcgtaggtttaacagcaataaatgttagtaactatgtgccatttattccagaacacaaagtaactgctacaggtgactttggtggatggcaaggcatatatgctggtgtttcaatgattttcttagcgtatatcggtttcgattctatcgcagcaaactcagcagaagcacttgaccctcaaaagacaatgcctagaggtattcttggttctttaagtgttgctatcgtattatttattgctgtagcacttgtgttagttggtatgttccattactcacaatacgcaaacaatgctgaacctgttggttgggctttacgtcaaagtggtcatggtgttgtagcagctattgttcaagctatctctgttatcggtatgtttacagcattaattggtatgatgttagcaggctcacgtttactttattcatttggacgtgacggcttattaccttcatggttaagccatttaaacgacaaacatttacctaatcgcgcactagttatacttactattattggtgttttaattggttctatgttcccattcgcatttttagcacaattaatttcagcaggtacacttgttgcatttatgttcgtttcattagcaatgtatcgtttgagaaagcgtgaaggtaaagatctaccaattcctgcatttaaattacctttatatcctgtgttaccagcaattacatttgttttagtattgctagtattctggggattaggattcgaagcgaaattatacactttaatttggtttattgttggtatcattctatatttaagttatggacttagacattctaagaaaaatgatgtagctgaataccacccaccaaaataa

SEQ ID NO: 34243 - DNA, 213 bp, Staphylococcus aureus
atgagcttttacgaatatatacaaacatttaaagatgataaaacaccattaggcgaattagcgatttggattaaagaagatgattcattcccaaaacaagagaagctaacagaaaacattttgtcttattttcatcaaatgtccaatatagatcatgagtttttagaaattgtaaaaagatcactttctctgtatgatcaattaaaatcgtaa

SEQ ID NO: 34244 - DNA, 2634 bp, Staphylococcus aureus
ttgaaaaaaagaattgattatttgtcgaataagcagaataagtattcgattagacgttttacagtaggtaccacatcagtaatagtaggggcaactatactatttgggataggcaatcatcaagcacaagcttcagaacaatcgaacgatacaacgcaatcttcgaaaaataatgcaagtgcagattccgaaaaaaacaatatgatagaaacacctcaattaaatacaacggctaatgatacatctgatattagtgcaaacacaaacagtgcgaatgtagatagcacaacaaaaccaatgtctacacaaacgagcaataccactacaacagagccagcttcaacaaatgaaacacctcaaccgacggcaattaaaaatcaagcaactgctgcaaaaatgcaagatcaaactgttcctcaagaagcaaattctcaagtagataataaaacaacgaatgatgctaatagcatagcaacaaacagtgagcttaaaaattctcaaacattagatttaccacaatcatcaccacaaacgatttccaatgcgcaaggaactagtaaaccaagtgttagaacgagagctgtacgtagtttagctgttgctgaaccggtagtaaatgctgctgatgctaaaggtacaaatgtaaatgataaagttacggcaagtaatttcaagttagaaaagactacatttgaccctaatcaaagtggtaacacatttatggcggcaaattttacagtgacagataaagtgaaatcaggggattattttacagcgaagttaccagatagtttaactggtaatggagacgtggattattctaattcaaataatacgatgccaattgcagacattaaaagtacgaatggcgatgttgtagctaaagcaacatatgatatcttgactaagacgtatacatttgtctttacagattatgtaaataataaagaaaatattaacggacaattttcattacctttatttacagaccgagcaaaggcacctaaatcaggaacatatgatgcgaatattaatattgcggatgaaatgtttaataataaaattacttataactatagttcgccaattgcaggaattgataaaccaaatggcgcgaacatttcttctcaaattattggtgtagatacagcttcaggtcaaaacacatacaagcaaacagtatttgttaaccctaagcaacgagttttaggtaatacgtgggtgtatattaaaggctaccaagataaaatcgaagaaagtagcggtaaagtaagtgctacagatacaaaactgagaatttttgaagtgaatgatacatctaaattatcagatagctactatgcagatccaaatgactctaaccttaaagaagtaacagaccaatttaaaaatagaatctattatgagcatccaaatgtagctagtattaaatttggtgatattactaaaacatatgtagtattagtagaagggcattacgacaatacaggtaagaacttaaaaactcaggttattcaagaaaatgttgatcctgtaacaaatagagactacagtattttcggttggaataatgagaatgttgtacgttatggtggtggaagtgctgatggtgattcagcagtaaatccgaaagacccaactccagggccgccggttgacccagaaccaagtccagacccagaaccagaaccaacgccagatccagaaccaagtccagacccagaaccggaaccaagcccagacccggatccggattcggattcagacagtgactcaggctcagacagcgactcaggttcagatagcgactcagaatcagatagcgattcggattcagacagtgattcagattcagacagcgactcagaatcagatagcgattcagaatcagatagcgactcagattcagatagcgattcagattcagatagcgattcagaatcagatagcgattcggattcagacagtgattcagattcagacagcgactcagaatcagatagcgactcagaatcagatagtgagtcagattcagacagtgactcggactcagacagtgattcagactcagatagcgattcagactcagatagcgattcagactcagacagcgattcagattcagacagcgactcagaatcagacagcgactcagactcagatagcgactcagactcagacagcgactcagattcagatagcgattcagactcagacagcgactcagactcagacagcgactcagactcagatagcgattcagactcagacagcgactcagattcagatagcgattcggactcagacagcgattcagattcagacagcgactcagactcggatagcgattcagattcagacagcgactcagactcggatagcgactcggattcagatagtgactccgattcaagagttacaccaccaaataatgaacagaaagcaccatcaaatcctaaaggtgaagtaaaccattctaataaggtatcaaaacaacacaaaactgatgctttaccagaaacaggagataagagcgaaaacacaaatgcaactttatttggtgcaatgatggcattattaggatcattactattgtttagaaaacgcaagcaagatcataaagaaaaagcgtaa

SEQ ID NO: 34245 - DNA, 1431 bp, Staphylococcus aureus
atgaacgaatcaggagataacaaactcagtaaatcttctttaattggactagttataggatccatgattggtggcggtgcgttcaatataatgtctgatatgggcggtaaagccggtggattagccattattattggttggattattacagctataggaatgatttcattagcgttcgtatttcaaaatttaaccaatgaacggccggagctagacggtggtatttatagttatgctcaagcaggatttggcgattttgtaggatttatcagtgcttggggatattggttctcagcgtttttaggcaatgttgcctatgcaacactattgatgtcagcagtaggtaactttttcccgatttttaaaggaggcaacacattaccaagtattattgtcgcctcgttactactctggggtgtccatttcttgattttaaaaggcgttgaaacagcagcatttatcaatagtattgttactgttgcaaagttaatcccgattttacttgtaatcatatgcatgataattgcattcaattttgacacttttaaaacaggctttttcggtatgacgtcagagggtgtattgccatttagttgggcgagcacaatgagccaagttaaaagtacgatgctagtgacagtttgggtgtttatcggtatcgaaggtgcagtaattttttctagtagagctaaaaataaaaaagatgtaggtagtgccacggttataggacttatatcagttttaattatctatttcttattaactgtattagctcaaggcgtgattttgcaaaatcatatttctcaattagattcgccaagtatggcacaggtgcttgcaactattgtaggtggttggggatctacacttgtaaatattggtttaattatttcggtactaggtgcatggttaggatggacattgcttgctggtgaattacctttcattgttgcaaaagatggattatttccaaagtggtttgctaaagaaaataaaaatggagcacctgtaaatgcactgcttattaccaatatattagtacaattatttttaataagtatgctatttacacagagtgcgtatcaatttgcattttcactagcatcaagtgctattttatacccttacatgttcagtgcattttaccaagttaaatacactttagagcatcgacagcaagcaactactaaacaatggacgattggcatcatagcctcaatttatgctatatggcttatatatgcagcaggtatcaattacttattattgacgatgttactttatattccagctcttcttgtttattcaatcgttcaaaagaataatcagacacgtttgattaaatcagactatattctttttatgattattatcgtacttgcagttatcggattaattaagttattgatgggaacgataaatgttttttaa

SEQ ID NO: 34246 - DNA, 1359 bp, Staphylococcus aureus
atgattaaattatttgattactttaacgatcattcacgaaagttatatgagtcttttaaagccagtaagttggaagaagatttaacaattgtactcaatgacaatggctttttaccggacgatgttatatcaccgtatcaattttttgcagataatcataatacagaaaatatgaaaccacgattttttaatcaggttactgtaccagctttttgggaaattaaaggtaacaacaattcggctacaattaatgatatgggacgtctacgaggcaaaatattttatcaaagtggagagcgccctagaattgttagtcgtgtcgaatggtttgatgaccaacaacgtgtccgatttgtcgattattattctaagaatggtattaaatttgcacaaactgtttacgatttaaatcgtaaagcgatcttgaagaaatatatgacagcagaaggtaaagaagtgatttatgaaaattttgtaacatctgatgtcatattggattggcaagggaagtcttactttttcccttcaaagctcgcattcgtattattttttatcaagcaacttgaaattacggaacatcatttcgttattaactcactagccctaccattttcagtgttatataatttgccatcaaaaggtagtgatgttttggtatggcaagaacactgtaatggtaatgtcccgggaaatatgcaattgatgtgtaaaggtgatatgaaacgacattgtaatattattattccagataaaaacgaatatgaaacgatgctcaatatagcagacgcaaaggttcaatctcgtattttacaaggcggatatctatataactatcgtagtcgtaatagatatactaaagaaattgtaatattaactaactcggatcaacttcgtaacatcaaggtattggttgaaactttaccagattttaattttcacatcgctgctattacagagatgtctgataagctaatgcaacttgatcaatatgctaatgtgcacttatacccatctattaatattgacagggtaaatgaactataccagttatgtgatatttatcttgatatcaatgagggtaatgaaattttaaatgcggtggaacaagcgtttgactatgagttgttgattttaggttatcgtcaaaccgcacaccatgctaaagtaacattatcagagcacttatttgagcataatgatgagataacaatggaaagtaaagaccaattaatacaaatgttagaaagtttgaaagatcaacaacagtttcgagatgctttattagcacaaaaagcacatgcacacgaaatctcgcgtgaacaattcgagcaagtttttaaacaggcgctcgaaagctaa

SEQ ID NO: 34247 - DNA, 1239 bp, Staphylococcus aureus
ttgcaattttttaactttttgcttttttatcctgtatttatgtctatttactggattgtcggttcaatttatttctattttaccagagaaattagatattcattgaacaagaagcctgacataaatgtggatgaattagaaggcattacatttttacttgcctgttataacgaaagtgaaacgattgaagatacgttgtctaatgttcttgcactcaaatacgagaagaaagaaattattatcattaatgatggaagttcagataatacagcagaactcatctataaaatcaaagaaaataatgactttattttcgtcgatttacaagaaaacagaggtaaagccaacgcactcaatcaaggcattaaacaggcttcatatgattatgtaatgtgcttggatgcagatactatcgttgatcaagatgcaccatattatatgattgagaatttcaaacatgatccaaaacttggtgcagttacaggtaatcctagaattcgaaataagagttctattttaggtaaaattcaaacgatagaatatgcaagtttaattggctgtattaagcgaagtcagacacttgctggcgcagtcaatactatttcgggtgtcttcactctatttaaaaaaagtgcagttgtcgacgttggctactgggatactgatatgattaccgaagatattgcagtttcttggaaattgcatttacgtggatatcgtattaagtatgaaccgcttgccatgtgttggatgttggttccagaaacattgggaggtctttggaagcaacgcgtgagatgggctcaagggggacacgaagtattactacgagacttttttagcacaatgaaaacgaaaaggtttcctttatatattttgatgtttgagcaaatcatctcaattttatgggtatatatagtgcttctatatttaggctatttgttcataacagcaaacttcttagactatacatttatgacatatagtttttcaatatttctactatcatcatttactatgacttttataaacgttattcaatttacagtcgcactctttattgatagtcgctacgagaaaaagaatatggctggactcatatttgtaagttggtatccgacagtatactggattattaacgcagcagtagttcttgtcgcatttccaaaagcattaaaacgtaagaaaggtggttacgcaacatggtcaagcccagacagagggaatacccaacgctaa

SEQ ID NO: 34248 - DNA, 615 bp, Staphylococcus aureus
atgttaagaatcgccatagccaaaggacgtctaatggatagtttaattaactatttagatgtaattgaatatacgacattatcagaaacattaaaaaatagagaacgccaattattattaagtgtagataatattgaatgcattttagtaaaaggaagtgacgtgccaatctatgtggaacaaggaatggccgacataggcattgttggtagcgacatattagatgagcgccaatataatgttaataatttgttgaatatgccttttggagcatgtcattttgcggttgcagcgaaacctgaaacgaccaattatcgtaaaatcgcaacgagttatgttcatactgctgaaacatattttaaatcaaaaggtattgatgtcgaattgattaaattgaatggttctgttgaattagcttgtgtcgtagatatggtagacggaattgtcgacatcgttcaaacaggtactacgctaaaagcgaacggactggttgaaaagcaacatattagtgatatcaatgcaagattaataactaataaagcagcttattttaaaaaatcacaattaatagagcaatttattcgctctttggaggtgtctattgccaatgcttaa

SEQ ID NO: 34249 - DNA, 516 bp, Staphylococcus aureus
atgactaactttacttttgatggtgcacacagtagtttagaattccaaattaaacatttaatggtttctaaagtgaaaggttcatttgatcaatttgatgtagctgttgaaggagatattaatgacttcagtactttgaaagctactgcaacaattattccaagctcaattaacactaaaaacgaagcacgtgataaccacttaaaatctggtgatttctttggtactgatgaatttgataaaatcacgtttgaaacaaaatcagttactgaaaacaaagttgttggtgatttaacaattaaaggtatcactaacgaagaaacattcgacgttgaattcaacggagtaagtaagaatcctatggatggttctcaagtaacaggtgttattgttactggtacaatcaatagagaaaactacggcattaactttaaccaagcacttgaaactggtggcgtaatgctaggcaaagatgttaaattcgaagcatcagctgaattctcaatctcagaataa

SEQ ID NO: 34250 - DNA, 1380 bp, Staphylococcus aureus
atggatttagatacaattacgagtatttcaacaccaatgggtgaaggggcaattggaattgttcgattgtctggaccgcaagccgttgaaattgctgacaaattatataaaggaaaacatcttttaaatgatgttccatcacatacgattaattacggtcatattattgatccagagtctaaagaagtggttgaagaagttatggtgtctgtgttaagagcgccaaaaacatttacacgcgaagatattatagaaattaattgtcatggtggtattttaacgattaatagagtgctggaacttactatgacatatggcgctagaatggctgagccaggtgaatttacaaaacgtgcctttttaaatggtcgtattgatttatctcaagctgaagcagttatggactttattcgctcgaagacagatagagcttctaaagttgcgatgaatcaaattgaaggtcgtctaagtgacttaatcaaaaaacaacgtcaatctatattagagatactcgctcaagtggaagtgaatattgattatcctgaatacgatgatgttgaagatgcgactactgaatttcttttagagcagtctaaagaaatcaaacaggaaattaatcgtttattagataccggtgcgcagggcaaaattatgcgtgaaggtttatctacagttattgttggtaaaccaaacgtaggtaaatcatcgatgttaaataatttaatacaagataataaagcgattgtaactgaggtagcaggtactacaagagatgtcttagaagagtacgtcaatgttcgtagcgtgccattaagattagttgatactgctggtatacgcgagacagaagatatagtagagaagattggtgttgaacgctctagaaaggctcttagccaagcagacttaattttatttgtattaaacaataacgaagcattgactcaagaagattacacattatatgaagtggttaaaaatgaagatgtaatcgtaattgttaataaaatggatttagagcaaaacatagatattaatgaagttaaagatatgataggtgatacgccattaattcaaacttcaatgttaaaacaagaaggtattgatgaattagaaatacaaattcgagatttgttctttggtggagaagtacaaaatcaagatatgacttatgtttctaattcaagacatatttcattattaaaacaagcaagacaaacgatacaagatgcgattgatgcagcagaatctggtgtgcctatggatatggtacaaattgatttaactagaacttgggaaatattaggagaaattattggtgagactgcaagtgatgaactcatcgatcagttattcagtcaattctgcttaggtaaatag

SEQ ID NO: 34251 - DNA, 825 bp, Staphylococcus epidermidis
atgaagtgtttgttcaaaatgctatcaatcataataataatgttaagtactttcaccttattcatcagtccgagtacatatgcaaatgaagatgaaaattggactaaaataaaaaatcgaggagaactaagagttggattgtcagctgattatgcacctttagaatttgaaaagacgatacatggtaaaactgaatatgcgggtgtagatatagaattagctaaaaagattgcgaaagataatcatctaaagctaaaaattgtaaacatgcaatttgatagcttattaggtgcacttaagaccggtaaaatcgatattattatctccggtatgacaacaactcccgaacgaaaaaaagaagtggattttacaaaaccttacatgattacaaataatgtgatgatgattaaaaaagatgatgcaaaacgttatcaaaacatcaaagattttgaaggcaaaaaaattgctgcgcaaaaagggacagatcaagaaaaaattgcacaaactgagattgaagatagtaaaatttcttcactcaatagattacctgaagctatattatctttaaaaagtggaaaagtagcaggtgtagttgttgaaaaaccagtaggtgaggcatatttaaaacaaaattcagaactaacattttcaaagattagatttaatgaagaagagaaacaaacatgtatagctgttcctaagaactctcctgtacttttagataagctaaatcaaacgattgataatgtacaacgacaaaatttaattgatcaatacatgacgaaagcagccgaagatatgcaagatgatgggaattttatttct

SEQ ID NO: 34252 - DNA, 854 bp, Staphylococcus epidermidis
atggggctgaataaagaagctataaaaattggttttgcctatgtcggcattgttgtcggcgcaggattttcaacaggacaagaagtgatgcaatttttcacaccatttggtttatggtcatatattggagtgattatctcaggatttatacttggattcataggaagacaagtagctaagataggtactgcatttgaagcgaaaaatcacgagtccacattgcaatatgtgtttggaaaaaaatttagtaaagtttttgattatattcttgtctttttcttatttggtatagctgtcactatgatagccggatcaggttctacttttgagcaaagttttggaattcctacttggttaggcgcattaatcatgacagttttgatttacttaacattattattagattttaataaaattgtaagagctttaggactagttacaccatttttaatcataatggttattcttattgctgtgttttacctatttacaggtagtatttcattaggggaagtaaacagtgctatgcctgacacgagtgcttggaaaggtatcttttggggattagtatacggcggattagcctttgctgtaggatttagtacgatagtagctatcggcggtgatgcgtctaagcgaagagtttcaggtgcaggagcaatgtttggtggtgtgctatacgctatcctacttgcgttaattaacttctcgcttcaaacagaatattcaaaaattaaagatgtggcaatacctacgcttaacctagcgaaaggtatacatccatggttaggtcttgtactcacagtcattatgctagctgtgatgtacaacacgattttaggtctttgttattc

SEQ ID NO: 34253 - DNA, 4899 bp, Staphylococcus epidermidis
atgaaaaagagaagacaaggaccaattaacaagagagtggattttctatccaacaaggtaaacaagtactcgattaggaagttcacagtaggtacagcttcaatactcgtgggtgctacgttaatgtttggtgccgcagacaatgaggctaaagcggctgaagacaatcaattagaatcagcttcaaaagaagaacagaaaggtagtcgtgataatgaaaactcaaaacttaatcaagtcgatttagacaacggatcacatagttctgagaaaacaacaaatgtaaacaatgcaactgaagtaaaaaaagttgaagcaccaacgacaagtgacgtatctaagcctaaagctaatgaagcagtagtgacgaacgagtcaactaaaccaaaaacaacagaagcaccaactgttaatgaggaatcaatagctgaaacacccaaaacctcaactacacaacaagattcgactgagaagaataatccatctttaaaagataatttaaattcatcctcaacgacatctaaagaaagtaaaacagacgaacattctactaagcaagctcaaatgtctactaataaatcaaatttagacacaaatgactctccaactcaaagtgagaaaacttcatcacaagcaaataacgacagtacagataatcagtcagcaccttctaaacaattagattcaaaaccatcagaacaaaaagtatataaaacaaaatttaatgatgaacctactcaagatgttgaatacacgacaactaaattaaaaacaccttctatttcaacagatagttcagtcaatgataagcaagattacacacgaagtgctgtagctagtttaggtgttgattctaatgaaacagaagcaattacaaatgccgttagagataatttagatttaaaaactgcatctagagaacaaatcaatgaagcaatcattgctgaagcactaaaaaaagacttttctaaccctgattatggtgtcgatacgccattagctctgaacacatctcaatcaaaaacttcaccacataagagtgcaagtccacgcatgaatttaatgagtttagctgctgagcctaatagtggtaaaaatgtgaatgataaagttaaaatcacaaaccctacgctttcacttaataagagtaataatcacgctaataacgtaatatggccaacaagtaacgaacaatttaatttaaaagcaaattatgaattagatgacagcataaaagagggagatacttttactattaagtatggtcagtatattagaccgggtggtttagaacttcctgcaataaaaactcaactacgtagtaaggatggctctattgtagctaatggtgtatatgataaaactacaaatacgacgacttatacatttactaactatgttgatcaatatcaaaatattacaggtagttttgatttaattgcgacgcctaagagggaaacagcaattaaggataatcagaattatcctatggaagtgacgattgctaacgaagtagtcaaaaaagacttcattgtggattatggtaataaaaaggacaatacaactacagcagcggtagcaaatgtggataatgtaaataataaacataacgaagttgtttatctaaaccaaaataaccaaaaccctaaatatgctaaatatttctcaacagtaaaaaatggtaaatttataccaggtgaagtgaaagtttacgaagtgacggataccaatgcgatggtagatagcttcaatcctgatttaaatagttctaatgtaaaagatgtgacaagtcaatttgcacctaaagtaagtgcagatggtactagagttgatatcaattttgctagaagtatggcaaatggtaaaaagtatattgtaactcaagcagtgagaccaacgggaactggaaatgtttataccgaatattggttaacaagagatggtactaccaatacaaatgatttttatcgtggaacgaagtctacaacggtgacttatctcaatggttcttcaacagcacagggggataatcctacatatagtctaggtgactatgtatggttagataaaaataaaaacggtgttcaagatgatgatgagaaaggtttagcaggtgtttatgttactcttaaagacagtaacaatagagaattacaacgtgtaactactgatcaatctggacattatcaatttgataatttacaaaatggaacgtacacagtcgagtttgcgattcctgataattatacgccatctcccgcaaataattctacaaatgatgcaatagattcagatggtgaacgtgatggtacacgtaaagtagttgttgccaaaggaacaattaataatgctgataatatgactgtagatactggcttttatttaactcctaaatacaatgtcggagattatgtatgggaagatacaaataaagatggtatccaagatgacaatgaaaagggaatttcaaatgtcaaagtgacgttaaaaaataaaaatggagataccattgggacaacgacaacagattcaaatggtaaatatgaattcacaggtttagagaacggggattacacaatagaatttgagacgccggaaggctacacaccgactaaacaaaactcgggaagtgacgaaggtaaagattcaaatggtacgaaaacaacagtcacagtcaaagatgcagataataaaacaatagactcaggtttctacaagccaatatataacttaggtgactatgtatgggaagatacaaataaagatggtattcaagacgacagtgaaaaagggatttctggtgttaaagtgacgttaaaagataaaaatggaaatgccattgggacaacgacaacagacgcaagtggtcattatcaatttaaaggattagaaaatggaagctacacagttgagtttgagacaccatcaggttatacaccgacaaaagcgaattcaggtcaagatataactgtagattccaacggtataacaacaacaggtatcattaacggagctgataatctcacaattgatagtggtttctacaaaacaccaaaatatagtgtcggagattatgtatgggaagatacaaataaagatggtatccaagatgacaatgaaaaaggaatttctggtgttaaagtaacgttaaaggatgaaaaaggaaatataattagcactacaacaactgatgaaaatgggaagtatcaatttgataatttagatagtggtaattacattattcattttgagaaaccggaaggcatgactcaaactacagcaaattctggaaatgatgatgaaaaagatgctgatggggaagatgttcgtgtaacgattactgatcatgatgactttagtatagataatggttattttgacgatgattcagacagtgactcagacgcagatagtgattcagactccgacagtgactcggacgcagacagcgattctgacgcagacagtaactcagattcagatagtgattctgactcagacagcgactcggattctgatagtgattcggattccgattcagacagtgactcagacgcagatagtgattctgacgcagacagtgactcagattcagatagtgattctgactcagacagcgactcggattctgatagtgattcggattccgattcagacagtgactcagacgcagatagtgattcggacgcagacagtgactcagacgcagatagtgattcggatgcagacagcgactcggattcagatagtgattcggatgcagacagcgactcggattcagatagtgattcggatgcagacagcgactcggattctgacagtgattcggacgcagacagtgactcagattcagacagtgattcggacgcagacagcgactcggattctgatagtgattcggacgcagacagtgactcagattcagacagtgactcggattcagacagcgattcggattccgattcagacagtgactcggattcagacagtgactcagactccgacagtgattccgattcagatagcgactcagacgcagatagtgattccgattcagatagcgactccgacgcagatagtgattcggacgcagacagtgactcagattcatacagtgactcagattcagacagtgattcggacgcagacagtgactccgactccgacagcgattcagactcagatagtgactcagacgcagacagtgactcggactcagatagtgattcagatgcagaaagcgattcagactcagatagcgactccgattcagacagcgactccgactcagacagtgattccgattcagacagcgattcggactcagatagtgactcagacgcagatagtgattccgattcagatagcgactccgattctgatagtgactccgattcagatagcgactccgattcagatagtgattcggacgcagacagtgactcgtactcagatagtgactccgattcagacagtgattcggattccgatagcgattcggattccgatagtgactcggattcagacagtgattcggactcagacagcgactccgattcagatagtgattccgactcagacagcgattcggattccgatagtgactcggattcagacagtgattcggactcagacagcgattccgattccgatagtgactcggattcagacagtgattcggactcagacagcgattccgattcagacagtgactcggactcagatagtgactccgattcagacagcgactcggattctgataaaaatgcaaaagataaattacctgatacaggagcaaatgaagatcatgattctaaaggcacattacttggaactttatttgcaggtttaggagcattattattaggaagacgtcgtaaaaaagataataaagaaaaa

SEQ ID NO: 34254 - DNA, 333 bp, Staphylococcus epidermidis
gaacagattaagcaacaaattaaagaaaatgttttgaaaggttatgtttcccctggtgaacatcttccatcaatgcgtgagttagctaaagatttaaaagtgagtttaataacgacaaaacgagcatatgaagatttggaaaaagatggatttgtaacaactattagaggtaaaggaacctttgtaaaggaacaagataattctattctaaaggaaaagcaattttttgttattgaaaatttagctcactctatgtcaaaagaagccaaaacaattggaatgcctttagaggaattaatagaaatattgactatgatttatgaggaggacgac

SEQ ID NO: 34255 - DNA, 1068 bp, Staphylococcus epidermidis
atgaatttaactactcaaatcacaaaaatgttaggtattaaatatcctattatacaagctggaatggcaggaagtactacgccagaactagtttctactgttagtaaacaaggaggcttaggtatgataggagcaggttattttgattcacatcaactttcaaaagagattttagaagttcaaaaactgacacaagctccttttgcagtaaatctatttacccccaatgatattaagtacgataaaaaacaaattgagcagatgaatacaaaactcaaaccatatagagaagcgcttggattatctactcccaaaaatagtacggttaaagaaaaagaaaagtttgaagatgcaatagaagttattgaatcattaaaagtacctatcattgcttttacttttggtattccaaatcaaaatattattaaacgacttcataatgcaggaaaaattttaattggaactgcaacatcagtcgaagaagcagttgaaaatgaaaatgccggtatggatatagttgtagcccagggctatgaagcaggtggccacagaggatcatttacaacaatcaatggtgaatttccattggtcggtactttatctttagtaccacaaattgttgataatgtgtctataccagttattgcagctggtggtattatggatggaagaggtttagtagctagtttagctttgggggctggagcagcgcaattaggtactgcttatttaacaacgaatgaaagtggcgctgatgacaaaatcaaaaatgaaattattgaaagctctgaaacagatacaatactgacaaatgtatttagtggcaaattggctcgcggaattatgaatgaatttgtacacaatatgaatttatattcaaaacaggtgcctccttatcctttacaaaatcaattaacaacgcaaatacgaaaatctgctttggagaaaggatatactgagtggacccatatttggagtggacaaagtactagattagctgacacggtcgatgcagctcaattaacaaaaaatattattaatgatgcagtcaaaattatcaataataag

SEQ ID NO: 34256 - DNA, 1069 bp, Staphylococcus epidermidis
atgaagaaaaataaacttgaattagtgtatttacgtgcgtttatttgtgtcataatcatcgtgacacacttactaacgcaaatcactttagaaaatgaacagatgtctgatagttcactcatattgcaatattatatacgcaatatttttattttcggcacccctagttttataatattgtctcaattattaacaacattaaattacgaatcagtaactataaattatcttttttcaagatttaagtatatttttattccatatcttttaatcggcttgttctatagttatagtgaatcacttatcaccgcttcttcttttaaaaagcagtttatcgaaaatgttgttttaggacaatggtatggctatttcattatcataattatgcagttctttgttctatcttatatcatttacaaaattaattttagattgttcaatagtaaaattttgctgcttttagcatttatagtccaacaatcttatctacattattttttgaataatgacacttttcatcaattcatgactcattattatccattaagcgaaaatacaatgatattaggatggatattctactttttcttaggtggttacattggctataattatgaaaaaatattatctttcttagaaaaatatttaattatagttattatgttaactttaggcgcatatgttttatttatcgctgtttccggtagtgattattggaatgtcacaagctttacttatacgttaacattatataatagtgtcatgttcttcttattactaggagtctgtatgcactttaaaactatgttattaaatactattaaagctattagtgcattttcctttttcatttatttgttgcacccgaattatcttagattctctttttgcttacaccaacatatttgaagataatacaattgttttcttggcgatttcacttttaatgattctaggaatttgtataggcgtcggaatgatgttaagagagttttatatattcagatttgtaattggaaaacaaccgtacaagttacaatttgaccaataccagcctaactggaattaa

SEQ ID NO: 34257 - DNA, 270 bp, Staphylococcus epidermidis
atgaagattaacatatttggatataatatcttcgccaagggcggaacatcaagaagtaatattaacttagtgaaaagcttattagaaattggacatgaggtacactactttaattatcaggactataataaaagtgatatcacaaaactaattatttacgaaggtttgagcacaaagcatcttcatattcatcaatttaatagtggaaaagaacttgctcatggagacctacttataattactagagaaacctttttaatcatgcatatc

SEQ ID NO: 34258 - DNA, 1245 bp, Staphylococcus epidermidis
atgaggtcttttatgttaaaggaggtttttaaaatgacgaggtgcaggtcaccaacctatataactattaaacaaattaaaaatgaaaggaatcaaaatatgaaaaataagagaactttattgaaagtaatcacatcgactagtgttgctttacttttaagtaatttagtgatgaattcagtcgttagagctgaatcaaacacttcagtttcttcttatcaaacaacaatacaaaaatatatcgttaataaaaacaaattggttaaagaaattaaaataaataaaggagataaagttcaatttttaatcaaaagtaaagtattaaacaatgaaccaattactagtattaaattcagtgatgatttcgaaaatgtgtttgatattgataaaaatgtagaagtctttatccctaaagatgaaactactgttcatgattcattaaatttcaaagaagattttaacaatgtgacaaaacagggtgtactaaaagtaaacgaagataatgaaagtttcgaatggatagcaaataatcctaatgaatttagtggtaaaacgctttatttagttgtaaaaggaacaactaaaaaagatgctgattataaaaaatatattagtgataaacttacatcaatttctgatgtagctaaagaacaaattaattcacaagagctcacgtctaacagtgtagatgtgattattaagccagactcaaacaagaaccttgtatttatacaaaatgctttagcacatcaacacattagtttagatttattgaatgataagaaaaataaaaaagcaacaaatataaatcaaatacaacaaacttctagtaagtctaaagatattcaaaattcaaacaacaaggtaagtaattcgaataataaaataacattgaatattacaagtgatgagtatgaaaaagaaaaaaagaatagtaagcaagttcaagattcaaataaattagtagataaagaacaaaaaaatactcaaaatactaaagatttaaaaaaagaaaatactaaagattcatcaaaaaataatttagactccaaagataaagaaaatataaaaaaagacaataacataaagaaagcaactgacaaacctactaaagaaaaactattaccaaatacaggtatgacagataatattacatacgtcatggtagggttaattattagtttaggtagttctatattgttattaaaagttgcatctaaacactataaaaatagaaagaaatgt

SEQ ID NO: 34259 - DNA, 1743 bp, Staphylococcus epidermidis
atggaggatgctgtggtggagatggatgctgttaaatacttaaataaattgaatttagataacattgagttaacaaaatatttgttttttactggtaaaggcggcgtaggtaaaacgacgatatcaagttttattgctttaaacttagcagagaatggaaagaaagtagctttagtaagtactgatccagctagtaatttacaagatgtatttcaaatggaattatctaataaattaactaaatatcaacctatacctaatctctctatagccaattttgacccgattgttgctgcagacgattataaagcacaatctatagaaccttatgagggtattctaccagaagatgtgctttctgaaatgaaagaacagttaagtggttcatgtacagttgaagtagcagcatttaatgaatttacaaattttttatccgataaaactttagaacaagaatttgatttcattatatttgatacagctcccacaggtcacaccttgagaatgcttgaattaccttctgcatggacagattatttaaatacaacgagtaatgacgcttcttgcttaggtcaattatcaggtttaaatgaaaatagagttaaatataattcagcacttgaaaaactacgtaaccaagatgatacgaccatgatgttagttgcgagacctactcactcttctatatatgaaattcaaagagcgcaacaagaattacaacaactgtcaatttctaaattcaaagtaatcattaacaactatatagaagaaagtcacggtttaatttcgagtcagatgaaatcagaacaagataaaaacattaatcattttactgaatggttaaataacaatcatgcttattacgttccatataaaaatcagaaagaagaaggtatagaaagtttaactaatctattaaatgatgataacttaattgaaaatgatgactttattgttgaagatcatccgcaattcaataaattaatcgatgaaattgaaaatagtaaagttcaatatttatttacaatgggaaaaggtggcgttggtaaaacgacagtagcaacgcaattagctacaacgttatctaataaaggatatcgtgttcttttagcaactactgaccctactaaagaaattaatgttgaaactacaagtaatttaaatactgcttatattgatgaagaacaagcattagaaaagtataaaaaagaagtactagccacagtgaatgatgatacaccacaagacgatattgattatattatggaagatttaaaatcaccttgtacagaagaaatagcatttttcaaagcctttagtgacattatggagaatcaagacgacatggattacgtcattgtagatacagctcctacaggccataccttgctgttacttgattctagtgaaaatcatcatagagaattaaagaaaaaatcaactcaaactaccagtaatgttgaaacattattacccaaaattcaaaataaaaatttaacacagatgataattgtaacattagcagaaaaaacaccttatttagaatctaaacgtttagtagaagatttaaatagagctaatataggccataattggtgggttgttaatcaatcgttagttacgctaaatcaacgtgatgacctttttagtaacaaaaaagaagatgaatcattttggataaacaagattaaaaatgaaagtcttgataattactttgtcataccttatcgagtattagaatat

SEQ ID NO: 34260 - DNA, 2010 bp, Staphylococcus epidermidis
atgtttacaaacatagatacgaaaaatcatacagttgagcaaacgatttatattaaccctcttcgttattcagccaaggaaacaaatgtaaatatttcagggaatggtgatgaaggttcaacaattatagacgatagcacaataattaaagtttataaggttggagataatcaaaatttaccagatagtaacagaatttatgattacagtgaatatgaagatgtcacaaatgatgattatgcccaattaggaaataataatgatgtgaatattaattttggtaatatagattcaccatatattattaaagttattagtaaatatgaccctaataaggatgattacacgactatacagcaaactgtgacaatgcagacgactataaatgagtatacttttgaagcatcctatgataatacaattgctttctctacaagttcaggtcaaggacaaggtgacttgcctcctgaaaaaacttataaaatcggagattacgtatgggaagatgtagataaagatggtattcaaaatacaaatgataatgaaaaaccgcttagtaatgtattggtaactttgacgtatcctgatggaacttcaaaatcagtcagaacagatgaagatgggaaatatcaatttgatggattgaaaaacggattgacttataaaattacattcgaaacacctgaaggatatacgccgacgcttaaacattcaggaacaaatcctgcactagactcagaaggtaattctgtatgggtaactattaatggacaagacgatatgacgattgatagtggattttatcaaacacctaaatacagcttagggaactatgtatggtatgacactaataaagatggtattcaaggtgatgatgaaaaaggaatctctggagttaaagtgacgttaaaagatgaaaacggaaatatcattagtacaactacaaccgatgaaaatggaaagtatcaatttgataatttaaatagtggtaattatattgttcattttgataaaccttcaggtatgactcaaacaacaacagattctggtgatgatgacgaacaggatgctgatggggaagaagttcatgtaacaattactgatcatgatgactttagtatagataacggatactatgatgacgaatcggattccgatagcgactcggattcagacagcgactcagattccgatagtgattcagactccgatagcgactcggattcagacagcgactcagattcagacagcgactcagactcagacagtgattcagactcagacagcgactcagattccgatagtgattcagactccgatagcgactcggattcagacagcgactcagattcagacagcgactcggattcagacagcgactcggattctgatagcgactcggattcagacagcgactcagactcagacagtgattcagattcagacagcgactcagattccgatagtgattcagactcagacagcgactcagattctgatagtgattcagactcagacagtgattcagattcagacagcgactcagattccgatagtgattcagactcagacagcgactcagattccgatagtgattcagactcagacagcgactcagattctgatagtgattcagactcagacagtgattcagattccgatagtgattcagactccgatagcgactcagactcggatagtgactcagattctgatagtgattcagactcagacagtgattcggattccgatagtgattcagactcagacagcgactcagattctgatagtgattcagactcaggcagtgattcggattccgatagtgattcagactcagacaacgactcagatttaggcaatagctcagataagagtacaaaagataaattacctgatacaggagctaatgaagattatggctctaaaggcacgttacttggaactctgtttgcaggtttaggagcgttattattagggaaacgtcgcaaaaatagaaaaaataaaaat

SEQ ID NO: 34261 - DNA, 300 bp, Staphylococcus epidermidis
atgtcagaagaaatgaacgaccaaatgcaagttcgtcgtcaaaaattacaagaattaattgatttagggattgatccttttggtcatcgattcaatcgctcatctacttcaagtgagttaaaagaacagtgggaccaattctctaaggaagaattgcatgacaaagaagacgaaagccacgtgtcaattgcaggtcgtcttatgactaaacgtggtaaaggtaaagcgggatttgcacatattctagacttgaaaggtcagattcacatttatgtaagacgagatcaagttggagatgat

SEQ ID NO: 34262 - DNA, 738 bp, Staphylococcus epidermidis
atgacagtaaaagttgaacatcttacagggggatatggaaaaaaacctgtaattaaagatttgaattttgaattagaaaaaggtgaaattgtaggtttaataggtctaaatggtgctgggaaaagtactacaattaaacatatgctaggattgattaatccaatggaaggcaaattatcaatttcaaatattaaaattaatgaagatattgaaaattatagaagaaagttatcttatatacctgaatcaccagtcatctatgatgaactaactttagaggagcacattgaaatgacggcgatggcttatcaattaagtagagaagaggctatgcgtagagctaaaccattacttaaagtttttagattagaaaatgaacttaaagtatttccaagtcatttttctaaagggatgaaacaaaaagtgatgattatttgtgcatttatagttgatccagaattatatattattgacgaacctttcctcggtttagatcctttggggatacagtctatgttagatttaatggtagaaaaaagaaatgaaaatcgaacagtattaatgagtacacatattttggctacagccgaaaggtattgtgatagatttattattttagataaaggtgaaattgttgcatttggtaatcttgatgagttacgggaacaaacaggattaaaagataaaactttagatgatatttacatccatgtcacacaaggtagtagtgcttatgaa

SEQ ID NO: 34263 - DNA, 625 bp, Staphylococcus epidermidis
ttgcactttacacaacgtgaacaagacaaattgatgatagttgtagctgctgaggttgcacgtcgtagaaaagcaagaggacttaaacttaatcatcctgaagcacttgctttaatcagtgatgaattattagaaggcgcgcgtgatggtaaaacggtagctgaacttatgagctatggaaaaacaattttaaacgaggaagatgtcatggatggcgtagctaacatgattacagaacttgaaattgaagcaacttttccagatggtactaagttaataacagtccatcacccaatcgtttaaggaggctatatcaatgattcctggtgaaattattgttaaaaatactgaaatagaagtcaataaacatcatcccgaaacggtgattgaagtgaaaaatacgggcgatagacctatacaagtaggttcacatttccactttttcgaagcaaataaggcattagaatttgatcgtgagaaagcatatggtaaacatttggatattcctgcaggagctgcagtgagatttgaacctggagatgaaaaaaaagtacaacttgtcgaatattctggacgacgtaaaatttatggattccgtggtttagtcgatggcgatattgacgaa

SEQ ID NO: 34264 - DNA, 777 bp, Staphylococcus epidermidis
ttgattcaaattcgaaatttagataaaacgatagacaataaacctattttaaaagatattagcgtagatattaaaaagggaaaattgacttcactcataggtcctaacggtgctggtaagagtacattattatctgctatcagtcgcttatttagttatgagaacggttcaattttgattgaagacaaagaaatttcagaatataaaactgacgatttagctaaaaaattaagtattttaaaacaatctaatcacactgatatgaacataactatcgagcaactagttaaatttggtcgttttccatattcaaaaggtcgaatgaagcaagaagactatgacaaagtggaatatgctcttgacttattacagcttaatgaaattaaacatcgtaatattaaaacactatctggaggtcagcgacaacgtgcatatattgctatgactatagcacaagatactgattatatattattagacgagcctttaaataatttagatatgaaacattcagtacagattatgcaaacgttacgagatttatgtcgtcagttaaataaaacaatcattatcgtattacatgatatcaactttgcttcttgttattcagacgacatcattgcgcttaaacaaggtgagctagttaaagctgatgataaagataatgttattcagtctgacattttaaaaagtttatatgaaatggaagtacgtatagaggagataaggggacaacgtatttgtctatattatgatgaaactacttttgactcagtt

SEQ ID NO: 34265 - DNA, 1098 bp, Staphylococcus epidermidis
atgcttgaaaaacgttatcttgtactggaagatggctcttattacgaaggatatcgcttagggtcagatgacttatctataggcgaaattgtattcaacactgctatgacggggtaccaagaaacaatctctgacccgtcttacacaggtcaaatcataacttttacgtacccactaattggaaactatggtattaatcgcgatgattttgaatcattaacacctaaattaaatggggtagtagtaaaggaagcaagtacacaccctagtaactttagacaccaaaaaactttacacgaaacacttgctcaatatcatattcctggtatatcgggggtagatactagaagtattactcgtaaaattagaaattatggtgttttaagagctggatttacagataataaagataacattcaggaacttgttgaacagttgaaaactgctgaattacctagagatgaagttcaaacggtttctacaaaaacaccatatgtatcaacaggttccgatttaagcgtcgttttactcgactttggtaaaaagcaaaatatcgttcgtgaattaaatttacgtggttgcaacgtcacagttgtaccatatgatacgtcagctgaagagattttaggcatgtctccagatggtgtcatgctatcaaacggacctggtgatccagacgaagttgacgttgctttagatatgatcagaggcatattaggaaagataccattctttggtatctgccttggtcatcaactttttgcattatcacaaggcgcaacttcattcaaaatgaaatttggacatcgtggtgcgaaccatcccgttaaagatttaagaacaggtaaaatagatatcacgagccaaaatcacggctattctattgattgtgactcgctaaaaaatactgaccttgaagttacacacattgctttaaacgatggtactgttgaaggactaagacataaagaacttccagcgttttcagtccaatatcatcctgaagcaagaccaggtccaagtgattctaattacttatttgatgagttcatagcaatgatgaaggatttcaaagaaaaggagcgtcaaatcaatgcc

SEQ ID NO: 34266 - DNA, 2994 bp, Staphylococcus epidermidis
cagctcactcaatcaacgttaaaattaaacgataaaatgaaattattgagagataagcttaaaaccttagtaaatcctgttaaagcaagtttaaattatagaaacgctgattataatttaaaacgtcaatttaacaaagctttaaaagaagctaaaggcatattaaataaaaatagcggtccaaatgtcaatatcaatgacattcaacatcttttaacacaaatagataatgctaaagaccaattaaatggtgaacgacgtctaaaagaacatcaacaaaaatctgaagtatttattattaaagaattagatatacttaataatgctcaaaaagctgcaataattaatcagattagagcgtctaaagacattaaaataattaatcaaatcgttgataatgcaatagaattaaatgatgctatgcaaggtttaaaagaacatgtagctcaattaacagcaactacaaaagacaacattgaatatttaaatgctgatgaagaccttaaattacaatatgattacgctatcaacttagcgaataatgttcttgacaaagaaaacggtacaaataaagacgctaatatcataattggaatgattcaaaacatggatgatgctagagcacttctaaatggaattgaaagacttaaagatgctcaaacaaaagcacataatgacattaaagatacgctcaaacgtcaacttgatgaaattgaacacgctaatgcaacatcaaattctaaggctcaagcaaaacaaatggtaaatgaggaagctagaaaagcgttttctaatattaatcacgcaacatcaaatgatttagttaatcaagcaaaagatgaagggcaatctgcaattgaacacatacatgcagatgaattacctaaagcgaaactagatgctaatcaaatgattgaccaaaaagttgaagatataaatcacttaattagtcaaaatccaaacttatcacatgatgaaaaaaataaactaatatctcaaattaataagttagtaaatggaattaaggatgaaattcaacaagctataaacaaacaacaaatagaaaatgctacaacaaaactagatgaagtcattgaaactactaaaaaattaattatcgccaaagctgaagctaaacaagtgataaaagagttatcacaaaagaaacgagatgcaataaataacaacactgatttaacaccttctcaaaaggcacatgctttagcagatattgataaaacagaaaaagatgcacttcaacatatcgaaaattctaattcaattgatgatatcaataacaataaaaagcatgcatttaatactttagctcatatcattatttgggatactgatcagcaaccattagtttttgaactacctgaattgagccttcaaaatgctttagtaacaagtgaggtggttgttcacagagatgaaactatttcattagaatctataattggagctatgactttaactgatgaacttaaagtcaatattgtttcattaccgaacactgataaagtagctgatcacctaaccgctaaagttaaggttattttagctgatggctcatatgtcactgtaaatgttccagtcaaagttgtagaaaaagaattacaaatagctaaaaaggatgctataaaaacaattgatgttctggtaaaacaaaaaatcaaagatatagattctaataacgaattaacgtctactcaacgtgaagatgcaaaagctgaaattgaaagattgaaaaagcaagccatcgataaagtgaatcattcaaaatcgattaaagatattgaaacagtaaaacgaactgattttgaagaaatagatcagtttgatcctaaacgctttacgctaaataaagctaaaaaggatatcattactgatgttaatactcaaatccaaaatggtttcaaagaaattgaaacaataaaaggtttaacttctaatgaaaaaactcagtttgataaacaattaactgaactacaaaaagaatttttagaaaaagtcgagcatgctcataatttagtagaattaaatcaattacaacaagagtttaataatagatataaacatattttaaaccaagcacatttactaggtgaaaaacatatagcagaacataaattaggatatgttgtagtaaacaaaactcagcaaatactaaataatcaatctgcttcttactttataaaacaatgggcacttgatagaattaaacaaattcaactagaaacgatgaattcaattcgtggtgcgcataccgtacaagatgtacacaaagcattattacaaggtatagagcaaatcttgaaagtaaatgtaagtattataaatcaatctttcaacgattccttgcataactttaattatcttcattcaaaatttgatgctagattaagagaaaaggatgttgcaaaccatatcgtacaaactgaaacattcaaagaagttctaaaaggaacgggtgttgaaccaggtaaaatcaacaaagaaacacagcaaccaaaacttcataagaatgataatgatagcctattcaaacatttagttgataatttcggcaaaactgtaggtgttattacattaactggtttactttctagtttctggttagttttggctaaaagacgtaaaaaagaagaagaagaaaaacaatcgataaaaaatcatcacaaagatattcgtctttcagatactgataaaatagatccaattgtaataactaagcgtaaaatagataaagaagaacaaattcaaaacgatgacaaacattcaattccagttgctaaacataagaaatctaaagaaaagcaattgagtgaagaggatattcattcaatccccgtcgttaagcgtaaacaaaacagtgataacaaagatacaaaacagaagaaagttacttctaaaaagaagaaaacgcctcaatcaactaaaaaagttgtaaaaaccaaaaagcgttctaaaaagtaaaatatatctttaaca

SEQ ID NO: 34267 - DNA, 720 bp, Staphylococcus epidermidis
gtggacactccatctcaaataggaacaaatacaatcacgattgagtcaacggatgcgagcggaaataaaactacgactaaaattaattatgaagtaacgagaaatagcgcaagtgactctacttccactagcatagtaaatagtgtttcaacaagtataagtaatagtacatcgctaagtgatagtgtaaaagcgagtcaatcattatcaacaagtaagagtctctcagagtcgttaagtgcgtcgacgtcgaatagtacgtcaatccaagcgagcgaatcagcaagcacaagtaaacaattatcagaatcagcgagtacgtcgacatctgatagtgcatcagagtcagcaagaaagagtgagtcaacgagtaaaagtacgtcattaagtgaatcgacaagcacaagcgtttcagattcagcaagcgtgtcaacgtcagaaagtgcgtcaacatcaacaagtgtgagtggctcaacaagtacaagcatttcagactcaacgagcacatcgacgtctgatagcgcatcaataaaagcgagcgaatcagcaagcacaagtaaactattatcagaatcagtgagtacgtcgacgtctgatagcgcatcaacgtcaacgagcgtaagtgactccaatagcgcaagtacgtcattaagtaaatcgacaagcacaagcgtttcagattcaacaagtacatcgacatccgacagtgcgtccacatca

SEQ ID NO: 34268 - DNA, 885 bp, Staphylococcus epidermidis
atgtcagcgagcgagagtgagtcacacagtacaagtacgtcattaagtgaatcgacaagtacgagtctttcaggctcaacgagtgcgtcgacatccgacagtgcatcaacgtcaacgagtgagagtgagtcagacagtacaagtacgtcattaagtgaatcgacaagtacgagtctttcaggctcaacgagtgcgtcgacatccgacagtgcatcaacgtcaacaagcgagagtgactcaacaagtgaaagtacatcgttgagtgaatcattaagcacaagcgtttcagattcaacaagcgcgtcaacgtcagaaagtgcatccacatcaacgagtgagagtgagtcaaacagtgccagcacatcgttaagtggatcattaagtacaagcatttcagattcaacgagtacgtcgacatccgacagtgcatcaacgtcaacgagtgagagtgagtcagacagtacaagtacgtcattaagtgaatcgacaagcacaagtctttcggactcaacaagtacgtcaacgtcagaaagtgcatcaacgtcaacgagtgagagtgactcaacaagtgaaagtacgtcattaagcgagtcgacaagcacaagcgtttcagattcaacaagcgcgtcgacatccgacagtgcatcaacatcaacgagtgtgagcgactcggaaagtgcaagtacatccataagtgaatcattaagtacgagcgtttcagattcaacgagtacgtcgacatccgacagtgcatcaacgtcaacgagtgagagtgactcaacaagtgcaagtacgtcattaagcgagtcgataagcacaagcgtttcagattcaacaagcgcgtcgacatccgacagtgcgtccacatcaacgagtgagagtgag

SEQ ID NO: 34269 - DNA, 1407 bp, Staphylococcus epidermidis
gtgagtgactcaaacagtgccagcacatcgttaagtggctcattaagtacaagcgtttcagactcaacaagtacatcaacatccgatagtgcatctgcatcaacaagtgagagcgactcggaaagagcaagtacatcgttgagtggctcaacaagtacaagcatttcagactcaacaagtacatcaacatcagacagtgcatcaacatcaacgagtgtgagtgagtcaaacagtacaagcacatccataagtgaatcattaagtacgagcgtttcagattcaacgagtacatcgacatcagacagtgcatcaacatcaacgagtgtgagtgactcggacagtgcaagtacgtcatcaagtgaatcagtaagcacaagtgattcagaatcaacaagcacatccacatccgatagtgcatccacatcaacgagtgtgagtgagtcaaacagtacaagcacatcattgagtggctcaacaagtacaagcgtttcagactcaacaagtacatcgacatcagacagtgcatctgcatcaacaagtgagagcgactcggacagtgcaagtacgtcatcaagtgaatcagtaagcacaagcgtttcagattcaacaagcgcgtcaacgtcagaaagtgcgtcaacatcaacgagtgtgagtgactcgaatagtgcaagtacgtcattaagtgaatcgacaagtacgagtctttcagattcaacgagtatgtcgacatcagacagtgcgtcaacatcaacaagtgagagcgactcggacagtgcaagtacatcgttaagtgactcgacaagtacgagcgtttcagaatcaacaagtacgtcgacatcagacagtgcgtcaacatcaacaagtgtgagtgagtcaacgagtacaagtacgtcatcaagtgaatcagtaagcacaagtgattcagattcaacaagcacatccacatcagaaagtgcgtcaacgtcaacaagtgagagtgactcaaacagagcaagtacatcgttaagtggctcgacaagtacgagcgtttcagactcaacaagtacatcgacatcagacagtgcatcaacatcaacgagcgagagtgactccaatagcgcaagtacatcgttaagtggctcaacaagtacgagtctttcagaatcgacaagtacatcaacatcaacgagtgtgagtgcctcaaacagtacaagtacgtcattaagtgactcgacaagtacgagtctttcagactcaacgagcacatcgacatcagaaagtggatcaacgtcaacaagtgagagcgactcggacagtgcaagtacatccttaagtgagtcaacaagtacaagcatttcagactcaacgagtacatcaacatcagatagtgcatctacatctatgagtgtaagcgagctcaaacagagc

SEQ ID NO: 34270 - DNA, 1449 bp, Staphylococcus epidermidis
atggttgaaaaattaaaaaatgaatggcttaaccagccaggcaaaaatatacttgcaggtattgtagttgccttagctttaatccctgaagctatcgcattctccatcattgctggtgtagatcctatggttggtttatatacttcgttcattattgctgtcgtcactgctattgtaggtggtagagcggcgatgatatcaggtgcaacaggggctattgccttattaattgtgccacttgtgaaagattacggtgtagagtatcttctagctgctactatactgatggggttaattcaattaattttaggacttcttaaagtaggtcgtctaatgaaatttatacctcgttctgtcatgataggttttgtgaatgctctaggaatcatgatttttatgtctcaaatagaacatatctttgggatatcaatttcaacttatatatatgtaattgtaacgttactcatcgtatatataattccaagattttttaaagctatacctgcaccattaatagctattatcgtattgactgccctttatatgtatacaggttctgacgttagaactgtgggagatttaggtaatatcaaacaagctttccctcactttttaatccctaatgttccctttaatttagaaactcttcaaattattttcccttactctttatctatggctattgtaggtttagttgagagcttacttacagctaaaattgtagacgatgctacagacacttatagtagtaaaaatagagagtcctgtggtcaaggtatcgctaacatgattaccggattattcggtggcatgggaggttgtgccatgattggtcaatccgtcatcaatgttaaatcaggtgcaaacagtagattgtctacatttacagcgggtattgtacttatatttatgattattgtacttggaggacttgtagttcaagttccaatgccaattttagcaggtattatggttatggtttctgttggtacatttgattggaattcctttaaatatattaagaaagcaccaaaaacggatgcagtcgttatgcttattacagtgattattgttttaatgacgcataatttagctttaggtgttgttgcaggcgttgttttcagtgctttattctttgctactaaaatttcaaaagtagaagttatttctgaagagttcggtaaaataaaccgattatcttttaaaggacaaatcttttttgtttctattgattctatgatggagcaaataaactttgagattgaaaatagtaccatagaattaaacttcaataatgcacacttatgggatgattctgcagtagatgcaattgacacgatagtacgaaaattcgaagaaaaaaataatattgttcgtgtagaaaaattaaattcagatagtcgtaaagttgtttcagagttaagccaactaaatgaaaatcatttaaac

SEQ ID NO: 34271 - DNA, 540 bp, Staphylococcus epidermidis
atggttgaaaaattaaaaaatgaatggcttaaccagccaggcaaaaatatacttgcaggtattgtagttgccttagctttaatccctgaagctatcgcattctccatcattgctggtgtagatcctatggttggtttatatacttcgttcattattgctgtcgtcactgctattgtaggtggtagagcggcgatgatatcaggtgcaacaggggctattgccttattaattgtgccacttgtgaaagattacggtgtagagtatcttctagctgctactatactgatggggttaattcaattaattttaggacttcttaaagtaggtcgtctaatgaaatttatacctcgttctgtcatgataggttttgtgaatgctctaggaatcatgatttttatgtctcaaatagaacatatctttgggatatcaatttcaacttatatatatgtaattgtaacgttactcatcgtatatataattccaagattttttaaagctatacctgcaccattaatagctattatcgtattgactgccctt

SEQ ID NO: 34272 - DNA, 963 bp, Staphylococcus epidermidis
atgaaattcgcagttgttggaacaggtgtaattggtagtggatggattactagaatgcttgcgcatggtcatgaagtgattgctactgatccaagtgaaggtgcatatgaacgcatgttgacacaagttaaacaaaattggccttacgcagagcaaatgggccttgctgaaaatgcatcaattcaaaacctaacatttacaccacatttagaagaagcggtcaaagatgcggatcatattcaagaaaatgtaccagaagtagaagaaattaaagatgctgtattaaaagagattgatttttatgcgaaacctgaagcaacaattggttcaagtacatcaggaattatgccttcagaattacaagctaacttatcacatcctgaacgattagttgttgcccatccatttcacccggtatatattttgccattagtcgaaattgtgccaggtaagcaaacatctgaagaaacaacagttaaagccgaacagatttatgaaagtattggtatggatgttttacatgtgcgtcatgaaatagaaggacatattgcagatcgtcttatggaagcattatggcgtgaatcattgcacatagttaatgatggtattgcaacaacagaggaagttgataaggcgtttacccatgcagcaggtttacgttatgcacaatatggtccatttatgacgttccacttggcaggtggtgaaggtggtatgcgtcatatgttaaaacaatttgggccagctttaaaaaaaccttggacaaaactcatcgcgcctgaactgacagatgacctatatcataaagtagtaagtggtagtgaagcatcttctcaaggatatacaatgtctgaacttgatcaaaaaagaaacgaatttctaattaaagtgaaagaattagcagaacaatattggccaagtgatagtaaagcgatgaaaaagtctaacggagcggaattacaa

SEQ ID NO: 34273 - DNA, 468 bp, Staphylococcus epidermidis
atgacaaatcatattgtactatatcaaccagaaataccagcaaatacaggaaatattgcacgtacttgtgcgggtactttaacccatcttcatctaattaaaccactcggctttagtacggaagacaaaatgttaaaacgtgcaggacttgattattgggagcatgttaatattacatatcacgatagtattgaggaattttttgctaatacagaaggtcattactatttattaacaaaatttggtaaacagacctacagcgattttaatttttctaatactaatgaggattattattttatctttggtaaagaaactactggtcttcctgaatgggttaaggagaaatatgcaaaaacagctttaagaattccaatgagtgacaatatacgctctcttaatctttctaatactgctgctttactgatttacgaagctttgagacaacaagattatcctaacctttca

SEQ ID NO: 34274 - DNA, 1359 bp, Staphylococcus epidermidis
atgatgaaaaataaactaacattaaaagagaatctatttatcggctcaatgctgtttggtctattttttggtgctggaaatctcatttttccaattcacttaggtcaaactgcggggtcaaatgtatggaccgccaatttaggatttcttatcacggctatcggactacctttcttaggaattatagcgataggtgtatctaaaacaaacggggtctttgaaatttcctcaaggataagtaaaatatatggttatttgttcacaattggcttatatcttgttataggtccgttttttgcgttgccaagacttgcgacgacgtcatttgaaatagcattttcaccatttatttcatctggtacggcccaagcgttgttgcctatttttagtattttattcttcggagtagcgtggttattttcgcgtaaaccttctaaaatattagactatattggaaaattcctaaatccggtctttctcatcttgcttggaattgttgttgtgcttgcatttatccgtcctatgggtggaattagtcatgcgccagtaagtgctgattatagcaatagcgtgttactcaaagggtttatcgatggatataatacattagacgctttggcatcattagcatttggtattatcattgttactacaattaaaaagttggggattactaatccgaatacaatcgctaaagaaactttaaaatcaggtacgattagtattatagctatgggtgttatttatactttattagctttaatgggtacgatgagtttaggtcgttttaaagtaagtgaaaatggtggtattgctcttgctcagattgcacaacattatttaggggattatggaattattattttgtcactaatcatcattgtggcatgtctgaaaacagcaataggattgatcacagccttttcggaaacatttacagagttattccctaaatctaactatctttggttagctactggggtgagtatattagcttgtatatttgctaatgtaggtttaacaaaaattattatgtattcaacaccagtattgatgttcatttatcctttagcgattactttaattttattagcattacttagtccactatttaaacattctaagattgtctatcgatttacaacattatttacaatggtggcggcatttgtagatggtgtgaaagcaagtccagagttctttgttaatacaaaatttgcacaaacaatcattggatttggagaaaattatctcccattctttaacattggtatgggatggattgttccagcattttttggtttcattattggtattattgtatactttatgactgctaaaaaatcgtcccacgtacaa

SEQ ID NO: 34275 - DNA, 753 bp, Staphylococcus epidermidis
atgcttaaaggacacttacactccgttgaaagtatgggcactgtcgacgggccaggacttagatatatattatttactcaaggttgtttgttaagatgtttatattgtcataatccagacacttggaagattaacgaaccatcaagagaagtgacggttgatgaaatggtaaatgaaatcttgccgtacaaaccttactttgaagcttcaggcggtggggtaacagtcagtggtggcgaaccattactacaaatgcctttcttggagcaattattcaaagaattaaaagcaaatggtgttcacacatgcattgatacttctgcgggctgtgtaaatgatacaccagcatttaatcgtcattttgatgagttgcaaaagcatacagatttaatcttattagacattaaacatatagataatgataagcacatcaaattaacaggcaaacctaacacacatattttaaagtttgcacgtaaattatctgatatgaaacaacctgtttggattagacatgttttagtacctggtatttcggatgataaagaagatttgataaaactaggagaatttattaattctttagataacgttgaaaagtttgaaatcttaccttatcatcaactcggtgtgcataagtggaaaaatttaggcattccttatcaactcgaaaatgttgaaccgcctgacgatgaagcggttaaagaagcttatcgctatgttaattttaatggcaaaatacctgtaacatta

SEQ ID NO: 34276 - DNA, 813 bp, Staphylococcus epidermidis
gtgacactgcttaaagtagcacatttaggaattaaggacacatggtcagatgagacgctcgttgataacgtgaatttcacagttcaatgtggagaaacattaggtattattggagaaagtggaagcggaaaatcgattacttgtaaggcattaataggtttaaacgctcaacgtttatctgtaagcggagatatcttttttgaacatcaaaatttaaatacaataactgaaaagcaactacgcaaaattcgtggtaaagatattgcgatgattatgcaacaaggaacacgggcatttgatccttcaactaaagtgggaaagcaaatgattgaaactttgcgtgcacatacgacattatcaaagcaacaaataaaacaagaacttattcattatatgacgtatatgaagttgaaagatcctcagtcattattaaaagcatatccctacatgttgtcaggtgggatgcttcaacgtatgatgattgcactagcattagcattgaaacctaaattgatcattgctgatgagccgaccacagcattagataccatcacacaatatgaagttatcaatgcttttaaagatataaaacatcattttgattgcgccatgatttttatatctcatgacctcacagtgattaataaaattgcagaccgtgttgtagttatgagagaaggtcgtgtgatagaagaaggtcgaacaaatatggtattacaacaacctcgtcatcactatacagcttatttattatcaactaaaaagacaatttatgattattttcagtttgtgctgaggggtgatttcaatgct

SEQ ID NO: 34277 - DNA, 1596 bp, Staphylococcus epidermidis
atgaataaactcacaaaactaagtacagtcatttttgtatctgggattattttagccggttgtggaagtaacaaagaactaacagagaaaaaagagaataaagtattatcatatacaactgtcaaagatattggagatatgaatccccatgtttatggaggttcaatgtccgcagagagtatgatttatgagccgttagttcgcaataccaaggatggtattaagccattattagcgaaaaaatgggacatttcacctgatggtaaaacatatacgttttatttaagggacgatgtatcttttcatgatggtacgaaatttgatgcagacgcagtgaagaaaaacatcgatgcagtacaacaaaataagaaactacattcatggttaaaactttcaacactgattgatgatgtcaaagttaaggataagtatacggtacaactacatttgaaggaagcttatcaacctgcgttagcagaactagctatgccacgaccatacgtttttgtatcgcctaaagattttaaacacggtacaaccaaagatggtgtgaaatcatttgacggtacaggaccatttaaaatgggtgaacacaaaaaagatatatctgcagaatttaataaaaataatcaatattggggagaaaaggcaaagttaaataaagtagaagcaaaagttaaacctgctggagaaacagcatttttatcaatgaaaaaaggagaaaccaactttgcttatacagatgatagaggtacagacagcttagataaagatagtttaaaacaattaaaagaaaccggaagctatcaagtaaaacgtagccaagccatgaatacaaaaatgcttgttgttaattctggtaagaaagatagtgcagtcagtgataaagcagtcagacaagcattaggtcacatggtaaatagagataaaatagctcaagatattttaaacaagcaagaaaagccagccacacaactatttgctaaaaatgtgacagatataaactttaatttaccaacaagaacatatgataagaaaaaagcacaagcgttattagataaggccggatgggtgctttcaaaagatcgacaagttcgtcaaaaagagggcaaagatttgaatcttaagttgtattatgacaaaggctcttccagtcaaaaagaacaagctgaattcttagaggcagaatttaagaagttaggtgtacaactagatataaacggagaaacgtcagataaagtagctgaacgtcgtagttctggtgattacgatctaatgtttaatcaaacatgggggctattatatgatcctcagagtacattagcagcatttaagacgaaaacgggatatgaaagtgcaacattaggtattaagaataagtcacaactgtacaaagatattgatgaggcgttcaaaattcaagatgcaaaggaacgttcaaaagcgtatcagcaaattttgaaacaagttgacgatgaaggtgtctttattccaattactcacgggagaatgactgttgttgcacctaaagatttacaaaaattatcctttacacaatcacaatatgagcttccatttaatgaaatgcaatataaa

SEQ ID NO: 34278 - DNA, 1047 bp, Staphylococcus epidermidis
atgagtgactcacaaagagaacagaggaaaaatgaacatgtagaaatcgcaatgtcacaaaaagatgcgctggtttcagattttgataaagtgagatttgttcatcattccatccccagtattgatgttagtcaagtcgatatgacaagtcatactacgaaattcgatttggcatatccaatctatataaatgcaatgactggtggaagtgattggacaaaacaaattaatgaaaaattagcaattgttgctagagaaactggaattgcaatggcggtgggatcaacacatgcagctttgcgcaatcctaatatgattgaaacatttagcattgtgcgtaaaacaaatcccaaaggaacaattttcagcaatgtgggtgccgatgtaccagtggataaagctctacaagcggttgaattattagatgctcaagcgctacaaattcatgtgaactcacctcaagaattagtcatgcctgaagggaaccgtgaatttgcttcatggatgtcaaatattgaatctattgttaaacgcgttgatgttccagttattattaaagaagttggtttcggaatgagtaaagaaacattacaagcgttatatgatattggtgttaactatgttgatgtcagtgggcgcggtggaactaatttcgttgatattgaaaatgaaagacgttcgaataaagatatgaattatttatctcagtggggacaatctaccgtagaatccttacttgagagtactgaatttcaagatcgattaaatatttttgctagcggtggcttacgtacaccactcgatgctgtaaaatgtttagcattaggtgcaaaagcaatagggatgtctcgaccgtttttaaatcaagtagaacaatcaggtatcacaaataccgtagactatgtagagtcttttattcaacatatgaaaaaaattatgacgatgttagatgcgccgaacattgagcgtttacgacaagcagatatcgtaatgagcccggagttaatatcatggatcaatcaacgtggccttcatttaaatagaaaa

SEQ ID NO: 34279 - DNA, 1974 bp, Staphylococcus epidermidis
atgacagcgaccttcattattatatatattgtagtagcgctcatactcattggttttattaatttctttttaattaagcgtaaaagaaaaaataaagacaaaagagtggaacaacgttcgacaatagattctaagagagaaagcaatcaatctaaatttaaagcaagcgatttagaacaaacaactaagtcaaatactgacccaacgcaatcaaacgatattgaagatgaaaaacgaaaaaatcactttgactcagaaatagataatgcatctcaatctatcaatacagatagtaaagaggatagaaacgcgttaagtcataagaaccaagaggaagatgacgcatcgaacgatgtgttgaaccctatcgatccaaattctactgaaggtagagttaatgaaagaattaaaaatcaagagtctaactttatttttggtaaaggcataactagaggtaaaattttagcggcaatgttatttggtatgtttatcgcgattctaaaccaaactctattaaatgtggcattgcctaaaataaatacagagtttaatatttctgcctcaactggtcaatggttaatgactggttttatgttagtgaatggtatattaatacctattagtgcctttttatttaataaatattcttatagaaaattatttattataggtttagcactatttacattaggttccttagtttgtgcaatctcatttaatttcccaattatgatgagtggacgtgtattacaagccataggcgcaggtatattgatgccgttaggttctaacgttattgttaccattttcccacctgaaaaacgcggtgtggcaatggggacaatgggtattgcaatgatattagcacctgcaatcggtccaacactttcaggttacattgtgcaaaattatgattggaatgtaatgttttacggtatgttctttataggtattattgctatcgtaattggtctattttggtttaagttgtatcaaagtacaacaaatccgaaagcagatattcctggaattatttatagtacgattggattcggttccttattatatggtttctcagaagctggtaataaaggatggggctcaactgagattgtaacaatgtttattgttggtacggttttcattattttctttattttaagagaactaagaatgaaagcgccaatgttgagcttggaagtattaaaatatccaacttatacacttacaactgttatcaatatgattgtgatgatgagtttatacggaggaatgattttacttccattatatttacaaaatcttagaggattttcagcattagactctggattattactattgccaggtgcattagtcatgggagcattaggtccggtggcaggtaaattgttagatacaataggtattaaaccattagcaatatttggtattggcattatgacatatgcgacatgggaattaagtaaattaaacatggatacaacatatctccatattatgtggatatatattgtgcgttcatttggtatggcatttgtaatgatgccgattatgactgcaggtatgaacgctttaccaccacgcttaatttctcatggtaatgcgtttgttaatacaatgagacaattagctggttcaattggtacagctattttggttacggtcatgacgacacaacaaacaaatcatctttctgcttttagtgaagagttagataaaacgaatcctgtcattcaagaccatatgcgtgaacttgcccaacagtatggtggtgagtcagcagcaatgaaattattactcgaacatgtcaataaacttgcatctgtagaaggtgtaaatgatgcatttattgttgctacaattattagtgcgattgcactgatattaagcttgttcttacagggcaagaaaaaggctcaattatcagctgaaaaagcaaatgctgaagattatccttcgcaacaagataaa

SEQ ID NO: 34280 - DNA, 645 bp, Staphylococcus epidermidis
atgaaaaaaatgatattaatcaatgtgattactatcattgtcctagttgttattggtgtgttaggcttttggttctggcataacacaacaagttatgtgacaactgacaatgcaaaagttgatggagatcaaataaaaatctcaagtcctgcatctggacaaattaaatctcttaatgttaagcaaggagacaaacttgataaaggtgataaagtagcagaagttttagcacaaggccaagatgggcaatcaaaagatatgaacatcaaaatgccacaaaaaggtactattgttaaaacagatggtatcgaaggttctatgactcaagcagggaacccaattgcatatgcatataatttagatgatctatatataactgctaatgtagatgaaaaagatatttctgacgtggaaaaaggcaacgacgttgatgtagatatcgacggtcaaaaagcatcaatcaaaggtaaggttgaagaagtaggccaagcgactgcagctagcttttcattgatgccatcatcaaatagcgacggtaactatacgaaagtttctcaggtagtacccgtaaaaatctctttagattctaatccatctaaaaatgttgtcccaggtatgaacgctgaagttaaaattcataaaaat

SEQ ID NO: 34281 - DNA, 1290 bp, Staphylococcus epidermidis
atgtctaaaatattaatggttggtagtggaccggtcgctattcaacttgctcgactatgtaacttacatggggaacatatggttgatatggtgagtcgcgttcatgcatcaaccaaatctaagagagtctttgatgcgtatcatcgtgacggctttttttcagtaatgactcaaaatgatgcacatcagtgtttttcaggtaagtttacggttagacatttttttaaagatgttaaagacattacacaatattatgacgtggtgattttagcatgtactgctgatgcgtatcgaccgatattacagcaattatctaagtccacattaaaacgtattaaacaaattatcttggtctcgccaacattaggatcacatatgcttgttaagcaaatactatcagatgttcattgtgaaggtgaagtgatttcgttttccacttatctaggcgatactcgaatatttgataaagcacaaccgcattgtgtcctaactacacgagttaaatcaaaattattcgtaggttcgactcattctcagtctattacgttgtataagcttaagtctttattcgactatttgaatatagaattaacaacgatggacacaccgctacatgcggagatacataatagttcactttatgtacacccaccattgtttatgaatcaattttcattaaaggcggtatttgaaggaacgaaagtgccagtatacgtatataagctatttccagagggtccaattacaatgaccttaatacatgaaatgcgattaatgtggcaagaaatgatgatgatattaaaaaaattaaaggtaccctcggtcaatctcctgaagtttatggtgaaagaaaattaccctatacgtgatgagaccatgcgcgaagttgatattgaaagctttgaaaatttatcagctattcatcaagagtatctactttatgtgcgatatacagcaattttaatcgatccattttctaatccggacgatcaaggtgcatattttgatttttctgccgtaccatacaaacatgttgatactgatgaacaaggagttatacatataccacgcatgccgagtgaagattattatcgtactttgatgattcaagcaattggaagagcattaaacgttgcaacaccgatgattgacacattgttattacgttatgaaactaccgttaaacaatactgtgatacacatttacatcaacaactatcaaagcaattcgaattacatcattttaaacaggatttagcgttagtgacgaactacttaactttttataaa

SEQ ID NO: 34282 - DNA, 813 bp, Staphylococcus epidermidis
atgaatgagcatacaaaaatagagaaccaattacaatattatttagaacaatttacgtacttacatcaactcgttttggaagatagtcggcatattgttgatttagaaaatttgattgatgaatacagtcaatggatacttcaacctttggcagagcatcattatttaacatggaatgatttagaaacaaaaataagttttaccaagaagcttcaagaggtatcagcaaagtgtgtgaaacaggtagaagtcattcgagcacaacgtttgttgaatggtagggcctccacgtcaggttatttcgaaaatatagagcattgtattaatgaagaattcggaagatggcaaattggacaaaatgacaagttgttactgattgggtcgggtgcatatcctatgacattaattcaagttgctaaagaaactggcgctgcggtcattggtatagatatagattcggaagcagttgatttagggcaacgtgtcgtcaatgtactagctccaaatgaagatatcgttattagtaatcaaacagttgatcaattagaagacatccaatctgtgactcatattattttcagttcgacgatacctatcaaatatgacattttgaatgaactttacacattgacgaatgatgaagttgttgtagctatgcgatacggtgatgatatgaaagcattgtttaattatccatctcaagcaactgacgaaacacaatggcgatgtgaagaactacaaacacgaccgaagcagatttttgatattgcactttatcgtaaagtgacatcaaaagttggtgttgaacatgtc

SEQ ID NO: 34283 - DNA, 468 bp, Staphylococcus epidermidis
atgcctcgtaaaggatcagtacctaaaagagatgtattaccagatccaattcataactctaagttagttactaaattaattaacaaaattatgttagacggtaaacgtggaacagctcaaagaattctttattctgcatttgatcttgttgaacaacgtagtggtcgtgatgcattagaagtgttcgaagaagcaattaataatatcatgccagtattagaagttaaagctcgtcgtgtaggtggttctaactaccaagtaccagttgaggtgcgcccagaacgtcgtactactcttggattacgttggttagttaactatgcgcgtcttcgtggtgaaaaaactatggaagaccgtttagctaacgaaatcttagatgctgcaaataatacaggtggtgcagtcaaaaaacgtgaagacactcacaaaatggctgaagcgaacaaagcatttgctcactaccgttgg

SEQ ID NO: 34284 - DNA, 2079 bp, Staphylococcus epidermidis
atggcaagagacttttctttgaaaaatactcgtaatatcggtatcatggctcacattgatgctggtaagacaactacgactgaacgtattctttactacacaggtcgtatccataaaattggtgaaacacatgaaggtgcttcacaaatggactggatggaacaagagcaagaccgtggtattactatcacatctgctgctacaactgcacaatggcaaggtcaccgtgtaaacatcattgatactcctggacacgtagacttcacagttgaagttgaacgttcattacgtgtacttgatggtgccgttactgtacttgatgcacaatcaggtgtagaacctcaaactgaaacagtttggcgtcaagcaacaacttatggtgtacctcgtattgtttttgtaaacaaaatggacaaattaggtgcgaactttgaatattcagtaagcactttacatgatcgtttacaagcaaatgcagcacctattcaattacctattggtgcagaagatgaatttgaagcaatcattgacttagtagaaatgaaatgctttaaatatacaaacgacctaggtacagaaatcgatgaaatcgaaattccagaagaccataaagaaagagctgaagaagctcgcgctcaattaattgaagctgttgctgaaaacaacgacgatttaatggagaaatatcttggggatgaagagatttcagttgatgaattaaaagatgctatccgccaagctactactgacgtagaattctacccagtactttgtggtacagcgttcaaaaacaaaggtgttcaattaatgcttaatgcagtaattgattatttaccttcaccattagatgttaaaccaattattggtcatcgtgcgaacaaccctgatgaagaagttgttgctaaaccagatgattcagcagaatttgctgctttggcatttaaagttatgactgacccttatgttggtaaattaacattcttccgtgtatactctggaacattatcttcaggttcatatgtgaagaactcttctaaagataaacgtgaacgtgttggacgtttattacaaatgcacgcgaactcacgtcaagaaattgacactgtttattcaggtgaaattgcagctgcagtaggccttaaagaaacaggtactggtgatactttatgtggagagaaaaatgacattatcttggaatcaatggaattcccagaaccagttatccacttatcagttgaaccaaaatctaaagctgaccaagataaaatgactcaagctttagttaaattacaagaagaagacccaacattccatgcacacacagatgaagaaactggacaagttatcatcggtggtatgggtgaattacacttagatattttagttgaccgtatgaagaaagaattcaacgttgaatgtaacgtaggtgctccaatggtttcttatcgtgaaacatttaaacaacctgcacaagttcaaggtaaattctcacgtcaatctggtggtcgtggtcaatatggtgatgttcatattgaattcactcctaacgaaacaggtggcggtttcgaattcgaaaacgctattgttggtggtgtagttcctcgtgaatacattccatcagttgaacaaggtcttaaagatgctatggaaaatggtgtcttagctggttatccattaattgatgttaaagctaaattatttgatggttcttatcatgatgtcgattcatctgaaatggccttcaaaattgctgcatcattagcgcttaaagaagctgctaaaaaatgtgatccagttatcttagaaccaatgatgaaagttactatcgaaatgcctgaagaatatatgggtgatatcatgggtgacgtgactgctcgtcgtggacgtgtagacggtatggaaccacgtggtaatgctcaagttgttaacgcatatgtaccactttcagaaatgtttggttatgcaacttcattacgttctaacacgcaaggtcgcggtacttacacaatgtactttgaccactatgcagaagttcctaaatcaattgctgaagaaatcatcaagaaaaataaaggtgaa

SEQ ID NO: 34285 - DNA, 1182 bp, Staphylococcus epidermidis
atggcaaaagaaaaatttgatcgctcaaaagaacatgccaatattggtactatcggtcacgttgaccatggtaaaacaactttaacagctgctatcgcaactgtattagctaaaaatggtgacactgttgcacaatcatacgatatgattgacaacgctccagaagaaaaagaacgtggtattacaatcaatactgcacatatcgaataccaaactgacaaacgtcactatgctcacgttgactgcccaggacacgctgactatgttaaaaacatgatcactggtgcagctcaaatggacggcggtatcttagttgtatctgctgctgacggtccaatgccacaaactcgtgaacacatcttattatcacgtaacgttggtgtaccagcattagttgtattcttaaacaaagttgacatggtagacgacgaagaattattagaattagttgaaatggaagttcgtgacttattaagcgaatatgacttcccaggtgacgatgtacctgtaatcgctggttctgcattaaaagcattagaaggcgatgctgaatacgaacaaaaaatcttagacttaatgcaagcagttgatgattacattccaactccagaacgtgattctgacaaaccattcatgatgccagttgaggacgtattctcaatcactggtcgtggtactgttgctacaggccgtgttgaacgtggtcaaatcaaagttggtgaagaagttgaaatcatcggtatgcacgaaacttctaaaacaactgttactggtgtagaaatgttccgtaaattattagactacgctgaagctggtgacaacatcggtgctttattacgtggtgttgcacgtgaagacgtacaacgtggtcaagtattagctgctcctggttctattacaccacacacaaaattcaaagctgaagtatacgtattatctaaagatgaaggtggacgtcacactccattcttcactaactatcgcccacaattctatttccgtactactgacgtaactggtgttgtaaacttaccagaaggtacagaaatggttatgcctggcgacaacgttgaaatgacagttgaattaatcgctccaatcgctatcgaagacggaactcgtttctcaattcgtgaaggtggacgtactgttggatcaggcgttgtaactgaaatctttgaa

SEQ ID NO: 34286 - DNA, 948 bp, Staphylococcus epidermidis
atgaaatatatagatgagcaaacacaagctcaattattagacatgaatgaagtcattttagaagtagaaaaagctttgcaagctttttcagagaataagacgataacgccattaagatatgttttgccatttaatgagcaaaatcgttatttagtgatgccagcattatcagatgaattaaatatcgttggacttaaaacagtctcatttgcacctgaaaattcaaaaaaagggaaagcgactattactggatcagttattttaagtgactatgaaacaggagaaacattgtctatattagatggtggttttcttactaaagtaagaactggtgcaatttcaggtgtagctactaaatatctagcaaaagaaaacgctaaaacacttagtgtaataggggcaggtgtacaagctgaaggtttaattgaagcgatacttgctgttagagatattgaaaaaattcacatcgcaagtagaacgttcgaaaaagcagaaaaatttgctcaaaatatacgaaatcgatttaatattaaagtgagtgtatttagatcggcagatgaagcgatagacagtgcagatattgtagttacagcaacaaatgcaaatcagcccgtttatactcattctttacatccaggcgtgcatttaaatgcagtcggatcctttaaaccagatatgcaagaaataccttcagaaacaatgcttgttgctaataaaattgttgttgaatctatggaagcagctttagaagaaacaggtgatttaaaaattcctcaagcagaaggaatattaactaaaaatatgctacatagtgaattaggcgacattatttctggtgaaaaagttggccgcgaaactgaagaagaagtgacagtctttaaatcggtcggtctagcaattgtagatatcattgtggcacaatatttttataaaaaattaatacaatct

SEQ ID NO: 34287 - DNA, 1074 bp, Staphylococcus epidermidis
atgtcagaaaaagtaaaattcgaaaaaagagagtctttaaaagaaaaacctgatacagcaaacttaggatttggacaatatttcacagactatatgttaagtgttgattatgacgctgatcaaggatggcatgatatgaagattgtgccgtacgcaccatttgaaatttcaccagcagcgcaagggttacattatggtcaggcagtttttgaaggccttaaagcctataaacataatggcgaagttgtattattccgtccagatcaaaactttaaacgtattaataattctttagcacgtttagaaatgccagaagttgatgaagaagcattattagaagggttgaagcagcttgtcgacgttgaacgagattgggtacctgaaggcgaaggtcaatcgttatatattcgtccttttgtatttgctactgaaggtattttgggtgtacgttcttcacatcaatataaattactaattattttatctccgtcaggggcttattatggtggtgacacattaaagtcaactaaaatttatgtcgaagatgaatatgtacgtgcagtacgcggaggtgtaggtttcgctaaagttgcaggtaactatgcggccagcttacttgcacaaacaaacgctaataaattaggttatgaccaagtattatggcttgatggtgttgaacaaaaatatgttgaagaagttggtagtatgaatattttcttcgtagaaaatggcaaagtagttacgccagcattaaacggtagtatcttgcctggtattactagaaagtcaattattcaattagctgaagatttaggttatgaagttgaagagagaagagtttctatagaagagctgtttaacgcatatgataaaggtgaacttacagaagtatttggttcaggtacagcagctgttatctctcctgtaggtacacttcgctatgaagatagagaaattgttattaataacaatgaacctggtaaaatcactcaaaaattatatgacacatatactggtattcaaagtggcaaattggaagataaatacggatggagagtagaagttcctaagtat

SEQ ID NO: 34288 - DNA, 714 bp, Staphylococcus epidermidis
atgatttatgcgggtatattagcaggtggtattggttctagaatgggaaatgttccattacccaaacaatttttattattacaaggaaaacctattattattcatacagtagaaaaatttttaatgtataaggactttgatgaaatcattattgccacgcctcaaaagtggatcaattatatgcacgatttgctaaacaattatcgattagacgataagaaaataaaagtaatacaaggcggcgacgacagaaatcacactataatgaatattatagaaagcattgagcaacataaaaaattaaatgatgaagatatcatcgttacccatgatgcagttagaccatttctaacaaatcgaattattagagagaatgtggaatatgctagtcaatatggcgctgtagatacggttgttaatgctgttgatactatcatttcttcaaatgatgcacaatttatttctgagattccaattagaagtgagatgtatcaaggacagacgcctcaaacttttaaaataaaagagttaaaggatagctatttatcgttaactcaatctcaaaaggaaatattaactgacgcgtgtaaaatactcgtagaattgggtaagccagtaaaattagtcaaaggagagttatttaacataaaaattacaacaccatatgatttaaaagttgcgaattcaattattactggagctgttgataatgat

SEQ ID NO: 34289 - DNA, 746 bp, Staphylococcus epidermidis
tacataagcattttaatattaacgttttttattggcggatgtggatttatgaataaagaaaataataaagaagcagagattaaagaaaattttaataaaacattaagtatgtatccaattaaaaatttagaagatttatacgataaagaaggctatcgtgatgaagagtttgaaaagagagacaaagggacatggattattaattcagtcatgaatattcagaaaaaaggtcaagcgatggaatctagaggcatggttttatatatgaatagaaatactagaaagacgacaggtcatttttatactagtattaccacagaagataaaaaaggaagagttcataataaagaaaaaaataccctgttcaactaaaaaacaataaaattgaaccgactaaacctatcgacgatgaaacattaaaaaatgaaattaaaaactttcagtttttctctcaatatgggaattttaaaaatttaaaagactacaagaatggaaatgtttcttataacccaaacgtaccaagttattcggcagagtaccaattaagtaatgaagatgacaatgtgaagcaactcagaaagaggtatgatattccgattaagagagctcctaaactaatattaaaaggggatggtgatcttaaaggttcatctataggttataaagaaatcgagttttcttttgtcgacaacaaagaacaaagcatctactttgcggatagtttggaatttaatccaagtgatgta

SEQ ID NO: 34290 - DNA, 1029 bp, Staphylococcus epidermidis
atgattaatcaagtatatcaattagtaagtccaagacaatttgaagcaacatttaaaactattgatttacataatcataatagcaaagttattgttcgacccttatatttgtcaatttgtgcagccgatttgagatattattgtggaaatagagatagcaaaattttatctaagaaattacctatgtcattgattcatgaaagtgtaggtgaaattgtatacgactctgaacatcgactaaaaaatggaactaaagttgttatgattcccaatacaccgtctaaatcgcataatatcattgcagaaaattatttaacttctagtcattttaagtcaagtggttatgatggttttatgcaagattatatagtcatgaaacctgatagagtagtcactttaccacaagaaattgatttgagtgtagcgtcgtatactgaattagttacagttagtgttcatgcaatagatcgttttaaagcaaaagcaataccacaatttgaatcattggggatatggggggacggtaatttaggatatatcactgcagttttactaaaaaaactatatcctactactaaaattatagtttttggaaaaacattatataaattaagccgtttttcatttgtagatgaaatcattcaaattgacaatattcctcaacatatcaaaattgatcatgcatttgaatgtgtgggtggtaaaggaagtcagcaggctattgaacaaattatcaatattattaatcctgaagggagtatcgctttattaggagtgagcgaactgtctatacaagtgaatacaagaatggttttagaaaaaggtttaactataattggtagtagcagaagtggtttaaaggattttgaaaaaactattgaattgtatcgtaaatatcctgaagttcttaatcaattagcattacttaaaggtaaagaatttgaaataaataccatagaagacctcattacagcgttcgaatatgatatttctaacgcatggggaaaaacagttttaaagtggaatatt

SEQ ID NO: 34291 - DNA, 1881 bp, Staphylococcus epidermidis
gtgggagtcgtgtcaatcattactgggattacaatatttgtcagtggtcagcatgctcaagctgctgaaatgacacaatcatcatcagattctaacgaacagtcacaacaaacagaacaagttgaacacaaagaagatacaactcatttatcttacgaattgaatcaagagggtgagacagcgagccaatcaaagactagtcaagagaatcaatctgatggcaatgtacaaaaaaagagtaatcaaatacaacaagattcaacacaaacgtcaccattaaatgaccaaaaacaaacttcaatggaacaacaatcaaaagacaatcatgttaccccaaattcacgtcaggatacatatccaaaaggccaaaatcaagatgataaaggcaaacaacagtttaaagataatcaacactcacaaacagaacatcaacctaatactcaaaaccaaaataatgatcaagattcatcagataaaaagcaacacccatctgatcaaactcaagactcatcttcaaaaggaacacaacctaaacaatcacagtctatagaagatagagataaaacagtaaaacaaccatcttctaaagtacacaaaataggtaacacaaaaactgataaaacagttaaaacaaatcaaaaaaagcaaacatcattaacttcaccacgcgttgtgaaatcaaaacaaactaaacatatcaatcaacttactgcgcaagctcaatataaaaatcaatatccagtcgtgtttgtacatggatttgtaggtttagtcggtgaagatgcattcagcatgtacccaaattattggggtggtactaaatataacgtgaaacaagaacttacaaaattaggttaccgagttcacgaagccaatgtaggggcatttagcagcaattatgaccgtgctgttgaactgtattattatattaaaggtggaagagtagattatggtgcagcacatgctgcaaaatatggtcacaagcgttatggcagaacatatgaaggcatcatgcctgattgggaaccaggtaaaaagatacatcttgttggacatagtatgggtggccaaacgatacgcttgatggaacattttttaagaaatggaaatcaagaagaaatagattatcaacgtcaatatggtggtacggtatccgatttatttaaaggtggacaagataatatggtgtctacgattactacattaggaacgcctcataatggcacacctgctgcagataaactagggtcgactaaatttattaaagatacaattaatagaattggaaaaattggtggaactaaagcgctcgatttagaactaggtttttctcaatggggcttcaaacagcaacctaatgaatcatatgctgaatatgcaaaacgtatagcgaatagtaaagtttgggagactgaagatcaggctgtaaatgatttaacaactgctggagcagaaaagttaaaccaaatgacgacattgaatcctaatatcgtctatacatcatatacaggtgctgcaacacatactggaccattaggcaatgaagtgccgaatattagacaattcccactattcgatttaacaagtcgtgtgataggtggagatgataataaaaatgtcagagtaaatgatggcatagtacctgtgtcttcttcactacatccaagtgatgaagcatttaagaaggtaggtatgatgaacctagcaactgacaagggtatctggcaagtgagacccgtacaatatgattgggatcatctagatttagtcggcttagatactactgattataagcgaactggagaagaattaggtcaattctatatgagtatgataaataatatgttgaaagtcgaagagttagatggtattacacgtaag

SEQ ID NO: 34292 - DNA, 1692 bp, Staphylococcus epidermidis
atgacaaagcaaaatatatttatagatgacatttattgggaacgtgtccaactctacgtcaaaggacattttgaaggagtaaaacctacaagaaatttccttctcagaaacctaacagaaacaaagctgttaaatgctaatcgtgttaatattcaaggatcaacttttgaggcaagatttaatattgctattttagaaaaaggcaattttttaagtacaggtaattatatattaatcaaccgacaagaagatgaatacgtctgccaaattaatccaaaatttttgaatgataaaaaaaagcaaatgactttagaggagttaagagattacaactcacttgagacccaatcgttacaaaaaagttatttattaaaaaattatggtaagagttttcaaaggtataataacaaagagattaaatcttacgtcattgttccagcaatttcccaagaaattaatgagtttatttttaaagttcaatataaatctgaaataaataaaataagtaaacttaagcatttatcattcatattacataaagctttgaggaaaattagtttcaatgtaagagataaaatctatttgtcgatatttaacatttccaaaacagtatataagaataataaaaatcatgttttgtttacatcagattctagagcaaatatgtcaggaaattttaaatttatatacgaagaaatgcttaaacaacaattggacaaaaaacttgtcattcattccatttttaaacctaatatagcaaataggagatcgtttattgataaattaaaattcccatattttttaggaaaatctaaatatattttggttgatgattatcatccgatgatatataaacttcaatttagagaaaaccaagaaatagttcaagtatggcatgccgtgggtgctttcaagactgtaggatttagtagaactgggaaaaagggaggacctttcatagattctattggccataggaattatagtaaagcttatgtttcgtcaaataatgatattctttactatgctgaagcttttggaattgaagaacataaggttattccaacaggtgttccacgtacggatgttttgttcgatgaatcttataaaacacgcattaaacaaagtttagaaacaaaattaccaattataaaaaataaaaaagtcattctttttgcacctacatttagaggaagtgggcatcgcacagcacactatcctttctttaaaattaattttgcaagattagctagttattgtgaagaacaccaagctactgttttgtttaaaatgcatccttttgttagaaataaattaaatatcccagcaatttataataaatattttttagatatttcaaattaccgcgaagtaaatgatgtattgttcattacggatattttaatctctgattattcttctttaatctatgaattttcagtttttaaaaaaccaatgcttttttatgcttttgatttggaagattatatttacacgagagatttttatgaaccttatgaaacctttgttcctggtaaaatagtgaaaacttttgatgaacttattttagcgttagaaaataatgattttgaatttgaaaaggtaaagccgtttttaaataagaattttaaatataaagatggtaaatcgagtgaacgattagttaaagatttatttaacaaattttttcag

SEQ ID NO: 34293 - DNA, 693 bp, Staphylococcus epidermidis
ttggaatggatattatttgataaagatggtacattgattgagtttgacagtagttgggaaaaaattggcgtacgtctcgttgatcaacttttagaaacctttccagtacatgataaggaagcggcacatcgccaattaggcattatcgataaaaaaattaagccagattctgttatgggatcgggttcattaggtgaaattatagagtcttttaatggtgtaacaggtaaagaaacatcagattggacaaaggatacgagtcaggaactcattgattcaagagtgcctgaaaacaattggattgatggtgtacaagaaactattcaagctcttagaaatgaaggatatcacataggtatagtaacaagtgatactaaaaaaggagtcgatcaatttctggaggaaacgcaaactagaaatctctttgatttagtaatttctacagaaacacacgcagaagaaaagccacatcctaaagttttagatccactatttaatgcttttgatgttaaaccagaaaaggtagcaatagtaggagatacggccaacgatatgaaaaccgcgattaatgctcatttaggattagctatcggtgtgctaacaggcgtggctaaaaaagaggaactctacgacgcagatgtcatcattaatagtgcaaaagatgttaaacaagttatagagcaatacggaaaa

SEQ ID NO: 34294 - DNA, 750 bp, Staphylococcus epidermidis
atgaaaaaaactgcaattatcacgggaagtagtcgtggattaggcgctaaaattgcaataactttactagaaaaaggctacaatgttgttgttaattacaaacaaaataaggataaagctgaaaaattaattagaaattataatcaaagtagggctatagctattcaagctgatgtgacagacagaaacgatgtgaatcgaatgattcaaactgccacacaacattttggaaaaatagatatagtcattaataatgcacttgttggttttaaatttgatccaaatcagcaaaaatcgtttaaagatttaacttgggaagattatcaacaacaacttaatggtactttaaaaggagcatttaatgtgactcaaagcgtcataccacaatttatagaacaacaaagtggatgcattgttagtattggaaccaatttgtatcaaaatccagtcgtaccttatcatgagtatacaacagcaaaggcaggtctcattggctttactcgtaatattgctgcagaacttggacaatatggtattacagcaaatgttgtttctggaggattactcaaaacgactgatgcaagtgcagtcactacacctgaagtatttgatttaattgctcaaactacacctcttagaaaagtaacatcacctcaagatgtagccaatatggtcgtatatctcgcttcagatgaagcacgtggcgtaacaggtcaaaatattaccgttgacggtggtttaacaatgaac

SEQ ID NO: 34295 - DNA, 1353 bp, Staphylococcus epidermidis
atggctaatacacgagagttaaatcataaagatgcacagtatgtatggcacccattcacacagatgggagtctatgctaaaaatgacaatattattattgaaaaaggtcgcggaagttatttatacgatactgaaggtaataaatatttagatggttatgcgtcattatgggtcaatgtgcatggacatcagcataaaaagttaaataaagctattcataaacaacttgataagattgcccattctacgctattaggttcgtctaatattccatcgattgagctagccgaacagttagtcaaattaacaccagatagattacaaaaagtgttttactccgatacagggagtgcgtcggtagagattgctattaagatggcttatcaatattggaagaatatcgatgctgaacgatatgcgaagaagaataaatttcttacattacatcatggatatcatggagatacaataggttctgttagcgttggtggtatcgatagtttccacaaaatttttaaagaccttatttttgaaaatatacaaatagaaacaccgtgtttatataaaagtaagtatcgcaatgaagcggaaatgcttaattcaatactgaatcaaattgaaaatatattatctgagagaaatgatgaaatagtaggatttattctagagccacttatacaaggtgcaacaggtttattcgttcatccgcatggttttttgaaagctgtagaacagttatgtagaaaatatgatgtgttactaatttgtgatgaagtagctgttggtttcgggcgtacgggagaaatgtttgcctgtaaccatgaagatgtacaaccagatattatgtgtctgggtaaggcaattacaggcggttatttaccgttagcggcaactttaacatctcaaaagatatatgatgcttttttaagtcagagtcacggtaagaatacgtttttccacggtcatacatatacaggtaatcagttagtttgttccgtagcacttgagaatattaatctttttaaaaagaagcatctgattgggcacattcaaaagacatctcaaacattaaaacaacgcttagaggcacttcaacctcataaaaatattggagatattagagggcggggattaatgtatggtgtggaattagttgaaaacaaatcaacgcagacaccactcgatattccaactgtagaactgattatacgtcgatgtaaagagaatggattgatgattcgtaatttggaaaatgtcatcactttcgtacctattttaagtatgtctaataaagaaattaaaaaaatggttaaaattttcaacaaagccttacatcaaacattgggtaagaag

SEQ ID NO: 34296 - DNA, 876 bp, Staphylococcus epidermidis
atgataaagctaatagcaactgatatggatggaacattacttaacgctggtcatgaaatcaccactatgaatcaagaagcgataaaatttgcgcaagcgaacggcattacagtagttattgcaactggtagagcattttatgaggcacaaacacctgttgctgaaacagacttaaaagtaccttacatatgtttgaatggtgcagaagttcgtgatgaatcatttaatataatgagtacatcgcatcttaatcatgatttagtacacaaaattactacagcacttaaaaataatcatatttattatcaaatttacacaaaccgtggcatatatacagaagatcctaaacgtgatttagcaatctatatagatattgcagaacgtgcgggtcaaaaagcagatgtagacaagatacgaaataatatacaaaaacgcatagataacggtactttaaaagttgtagataattatgattcaattgaagatattcctggagaacttattatgaaggtgttagcttttgatgcagatttaagtaaaatcgaccaagtaggtcaagcgttagcatcatcaccaaatttagcagtatcttcatcatcaagaggtaatctagaaatcactcattcaaacgctcaaaaaggcattgccttatcagctattgctcatcaattgggtatagatttaacagatgtgatagcaataggagataatttaaatgatatttcaatgctagaacgtgtaggttatccagtagcaatgaataatgctacagacgaagttaaacatattgctaaatatgtcacagacaccaatgaaaatagtggagttggaaaagcaatcatgaaaatattaaaagaagaaaataatttagaggtg

SEQ ID NO: 34297 - DNA, 2676 bp, Staphylococcus epidermidis
ttgtttggtttaggtcataatgaggccaaagctgaggagaatacagtacaagacgttaaagattcgaatatggatgatgaattatcagatagcaatgatcagtccagtaatgaagaaaagaatgatgtaatcaataatagtcagtcaataaacaccgatgatgataaccaaataaaaaaagaagaaacgaatagcaacgatgccatagaaaatcgctctaaagatataacacagtcaacaacaaatgtagatgaaaacgaagcaacatttttacaaaagacccctcaagataatactcagcttaaagaagaagtggtaaaagaaccctcatcagtcgaatcctcaaattcatcaatggatactgcccaacaaccatctcatacaacaataaatagtgaagcatctattcaaacaagtgataatgaagaaaattcccgcgtatcagattttgctaactctaaaataatagagagtaacactgaatccaataaagaagagaatactatagagcaacctaacaaagtaagagaagattcaataacaagtcaaccgtctagctataaaaatatagatgaaaaaatttcaaatcaagatgagttattaaatttaccaataaatgaatatgaaaataaggttagaccgttatctacaacatctgcccaaccatcgagtaagcgtgtaaccgtaaatcaattagcggcagaacaaggttcgaatgttaatcatttaattaaagttactgatcaaagtattactgaaggatatgatgatagtgatggtattattaaagcacatgatgctgaaaacttaatctatgatgtaacttttgaagtagatgataaggtgaaatctggtgatacgatgacagtgaatatagataagaatacagttccatcagatttaaccgatagttttgcaataccaaaaataaaagataattctggagaaatcatcgctacaggtacttatgacaacacaaataaacaaattacctacacttttacagattatgtagataaatatgaaaatattaaagcgcaccttaaattaacatcatacattgataaatcaaaggttccaaataataacactaagttagatgtagaatataagacggccctttcatcagtaaataaaacaattacggttgaatatcaaaaacctaacgaaaatcggactgctaaccttcaaagtatgttcacaaacatagatacgaaaaaccatacagttgagcaaacgatttatattaaccctcttcgttattcagccaaagaaacaaatgtaaatatttcagggaatggcgatgaaggttcaacaattatcgacgatagtacaatcattaaagtttataaggttggagataatcaaaatttaccagatagtaacagaatttatgattacagtgaatatgaagatgtcacaaatgatgattatgcccaattaggaaataataatgacgtgaatattaattttggtaatatagattcaccatatattattaaagttattagtaaatatgaccctaataaggacgattacacgacgatacagcaaactgtgacaatgcaaacgactataaatgagtatactggtgagtttagaacagcatcctatgataatacaattgctttctctacaagttcaggtcaaggacaaggtgacttgcctcctgaaaaaacttataaaatcggagattacgtatgggaagatgtagataaagatggtattcaaaatacaaatgataatgaaaaaccgcttagtaatgtattggtaactttgacgtatcctgatggaacttcaaaatcagtcagaacagatgaagaggggaaatatcaatttgatgggttaaaaaacggattgacttataaaattacattcgaaacaccggaaggatatacgccgacgcttaaacattcaggaacaaatcctgcactagactcagaaggcaattctgtatgggtaactattaacggacaagacgatatgactattgatagcggattttatcaaacacctaaatatagcttagggaactatgtatggtatgacactaataaagatggtattcaaggtgatgatgaaaaaggaatctctggagtaaaagtgacgttaaaagatgaaaacggaaatatcattagtacaacaacaactgatgaaaatggaaagtatcaatttgataatttaaatagtggtaattatattgttcattttgataaaccttcaggtatgactcaaacaacaacagattctggtgatgatgacgaacaggatgctgatggggaagaagtccatgtaacaattactgatcatgatgactttagtatagataacggatactatgatgacgactcagattcagatagtgattcagactcagatagcgacgactcagactccgatagcgattccgactcagacagcgactcagattccgatagtgattcagattcagacagtgactcagactcagatagtgattcagattcagacagcgattccgactcagacagtgactcaggattagacaatagctcagataagaatacaaaagataaattaccggatacaggagctaatgaagatcatgattctaaaggcacattacttggagctttatttgcaggtttaggagcgttattattagggaagcgtcgcaaaaatagaaaaaataaaaat

SEQ ID NO: 34298 - DNA, 876 bp, Staphylococcus epidermidis
atgacagaatttgacttatccactagagagggtcgttggaaacatttcggttctgttgaccctgtcaaaggtacgaaaccaactactaaaaatgaaatgaccgatttacaaagcactcacaaaaatttcttatttgaaatagaggaagtaggcattaaaaatttaacttatccagttttaattgatcagtatcaaacagctggtttatttagtttttcaacgagtttaaataaaaatgaaaaaggcattaatatgagtcgcatattagaaagcgttgaaaaacattatgataatggcattgaacttgaatttaacacactacatcaattgttgcgtacgctacaagataagatgaatcaaaatgctgcaggtgttgatgtgtcaggtaaatggttctttgatcgttatagtcctgttacacatattaaagctgtaggtcatgcagatgttacttatggtttagctattgaaaatcataccgttacacgtaaagaattaactattcaagccaaagtaacaacactatgtccttgctcaaaagaaattagtgaatattctgcacataatcaacgtggtatcgttacagttaaagcatatttagataaaaataatgacgtcatcgatgattataaaaataaaattttagacgctatggaagccaacgctagttctatcttatatccaatcttaaaacgtcctgatgaaaaacgagtaacagaacgtgcttatgaaaacccacgatttgttgaagatttaattcgactaattgcagcagacttagttgaatttgattggattgaagggttcgatattgaatgtcgtaatgaagagtctatccaccagcatgatgctttcgcacgtctgaaatatcgcaaa

SEQ ID NO: 34299 - DNA, 729 bp, Staphylococcus epidermidis
ttgaaaatgattaatttagattcaaaaaaacttgcgtcattttatgtagcatgcgagttgtttaaacagatacagcagtaccctcataccaaactcggtttagcaactggtggaactatgactgacgtatatcattacttagtaaatttattaaccaaaaataaagctgatgtgtcgcaggttgaaacatttaatttagatgaatatgtaggtttaaaagcaagtcatcagcaaagttaccatacctatatgaataaagtgctatttgagcaatatcctcattttgctaaaaatcacattcatattcctgatggctattcagaaaatctagaagcagaagcggaacgatataacaaattattagatgaaagaggtccgattgatattcaaattttaggaattggagaaaatggtcacattggatttaatgaaccaggaacagacttcaatagtgaaacacatgtggtgaacttaacagaaagcactataaaagcaaatagtcgatattttgacaatgaagcggatgttcctagacaagcagtttcaatgggattagcaagtattttaaaagctaaaaggattatactacttgcatttggtccaaagaaaaaagaggccataagtaaactgttaaatgaacaggttaccgaagatgtacctgcgaccattttacacacacatcctaatgttgaagtttatgtagatgatgatgcagcaccagattgttta

SEQ ID NO: 34300 - DNA, 978 bp, Staphylococcus epidermidis
atgtgtacggctatttctttatatacaaaacaacgttatcattatttagctagaacgatggactttgcatttgaatttaatggtatcccaaccattgttccacgtcattatcactaccaatttgatctagattcagacatgcgtcttgaatatggttttgttggaacaaatttaaaagtaggacgttatagatttggtgatggtataaacgaaaaaggtttagctatttcgaaccattacttcactggtgaagcctcatacagtacccataaacgttatggttattttaacttagcacctgaggagtttattgtttgggttttaggttttaataaaagtattagcgaattaaaacaaaaggttaagaagatcaatattatgaatgaaaaaaatacaactttgaatatcgttcctcctttacatttcatggtcactgatgaaacaggacataccgtagccatagaacctcacaatggcttattaatagttaaagataattatgttcataccttaacaaatgcgcctaaattagattggcatctatctaacttaagaaattatgcttatttaacaccacagaaatcaaccaatcaattaataggtaaagtgctagtaagatcaatgggttgtgaagcaggaacaaatggcttaccgggtggttatacttcaacagaacgttttatacgggctacatatttaagacaccaactacgctgttcccataatgaagatgaaaatttaatgaattgttttaaagttctagaatcagtcagtatccctcaaggtgcagttatcgatgccaataaaatacattacacacaatatcaattagtgatggaaagtaaagaaagaagctattatattaagccatactttagtaatcaaattttcaaaataaaattaactgaagatcttttaagtaagaatgagttgacattcttacctattaatcacgaattaaagataacatcaatacag

SEQ ID NO: 34301 - DNA, 987 bp, Staphylococcus epidermidis
atggctgatttattatctgtattacaagacaaattatccggaaaaaatgtaaaaatagtattacctgaaggtgaagatgaacgagtgctcattgctgcgactcagctacaaaaaactgactatgtttcacctatcgttttaggaaacgaagataatattaaatctcttgcgtctaaacacgctttagatttaacgcaaattgaaatcatagatccagcgacgagtgaacttaaagatgagcttgtagatgcttttgttgaaagacgtaaaggtaaggcaactaaagaacaagcagttgaattattagataatgtaaattatttcggaacaatgcttgtgtatactggaaaggctgaaggtttagtgagtggtgctgcacattctactggagatacagtaagaccagcattacaaattatcaaaactaaacctggtgtatctagaacatctggtattttctttatgattaaaggtgatgaacaatatatttttggggattgtgctattaatccagaattagatgctcaaggacttgctgaaattgcagtagagagtgctaaatcagcacaaagctttggaatgaaccctaaagtagctatgttaagcttttctacaaaaggttctgctaaatcggatgatgttactaaagtgcaagaagcattgaagttagctcaagaaaaagctgaagcggatcaattagagcatgtagttattgatggggaattccaatttgacgctgctattgttcctagcgtagcagagaagaaagcacctggtgcaaaaattcaaggtgatgcgaatgtatttgttttccctagtctagaagcaggtaatattggttataagattgctcaacgtttaggtggatacgatgcagtaggaccagtcctacaaggattaaactctccagtcaatgatttatctcgtggttgctcaactgaagacgtttataacttatctattattacagctgctcaagccttacaa

SEQ ID NO: 34302 - DNA, 837 bp, Staphylococcus epidermidis
atggacttagcaactaaatattttaatcaaatcaactggcgttatgtcgatcattcaagtggtttagagcccatgcaatcttttgcgtttgatgacactttttccgaaagcgttggtaaagacttatcttgtaatgtagtacgaacgtggatacatcaacacaccgtgattttgggcattcatgattcgcgtttaccatttttaagtgatggtattcgttttcttacagatgaacagggatataatgcgattgttaggaattctggtggcttgggtgtcgtattagatcaaggaatattaaatatatctttgatttttaaaggacaaaccgaaacgactattgatgaagcctttacagtgatgtatttattgattagtaaaatgtttgaggatgaagatgttagtatcgatactaaagaaattgagcaatcgtattgcccaggaaaatttgatttaagtattaatgataagaaatttgccgggatttctcagcgacgagtacgtggtggtatcgcagtgcaaatatacttatgtattgaaggttctggctcagaacgggcattaatgatgcaacagttttatcaacgtgcacttaaagggcagactactaagtttcactatccagacatagatccctcatgtatggcatctttagaaactcttttaaatagagaaattaaagtgcaagatgttatgtttttattattatatgcactaaaagatttaggggcaaacttaaatatggatcctattacagaagacgagtggacacgttacgaggggtactatgataagatgctagaacgcaatgcgaaaataaatgaaaaattagatttt

SEQ ID NO: 34303 - DNA, 981 bp, Staphylococcus epidermidis
ttggtgaaaagtggcaaagcacgagcacatacaaatattgcgttgattaagtattgggggaaagctgatgaaacttacattattcctatgaataatagtttatcaattaccttagatcgattttatactgaaacaaaagtgacttttgaccctgattttactgaagatcgccttattttaaatggaaatgaagtgaatgccaaagagaaagaaaagattcaaaactatatgaatatagtgagagatttggctggaaatcgtttgcatgcgcgaattgaaagtgagaatcatgtgccaacagcagctggacttgcttcttcagcgagtgcttacgctgctttagctgccgcttgtaatgaagctttgtcattgaacttatcagatacagacttatcacgtttagctcgacgtggttcaggttctgcttctagaagtatttttggtggatttgctgaatgggaaaaagggcatgatgatttgacctcatatgcacatggaattaattccaatggttgggaaaaagatttatcaatgatatttgtagtgattaataatcagtcaaaaaaagtatctagtaggtcaggtatgtcactaacaagagatacttctagattctatcaatattggttggatcacgttgatgaagatttaaatgaagctaaagaggcagttaaaaaccaagattttcaacgcttaggcgaagtcattgaagcaaatggtttacgtatgcatgccactaacttaggtgctcaacctccttttacgtatttagtgcaagaaagctacgatgctatggcgattgtggaacagtgtcgaaaagccaatttaccttgttactttacaatggatgcgggtcccaatgtaaaagttttagtagaaaagaaaaataaacaagctgtgatggaacaatttttaaaagtatttgacgaatcgaagattatagcaagtgatatcatcagctctggcgttgaaattattaag

SEQ ID NO: 34304 - DNA, 1074 bp, Staphylococcus epidermidis
atgattcaggtaaaagcccccggaaaactttatattgcaggcgagtatgcagtaaccgaaccaggatataaatctattcttattgcagtaaatcgctttgtaacggcgacaattgaggcgtcaaataaagttgaaggtagtattcattccaaaacattacattatgaaccagttaaatttgaccgtaatgaagatagaattgaaatctcagatgttcaagctgctaagcaactgaaatatgttgtgacagctatagaagtgtttgaacagtatgtgcgcagttgcaatatgaatttaaagcactttcatttaaccattgatagtaacttagcagataactctggtcagaagtacggattaggttcaagcgccgctgttttagtatctgttgttaaagctttgaatgaattctatggtttggaattatcaaacctttatatttataaattagctgtaattgcaaatatgaaattacaaagtttaagttcatgtggtgatattgcggttagtgtctacagtggttggcttgcatatagtacgttcgaccatgactgggtgaaacagcaaatggaagaaacatcggtgaatgatgttttggaaaaaaattggccaggcttacatatcgaacctttacaagctcccgaaaatatggaagtccttattggatggactgggtccccagcttcttctccacacttagtgagtgaagtcaaacgtttaaaatcagatccaagtttttatggtgattttttagatcaatctcatgcttgtgtagaaagtttaatccaagcttttaaaactaataatatcaaaggtgttcaaaagatgatacgtataaacagacgtattattcaatctatggataacgaagcatcagttgaaattgaaacagataagctaaaaaaattatgtgatgtcggtgaaaagcacggtggcgcttctaaaacttcaggtgctggtggtggcgattgcggcattactattatcaataaggtaattgataaaaatattatttataacgaatggcaaatgaatgatatcaaaccattgaaatttaaaatttaccatggacaa

SEQ ID NO: 34305 - DNA, 339 bp, Staphylococcus epidermidis
atgaaaaataaatttttaatctgtgatgagtgtcaggctgtgaatttaaaatctttgaagcgaaaattagaaaaattagatccggaagctgaaattgaaataggctgtcaatcttattgtggaccaggtcggcgtaaaacatttgcatttgttaataatcgaccacttgctgcattaaccgaagaagaacttatggaaaaggttacaaaacaattaaaaaaaccacgtgatccagaagaagaagagcgactaagaaaacgtaacgaagaacgaaaacgtcgtaaagaagaacaagatcgcaaacttaaggaaaagttaaagaagcacaaagcagagaaa

SEQ ID NO: 34306 - DNA, 1329 bp, Staphylococcus epidermidis
atgaaaaattatgatttgattattattggttttggaaaagcaggtaaaacattagcggcacatgctgctagtcacggacaaaaggttgcagtggtagaacaatcaacaaagatgtatggcggtacatgcattaatatcggatgtataccgactaaaacattaattcatgatggtattgaaggtagttcattcaaagaggctattactagaaaaaaagaagtcgtacaggcattgaataacaagaactatcaaggcttaaattcaaaggacaatatagatgttctaaattataaagctaattttatttctaacgaggtaatagaactacaagataataatggaacaattcaagaaacaattacagcagataagatagtaatcaacactggttcacgtgcaaatatcccagatatcaaagggatagatacagctcaaaatatatatgattctactggattactaaatattgactatcaacctcaagaacttgttattattggtggtggttatatcgctctcgaattcgcttcaatgtttgcaaattttggaacacatgtaacaattcttgagcgtggtgatgctatcatgacaaatgaagatcaagacattgcaaatcttattgtcaaagatttacaagataaaggtgtgactataaacactaatactagtactattgcattttcaaacaataaagatcaaactatcatacacacaaatcatggagaaatatcagctgatactgtgctcttagccacaggtcgtaagccaaatacaaatcacttaggtcttgaaaatacagatgtaaaaatcggaaaacaaggtgaagtaattgtaaatacacatttgcaaagtacagtgaaacacatatacgctgcaggtgatgttaaaggtggattgcaatttacgtatatttcactcgatgattatagaatcattaaatcacatctatttggtgatggttctagaacaactgaaaatcgtggtgcaataccttatacggtctttattgatcctcctctatctagagtaggactaattgcaagtgaggcgaaattacaaggatacgatattctagaaaataaagtctttgtcagtaacataccccgtcacaaaatcaataatgattccagaggtttatttaaagcagtaattaataaagatacaaaagaaattttaggagcgtcattatatggcaaagaatcagaagaactgattagcttaatcaaacttgctatagatcaacatattccttacacagtattaagagataatatatacacacatccgacaatgaccgaatcctttaatgacttgtttttagaaccactt

SEQ ID NO: 34307 - DNA, 936 bp, Staphylococcus epidermidis
atggtaaaacaagtacgattaggtaaatctgatgtcaatgtttttcctatcgcattaggtacaaatgcagtaggtggtcataatttatatcctaatttggatgaagagcaagggaaagaagttgtacgtcaagctattgataatggtataacattattagatacagcatatatctacgggcctgaacgttctgaagaattagttggacaagttgtaaaagaatatccacgcgagaaagtgcaaattgcaacaaaaggttcgcatgttattaaagaaaatgaagaagttgttcaaaataacgatccagaatatttaaaacagcaagttgaaaatagtttggaacgtcttcaagtggattatattgatttgtattatattcattttcctgatgacgatacaccaaaagataaagcggtggcggctcttaaagagcttaaagatgaaggtaaaattaaagcaataggtgtatctaatttctctttagaacaattaaaagaagcgaataaagatggatatgttgatgttgttcaattagaatacaatttattacatcgtgaaaatgaagaagtaatggcatatgctgcagaaaataatattacatttgttccttacttcccacttgcttcaggtatactagctggcaagtacgatgaaaatcaaacatttgaggatcatcgtgcagaacgtcctgattttcaaccagacgtattcaaagataatgtgcgtcgtgtaaaagcattaactgatattgcagaggcacatgatacaacgattgccaatgtcgtattagcattttatcttacacgtccatcactagatgttgtcatccctggtgcaaaacgtgcagagcaagttgttgaaaatattgatgctgcaaatattgaattatcgcaaggtgaaatagacaaaattgatagtttattcccaattaaaaaa

SEQ ID NO: 34308 - DNA, 432 bp, Staphylococcus epidermidis
atgaccatgaatagacaacaaaataaccttatctttcaatacgctgccgtgattattttcttcatggtcattgtgtttggcttttcattatttttagctggacattatacacctggtggcggtttcgttggtggtttgcttttcgctagtgcattattagttattacaattgcatatgatgtaaaaacgatgcgaaagatttttcctttagattttaaaatcttaattggtattggtttattattttgcgtgggtacaccattaacaagttggttcatgtctaaaaacttttttacacatgtcacttttgacatccctttgcctttacttgaacctatgcacatgacgacagcgatgttttttgatttcggtgttttatgtgcagttgtaggaactattatgactataattatttcgattggagagaacgaa

SEQ ID NO: 34309 - DNA, 2403 bp, Staphylococcus epidermidis
gtgagtttgttacatattgcggtactattaccgttaatatttgcactcattattccattcctataccggttcgttaaacgtatacatttaggatggtttgtattacctgttcctattgtcttatttatatatttcatatcattgatttcaatgacgatgtcaggtaataacgtaatgaaaaacttaaattggatgccacatattggaatgaattttaatttatatgtggatggtctcggattattattcagtttgcttatcactggcataggaagtctagtggttttatattctatcggatatttaagcaaatcagaacaactcgggaatttttactgttatttattactatttatgggtgcaatgttaggagttgtactctctgataattttattattttatatttattttgggagttaacttctttctctagctttttattaatctctttctggagagagaaaaaagcttcaatttatggtgctcaaaaatctttaatcattaccgtattaggtggcttgagcatgctaggtggtatcattttactttccctagctactgatacttttagtattcaggctatgatttcaaaagcaagtgacattcaaaatagtcctttctttatcttagtaatgatactttttatgattggtgcatttacaaaatctgcacaagtgcctttttatatttggttaccagatgctatggaggcgcctacgccagtgagtgcataccttcattctgcaacgatggtaaaagcaggactatatctaatcgcaagaatcacacctatttttgcaatatccgaaggttgggtatggacaattacacttgttggtttaatcaccctattttgggcatcactcaatgcaacaaaacaacatgacttaaaaggtattttagctttctcaactgtgtctcaactagggatgattatgtctatgcttggtattggtgctgtaagttatcattatcaaggcgctaatagtcaactttatgttgctggatttgttgctgccatatttcatttaattaatcatgccacgtttaaaggtgcactatttatgattacaggtggtattgatcattcaactggtacacgtgatgttaaaaagttgggcggtttacttacaatcatgcctatctcattcacgcttacagttattacaacattaagtatggctggtgtgccgccttttaacggctttttatcaaaagagaaattcttagagtcaatgattaatgttacacatttaaatttaatgagtttaaatactttaggtattcttttaccaatcattgccattattggtagtattttcacatttgtatattcaattaaatttatattgcatatattctttggttcttataaacctgaagctctgccaaaacaagcgcatgaatcttcaattttaatgcttatttcacctatcattttaacatcactagttatagtattcggtttattcccaagtatattaacgcaatctattatagagccggcatctgtagcagttagtcaaacatcaaatataactgctgagttccatttattccatggtataactccagcattcctatcaacaataggtatttatattattggtattttattattaatttcatttagttattgggttcgtttattacaagcacatccatatcagttaacgttgaatcattggtatgacacttcaggccaacgtattccaggatattccgaaaatataacaaatagttatgttacaggtttttctagaaataatttggtgattatcttaggtattctcattgctttaacttttgttacagtcatcagtgtacccttcagtattgactttaaaaacgtgagtcatttacgcgtatttgaaggtgcaacagtattgtttttactgattgcttcaactttcattatatttgcaaaatcacgtttgtttagcattatcatgttaagcgctgtgggttacgctatatcagtattatttattttctttaaagcgcccgacttagcattaacacaatttgtagtggaatctatttctacagcattattcttactatgcttttatcacctacctaatttaaatcgctacaatgaaaaaccaacctttaaactgacaaatgctgtgatttcaattggagtgggattatcagtgattattttaggattaattggctatggtaatagacactttgactctattactaaattctatcaagaacatgtttttgatttagcacatggtaaaaatatggtaaatgtcatcctcgtagatttccgtggtatggatactttattcgagtcatctgtactaggtattgcaggtttaggcgtatatacaatgattaaattacgattaaaacagaaaaatcaatcaagtgaggtgaatgaccatgaa

SEQ ID NO: 34310 - DNA, 1020 bp, Staphylococcus epidermidis
atgaaagcagctgtagtaaccaaagatcacagagtaagtattgaagaaaaacgtttaagagaattaaaacctggagaagcattagtaaagactgaatattgtggtgtatgtcacactgatttacatgttaaaaatgcagatttcggtgacgtaacaggtgtaacgctaggacatgagggaattggacgtgtcattgaagttgctgataacgtagattcattaaaggtaggggatcgtgtatctatagcatggatgtatgcagcatgcggtaattgtgagtattgcacaactggtagagaaacattatgcagggatgttcttaatgccggatatactgttgacggggcaatggctgaagaagtcattgttgatgcgaattatgcagttaaagttcccgaaaatcttgatccagcggctgcttcatctattacctgtgcaggtgtgacaacatataaagcagtaaaagtgagtggcatcgaaccaggacaatggttaggcgtatttggtgtgggcggattaggtaatttagcattgcaatacgccaaaaacgtaatgggcgcgaaagttgttgcattcgacattaatgatgataaattaaattttgctaaagagcttggtgctgatgcaatcataaattcaactaatgttgatcctattgaggaagttaatcgtctaacgaataataaaggattagatgcaacggtgattactgctgtagctaaaacaccttttaatcaagcagtggatgttgttaaggcgggtgcacgtgtggtagcagtaggacttccagtagacaaaatggatttagatattccacgtttagtgcttgatggaattgaagtcgttggctcattagttggtaccagacaagatttaagagaagcatttcaatttgctgccgaaaataaagttattcctaaagtccaattaagacaattatctgaaattaacgatatttttgatgaaatggaaaagggaacaatcacaggtcgaatggtcattgatatgaaaagctcgcac

SEQ ID NO: 34311 - DNA, 1188 bp, Staphylococcus epidermidis
atgactcaatctgaaaaaattattaacttaacaaatcactatggggcgcataactacgttccacttccaattgttatttctgaagcagagggtgtatgggtgaaagatccggaaggtaacacgtatatggatatgctttcggcctactcggcagtgaatcaaggtcatcgacacccaagaattattcaagcattgaaagatcaagcagataaagtcactttagtatcacgtgcttttcatagtgataatttgggtcaatggtatgagaaaatatgtaaactcgcaggtaaagacaaagcattgcctatgaatacgggagcagaggcggttgaaacagctttaaaagctgctcgtcgttgggcttatgatgttaagggtattgagccgaacaaagctgaaattatcgcttttaatggtaatttccatggacgtacgatggcaccagtatcattgtcttcagaagctgagtatcaacgaggctatggtccattgttagatggctttcgaaaagttgagtttggtgacgttaatcaattaaaagcagcaattaataaaaatacagcagcaattttagtagaacctatacagggagaagcagggattaacgtaccaccagaaggatatttgaaaacaattagagaattatgtgatgaacatcaaattttatttattgctgatgaaattcaagcaggattaggacgttcaggaaaattatttgcaacggattgggatcatgtaaaaccggatgtttatattttaggaaaagcgttaggtggaggggtatttcctatctcggtagttcttgcagataatgaggtattagatgtatttactcctggctcacatggttctacatttggtggaaatccactagcgagtgcagtttctattgcagctatagatgtcattattgacgaggatttacctggtcgttcattagaattaggagaatattttaagtctgaattgaaaaaaattgagcatccatctattaaagaagttaggggacgaggattatttatcggtattgaattacatgaaagtgccagaccatattgtgaagctttgaaagaacaaggattattatgtaaagaaactcacgacaccgttattagatttgcacctccattagtgataacgaaagaagagttagacatggctttagagaagattaagagtgtatttgca

SEQ ID NO: 34312 - DNA, 1242 bp, Staphylococcus epidermidis
atgactgagaataataatttagtaacttccactcaagggattattaaagaagcattacacaagttgggctttgatgatggtatgtatgaccttataaaagaaccaattagatttttacaagtgcgcattccagtacgaatggacgatgggacagttaaaacatttactggataccgtgcacaacataatgatgcagttggccctactaaaggtggcgttcgtttccatccagaagttgatgaagaagaagtgaaggcattatcaatgtggatgactttaaaatgtggcattgttaatttaccttatggtgggggtaaaggcggtattgtttgtgatccacgtcaaatgagtatacacgaagttgagcgtctatctcgagggtatgtaagagctatatctcaatttgttgggcctaacaaagatattccagcaccagacgtttttacaaactctcaaattatggcttggatgatggatgagtatagtgcattagataaatttaattcgccaggttttataacaggcaaacctattgtattaggtggatctcaaggacgtgatcgctctacagctttaggtgtagtcattgcaattgaacaagcggcaaaacgtcgtggcatggatattaaagatgccaaaattgtgattcaaggtttcggcaatgcaggtagtttcttagctaaattcttatacgatttaggtgctaaagtagttggtataagtgatgcatatggagccttacatgaccctaatggacttgatatagattatttattagatcgacgtgatagcttcggtacagttacaaatctattcgaagatacaatttctaacaaagaattattcgaattggattgtgacatccttgttcctgctgcaatttccaatcaaatcactgaagataatgcgcacgatattaaagcaagcattgtagttgaagctgctaatggccctacgacgcctgaagcaacacgtattttaacagaaagagatatattactagtgccggatgtacttgcaagtgcaggaggtgtgactgtatcttatttcgagtgggtacaaaataatcaaggttattattggactgaagaagaagtcaatgacaaactacgtgagaagttagtaacagcatttgatacgatttatgaattgtcacaaaatagaaaaattgatatgagattagcagcatatatagtaggtattaaacgtactgctgaagcagcaagatatagaggttgggca

SEQ ID NO: 34313 - DNA, 1071 bp, Staphylococcus epidermidis
ttgaatgacttagaccacccacaactcatttttgaatctacaggtatctattcaagaggtatggaacgattttgttgtgtaaatcaaattaactatattcaaatgaatccgttagaagccaaatttaaaacgagcgctctaagatcatggaaaactgatcaggcagatgctcataagcttgcttgtttaggaccgacgcttaaacaaacagacagcttacctatacatgagttaatattctttgaattaagagaacgcgtccgttttcatctagaaatcgagaatgaacaaaatcgacttaaatttcagatccttgaattactccatcaaacattccctggtttagaaagattgtttagtagtcgatattcaatcattgcactcaacatcgcagaaatctttactcatccagacatggttcttgatatcgacaaggaggtactgattacacatatattcaattctacagataagggaatgtcaatggataaagctacaaaatatgcacttcaattaagggtgattgctcaagaaagctatcctaatgtcgatagacattcctttctagtcgaaaaattacgcttacttattcaacaattaaaacaatctattcatcatctcaaacaattagatgatgccatgattcaattagcacaacaactcgattattttgaaaatattcattcgatacctggtattggtaagctaagcacagctatgattattggggagattggtgatattaagcgatttaaatcaaataaacaactcaatgcttttgttggcattgatatcaaacgatatcaatcaggtcatacacactgtagagataccatcaacaagcgtggtaataaaaaagcgagaaaacttttattttgggtgattatgaatataataagagggcagcatcattatgacaatcatgtcgtcgattattactacaaactaagaaagcagcctaatgagaaacctcataagactgccatcattgcttgtataaatcgattattaaaaacaattcattatcttgtaatgaatcataaattgtacgattatcaaatgtcaccacat

SEQ ID NO: 34314 - DNA, 1047 bp, Staphylococcus epidermidis
atgtttaaatctaagaaaataatcatttcaactttatctaccgttacactgggtttagctagtttaagttccccttcgatagctgaaacttcgaaccactctccagcaccaaaccaatcagagaaatcgatacaacaacaaacaaatattccatctaatatgaatcaatcatcagctaaaacatttaaacgacaagctgaatcagactcagtaagtggtaaaacaaacgatactcataatcattggactaaaaatttaactggagagaaatttacaaccattgcacatcgtggcgcaagtggttacgccccagaacatacttttgaagcatatgataaaagtcataatgaattaggagcatcttacatagaaatcgatttacaacgtactaaagatggtcacttggttgctatgcatgacgaaaaggtcaatcgtacaactaatggccatggacgtgtcgaccaacttactttaaaagagttaaaacaacttgatgcaggaagctggtttaatcgaaagcaccctgaatatgccaaaaataaatataaaaatgctaaagttcctactttagacgaaattttaaatcgctatggcaaaaatgcaaactattatattgaaactaaatcgccagatgtttatcctggcatggaaaaacaattattagatacattagataaacatgacttgttaacacaaaaatcacttaaacatggacatgtgatgatccaatcattttcagggagtagtttagaaaaggtacatcacatgaacgccaatataccacttattagactaatgaataaatttgaacttaaaaaagctactaatcaagatttaaaaaatattaaatcttatgccattggagtaggtcctgaatacacagatttaaatattaagaacacaagacatttaaaaaatttaggatttttagttcatccttatacagttgatgatgaaaatcaaatgagaaacttaaatcaatatggtgttgatggtgtattcactaattttgctgatagatataaaaaagtttcagaaacacaacaa

SEQ ID NO: 34315 - DNA, 1389 bp, Staphylococcus epidermidis
atgagcaataaagcttggggtggcagatttgaaactcaacccgaagaatgggttgatgatttcaatgcgtcaattgattttgataaaaatttaattaaacaagatgttcaaggtagtattgcacatgcaactatgctcgctaaacaacatattattacagatgatgaagctcaatccatcattaatgagcttaaaaatattcaaagtgactttgaagaaggtaaacttaaatttaaagcttctctcgaagatattcatcttaatattgagcacgagcttattcaacgtattggcgaagctggtggaaaactgcatactggtcgtagccgtaatgatcaagttgccacagatatgcatttgtatactaaagaacaagttcaatacattattgaacttatagcgtcgtttcaagaaacaattgttcaattagcagaccagcacgttgacacaattatgcctggatacacgcatttacaacgtgcacaacccatctcgttcgcacatcatattatgacttacttttggatgttagaaagagacaaaggtagattcatggatagtcttaaacgtatagatatctcaccattaggtgctgcagctttaagtggaactacacaccctatagatagacatctgactcaagaacttctaggatttgcaaatctgtatgaaaatagtttagatgctgtcagtgatcgtgactatatcgttgaaacattgcatcatatttcactcactatggtacatctatcacgttttgcagaagaaatcattttttggtcgactgatgaggcaaaatttatcactttatcagatgcgttttctactggctcatctattatgccacaaaagaaaaaccctgatatggctgaactaataagaggaaaagtcggacgtactacaggacacttgatgagtatgttagtaacacttaaaggcttacccttagcttataataaagacatgcaagaagataaagaaggtttatttgatgctgtacacacacttaaaggctctcttcgaatcttcgaaggtatggttgcatctatgaaagttaattcaaaccgtttaagtcaaacagtaaaaaatgatttttcaaatgcaacagaattagcagactatttagtcagtaaaagtgtaccttttagaaccgctcatgaaatcgttggtaaaatcgtattaaattgtattcataaaggtatatacctattagacgtacctttaagcgaatatcaagaacatcatgagaatattgaggaagatatatatgattatttaacacctgaaaattgtctcaagcgtcgccaaagctatggttcaactggtcaagaatcagtaaaacatcaactaaaagtcgcaaaagcattattaaaagacaacgaatcaaaa

SEQ ID NO: 34316 - DNA, 1329 bp, Staphylococcus epidermidis
atgactcacattcaattagactatggcaaaactttagaattttttgataagcatgaactagatcagcaaaaggatattgttaaaactatccatcaaactattcataaaggtacaggagcaggtaatgactttttaggttggttagatttacctgttgattatgataaagaagaattttctagaatcgtcgaagcatctaaacgtatcaaatcaaattccgatgtacttgttgttatcggtattggaggttcatacttaggtgcacgtgctgcaatcgagatgcttacatcttcatttagaacaaatacggaataccctgaaattgtatttgtaggtaatcatttatcctcaagttatacaaaagaattacttgattatttacaaggaaaagatttttcagttaacgttatttcaaaatcaggtactacgacagaaccagcagttgcatttagattatttaaacaattggttgaagaaaaatatggaaaagatgaagctaagaaacgtatttttgcaacgacagataaatctaaaggtgcacttaaacaattagcagacaatgagggttatgagacgtttgttgtacctgatgatgtgggaggtcgttattctgttcttacagctgtaggattactaccaattgcaactgcaggtatcaatattgaatcaatcatgattggtgcggctaaggcacgtgaagagttatcttctgatgatttagatcaaaatatcgcatatcaatatgcaactattcgaaatattttatacagcaaaggttatactactgaaatgttaattaattacgaaccctctatgcagtatttcaacgaatggtggaaacaattatacggtgaatcagaagggaaagatttcaaaggtatttatccatcaagtgcgaattacacaactgatttacattccttaggacaatatgttcaagagggccgtcgtttcttattcgagacagtggttaaggtcaaccatccaaaacatgatatcaaaattgaagaggatgcagatgatttagacggactgaactatcttgctggcaaatcaatcgatgaagtgaatactaaagcatttgaaggtacattacttgcacataccgatggtggcgttccaaatatcgttgtaaatattcctcagttagatgaagaaacatttggatatgttgtttatttctttgaattagcttgtgcaatgagtggatatcaattaggtgttaatccatttaatcaacctggagttgaagcctataaacaaaatatgtttgcgctattaggtaaaccaggctttgaagataagaaaaaagaattagaaaatcgttta

SEQ ID NO: 34317 - DNA, 1659 bp, Staphylococcus epidermidis
atgagtataatcgatcaggttaaacaaacgctaatagaagaaatagaagttagtattagaaaagctaacctcgcagaagatattccagaaatcaaaattgaaatacctaaagatcctaaaaatggagattattcttctaatattgctatggttttaacaaagattgctaagcgtaatccccgtgaaattgcgcaagctattgtcgatcatttagatacaagcaaagcacacgttaaacaagttgatattgctgggccaggtttcatcaacttttatctggataatcaatatttaacagccattattccagaagctatcacaaaaggtgatcgatttggatatgcaacacaatctaagaatactaacattttattagaatatgtatcagctaatccaacaggagacttacatattggtcatgctagaaatgcatctgtaggcgattctttagctaatattctcattgcggctggttacaacgttacacgtgaatattatattaatgacgcaggtaatcaaatcactaatttagcacgatcaattgaagcacgatactttgaagctttaggtgatacgagttatgagatgccggcggatggttataatggtaaagacattattgaaatcgggaaagacctcgctgttaaacatccagaaataaaagactacactgatgaagaacgcttaaaaacatttagacaacttggtgtcgattatgaaatggaaaaattgaaaaaggatttatctgactttaacgtgcactttgataattggtttagtgaaacatctttatatgaaaatggcgcgattgaaaatacattatctaaaatgaaagaactaggctatacgtatgaagcagatggtgcaacttggttacgtacaagtgacttcaaagacgataaagatcgtgtattaataaaaaaagacggtaattatacttatttcacaccagatacggcttatcactacaataagattaatagaggaaatgatattttaattgatttaatgggtgctgatcaccacggttatattaatcgtctcaaagctagcttagaaacatttggtgtagacagcgatcgtcttgaaattcaaattatgcaaatggttcgccttatgcaaaatggagaagaagtgaagatgagtaagcgtacaggcaatgcgattactttacgtgaaattatggatgaagtcggtatcgatgctgcacgttatttcttaacaatgcgtagtcctgattctcattttgactttgatttagagttagctaaagagcaatctcaggacaatccaatttattacgcacaatatgcacatgcacgaatttgctctattttaaagcaagctaaagaacaaggtattgaagtgtctactgatgcagacttttctaaaataaataatgataaagcaatagacttattaaaaaaagtagcagaatttgaatcaacgatagagagtgcagccgaacatcgcgcacctcatcgtctaactaattatattcaagatctagctgcagcattccataaattttacaatgctgaaaaagtgcttacagatgatacagaaaaaactaaagcatatgtagctatgattgaagcggtgcgtattaccttgcacaatgcattagcattagtaggtgtcacagcaccagaatctatg

SEQ ID NO: 34318 - DNA, 753 bp, Staphylococcus epidermidis
atgatgaaagaacgcttcagtcccaaaatgctttctgacattaccggagttagtatacgtacgcttcattattatcatgaaaaggggttactcgtaccacaacaaatgagtgctaatgggtaccgatattataatgttcaagatatttcaaagttacaatatattctctttttaaaggaattagatttaacactaaaacaaatacagatatattttgaaggtgatagtgattttagaactaaaatattacatgataatttttatcacattgttaaaaaaagagatcgcttaaatgatattatctgtacgttagaacatcattttcaccaagataatgaagagattgaggtaactacaatgcaaaatttcaatttaaatgaacagtatgaaaaagaagcagcaagtaagtatggagatacccattattatcaagcatataaagataaacaaaaaagtaaggatgaatcagaacagcaaaatcattttgaggaaattaataagcaattaaatatgttttttgacgatatgaatcagctatatttaaacaaagtttctatacttgaagcaagtggaaaaattaagaaattactatgtattttgaaagaacaagttcctaattgtgacaatcaatttttagaatatatagctcagatttatattgaagacgagcgatttgtaaagtttattaacaagcaacgtgaacgtggtttgaatttatacatttctgatgcgataaaaacgtttattaaatta

SEQ ID NO: 34319 - DNA, 885 bp, Staphylococcus epidermidis
atgaaaagtaaactatggatagttatatgcgcattgattgtagtactggctgcatgtagtcaagatgccaaccactcatctaataataaagacactgaaaaaagcgataaaaaatatcatagaattgtttcgctcattcctagtaacacagaaattttatatcgcttaggaatcggagaagatatagtaggtgtatccactgtggatgattatcctaaagatgtaaaaaaaggtaaaaaacaattcgatgcgatgaatttaaataaagaagaattaataaaagctaaaccggatttgattttagcgcatgagtcacagaaaaattctgcaggtaaagtgctaaagtcacttaaagataagggagtaaaagtcgtttatgtgaaagatgcacaatcgattgatgaaacttatgatacctttaaatcaattggaaaattaacggatcgtgaaaaacaagctaaagaacttgttgatgaaacaaaacataatgtagataaaatcattaactccattcctaaacatcataagaaacaagaagtgtttatggaagtatcatctaaaccagacatttacactgccggaaaagatacattctttaacgatatgttagagaaactagatgctaaaaatagttttgatgatgttaaaggttggaaatcagtaagtaaagaaagcattattaaacgtaatcctgatattctgatttccacagaaggtaaatcaaaatcagactacatagaaatgataaaaaaacgtggtggttttgataaaattaatgctgtaaaaaatacacgtattgaaacagtagatggggatgaagtttctcgaccaggtcctcgtattgatgaagggctaaaggatttaaaagacgaaatatataaaaaa

SEQ ID NO: 34320 - DNA, 573 bp, Staphylococcus epidermidis
ttgaaaaaagaaattttagagtggattgttgccatagccgttgccattgcacttattgccataatcactaaatttgtcggaaaatcatattctattaaaggtgattcaatggatcctacattaaaagatggggagcgtgtagtggtaaatattattggctataaattaggtggcgttgaaaaaggaaatgtcattgtatttcatgctaataaaaaagatgattatgttaaaagagttattggaactccaggagatagtgttgaatataaaaatgatacactctatgttaatggtaaaaagcaatcagaaccatacttgaactataatgaaaaacgtaagcaaactgagtatatcacaggtagtttcaaaacaaaaaatttaccaaatgctaatcctcaatctaatgttattcctaaaggtaaatatttagttttgggggataaccgtgaggtaagtaaagatagtcgttcattcggtttaattgacaaagaccaaattgttggaaaggtatcgctcagatattggcctttcagtgaatttaaatctaactttaatccaaataacactaaaaat

SEQ ID NO: 34321 - DNA, 3477 bp, Staphylococcus epidermidis
atggaatttaatacatatattggtcgagcaggtacaggaaagtcaacagccatgcttaatcaaataaaaaataaaatgaagcaagacccgctgggtgatcctatagtattaattgcacctactcagagtacttttcaattagagcaagcatttgtaaatgattccgaacttcatggtagtttgagaactgaagtacttcactttgaaagattgagtcatcgtgtttttcaagaagttggtggtttgacagagcaacgattatctaaggccgctttagaaatgatgattttccatattgttcaacaacatgagtctgatttgaaattgtatggttcacaagctcaatactatggtttaagcgaaaagttagctgagcaaattcaagattttaaaaaatataatgtcactcctgaacacttaaatcaattgatagaaaatcattcaatacaaacgagaacaaaacataaattagaagatatttctcttatttataaacaattagaatcacgaatgaatggtgaatttataacaacagaggatagtttgcaacaattcattgaaatactatctcaatctcagtggataaaaaaggctgaagtatttattgatggattccataatttttctacattggaatatagaattatagaagcacttgttcaacacgccaaacaggtgactgtattattaacgaccgatggcagccatcatccatttagtttatttagaaagccatctgaagttttatcacatttggaggatatcgctaatcgtttaaatataaatctaaataaaacatattttaatacattttatcgctataacaatgatgatttaaagaatcttgaaaatgggtttgatgcattacaatttacgcctaaacatcatcaaaatcatgttaaaatatttgaatcttcaagcatgagagaagaaataaatgaagtagctcgacgtattttaaaagatgtcagagaagcagattataaattcagggacattgctatattataccgtgatgaatcgtatgcatatctattcgagtcaatacttccttcatatgatataccatttaacattgatactaaaaagtctatgacacatcatcctatcatggaaatgttacgttctttattggaagttatacgttcaaattggcatattaatgcaatgttacgattatttaaaacgaatgttttaacgtctcaatttaaaagaagtagctatttaattgatttactggagaatttcgttttagaacgtggtatttatggtaaacgttggttagatgaagatatctttagtattgatcagtttagtagaatgggacgtaaatcacatcaactaactgaaggacatcaagcattatacaaagaagtaattaaacttaaaaagaatgttataaataaagtgttatatttcgagcaagctatgaatgaagcgcatactgttaaagattatgctacgtcattttatgaaagtttggagtattttgaactaccgagtcagttaatgactcaacgtgatgaattagagttagcgggtctaacagaaaaagccgaagaaattgaccaagtatggaatggtttaatacaaattttagatgatttagttactgtatttgatgatcaggaaatgacacttcaacaatttttagatgtttttgatataggtttagagcaattagagtttgttatgatacctcaaactttggatcaagttagtatcggtacaatggatttagcgaaagttgataataaaaaacatatttatatggttgggatgaatgatggtatattaccacagactgtatcttcatcaagtttgattacagatgaagagaagaaatatgttgaggacaatgcacatgttgagttaagtccaacttcagatatactgcaaatggatgaagcgtttgtatgttacatcgctatgacaaggagtcaacaaagcgttactttttcatatagtttaatggggaattctggagatgagaaggaaattagtccttttttaacgcaaattaaagaattattttatgatttagaaatcaccaatctacaagatttacataaagcgcaaccattattaatgatgcaacattcacatcaaactaaaattcagctttttgaatatttaagaggttggttagaccatgaagacatcgattatcgttggttggatgcatatttagctattcgagacgatgatcaattaaatcaaggtttagattatcttactacgtcattgacatatgataacgagactgtccaattaaatgaaattttatcacaacaactttatggtaaaactatcaacgctagtgtgtctcgttttgaaggttatcaacaatgtccttttaaacattatgcctcgcatggtttaagattaaatgaacgcactaaatatgaattacaaaattttgacttaggagatatttttcattcagttttaaaatacatttccgatcgaatttatggtgacttcaagaatttagatacaaagaatattcaatcacttactaaagaagcattagagcttattttacctaaagtacagtttaatttgttaaattcgtctgcgtattataaatatttatctaaaaagattggatcaatcgttgaaacaactttaaaggcacttaaatatcaaggggagtactctaaatttgtacctcaacgatttgaaacaggatttagaaaatcacctaaaaacaaaggtgaacttgttgcacaaccactgattaccaatcagggaattccgattaatataagaggtcaaatcgatcgtattgatacatatacaaaaggtgatcatagttatgtcaatatcattgattataaatcttcagaaagtagtgcaacactcgatttaacaaaagtttattatggtttgcaaatgcaaatgatgacctacatggatattgtattacaaaacaaggagcgtttaggtcttacagatattgtgaaaccagggggtctactttatttccatgtccatgaaccgcgtattaaatttaaaagttgggcagatatagatgaagaccaatttcaaaaagactatatcaaaaactttaaaatgagtggtttgcttaatcgtgaccaagaagtgttagacgctttagatattagacttgaaccaaagtataattcggatattgttccaatagcattaacagctaaaggcgctataaatcaacgtagtagtaaagtagctgatgaaaacatcatttatcaattaatagaacataataagaagaattttatcgagacagccagccacattatggatggacatacggaagtggcacccttgaagtacaaacaagtattaccttgtcaattttgtaattataaatcagtttgtcatgtagacggattaatagatagtaagcgttatagaacagtagatgaatcgataaaaccattagatttaattcaacaattaagaaatgaaggtggtgaaagacatgattccaac

SEQ ID NO: 34322 - DNA, 3672 bp, Staphylococcus epidermidis
atgaaggtggtgaaagacatgattccaactaaacctcatgatgtgatttggacagatgcacaatggcaaagtatttatgcgaaaggacaggacatacttgttgctgctgcagcaggttccggtaaaacagccgttctagttgagcgtattatacaacgtatactaagagatgatgtagatgtagatcggttactagttgtaacatttacgaatttaagcgcacgtgagatgaagcatcgagttgataaacgtatacaagaagcatcttttaaggatcctaacaatgaacatttaaagaatcagcgaatcaaaattcatcaagcacagatttctactttacacagtttctgtttgaaattgattcagcagcattatgatgtattagatatcgatcctcattttagaacaagtagtgaagcggaaaatatattattattagaacaaactattgatgatgttttagaacaacactatgataaattagatcctcactttatagaattaaccgaacaactatcatcagataggaatgatgatcaatttagaagtattattaagcagttatattttttcagtattgctaatcctcaaccatttgaatggctcaatcaattagcgcaaccatacaaagaagaaaataaacagcaacaattaatgcagcttatcaatgatttagcaatgatttttatgaaagcaggatatgaggaattacaaaaaagttatgacttattctcaatgatggaaagtgttgataagcagcttgaagttattgaaaccgaacgcatgtttattactaaagctattgaaggtaaagtattaaatacagatgttatcacgcaacatgaatttatgagtcgttttccggcaataaatagcaagataaaagaagcaaatgaaggcatggaagatgctttaaatgaagcaaaacaacattatgataaatataaatctttagttatgaaagtaaagaatgattatttttctagaaatgcagaagatttgcaaagagatatgcaacaactcgcacctcgagtggcttatttagctcaaatagttcaagatgtgattcaatcatttggtgttcaaaaacgaagtcgtaatattttggatttttcagattatgaacattttgcattacgcattcttactaacgaagatggctcaccttcgcgtatcgctgaaacgtatcgtgaacattttaaagaaatcctagttgatgagtatcaagatactaatagagtgcaagaaaaaatattatcttgtattaaaactggtgaagaacacgatggtaacttgttcatggttggggatgtgaagcagtctatttataaatttagacaagctgatcctagtttatttattgaaaaatataatcgcttttctagtagtggaaatgaaagtggcttgcgcattgacttatcgcaaaactttcgttcgagacaggaagtgttatctacaaccaattacttgttcaaacatatgatggatgaacaagtaggagaaatttcatatgatgatgcagcgcaattgtattttggtgcaccatatgacgaagtttcacatcctgttcaattacgagcacttgttgaggcaagttcagaaaatagtgacttaactggaagtgaacaagaagcgaattacattgttgaacaagttaaagatattattaatcatcaaaacgtatacgatatgaaaacaggtcaatacagaaaagcaacatataaagatatcgtaattttagagcgaagttttggtcaagcgcgtaatcttcaacaagcttttaaaaataatgatatcccttttcacgtaaatagtaaggaagggtattttgagcaaactgaagtacgtcttgtgctttcatttttaagaacaatagataatccacttcaagacatttatttagtgggattgatgcgttctgtaatatatcaatttactgaagaagaattagctgaaataagagttgtaagccctcatgatgattacttttatcaatctataaaaaattatatgattgatgaaaaagctgattctagattggttgacaagttaaatcgttttattcaggatatacaaaaatatcaaaattatagtcaaagtcaaccggtttaccaattaattgataaattttataatgatcattttgtaattcagtactttagcggtcttattggaggtaaaggtagaagagcaaatctgtatgggctatttaataaagctgttgaatttgaaaattcaagtttcagaggtttattccaatttattcgttttattgatgagcttattgatcgtaaaaaagattttggtgaagaaaatgtcgtaggtcctaacgataatgtggttagaatgatgacgattcacagtagtaaaggattagaatttccatttgtaatttactcaggattatctaaaaaattcaacaaaggtgacctgaatgcaccagttattctaaatcaacaatatggtttaggtatggattattttgatgtaaataaagatatggcttttccttcacttgcctctgtggcatatagagcaataaatgaaaaagaacttatatcagaagagatgcgtttaatctatgttgcgttgacacgagcaaaagagcaacttattttagttggaagagtcaaagatgaaaagtcgttaattaaatatgaacaattagctgtttcagacacacatatagcagttaatgaacgccttactgctaccaatccatttgttctaatttatggtgttttggctaagcatcaatcgccttcattgccaaatgatcaaagatttgaaagagatattgatcaattaaattctgaagtgaagccacgtgtatcaatagtgattgatcattatgaggatgtttcaactgaagaagtagtcaatgataatgaaataagaacaatcgaagaattaaaggccataaatactggtaatgaagatgtgaaaattaaaattcatcaacagctttcttatgactatccttttaaagttaacacgatgaaaccatctaaacagtcggtatcagagttaaaacgtcaattagaaactgaagaaagtaatacaaattatgatagagtacgtcaatatcgtattggtgttgcatcatatgaaagacccaagtttcttacccaaacaaaaaaaagaaaagcaaatgaaatagggactttaatgcatacagtcatgcaacacttaccttttagagaacaacgtttaacaaaagacgaattatttcaatatatcgatcgattgattgacaaacaacttattgatgaagatgcaaaagaggatattagaatagatgagattatgcatttcattgatggccctctctatatggaaatagctcaagctgacaatgtttatactgaattaccttttgtggtaaatcaaattaaagttgatggacttacaagtgaagatgaagatgtatccattattcaaggtatgattgatttaatatatgaaagtgacggacaattttactttgttgattacaaaacagatgcttttaatagaagaaaaggtatgagtgatgaagaaatagggaatcagctcaaagaaaaatatcagatacaaatgacgtattatcgaaatactttagaaaccatacttaaacgacccgtaaagggttacttatattttttcaaatttggtacattagaaatagatgat

SEQ ID NO: 34323 - DNA, 903 bp, Staphylococcus epidermidis
atgaaatttctatcattcaaacataatgacagaacttcatatggtgttaaagtaaaacgtgaagatgctgtttgggatttaccaatggtttttgctgagtttggggacaaagactttaatcctaaaactttaattgcaggtttacagcaaaatcaaactttagactttcaagagcaagttcgaaaagcagttgtcgcagcagaagaaagtggaagagatgaggaatttaaacttttattcactgatattgattttctaccaccagtgacacctccaaataatgtgattgcatttggtagaaattatgaagatcatgctagtgaattaaatcatgaagttgatagtttatacgtatttactaaagcggcttcatctttaactggtgatgaagcaacaattcctaatcataaagatattacagaacaattggactatgaaggcgaacttggaattgtaattggaaaatcaggcgaaaagattcctagaggattagctttagattatatttatggatacacaattatcaatgatattacagatcgtactgcgcaaagttcacatgatcaagcattcttatcaaaaagtttaactggggcatgtccaatgggcccttatatagtaaccaaagacgaattacctgcgccagagaatgtaaatatcgtaacaaaagtgaataacgaaattcgacaagatggcaacactggtgagatgattttaaaaatagatgaactcatcgaaaagatttcaaaatatgtggctttacatccaggcgatatcattgcaactggtacacccgctggtgtgggtgctggtttacaaccaccacaatttttacaaccaggtgatgaagtcaaagtaactatagataatattggcactttaacaacatatatatctaaaaat

SEQ ID NO: 34324 - DNA, 1071 bp, Staphylococcus epidermidis
ttgaatgacttagaccacccacaactcatttttgaatctacaggtatctattcaagaggtatggaacgattttgttgtgtaaatcaaattaactatattcaaatgaatccgttagaagccaaatttaaaacgagcgctctaagatcatggaaaactgatcaggcagatgctcataagcttgcttgtttaggaccgacgcttaaacaaacagacaacttacctatacatgagttaatattctttgaattaagagaacgcgtccgttttcatctagaaatcgagaatgaacaaaatcgacttaaatttcagatccttgaattactccatcaaacattccctggtttagaaagattatttagtagtcgatattcaatcattgcactcaacatcgcagaaatctttactcatccagacatggttcttgatatcgacaaggaggtactgattacacatatattcaattctacagataagggaatgtcaatggataaagctacaaaatatgcacttcaattaagggtgattgctcaagaaagctatcctaatgtcgatagacattcctttctagtcgaaaaattacgcttacttattcaacaattaaaacaatctattcatcatctcaaacaattagatgatgccatgattcaattagcacaacaactcgattattttgaaaatattcattcgatacctggtattggtaagctaagcacagctatgattattggggagattggtgatattaagcgatttaaatcaaataaacaactcaatgcttttgttggcattgatatcaaacgatatcaatcaggtcatacacactgtagagataccatcaacaagcgtggtaataaaaaagcgagaaaacttttattttgggtgattatgaatataataagagggcagcatcattatgacaatcatgtcgtcgattattactacaaactaagaaagcagcctaatgagaaacctcataagactgccatcattgcttgtataaatcgattattaaaaacaattcattatcttgtaatgaatcataaattgtacgattatcaaatgtcaccacat

SEQ ID NO: 34325 - DNA, 774 bp, Staphylococcus epidermidis
atgaataaaattcaaatttgtaatcagattgaacttaactatattgatgaaggcgaaggcatccccatcattttaattcatggattagatggaaatttggcaggatttaaggatttaaaaaatgaactcaagaagcagtatagagtaattacttatgatgtcagaggtcatgggaaatcttcacgaacagaatcatatgaattaaaagatcatgttgaagatttaaatgatttaatgagagcattaaacatcgattctgcacatattttaggacatgatatggggggcatcattgcaagtgaatttactgaaaaatatcaatataaagtgattacattgacaattgtttcggctaaaagtgaggacattgcaaatggtttcaacaaattaatggttgattaccaagaagaattagcagggtttaataaatctgaggcaatgattattttattttctaaattatttaaagagaaagataaagcaatgaaatggtatcaaagccaaaaattatacaatagaccaactccggaagaaagtgcaattgcagtacgtgcattgcttaatattaaagatttaactcgtgttcatcataatgtgtctatacctactttaattgtgaatggtaagtacgacccactcatacaaaataaaagtcattatgatatggatcaatattatgatcaagttacaaaaattgtatttgataattcaggacatgcaccacatatcgaggaaccagaaaaattcctgaaactctatttagattttgttagt

SEQ ID NO: 34326 - DNA, 1821 bp, Staphylococcus epidermidis
atgagaaaaaaattaaataatgaatatcgctctgctaaaaaaatacgatatatgcctggattagatggtttgcgagcaattgcagtcattggtattattatttatcacttgaataaacaatggttaacaggtggttttttaggcgtagatactttttttgttatttcaggttatttgattacgagcttattacttaaagagtatgaagatactggaacaataaatcttaaaaatttttggattcgtcgtattaaaaggttattaccagcggtatttgcattaatagtagtagttggaattgcaactttattattgcaccccgagcatattgtaagagttaaacatgatatgatagcagcaatattttacgtatctaattggtggtatattgctaaagatgtcaattatttcgagcaattttcttttatgcctttaaagcacctatggtcactagccattgaagagcagttttacctttttttcccagcagtactcttattatttatggcaatagttaagaaaaagaaaaatgtcatactgatgttttggatcatatccctggtttcattattaatgatggttgttatttctcaacctcacttgaaccattctagagtatattttggaactgatacaagattgcagacactgcttttaggtgtacttctagcatttatctggccaccttttaaattaaatcccaatccacctaaaggattaaaaactgtgattaatagtgcgggtatcataggacttacatttttaattctattattctttactgttagtgatgaaagtgattggatttataacggtggattttatcttatttcaacaatgactttgctaattattgcaagtgttgttcatccaacgacaattttagctaagttattaggaaatcctttatttgtctacattggaaagcgttcatacagtttatacttatggcattttcctgtaattagctttattcatagttattttattgatggtcaattaccaacttatgtttatattatggatatcgtaattactgtattattagccgaattatcatttagatatgttgaaacgccattaagaaaggaaggtctaaaggcttttacatttaaaaaaacttacaaacctcagtttattagaacaattgtaacgttaattatgttgttaccttttatttttatactagttggagctttcgataaattcggaaaagatacaatttcaaataaagcacaaacatttaatacaaacgaggctgatcaatatcttattcatatgataccgattgataatatttcgttaactagcgatggtaaaaccaaagagaataagaaagacaatgatgtatatacacaaattaagccattattaattggtgattcagttatggtagatataggggaacaatttaaaacgaaagtacccaaagctaaaatcgatggcaaagtcggtcgtcaactctatcaggccgagagcctcgttaaaaatcaatatagacattataataaaccatcagaccaaatcatacttgagttaggtacaaatggtgattttacaaaagaacaattagataatttaattgacaaatttggcaaagcacaagtgtatcttgtgaatacaagagtgccaagatcatatgaaagtcatgttaatgagttgatggcaaaagcagctaaaaataaaaagaatgtaaccctaattgattggtatagtcgctcaaaagggcatacagagtattttgctccagacggaatccatcttgaaaatgatggcgtagaggcattgacagatgagatattaaaaaatataaagaagaaa

SEQ ID NO: 34327 - DNA, 2607 bp, Staphylococcus epidermidis
ttggatattaatcaaatgacatatgctgtacaaggtgccttacaaaaagcagtcgcgtacagtaaagaatatgaattacaaaacattgaagttgaagcattgttaaaagctgcaatgaatgaaaatgatagtttatttaaaagtatattagaacgagcaaatattgatgttgatcaattaataaaagcatacgataatcaattaagtcattatccaactgtacaaggtgacaatgttcagtatggacagtatattagtgctaaaacaaatgaattattagacaaagccgagaaatatatgaagtcctatgaagatgagtttatttctatggagcatatattacgtgcagccatagatactgatgaaactactcaaaaatgggtcggcaataaagtagaagtgataaaagaaattataactaaagttagagggggaaatcatgtgacatctcaaaatccagaagtaaactatgaagctttagaaaaatatggtcgtgatcttgtagaagaagtacgtcaaggtaaaatggaccctgtcatcggtagagatgaagaaatacgtaatacaattcgtatattaagtcgaaaaacaaaaaataatccggttttaatcggtgaaccaggtgtaggtaaaactgcaattgttgaaggtttagcacaacgaattgtacgtaaagacgttccagaatcattactcgataaaacgattttcgagcttgatttaagtgccttagttgcaggtgcaaaatatagaggtgaatttgaagaacgtttaaaagcagtattgaaagaagtaaaagaatctgaaggtcgaatcatcttattcattgatgaaattcatatgttagtaggcgctggtaaaactgatggtgctatggacgcaggaaacatgttgaaaccaatgcttgcgcgtggtgaattgcattgtataggtgctacgacattaaatgaatatcgtgaatatattgaaaaagattcagcattagaacgtcgtttccaaaaagttggggtcagtgaacctgatgttgaggatacaatatcaattttacgtggtctaaaagaacgttatgaggtctaccatggtgtacgtatacaagaccgtgcacttgttgcagcggctgagctatctgatagatatattaccgatagatttttgccagataaagctatagatttagtcgaccaagcgtgtgcgacaatacgtacagaaatgggatcaaatccaacagagttagaccaagtaaatcgtcgagtaatgcaattagaaattgaagaaagtgccttgaaaaatgaatctgataacccaagtaaacatcgtttagaagagcttcaagaggaattatctaatgaaaaagaaaaacaatcctctttaaaatcacgtgttgaacaagaaaaagaaaaaattgctaaagtacaagaaaaacgtgctgaactagatagtagtcgtcaagctcttgaagatgcacaaacagaaggtaatcttgaaaaagcagcagaattacaatatggtacaattccgcaattagaaaaagaattgcaaaaatttgaggaagcctttcaagatgaaactggcgaagatagtgaaagaatgattcgtgaagtcgtttcagatgaagaaataggcgacatagttagtcaatggacaggtatacctgtatctaaacttgtggaaacagaaagagaaaagctattaagtttaagtgacatcttacacaaacgtgtagtaggtcaagataaagcagttgatttagtatcagacgcagtagttagagcacgtgctggaattaaagatccgaatagaccaatcggaagtttcttattcttaggacctactggagtaggtaaaactgaattagcaaaatcgcttgcttcatcacttttcgattctgaaaaacatatgattagaattgatatgagcgaatatatggaaaaacatgctgtatcacgtttaattggtgcacctccaggttatgtaggtcacgatgaaggtggtcaattaactgaagcagttagacgtaatccatactcagttattttgttagacgaagttgaaaaagcacatagcgatgtttttaatgtattacttcaaatactagatgaaggtcgtcttacggattctaaaggtagaagtgttgactttaaaaataccattatcatcatgactagtaatattggttcacaagtattacttgaaaatgtaaaagatgctggtgaaattagtgatgatacagagaaagcagttatggacagtctacatgcatacttcaaacctgaaatattaaatcgtatggatgacatcgtgttatttaaaccattatcagttaatgatatgagtatgattgtagataaaattttaacacaattaaatatgagattattagatcaacatatctcaattgaagtgacagaagaagcgaaaaaatggctaggtgaagaagcgtatgaaccacaatttggtgcaagaccattaaaacgctttgttcaacgacaaatagaaactccaattgcacgtatgatgattaaagaaagtctacctgaaggtacaataattaaagtagatttaaatgacaataaagaacttgattttaaggttgttaaacctacgtct

SEQ ID NO: 34328 - DNA, 1071 bp, Staphylococcus epidermidis
ttgaatgacttagaccacccacaactcatttttgaatctacaggtatctattcaagaggtatggaacgattttgttgtgtaaatcaaattaactatattcaaatgaatccgttagaagccaaatttaaaacgagcgctctaagatcatggaaaactgatcaggcagatgctcataagcttgcttgtttaggaccgacgcttaaacaaacagacagcttacctatacatgagttaatattctttgaattaagagaacgcgtccgttttcatctagaaatcgagaatgaacaaaatcgacttaaatttcagatccttgaattactccatcaaacattccctggtttagaaagattgtttagtagtcgatattcaatcattgcactcaacatcgcagaaatctttactcatccagacatggttcttgatatcgacaaggaggtactgattacacatatattcaattctacagataagggaatgtcaatggataaagctacaaaatatgcacttcaattaagggtgattgctcaagaaagctatcctagtgtcgatagacattcctttctagtcgaaaaattacgcttacttattcaacaattaaaacaatctattcatcatctcaaacaattagatgatgccatgattcaattagcacaacaactcgattattttgaaaatattcattcgatacctggtattggtaagctaagcacagctatgattattggggagattggtgatattaagcgatttaaatcaaataaacaactcaatgcttttgttggcattgatatcaaacgatatcaatcaggtcatacacactgtagagataccatcaacaagcgtggtaataaaaaagcgagaaaacttttattttgggtgattatgaatataataagagggcagcatcattatgacaatcatgtcgtcgattattactacaaactaagaaagcagcctaatgagaaacctcataagactgccatcattgcttgtataaatcgattattaaaaacaattcattatcttgtaatgaatcataaattgtacgattatcaaatgtcaccacat

SEQ ID NO: 34329 - DNA, 2037 bp, Staphylococcus epidermidis
gtggagatatttgaaactctactcatatttgtcgcactagttattgtgagctcctttgtacatactttcatacctaaagtacctcttgcatttatccaaattttccttgggatgattttatacctcactcccattccagttgaattcaattttgattctgaattatttatggttacattgattgcaccactactattcgttgagggtgttaatgtttcaagagtacatttaaggaagtatatcaaacctgttatgatgatggctctaggtcttgtcataactaccgttataggcgtaggattgtttattcattggatttggcctgaattacctataggtgctgctttcgcaattgcggctatactttgtcctacagacgctgttgcggtacaagcaatcacgaaaggtaaggttttaccaaaaggttcaatgaccattcttgaaggtgaatctttacttaatgatgctgcaggtatcatttcatttaaaattgccgtaggtgtattgattactggaactttttccatttttgatgcgattcaacaatttttgattgcctctattggaggtgctattgttggtctaattataggcatggctttagtgagatttcgtttaacattaatgagacgtggcattgagaacattaacatgtttacatttatacaattgctgacgccgtttgtcacttatttgattgctgaattattccatgcatcagggattattgcagcagtagttgcgggactcgtgcatggatttgaacgtgaccgtatagctcaaacgagaacacaattacagatgagctataatcacacatggagtattttaggctacgttttaaatggttttgtgttttcaatcttaggttttttagtacctgaggtaatagtgaaaattattaaaactgaaccgcataatttattattcttaatcgtcatcacattgctagtcgctcttgcggtgtatctctttagatttgtgtgggtatatgtactttatccttatttctatttatctgtcagtccattccaaaaaatgatttctaaaaatgatgaagataaagttactgagagtaaacctaagcgtagcttatatgcactaatcatgactctatgtggtgtacatggaaccatttcactcgcaatcgccttaaccttgccatatttattagcaaatcatgaaacatttgcttatcgaaatgatttattatttattgcttccggaatggtaatattaagtttaattattgcacaagtcattctgcctttagtaacgcctgatagccctgaagtgaagataggtaatatgtcatttaaagaggcgagaatctacattttagaacatgttatcgattacctaaatcaaaaatcgacgtttgaaacgagttaccgttatggaaacgtcattaaagattaccacgataaactcacatttttaaaaacggttgaaaaggaagatgaaaactccaaagaactagaacgacttcaaaagattgcatttaacgtagaaacaaaaacgctagagaaattggttgatgatggcgaaattactgagagtgttcttgaaaactatatgcgttacgctgaacgaacagaagtgtataaacaagcttcgttattaagacgaattattgttggtttaagaggaatgctattgaaacgtcgtgtaaaaacaaaaattaattcggcatcatctcttagtgttactgataacttattagaattgggtaaaatcaataagcttgttcattataacgtcgtaagtcgtttagccaaagaagctactactgataataaactagaagtaggtatgatttgcgatggatatctgatgagaatagataacttaacaccaaacaatttctttaattccagacatgaagatacacttaccaaaattaaattaaatgctttaagagaacaacgtcgtattctaagagaactaattgaaaatgatgagataacagaaggtactgcattaaaattaagagaatccattaattatgatgaaatggtaattgtagatagtatgaca

SEQ ID NO: 34330 - DNA, 939 bp, Staphylococcus epidermidis
atgaatgtgggtattaaaggttttggtgcatatgcacctaaaaatattatagacaatgcctattttgagcagtttttagaaacttcagatgaatggatttctaaaatgactggtattaaagaaagacattgggcagacgaagatcaagacacatctgatttagcatacaatgcaagtattaaagcgatagaggatgccggcattcagccagtagatatagacatgattatcgttgctacagctactggggatatgcctttcccaagcgtggctaacatcttacaagaaagactaggaacaggtaaggttgctactatggatcaacttgctgcatgttctggctttatgtattcaatgattactgctaaacaatatatacaatctggtgattacaaacatattttagttgtgggtgctgataaattatctaagattaccgatatgactgaccgttctactgctgtattatttggagacggtgctggagctgttgtcatgggagaagttgctgaaggtcgtggtatcattagctatgaaatgggttcagacggtagtggtggtaaatacttgtacttagatagagaaactggcaaactcaaaatgaatggtagagaagtatttaaatttgctgtgagaattatgggtgatgcatctacgcgtgtagttgagaaagctggtttatcgtctgaagacatagacttatttgttccacatcaggctaatattagaattatggaatctgcgagagagagattaggaatagaaagagaaaaaatgagtgtctcagtaaataaatatggtaatacttcggctgcctcaataccattaagtattaatcaagaattgcaaaatggaaaaatcaaagatgacgatactttagtcttagttggcttcggtggaggtctaacttggggcgcaatcgttattaaatggggaaaa

SEQ ID NO: 34331 - DNA, 1242 bp, Staphylococcus epidermidis
atgaataaaaataatagagttgttataacgggtatcggagccttatctccaattggtaacgatgctaaaacaacatgggacaatgcactaaaaggtgttaacggtatagataaaatcacaagaatagatactgatgattataatgtacatcttgctggtgaattgaaagattttaatatagaagaccacattgatagaaaagaagctcgccgtatggatcggtttacacaatacgcggtggttgctgcaagagaagcggttaaagatgcacaattaaatattaatgaaaaaaatgccgaccgtattggtgtatggattggttctggtatcggtggtatggaaactttcgaagttgcacatacaacacttgtagaaagaggaccacgtcgagtaagtccatttttcgttccaatgttaattcctgatatggctactggtcaagtttctattgatttaggtgccaaagggcccaatggttctacagtaacagcttgtgctacggggactaactcaataggtgaggcatttaaaattattcaacgtggtgatgcagatgcaatggtgactggtggaacagaggcacctattacacatatggcaatcgcagggtttagtgcaagtcgtgcattatctacaaacaatgaccctgaaacagcttgtcgaccattccaagaaggccgtgatggctttgttatgggtgaaggggcaggtattgttgtacttgaatcattagattcagctaaagagagaggcgctgaaatttacgctgaagttgtaggttatggttcctctggcgatgcacatcatattacagcacctgcgcctgaaggtgaaggtggctcacgagctatgcaagctgctttagatgatgctggaatcaaagctcaagatgtacagtatttaaatgcacatggcacaagtacacctgttggagatttatatgaggttcaagcgattaaaaatacattcggtgatgctgcgaagtcattaaaagtaagttcaactaaatcaatgactggacatttattaggtgctacaggtggaattgaagctattttttctgcgctatcaattcgtgattcaaaggtagcccctacaatacatgcaatcacaccagacgaagaatgtgatttggacattgttccgaatgtagcccaagacttagacattacctatgcaatgagtaatagtttaggatttggtggacataatgcagtgttagtatttaaaaaatttgaagac

SEQ ID NO: 34332 - DNA, 1077 bp, Staphylococcus epidermidis
atgacagaaacggtattagaagtaaatgatttgcacgtttcctttgatattgctgcaggagaagtgcaagctgtcagaggcgtggattttcatttaaataaaggggaaacgttagccattgttggagaatctggatctggaaaatctgtaacaactaaggcaattacaaaactttttcaaaaggatacaggaagaataaaaaagggagaaatcttatttttaggtgaggacttagctcagaaaagtgaaaaagaactgatacagctaagaggtcgagatatttcaatgatatttcaggatcctatgacttctttaaatccaacaatgcaaatcggaaagcaagtcatggaacctttgattaaacataagaaattaagtaaagcaaaggccaagcaaagagcattggaaattttgaatttagttgggttacctcgtgctgaaaaacgatttaaagcttatccacatcaattttcaggaggacaacgtcagagaatagttattgcaatagcattggcatgtgagcctaaaatattaattgctgatgagcctacaactgctttagatgtgacaatgcaggctcaaattttagatcttatgaaagaactacaaaataagattgaaacttcaattatctttattacgcatgatttaggcgttgtagcaaatattgcggacaaagtagccgtaatgtatgggggacagatggttgaaacaggggatgtgaatgaaatattttatgatcctaaacatccctatacctggggattgctttcttcaatgcctgatttaacaaccagtaatgacacggacttaattgcaattccaggtacaccaccagatttacttcatccaccaattggtgatgctttcgcacgtagaagtcgatatgctttagatattgattttaaagaagaaccaccttggttcaaaatttcacccacacattttgttaaatcttggttattagatgcaagagctccaaaagttacgccaccttcaatggttcaaaaacgattaagaacaatgccaagtaattatgaacaaccacatagagtagagagggtggcttttaatgag

SEQ ID NO: 34333 - DNA, 936 bp, Staphylococcus epidermidis
atgagtaatgaaaatgtattattacaagttaaaaatttaaaacagtattttaatcaaggtaaacataatgaagttaaagcgattgataatataagttttgatgtttataaaggggaaactttaggcctagtaggagagtctggatgtggtaaatcaacgactggaaaagccattatcaaattaaatgatattactgatggcgcaatcgagtatgatggtaaagatattcatcaaattagaaaacgtaaagagcgattgaagtttaataagaaaattcaaatgatatttcaagatccttatgcatctctaaatcctcggttaaaggtaatggatatcgtagctgaaggaatagatattcacaaacttgctagtagtcagcgtgatcgaaagaaacgtgtatacgaccttttagaaacagttggtttaggtaaagaacacgcgaatcgttacccacatgagttttcaggcggacaaagacaacgtattggtatcgcacgtgcattagctgtagagccagaatttattattgcagatgaaccgatatcagcattagatgtatcgattcaagctcaagtcgttaatcttttattaaagctacaacgtgaacgtgatattactttattgtttattgctcatgatttatcaatggtgaaatatatttccgatagaattgcagtgatgcacttcggtaaaattgtagaaattggaccggctgatgatatttataattatccattacatgattatactaagtcattattaagtgccattccacagcctgatcctgatgttgagagaaatcgtcaacgtgttttatatcatgaagatgcaacgcttaatgaagaacgtcaattaaatgaaattagaccacaacattatgtattttctactcaaaacgaagcagttaaattgaaacaaaagtatggtttgtctgtt

SEQ ID NO: 34334 - DNA, 792 bp, Staphylococcus epidermidis
atgcattttaaacgtgttgtaaagtggggattgaatatgtatcaaaaccaaagaataaaagataaaattaacatattaggtgtaagttttgataatactacaatgctggaaatggtagaaaatattaaacaattcatatctagcaatacagatgataatttatttatagtgactgctaatcctgaaatcgtggattatgcaactgaacatgagctatatagaaatttaattaatcaagctgattatgtagttccagatggtacaggaatagtaaaagcttcaaagcgattaaaacagcccttaaaacggcgtgtgccaggaatagaacttcttgaagaatgtctgaaaatagcacatgtcagccatcagcgcgtatatctgcttggatctaaaaatgaaattgttgagtcagcagagaaaaaacttcaatctcaataccctaatatccactttgcacatcatcatggctatattcatctagaagatgaaacagtcataaaacgtataacaagttttaatcccgattacatttttgtaggaatgggatttccaaagcaagaacaatggattcaaaagcataaggacaagtttaagcacactgtgatgatgggcgtaggtgggtcgtttgaagtattcagtggctcaaagaaaagagcacctcaaatatttagaaagttaaatattgagtgggtatatcgtgtgcttattgattggaaacgcattgggagaatgataagtattcctaaatttatgttaaaggtagcaatacaaaaatataaaatgaaatcaaaa

SEQ ID NO: 34335 - DNA, 792 bp, Staphylococcus epidermidis
atgagcgtttcggtaaatattgaaaatttaacaaaagaataccgtatctatagaaataataaagatagaattaaagatgcattaatacctaaaaacaaaaataaaacattttacgctctggataacgtaagtttaacagcgcatgagggagatgtgataggtttagtcggcatcaacggttcaggtaagtctactttaagtaatatgattggtggctctatttcaccaagttccggtgaaataacgagacatggtgatgtgagtgtcatcgctattaatgcaggactaaatggacaattgacaggtgtagaaaatattgaatttaaaatgctctgcatgggctttaaaaggaaagaaattaaaaaattaatgccggaaattatagaatttagtgaactcggcgaatttatttatcaacctgttaaaaaatattcaagtggtatgcgtgcaaaacttggattttcaattaatattactgttaatcctgacatattagttattgacgaagcattatcagtaggcgatcaaacatttactcaaaaatgtttagataaaatttatgaatttaaagcggctaaaaaaacaatattttttgttagtcataatattagacaagtgcgtgaattttgtacaaaaatcgcttggattgagggcggtaaactaaaagaattcggcgaacttgaagaagtattacctgattatgaggcgtttcttaaaacttttaagaaaaaatctaaagcagaacaaaaggaatttagaaataaattagatgagtcacgttttgtcgtaaaa

SEQ ID NO: 34336 - DNA, 987 bp, Staphylococcus epidermidis
atggaaactttattctcaggaattcagccaagtggtattccaacaattggtaactacattggtgcattaaaacaatttgtagatgttcaagatgactatgaatgttttttctgtatcgtagaccaacatgcaataacggtaccacaagaccgcttaaaattacgcaaacaaatacgtcaactcgcagcaatttatttggcatcaggtattgatccagataaatcgactttatttattcaatctgaagtccctgcacacgtgcaagctggttggatgcttacaacaatagcttctattggtgaattggaacgtatgactcagtttaaagacaaagctcagaaacgcgcagatggagtgcctgctggtctactcacttatccaccattgatggcggctgatatcgtgatttacaacactaacattgttcctgttggtgatgatcaaaaacaacatatggaactgacacgtaatttagtagatcgtttcaatagtagatataacgatgtattagtaaaaccagaggtacgaatgcctaaagttggtgggcgtgtgatgagtttacaagatcctactaaaaaaatgagtaaaagtgatgataatcagaagaatttcatttctttattggatgaacctcatgtcgctgccaaaaaaattaaaagcgctgtaacagactctgacggtataataaaatttgatcgtgagaataaaccaggcatttcaaatttactttcaatttattctggtctaactaatgactctattaaaaatattgaatctaaatatgaaggtgaaggttacggtaaatttaaaggtgatttatcggaaatcgttaaagattttcttattaatttccaagaaaaatatgcaagcttttataattctgatgacctagatgatattctagataaaggtaaagaaaaagctcaaaaagcttcatttaaaacattgaaaaaaatggaaaaagcaatgggcttaggtcgaaaaaga

SEQ ID NO: 34337 - DNA, 1071 bp, Staphylococcus epidermidis; identical to SEQ ID NO: 34313

SEQ ID NO: 34338 - DNA, 795 bp, Staphylococcus epidermidis
atggctgaagaattaagaatcatggagaataagagtcgtgaagatactaatctatcacctgttagcaaaatagaaatctattctttttttgatccttttagtaaagattgttttaaattatctgcaatcttatcaaaattaagaattgaatataataaatatataaaggtaagacatattttaaacccttctttaaaggtattaactaagtgtcaagctcaaagtacttcggattttgacaatattgcacttgcctataaagccgctgaacttcaaggtcgcatcagagcagaaagatttatacatttaatgcaaaatgaaatcattccaaaacgtgatattattaccgaagatatgatttctgattgtattaataatgccggtattgactatcaagtttttaaagaagacttgcaaaaggacaagttgactgacagcttgaaagttgatcttcacattgcaagagaaatggaaatagaacaagctccctcacttgtttttttcagcgaaaatgttcatgaagaaggtttaaaagtcgaaggattatatccttatcatatctatacttacattattaatgagttaatgggacaacctatagagaaaaatcttcctccaaaattagaatactacattcaaaagaaacaactagtaacaatggaagaacttttaacaatttatgaatggcctgaaaaattattaaacaaagaattaaagaaactcacacttcaacaaaaagttgaaaagttgcaatatccagagggagaattttggaagtctaaaatgcctcagtgt

SEQ ID NO: 34339 - DNA, 381 bp, Staphylococcus epidermidis
atggaacacggtgatattatgtctaaaacaccatatgagttgattggtcaaaaagccttgtatcaaatgattgatcatttctatcaacttgtcgagaaagattctcgtatcaatcatttattcccaggcgatttcaaagaaaccagtcgaaagcagaaacaatttttgacacagtttcttggaggtcctgacttatatacacaagaacatggtcatcccatgttaaaacgaagacatatggaatttacaattagtgagtatgaacgtgatgcatggcttgagaacatgcatactgctattcaacacgccgaacttcctgcgggtgtaggcgattacttgtttgagcgattaagacttactgcacatcacatggtaaattcc

SEQ ID NO: 34340 - DNA, 633 bp, Staphylococcus epidermidis
atgaaccagtgggatcaatttttaacgccatataagcaagctgtcgatgagttaaaagtaaaacttaaaggattaagaaaacaatacgaagtgggagaacataattctccaattgaattcgtaactggaagggtaaaacctatttcaagcgttatagacaaagcgaacaaaaggggtatcccttttgattgtttacatgaagaaatgtacgatattgctggtcttagaattatgtgtcaattcgtggatgacattgacatagttgttgatatattaagacaacgtcaagatttcaaggttatagaagaaagagattacattcgaaatacaaaagaaagtggctatcgttcttatcacgtgataatcaaatatcctattgaaacactcagtggacaaaagcacatattggctgaaattcaaatcagaaccttagcaatgaacttctgggctacaatcgaacatacattaaggtataaatatgatggggcatatccagatgagattcaacatcgtttagagagagcagcagaagcggcatatttattagatgaagaaatgtctgaaattaaagatgaaattcaagaagcgcaaaagtattacacgcaaaagcgtgctaagaaacatgaaaatgac

SEQ ID NO: 34341 - DNA, 807 bp, Staphylococcus epidermidis
atgcgttatacaatccttactaaaggtgattcaaaatcaaatgcattaaagcataaaatgatcaatcatatgaaagattttcaaatggtagaagatagcgaaaatcctgaaattgtcatttcagttgggggagatggaacgttattacaagctttccatcaatatagtcatatgttatccaaagttgcttttgtcgggatacacaccggtcatttaggattttatgcagattggttacctcatgaagttgaaaagcttattattgaaattaataattcggagtttcaagttattgaatatccactcttagaattaatagtcaggtataacgataatggttatgaaacaagataccttgctttaaatgaagcaacaatgaaaactgaaaatggctcaacattggttgtagacgtcaatataagaggtaaacatttcgaacgatttagaggagatgggttgtgtatatctacaccctcgggttcgacagcttataataaagctttaggtggtgcgctcatacatccatcacttgaagcgatgcaaattgctgaaattgcatctattaataatagagtgtttagaacggtaggctcgccattagtacttcctaaacatcatacgtgtttaattacgccggtaaatcacgatacgattagaaccacaatcgatcatgttagtattaagcacaaaaacgtcaatgcaatacagtatagagttgctaatgagaaagtgcgttttgccagattccgtccatttccgttttggaaaagggtacatgactcatttatttctagtgatgatgaacga

SEQ ID NO: 34342 - DNA, 852 bp, Staphylococcus epidermidis
atgattttaacatatcaaattgtacagtcagaaccagtgaaaacttttttgaaaaatcaagattattctaaacgcacgttgagcgccattaaattaaatggcgctttactattaaacggttcacctgtaactgtcagacaagttatggacaaaggtgatagattagaagttcattttccaagtgaaacaccaagtgagaatttgattccctacgataaggaattagaagtcatttatgaggatgcgtatttgataattgtaaacaagccacaaatgcaaaattgtgcaccttcaagagaacacccccatggcagtttagtagaacaagtgcttgcttattatacaaaaaaaggcgaaaaaataaatcctcatattgtaactcgacttgatcgaaacacttcaggtttagttgtgtttgctaaatttggacatgtacacaatttgttttcaaaggtgaaatttaaaaaagaatatgtcgccttagcctatggccaaacacaatcttcaggtgttattgaagtgcctattgcaaggctgagtgatagtatcattaagcgagaagttaatgaaaagggaaagtatgcaaaaactgtctatcaaaagcttatgcaaaatgagactgctagtttatgtaagattaatttacttactggaagaacgcatcaaattcgagttcactttgagtatattggtcatccattaattggcgatgatttgtacggtggaaatcatccttgtgttcatggacaagcgttacattgctgttcagtcgaatttatccaccccatatacaggtctcattatctgataaatgttgattacaaacaattaattaaattattcaacatggta

SEQ ID NO: 34343 - DNA, 1383 bp, Staphylococcus epidermidis
atgtctaacgaaactgaaatgaaagacaacgttcgtgaagacgtatatgataaagaattatttgatcgattattagatcaaaatgatatagatgaattcagaaaagaatttttagaattacataattatgagcaaagtgaatactttgaagatacggatgatggaaatagacaaaaaatatttgagtttttatcacccaaagaagtagcaaatttctttgatcaattagactttgatgacgatgattatgagagtctttttgataatatggatgctacttatgctagtcatgtcttagaagaaatgtcttatgataatgcagtagatattttaaatgagttatctaaacctaaagtggcgagtttgctaacattaatgaacaaagataatgctaatgaaatcaaagctttattacattatgaagaagatactgccggcggtataatgactacggaatttatttctttaaaatcaactacacctgttaaagaagcgttaattcacgtaaaagaacaagcgcctgatgctgaaacaatatatgtcatattcgcagtaaatgaagatgaacaacttgttggtgttctatcacttagagatcttattgtagctgagaatgatgcatacattgaagatgttatgagtgaacgtgtcatcagtgctaatgtcggtgatgaccaagaagatattgctcaattaatgagagactatgattttatagctgttccagttgtagattatcaaaatcatttactaggtattattactattgatgatatcctggatgttatggatgaagaagcaagtgaagactactcacgattagctggggtatctgacattgattctacaagtgactcagtgtttaaaacggcgagtaaaaggttaccatggctcattgtgttaacatttttgggtatgattactgctactatattaggtagttttgaagatacattatctcaagtggcattacttgcagcatttattccaattataagtggtatgtcaggaaattctggtacacaatcattagccgtttctgtccgtaatatatctactggggaaataaatgaacagagtaaatttaagattgcattgcgagaagcgggaagtggtttattatctggtattgtttgtgcagttatccttttcttaattattgtcgtcatattcagacaaccgttattagctttaatagtaggtgggagtttgacatgcgcaatgacagtaggtacattggttggttcaatgattcctttagtaatgaacaaatgtaaaattgatcctgctgttgcaagtggtccttttattacaacaattaatgacattgtgagtatgcttatttattttgggttagctacatcattcatgtcatacctaaca

SEQ ID NO: 34344 - DNA, 296 bp, Staphylococcus epidermidis
gtggaaacaataggagtatcatatatttaaaagaaggttcccaaaagttaatgattatcaatcgaggacctattgtagatatagataatcaaaaatatatatttgattattcagcatgtaattatcctgtcggtgtcgtagaagatcaaatatactattttaacgaagacaatatcgataaagtcgtttttgaaggttattctgatcaagatgagatgagatttcaagaattatttaaagaaatgaaaaataatttagatgatgatattcaacaaggtattgttcaaaagcaagat

SEQ ID NO: 34345 - DNA, 387 bp, Staphylococcus epidermidis
atggcacgtaaacaagtatctcgtaaacgtagagtgaaaaagaatattgaaaatggtgtagctcacatccgttcaacattcaataatactatcgtaactatcactgatgaattcggtaatgcattatcttggtcatcagctggtgcattaggattcaaaggatctaaaaaatcaactccatttgcagctcaaatggcttcagaaacagcttctaaaactgctatggaacatggtttgaaaacagtagaagtaacagtaaaaggacctggtccaggccgtgaatctgctatccgtgcactacaatctgcaggtttagaagtaactgcaatcagagacgttactccagtaccacacaacggttgtcgtccaccaaaacgtcgtcgcgta

SEQ ID NO: 34346 - DNA, 363 bp, Staphylococcus epidermidis
atggcacgtattgcaggagtggatattccacgtgaaaaacgcattgttatctcattaacatacgtatatggtattggtacttcaactgctaataaaattgtagaagaagctaacgtatcagcagatactcgcgttaaagatttaactgacgatgaattaggtcgtatccgtgaagttgtagatggctacaaagtagaaggtgacttacgccgtgaacaaaacttaaacattaaacgtttaatggaaatttcatcataccgcggaattcgtcatcgtcgtggcttaccagttcgtggacaaaaaactaaaaacaatgctcgtacacgtaaaggtccagttaaaacagtagctaataagaaaaaa

SEQ ID NO: 34347 - DNA, 216 bp, Staphylococcus epidermidis
atggctaaacaagatgtaattgaattagaaggtacagtactagatactttaccaaacgcaatgtttaaagtagaattagaaaatggtcatgagattttagctcacgtaagtggtaaaatcagaatgaattacattcgtattctacctggcgacaaagtaactgttgagatgtctccgtatgatttatcgcgcggtagaattacttatcgttataaa

SEQ ID NO: 34348 - DNA, 645 bp, Staphylococcus epidermidis
atgaatatcattttaatgggcttacctggtgcaggtaaagggactcaggcgagtgaaattgttaagaaattcccaataccacatatttctactggtgacatgttcagaaaagcgattaaagatgaaacagatttaggaaaagaagctaaatcatatatggatcgtggagaattagttcctgatgaagttactgtaggtatcgttaaagaaagaatttctgaagacgatgcaaaaaaaggattcttgttagatggattcccaagaactatagatcaagctgagtcattaagtcaaattatgtctgagcttgatagagaaattgatgctgtcattaatatcgaagttcctgaggaagaattaatgaatcgtcttacaggtcgtcgtatctgtgagaaatgtggtacaacatatcatcttgtatttaatcctccaaaggttgatggtatatgtgatatcgatggtggaaagttatatcaacgtgaagatgacaatccagaaacagtatctaatcgtttgagcgttaatgttaaacaatctaagcctattttagaatattacaacaacaaaggtgtcttgaaaaacattgatggttcaaaagatattgacgaagtaaccaacgatgtcattgatatcttagatcattta

SEQ ID NO: 34349 - DNA, 1290 bp, Staphylococcus epidermidis
atgtttcaaacgtttgtacgtttctttacaactaaagaagtacgaaacaagattttcttcactctagcaatgttagttatttttaaaataggaacgtatattcctgctccaggagttaatcctgaagcctttaatcatccacagggatctcaaggtgccactgagttattaaatacttttggtggcggtgccttgaaacgtttctcaatatttgcgatgggaatcatgccttatatcactgcatccatcgtcatgcaattactgcaaatggatattgttcctaaatttacagagtgggcaaaacaaggtgaaatgggtagaagaaaaattaataacgtaactcgttattttgctataattttagcttttatccaatctataggtatggctttccaatttaataactatctcaaaggacaacttattatagaaaagtctgttatgagttatttattaattgcagttgtattaacagcgggaacagctttcttaatttggcttggtgaccaaatcacacagtttggtgttggtaacggtatttctcttatcatctttgcaggtatattatcaactttaccttcgagtctagaacaatttgcacaatcagtgtttgtaggtcaagacgatacttcacttgcttggctgaaaatactaggattgattgtagccttgattttactaacagtaggcgcaatatttgttcttgaagctaaacgtaaaatacctattcaatatgcaaagaaacaatctgctcaacgattaggttcacaagcaacttatctacctttgaaagttaactctgccggtgttattccagttatctttgcgatggcgtttttcttgttaccaagaacattgactttattcttcccgaaagcagaatgggcacagaatattgctgatactgccaacccatcaagtaatattggaatgattatttatgtagttttaattattgcatttgcatatttttatgcttttgtacaagttaatcctgaaaaaatggcagataaccttaaaaagcaaggtagttatgtcccaggaattagacctggtgaacaaacaaaaaaatatattactaaagtactttatagattgacttttgttggttcaattttcttagcagctatagctattttacctataattgcgactaaatttatgggcttaccacaatcaattcaaattggtggtacgagtcttttgatcgttattggtgtagctattgaaactatgaaaactttagaagcacaagtcactcaaaaagaatataaaggctttggtggtaga

SEQ ID NO: 34350 - DNA, 438 bp, Staphylococcus epidermidis
atgaaattacatgagttaaaagcagctgaaggatcacgtcgtgtacgtaaccgtgtaggtcgtggtgctgcaactggtaacggtaaaacaagtggccgtggtcaaaaaggtcaaaaagcacgttcaggtggtaaactaagaccaggatttgaaggtggacaattacctttattccgtcgtttgcctaaacgtggtttcactaacattaaccgtaaagaatatgctattgttaacttagaccaactcaataaatttgaagatggtactgaagttactccagctttattagtagaatctggtgttgttaagaatgaaaaatctggtatcaaagtactaggtaacggttcactagacaagaaattaacagtgaaagctcataaattctcagcttcagcagcagaagctattgatgcaaaaggtggagcacacgaggtgatc

SEQ ID NO: 34351 - DNA, 498 bp, Staphylococcus epidermidis
atggctcgtagagaagaagaaactaaagaatttgaagaacgcgttgttacgattaaccgtgttgctaaagttgtaaaaggtggtcgtcgtttccgtttcactgcattagtggttgttggagataaaaatggtcgtgtaggtttcggtactggtaaagcgcaagaggtaccagaagctatcaaaaaagctgttgaagcagctaaaaaagatttagtagttgttccacgtgtagaaggtacgactcctcatactataactggtcaatatgggtcaggtagcgtatttatgaaaccagctgcacctggtacaggagttatcgctggtggaccagttcgtgccgtattagagttagcaggaattactgatatcttaagtaaatctttaggatcaaatactcctattaatatggttcgtgcgactatcaacggtttacaaaacttaaaaaatgcagaagatgttgctaaattacgtggcaaatctgtagaagaattatacaat

SEQ ID NO: 34352 - DNA, 360 bp, Staphylococcus epidermidis
atgatcagtaaaattgataaaaacaaagtacgtttgaaaagacatgctcgtgttcgtactaaattatcaggtacagctgaaaagccacgtttaaatgtgtatcgttcaaacaaacacatctatgcacaaattattgatgacgttaaaggcgtaacacttgctcaagcatcatcacaagataaagatattgcaaacacatcagcttcaaaagttgacttagcaactactgttggtcaagaaattgctaaaaaagctaacgataaaggtattaaagaaatcgtcttcgatcgcggaggatatttataccacggacgtgttaaagctttagctgatgctgcaagagaaaatggattagaattt

SEQ ID NO: 34353 - DNA, 534 bp, Staphylococcus epidermidis
atgagtcgtgttggtaagaaaattattgacattcctagtgacgtaacagtaacttttgacggaagtcatgtcactgtaaaaggtccaaaaggtgaattagaaagaactttaaatgaaagaatgacatttaaacaagaagaaaacactgttgaagttgtaagaccatctgattctaaagaagacagaacagatcatggtacaactcgtgctttattaaataatatggtactaggtgtttctcaaggttacgaaaaaacacttgagcttgttggtgtaggttaccgtgcacaaatgcaaggtaaagatttagtacttaatgttggatactctcacccagttgaaattaaagcagaagaaggcattactttcgctgttgagaaaaatacaactgttaaagtatctggtgtttctaaagaacaagttggtgcgattgcttctaacattcgttctgtaagacctccagaaccttataaaggtaaaggtattcgctaccaaggtgaatatgtacgccgtaaagaaggtaaaactggtaaa

SEQ ID NO: 34354 - DNA, 396 bp, Staphylococcus epidermidis
atgacaatgacagatccaatcgcagatatgcttactcgtgtaagaaacgctaacatggttcgccacgagaaattagaattacctgcgtctaatattaaaaaagaaattgctgaaatcttaaagagtgaaggtttcattaaaaatgttgaatatgtagaagacgataaacaaggtgttattcgtttattcttgaaatatggtcaaaacaatgaacgtgttatcacaggtttaaaacgtatttctaaaccaggtttacgtgtttacgctaaagcaaatgaagtgccaaaagtattaaatggcttaggtattgcattagtttcaacttctgaaggtgttatcactgataaagaagcaagaaaacgtaatgttggtggagaaattatcgcatacgtttgg

SEQ ID NO: 34355 - DNA, 768 bp, Staphylococcus epidermidis
atgttaaatctagaaaataaaacctacgtcattatgggtattgcgaataaacgtagtatcgcatttggcgtcgctaaagtattagatcgattaggtgctaaactggtatttacatatcgtaaagaacgcagtcgtaaagaattagagaaattattagaacaattaaatcaatctgaacatcatctctatgaaattgatgtgcagaatgatgaggatatcattaatggtttttctcaaatcggaaaagatgtaggccagattgatggtgtttatcactcaatcgcatttgccaatatggaagatttacgaggtcgattttcagaaacatctcgcgaaggtttcttacttgcacaagaaattagttcatattcacttactctcgtagctcatgaagccaaaaaacttatgcctgaaggtggaagtattgttgcgacgacttatattggtggtgaggcagcagttcaaaactataatgttatgggtgtagctaaagcaagtttagaggcgaatgttaaatatttagctttagacttaggtgaagataatattcgtgtcaatgctatttctgcagggccaattcgtactttaagtgctaaaggtgtaggtggatttaatacaattcttaaagaaattgaagcgagagcgccgttaaaacgcaacgttgatcaagaagaagtaggtaagacggctgcgtatttattaagtgatctttcaagtggtgtaactggagagaacatccacgttgacggtggattccacgcaattaaa

SEQ ID NO: 34356 - DNA, 537 bp, Staphylococcus epidermidis
ttgaaccgtttaaaagaaaaatttaatacagaagttactgaaaacttagtgaaaaaattcaattatagttcagtgatggaagtaccaaaaattgagaaaatcgttgtgaatatgggtgtaggtgacgcagttcaaaattctaaagttttagacaatgctgttgaagagttagaattaattactggtcaaaaaccattagtcacaaaagctaaaaaatcagttgcaacattccgtttacgtgaaggtatgccaatcggtgcgaaagtcactcttcgcggagaaagaatgtatgaattcttagacaaactcattgcagtttcattaccacgtgtacgtgacttccaaggtgtttctaaaacagcttttgatggtcgtggaaattacacacttggtgttaaagaacaattaattttcccagaaattgactacgataaagtaacaaaagttagaggaatggatattgttatcgtaacaactgctaacactgacgaggaagctcgtgaattgttaacaaacttcggtatgccatttcgtaaa

SEQ ID NO: 34357 - DNA, 315 bp, Staphylococcus epidermidis
atgcatatcaaaaaaggtgacaacgtaaaagttatcgcaggtaaagacaaaggtaaagaaggtaaagtagtagctactgaaccaaaaaaagaccgtgtcgttgtggaaggtgttaacgttataaaaaaacaccaaaaaccaactcaattaaaccctgaaggtggaattttagaaacagaggcagcaatccatgtttctaacgtacaattattagatcctaaaacaaatgaacctacacgtgtaggatataaaacagttgatggtaaaaaagttcgtatcgctaaaaaatcaggcgaagaaattaaagctaataat

SEQ ID NO: 34358 - DNA, 366 bp, Staphylococcus epidermidis
atgatccaacaagaaacacgcttaaaagtagcagacaattctggtgctcgtgaagttcttacaattaaagtattaggtggatctggtcgcaaaacagcgaacattggtgatattattgtatgtactgttaaaaatgcaacaccaggtggcgttgtcaaaaaaggtgacgttgtaaaagctgttgtagttcgtacaaaatcaggtgttcgtcgtgaagacggttcatatattaaatttgacgaaaatgcatgtgttatcatccgtgatgacaaaggcccacgtggtactcgtatctttggtcctgttgctcgtgaattacgtgaaggaaacttcatgaaaattgtatcactagctccagaagtacta

SEQ ID NO: 34359 - DNA, 261 bp, Staphylococcus epidermidis
gtgagcgaaagaaacgatcgtaaagtttatgtaggtagagttgtttcagataaaatggacaaaacagtcactgttctagtggaaacttacaaaacgcacaaattatacggcaaacgagtaaaatactctaaaaaatataaaactcatgatgaaaacaattcagctaaattaggagacattgttaaaattcaagaaactcgtcctttatcagcaacaaaacgttttcgtttagtagaaattgttgaagagtcagtaattatt

SEQ ID NO: 34360 - DNA, 432 bp, Staphylococcus epidermidis
atgttactaccaaaacgtgtaaaatatcgtcgtcagcatcgtccaaaaacaactggtcgttctaaaggcggtaactacgtaacatttggtgagtatggattacaagctacaactacatcttggatcacatctcgtcaaatcgaatcagctcgtattgcaatgacacgttacatgaaacgtggcgggaaagtttggattaaaatcttccctcatacaccatatactaaaaaacctttagaagtacgtatgggtgctggtaaaggtgcggttgaaggctggatagcagttgttaaacctggtagaattttattcgaagtagctggtgtacctgaagaagttgctcgtgaagcattacgtttagcaagtcacaaacttccagtaaaatctaagtttgtaaaacgtgaagaattgggtggtgaaacaaatgaaagc

SEQ ID NO: 34361 - DNA, 651 bp, Staphylococcus epidermidis
gtgggtcaaaaaattaatccaatcggacttcgtgtcggtgttatccgtgattgggaagcaaaatggtatgctgaaaaagactttgcttcacttttacatgaagacttaaaaatccgtaaatttattgataatgaattaaaagaagcgtcagtttctcacgtagatattgaacgtgcagcaaatcgcatcaatattgctatccatactggtaagccaggaatggttattggtaaaggcggttcagaaattgaaaaacttcgtaacaaattaaataccttaactgataaaaaagtacacatcaacgtaattgaaattaagaaaattgatattgatgcacgtttagttgcagaaaatattgcacgtcaattagaaaatcgtgcttcattccgtcgtgtacaaaaacaagctattacaagagctatgaaaaatggtgctaaaggtatcaaaactcaagtatcaggtcgtttaggcggagctgacatcgctcgtgctgaacaatactcagaaggaactgttccacttcatacattacgtgctgacattgattatgcacacgctgaagccgatacaacatatggtaaattaggcgttaaagtatggatatatcgtggagaagttcttcctactaagaacactagtgaaggaggaaaa

SEQ ID NO: 34362 - DNA, 351 bp, Staphylococcus epidermidis
atggaagcaaaagcggttgctagaacaataagaatcgcacctcgtaaagtaagacttgttcttgatttaatcagaggtaaaaatgctggagaagctattgctattttaaaattaactaataaagcttcatcaccagtaatcgaaaaagtattaatgtccgctttggcaaatgctgagcacaactatgatatgaatacagatgaattagttgtaaaagaagcatatgctaatgaaggaccaactttaaaacgtttccgcccacgtgcacaaggacgtgcaagtgcaattaataaacgtacaagccacattacaatcgtcgtaagtgacggtaaagaagaagctaaagaagct

SEQ ID NO: 34363 - DNA, 1482 bp, Staphylococcus epidermidis
ttgaatgcaagtgcgttgttcaaaaaaattagagtaaaaaatgtaattggtacattagatatacaggtggacgatattaccactgactcacgtacagctaaagagggaagtctatttgtagcatctaaaggatatacggtagatagtcataagttttgtcaaaatgtagtagatcaaggttgtggtattgttgttgtcaatagagaactcgaacttaaaggtaatgtgacgcaagtcgttgttcctgatactttacgtgttgcaagtctattggcacatgaattatacgagtttcctagtcatcaactgacgacatatggtgttacggggacgaacggtaagacatcgattgcaactatgattcatttaatttatagaaaattgaataaaaatagtgcatatctaggtacgaatggatttcaagttaatgaaacaaaaacaaaaggtgcgaatacaacaccagaaacagtagcattaacaaaaaagatcaaagaagcagttgatgccaatgcagaagcaatgacgatggaagtttctagtcatggattagccttaggtcgacttagaggcgtagagtttgacgttgctatcttttcaaacttgactcaagatcatttagactttcatggaactatggaagcatatggacatgctaaatcgttattatttagccagttaggtgaagatttgtctaaagaaaaatatgttgtattaaataatgatgatgacttctccgattatttagcaagtgtgacaccctatgaagtatttacatatggtattactcacgaagcacaatttatggctaaaaacattaaagaatcattgcaaggtgtagaatttgaattttgtactccatttggaagttttccagttaaatctccttatgtaggtaggtttaacatttcaaatattatggctgctatgattgcggtttggagtaagggaacaaatttaaatgaaattattaatgctgttactgagcttgaacctgtagaggggcgcttagaagtacttgatccatcacttcctatagatttgattatagattatgcacatacagctgatggtatgaataaactgattgatgctgtacaaccatttgttaaacaaaagctaatctttttagtaggtatggctggggaaagagatttaacgaaaacacctgagatggggagagtagcatgtcgagcagattatgttatttttactccagataatcctgctaacgatgatcctaaaatgttgacagctgaattagctaaaggtgcaacgcataacaattatatagagtttgatgaccgtgcagaaggtattagacacgcgattgatattgctgaaccaggtgatacagttgttttggcctcaaaaggtcgagagccttatcaaattatgcctggtcatgttaaagtcccacatcgcgatgacttaattggcttaaaagcagcatatcaaaaatttggtggtggacctcttgaggat

SEQ ID NO: 34364 - DNA, 276 bp, Staphylococcus epidermidis
atggctcgtagtattaaaaaaggacctttcgtcgatgatcacttaatgaaaaaagtagaagctcaagacggaagtgaaaagaaacaagtgattaaaacatggtctcgtcgttctacaattttcccaaatttcattggccatacttttgcagtatacgatggacgtaaacatgtacctgtatatgtcactgaagatatggtaggtcacaaattaggtgaatttgctcctacacgtacttttaaaggacatgcagcagacgacaagaaaacaagaaga

SEQ ID NO: 34365 - DNA, 1560 bp, Staphylococcus epidermidis
atgaatttaaaagaagaaatagagtcaagaaagacatttgccatcatttcacaccctgatgctggtaaaacaactttaactgaaaaattgttgtatttcagtggagcgattcgtgaagctgggacagttaaagggaaaaagacgggtaaatttgcaacaagtgattggatgaaggtagaacaagaacgtggtatctcagttacaagctctgtaatgcaatttgattatgatgattataagataaatattttagatacgcccgggcatgaagatttttcagaggatacgtatcgtacattaatggcagtagatagtgcagttatggttattgactgtgcaaaaggtatagaaccacaaacattaaaattatttaaagtttgtaaaatgcgaggtatccctatttttacattcatcaataaattggatagagtaggtaaagagccatttgaattacttgatgaaatagaagaaacacttaatattgacacttatccaatgaattggcctgttggtatgggacaaaatttctttggtattattgatagacactctaaaacgattgaaccatttagagatgaagaaaatttattacatttaaacgaagattacgaacttaaagaagaacacgcgataaaaaatgatagtgcatttgaacaagcaattgaagaaatgatgcttgtcgatgaagcgggtgaagcatttgataatgaagcgttactgaacggtgaattaacacctgttttctttggatcggcattagcaaacttcggcgtacaaaatttcttaaatgcatacgttgatcatgcgccaatgcctaatgcgagacaaactaaagaagaggttgatgttagtccattcgacacagatttttctgggtttatctttaaaattcaagccaatatggatccaaagcatcgtgacagaattgcatttatgcgcgtggtaagtggtgcgtttgaaagaggaatggatgtaaccttacaaagaactaataaaaaacaaaaaataactcgttccacatcatttatggccgatgataaagaaactgttaatcatgctgtagcaggcgatattattggtttgtatgatacaggtaactatcaaataggcgatactttagttggtggtaagcagaaatatagtttccaagagttaccacaatttactccagaaatatttatgaaggtttctgccaaaaatgtaatgaaacaaaagcattttcataaagggattgaacagcttgttcaagaaggtgcaattcaatattataaaacgttgcacacaaatcaaattatcttaggtgctgtgggtcaattacaatttgaggtgtttgaacaccgcatgaataatgaatataatgtagatgtggttatggaaccagttggacgtaaaattgcgcgttggattgaaaatgaagaagatattaaagataatatgaatacttctagatcaattttagtaaaagatagatacgacaattatgtattcctatttgaaaatgaatttgcaacgcgttggtttgaagaaaaattctctgatattaaactgtatagtttatta

SEQ ID NO: 34366 - DNA, 831 bp, Staphylococcus epidermidis
atggctcttaaaaaatataagccaattacaaatggtcgtcgtaatatgactactttagatttcgctgaaatcacaaaaacaacacctgaaaagtcattattacaaccgctaccgaaaagagcgggacgcaataaccaaggtaaattgactgttcgccatcatggtggtggacacaaacgtcaataccgtgttatcgattttaaacgtaacaaagatggaatcattgctaaagttgattcaattcaatatgatccaaaccgttcagcaaacattgcattgctagtttatgctgatggtgaaaaaagatatatcatcgcacctaaaggattacaagtaggtcaaactgtcgaaagtggtgctgaggcagatatcaaagttggtaatgctttaccattacaaaatattccagttgggacagtaattcataacatcgagttaaaacctggtaaaggtggacaacttgctcgttctgctggtgctagctctcaagtattaggtaaagaaggtaaatatgtattaatcagattaagatctggtgaagtacgtatgattttatctacatgtcgtgcaacaattggtcaagttggcaacttacaacatgaattagtaaatgttggtaaagcaggacgctctagatggaaaggcgttcgcccaactgtacgtggttctgtaatgaaccctaatgatcacccacacggtggtggtgaaggtcgtgctccaatcggtagaccatctccaatgtcaccatggggtaaacctacgcttggtaagaaaactcgtcgtggtaaaaaatcttctgacaaacttatcgttcgtggacgtaagaaaaaa

SEQ ID NO: 34367 - DNA, 273 bp, Staphylococcus epidermidis
atggaagcaagagatgttcttaagcgccccgtaatcactgaaaaatcttctgaagctatggcagaagataaatacactttcgatgtagatactcgtgcaaataaaacacaagttaaaattgctgttgaagaaatcttcgacgttaaagttgatagtgtaaatattatcaactacaaacctaagaaaaaacgtatgggccgttaccaaggctatacaaacaaaagaagaaaagcgattgttaaactaaaagagggttcaatcgatttatttaac

SEQ ID NO: 34368 - DNA, 1356 bp, Staphylococcus epidermidis
atgtcagttttaagtcagctgcttaaaaaatctagccctcaacaagggattatactctattatctatttgccatcgtcgttgcatttttattattaaatttgccatatgttcataaacaaggggttgaggttaatccaattgatacactttttgtagctgtatcaggtattagtgttacaggattatcaccaattactatagtcgacacatactcaacctttggtcaaattatcatacttattattttgaacatcggtggtataggtgttatggctattggaaccatgctttgggttgttttaggcaaacatattggaattagagaacgacaactcattatgttagataataatagagatactatgagtggaacggttaaactgattttagaaattgtaagaacaatttttattattgagtttataggtgcactcttactcgcgttctatttttatcgggataatcctgatttaaaaaacgcattaatgcaaggcatttttgtgtcagtatctgctacgactaacggtggtcttgatattactggtgaatctttagttccctatgcaaaagactattttgtacaaacaatagtaatgttcttaattgtgttaggatctataggctttccagttttgttggagttaaaagcatatataaagaatcgagtaactaattttaggttctcattattcacaaaaataacgacaacaacgtatttattcttatttttattcggcgttattgttgtattaatattagaacatagcaatgcatttaaaggattgagttggcatcaatcattattttatgcattgttccaatcatcaacgaccagaagtgcaggtttgcaaacgatagatgtgtcacatttcagcgacgcaacaaatattgtaatgggattattgatgtttataggatcatctcccagttctgtaggaggtggaatcagaacaacaacatttgctattttaattttgtttgttattaattttaataatactggtgacaaaacaggtattaaaattttcaacagagaagtacatattatggatgtacaaagatcatttgccgtatttactatggcgtcattaattacatttattagcatgattattatatctgccactgaacaaggcaagttgtcctttttacaaattttctttgaagtaatgtctgcgtttggtacatgtggtttaagcttaggtgtgacaagcgatgtcaacgacattaccaaggctgtattaatgatattaatgtttataggtcgtgtaggacttatttcattcattattatgttagctggacgtaaagaacccgaaaaatatagctatcctaaagaacgtatacaaattgga

SEQ ID NO: 34369 - DNA, 1548 bp, Staphylococcus epidermidis
atgaatggtacatgttacactaaattcaaggagaggagtggctctatggaaaaaaatgaaaataaaatagttgatgtgattgcaacttctgatatgcatagtcacttcttaaatggtgattatggctcaaacatttatcgggctggtacttatgttaatgaagctcgaaaaaataatgaaaatgtcatattactagatagtgggggaagtttggcgggatcacttgcagcattttattacgccgttgtagcaccatataaacgtcatcctatgattaagttgatgaatgcaatgcagtatgatgctagtggaattagccctaatgaatttaaatttggattatcttttttgacacgttcagttgcactctcaaggtttccttggctatcagcaaatatagagtatactgttactagagagccatatttttctacgccttatacaatcaaaatgtattcagatttgaaaattgctatcgtaggtttaacatcagatggattaatgaagaacgagtacgcagaaatggaagaagatgtctgtattgagaagactttggtttcagctaaacgttggattagatacatacatgaagttgaagaaccagacttccttattgttatttatcatggtgggttaaataaaattagtagtgccaataaaagaaatgaaaaaaatgcaaacgaagctgaaaaaattatggaagaacttggtgttattgatgtaattattaccgctcatcaacatcaaacagtagttggaaaagatcatggaactatatatgttcaagcaggtcaaaatgctgaggaattagtacatctttcaattaaatttaagaaacgtacaacttcttatgagattgagcacatcgactcaaaagttattgacttaaatgattaccatgaagatgagcaattattaaaagaaacatattatgatcgtaaggcagtcaaacactgggcaaattcagtagtttcaaacaaaaacaatggcttaacagttcaatgtattgaagatattatttgtaagccgcatccttttactcaattattacatgatgcaattagattagcctataattatgatatttcttgtgtgcatatacctaagaatggtgaggaagggttaaaaggaactataagaaatagagatatatacgatgcataccctcatccagataaacctatagatatcactgtcaaaggtaaaaatatcaaagatatacttgaatacagttatgcgcatattgattttaataagcgacaattaagtatgacaatgatagatgaaacgttatttacagtttggcaagggtttgattattgtatagacatgtcacaatcaccgtttaatagagttaaattaaatggtctaaatgaagaagattcgtatagaataacaatgacagattattgttatagaaactacaaaatgtatttacaagaagctatcgttcacgacacatattcggaaacgatgggtggattgattagaaaaaatttaaaatgtgacatgtattctgtgaaattaaatcataattttaaagtttat

SEQ ID NO: 34370 - DNA, 621 bp, Staphylococcus epidermidis
atggctaattatgatgttttaaaagtagacggatcaaaatcaggttcagttgaattaaacgatgcagtatttgctatcgaacctaataatagcgttctttttgaagctattaacttacaacgtgcgtcattacgccaaggtactcacgctgttaagaatcgttcagcagtacgtggtggtggacgtaaaccatggagacaaaaaggtacaggtcgtgcacgtcaaggtacaatccgtgctccacaatggcgtggtggtggtgtagtattcggaccaacaccaagaagctatgcatataaaatgccaaagaaaatgcgtcgtttagcattacgttctgcattatcttttaaagttcaagaaaatagctttacaattgtagatacttttggttttgaagcaccaaaaacaaaagaattcaaaaatgtattaactactcttgaacaacctaagaaagtattagttgtaacagaaaacgaagatgtaaatgttgaattatcagcacgtaacattcctggtgttcaagttacaactgctcaaggattaaatgtacttgatctaacaagcgctgacagtgtaatcattacagaagcagctgcgaaaaaagttgaggaggtgctcgca

SEQ ID NO: 34371 - DNA, 660 bp, Staphylococcus epidermidis
atgaccaaaggaatcttaggaagaaaaattgggatgacacaagttttcggtgaaaatggtgaattaatccctgtaacagttgtagaagctagtcaaaacgttgtattacaaaagaaaactgaagaagttgatggttataatgctatccaagtaggttttgaagataaacaagcatataagaaaggttctaaatctaataaatatgctaataaaccagctgaaggtcatgctaaaaaagctgacacagcacctaagcgcttcattcgtgaattccgcaaccttaacgttgacgaatacgaagtaggtcaagaagtctcagttgatacattcgaaactggtgacatcattgatgttacaggcgtttcaaaaggtaaaggtttccaaggtgctattaaacgtcatggacaaggtcgtggaccaatggctcacggttctcatttccatagagcgccaggctctgtaggtatggcatcagacgcttcaaaagtgtttaaaggacaaaaaatgccaggacgtatgggtggaaacactgttactgttcaaaacttagaagtcgttcaagttgacactgaaaatagtgtgattttagtaaaaggcaatgtacctggacctaaaaaaggtttagtagaaatcacaacttcaataaaaaaaggtaataaa

SEQ ID NO: 34372 - DNA, 306 bp, Staphylococcus epidermidis
atggcaaaacaaaaaatcagaatcagattaaaagcttatgatcatcgtgtgattgatcaatcagcagaaaaaattgttgaaactgcaaaacgttctggtgcagatgtttctggaccaattccattaccaacagaaaaatcagtttatacaattattcgtgctgtgcataagtacaaagattctcgtgaacaattcgaacaacgtactcataaacgtttaatcgacattgttaatccaacacctaaaacggtagatgctctaatgggcttaaacttaccatcaggtgtagacatcgaaattaaatta

SEQ ID NO: 34373 - DNA, 2133 bp, Staphylococcus epidermidis
atgaaatctttaatcttagctgaaaaaccatctgtcggaagagatatcgctaatgctttgaatcttcaacaaaaaagtaatggttatatagaagggaaacagtatatagtaacttgggcattggggcatcttgtgacaaatgcaacgcctgaacaatataacccttcatataaagaatggaatttagaagacttacctatcattcctaagaaaatgaaaacagtagtgattagtaaaacaaatagacaatttaaaattgtaaaatctttaattttagataaaaatgttaaagaaattattatagcaacagatgctggacgagaaggtgaactagtagctcgtcttattttagataaagtaggtaataaaaaaccaatcaagcgtttgtggattagttcggttacaaaaaaagccatacaagaaggatttaaacagttaaaaaatggaaacgcgtatcaaaatttatatgaagcagcacttgcacgaagtgaagcagattggatagtagggattaatgcaacacgtgcactaacgacaaaatatgatgcacaattatcattaggtcgtgtacaaactccaacaatacaaatagttaaatcaagacaagatgagattaactattttaaaccagaaaaatattacacgttatccattaatgttgatggttacgatttaaaccttaagcaacaaaagcgatataaagataaaaaagaattagaattgattgaacataaaattaaacatcaagaaggaaagatattagaagttaaaggaaaaaataagaaatcttacgcgcaacctttatttaatttaacagatttacaacaagaggcatataaacattacaagatggggccaaaggagacactaaatacattacaacatttatatgagagacataagttagtaacctatccccgtacagattctaattatttaacagatgatatggtcgatacaattcaagaacggttaagagcaattttagctacagattataaatctcatgttcgagatttaatttctgagtccttttcttctaaaatgcatatttttaataatcaaaaagtttcagatcatcatgcgattattcccacagaggttagaccatctattgaacaattgagtcaacgagagtttaaaatttatatgctaatcgcagaaagatttttagaaaatttaatgaatccttatttatatgaagttttaacaatccatgcacaactgaaagattacaattttgttttaaaagagataatacctaaacaattaggatataaagctttaaaagatcaaacctcttcgcatactttaacgcattcttttaaagaaggtcagttatttaaagtacatcgtattgagattcatgaacatgaaacaaaggcaccggaatattttaacgaaggttcattacttaaagccatggagaatccacaaaatcatattgatttgaatgataaaaagtatgcaaaaacactcaaacattcgggggggattggaactgtagcaactagggctgatattatagaaaagttatttaacatgaatgctttagagtcgcgagatggcaaaattaaagttacatcaaaaggaaaacaaattttagaattgtctccaagtgaattaacctcacctatactaacagcccaatgggaagaaaaattaatgcttatcgaaaaggggaaatataattctcagaaattcatacaggaaatgaaaaactttacatttaaagtagtaaataaaattaaaagcagtgagcaaaaatataaacatgataatttaacaacaaccgagtgcccaacatgtggtaagtttatgataaaagtcaaaactaaaaatggacagatgcttgtatgtcaagatcccaaatgtaaaactaagaaaaatattcaacgcaagactaatgcacgttgcccttattgtaagaaaaaaatgactttattcggtaaagggaaagaagctgtttatagatgtgtatgtggccacacagaaactcaatcacaaatggacaaaagaatgagagataaaacgaatggtaaagtttcacgtaaagaaatgaaaaaatatataaataaaaaagaagaaatcgacaataatccattcaaagatgctctgaaaaatctcaaattg

SEQ ID NO: 34374 - DNA, 3153 bp, Staphylococcus epidermidis
atgattaaaaaattattacaattttcgttaggtaataaattcgctatttttttgatggtagttttaattatattaggtggcgtttattcaagcgccaaattaaaacttgaattattaccagatgttgaaaatccagttatttcagttcaaactacaatgtctggagcaacaccccagtcaacacaagatgaaataagtagcaagattgataatcaagtacgctcgttggcctacgtaaatagtgtacagactgaatctatacctaatgcttctatagtaactgtagaatacgataatggtacagatatggataaagctgaagaacaattaaaaaaagaaatcgacaaaattaagtttaaagatggcgttggtgaacccgaattaacaaggaactctatggatgcttttccaattgtggcatattcttttacgagtaataatcaaaagttaaaagacgttactaaaaagttaaatcaacagctcgtaccaaaattacaaaccattgatggtgtacaaaatgcacaattaaacggtcaaactaatcgtgaagtatcgttaaagtttaaacaaaaaaatttagatgaaaaaggtttaactgcaaatgatgttgagaactatataaaaacggctacacgtgaaacgccattaggacttttccaatttaataagagtaataaatctattgttgttgatggtcaatttaaatctgtagacgcttttaaaaatcttaaaatccctttatctatttctggacaagctgcacaaaatgatagcgattccgacagtgatagtctaatgccaagtgataatactcgctcgactaatagttcaactcatatggcacagaaaggccaaatgccatctgtaccacttaaagatttagcagatattagtgtcggtgatgaacgtacttctatatccaagacaaatggaaaagatgctgttaacttacaaattatgaaatcacaagatgctaatactgtgcaagttgcgagagaagttcagaaaaaagtagatgaatttgtacgtaatgagagtggaatgaaatctattaaaacaatggatactgctaaacctattgaagactctctttatactatggttgaaaaggccgctctcggtacgattgttgctattatcgttattcttctgtttttaagaaatataagaactacagctatttcaattgtatctataccaatgtcaatattaattgcgctcatagcattaaaattaagcaacgtatcattaaatattcttactttaggtgcattaacggttgcaatcgggcgagttatagatgattctatagttgtcgttgagaatatatttagaagattatctgatccgaatgagaagctcaaaggtgaaaatttaattataagcgctactagagaagtatttaaacctattatgtcatcgacccttgttactatagtagtgtttttaccactagtgtttgtgtcaggttcagtaggtgaaatgtttagaccatttgcgctagccattacttttagtttattagcttcactacttgtttcgattaccctagtgccttctttaggtgcaacattttttaaaaatggcgttaaaaatagggaacaaaaagaaggtctaggaacagttgggagagcctatagaagcgctttgaattggtcacttaatcataaatggattgtgcttatagttagtatttttattttagttggaagtgtggtcataggcgcaagaaatctaggaacgagttatatttcaactggagataataaatttttagctctaacatatactccaaaacctggagaaacacagaaatctgtgacacaacatgctgaaaaagtacaaaattatttagataaaaaagataaagtagaaactgttcaatattctataggtggtcctacaccacaagatcctaccggtagtaccaacagcatggcaattatgattaaatatcaatctgacacgcctaattttgatgaagagcctgataaagtacttaaacatatcgagacatttaaacaacctggagaatggaaaaatcaagatttaggaacaggagcaggtaataattctgtcgaagtaactgtcaaaggacctaatacaagtgcaatgaaagatacagtcaaccgtgtagagaaaatgatgactgatattaaaggcataacgaatgttaaatctgatttatcacagacgtatgaccaatatgaaataaaagttgaccaaaataaagctgcagataatggtatttctgctgcacaacttgcgatgaatcttaatgaaaacttacctgagaaaacaatttctacagttaatgaaaagggtaaatctatagatgtaaaggtcaaacaaaataagcaaacagattggtcttctcaaaaaattaaaaacattaaactaaataagcctacgggcggtacgattaaacttagtgaaatagcatctcttaaaaaatcatatacaccaagtaaactgactcaagaagatggcgattatgctacgactgttacaggtaaagtgactgataaagatgtgggtggtaaatctcaacaagttatggctaaagtgaaagaccttgagaaacctagtcatattaaaattaatgtcggcggtgcaactgatgacattgataaggctatttctcagcttgctatggcgatgatagcagcaattatcattgtttatttaattttagttattacatttagaggtggtctggcaccatttacaatcttgttctcattaccatttacggttatcggtgtagtacttgcactcatcattaccggagaaactatttcagttccaagtttaataggtatgcttatgttaattggtatcgttgttacgaatgctatagtattaatcgatcgtgttattaacaatgaaaaacaaggtatgccgatgaaacaggcattgatagaagcgggtggtacacggataagacctatattaatgacagcaattgcaacaataggtgcactagtgccgttgttatttggtcatgacagttcaatattaatttcaaaaggtatggctgcaacagtaataggtggattaatttcttcaacgctactcacactctttgtagtaccggttatatacgaaattttattcactttaaaaaataaaattactaaaaagtttaatatg

SEQ ID NO: 34375 - DNA, 1248 bp, Staphylococcus epidermidis
atggaaaagatgaacatcactaatcaacaacatgacgcatttgtgaaatctcatcccaatggtgatttattacaattatctaagtgggcagatacgaaaaaattaacaggatggtattcaagaagaattgctgtcggtgaaaatggtcaaattaaaggtgttggccagctactattcaaaaaaatacctaaacttccatacactttatgctatgtatctaggggatttgtagctgattataataataaagaagtgttagaagctctacttagctatgctaaagaagtagcaaaagatgaaaagtcgtatgctatcaaaatagatcccgatgtcgaagtagataaaggtgcagaagcacttaaaaatctacgtgagcttgggtttaaacataaaggttttaaagaaggactgtctaaagactatattcaaccaagaatgactatgattacgcctattgacaaaacagatgatgaattagttcaaagtttcgaacgtcgaaatcgttcaaaagtaagacttgcactgaagcgtggaactaaagtagaacgatcaaatcgcgaggggcttaaaatctttgctaatttaatgaagataactggggagagagatggttttttaactcgagatattagttattttgaaaatatatatgatgcacttcatgaagacggtgatgcagaactcttccttgttaaattagagcctaagccagtattagatacggttaatcaagatcttgaagcacaattagctgagaaagagaaattacaatcaaaaaagcaagataaaaagacacttaataaacttaatgatattgataataaaattaagaaaacaaatgaattaaaatcggatttaacagaacttgaaaaaagcgagccagaaggtatttacttgtcaggagcgctcttaatgtttgcaggaaacaaatcttactatctctatggcgcttcctcgaatgactatcgtgatttcttaccaaaccatcacatgcaatttgaaatgatgaaatatgcacgtgagcatggtgcaacaacctatgactttggtggtacagataatgatcctgataaagattcagaacattatgggttgtgggcttttaaacgagtttggggtacatatttaagtgaaaaaattggagaatttgattatgtattaaatcaaccgctatatcatttagttgagaaagtgaaacctcgtttaacgaaagctaaaattaaaatatcacgtaaacttaaaggtaaa

SEQ ID NO: 34376 - DNA, 1020 bp, Staphylococcus epidermidis
atgaaagaggtaatacaagataaattaggccgtccaatacgggatttaagaatatcggtcactgatcgatgtaatttcagatgtgattattgtatgccaaaggaaatctttggagatgattacactttcttacctaagaatgaattgcttacttttgaagaattaacacgaatttcaaagatttatgctcaattaggagttaaaaagataagaattacaggaggagagcctctcttacgacgcaatctttataaacttgtagagcaattaaatctcatagatggtatagaggatattggattgactactaatggcttgttattaaaaaaacatggaaaaaatttatatcaagctggtttacgacgtattaatgtaagtttagatgcgattgaggataacgtttttcaagaaattaacaatagaaatattaaagcgtctacaatcttagaacaaattgattatgcagtatcaataggttttgaagttaaagtaaacgtggttattcaaaaaggggttaatgataatcaaattatcccgatgattgattattttaaaaataaaaatatcgaagtacgttttattgaatttatggatgtaggtaacgataatggatggaatttcaataaagttgtaactaaagaagaaatgcttaatatgatagaacaacattttgagataagtcctgtagcgcctaaatattatggggaagttgctaaatattttcgacataaagatagtgatgcacaatttggtctaattacgagtgtatctgaatcattttgttccacatgtacgcgtgctcgattgtcttcagatggtaaattttatggttgtttatttgcctcctcagaagggtttgatgtaaaagccttaatacgtaatggagctacagatgatgatttaaaagcacaatttaaacgattgtggagtattagaaacgatcagtactctgataagcgtacgatgcaaactattgagaataatagaaagaaaaaaattaatatgaattatataggtgga

SEQ ID NO: 34377 - DNA, 1887 bp, Staphylococcus epidermidis
atgagtgatcgttttataaaattcaacgatgaacaattagatgcaaaacaagtaatgatgttacaagacttagcacgtttacttttaaaaaatgaacaaacacaagttaaaatacaaaaattcccttactataatccttatagtaatacactcattgcgagttggttttggtctcatagaccgaaacatattgaacaagctggactgaaaacagatgtcttactcgcaacgtatggatatctgaatatggatctttcaatcatcaatcaagttttacacaacaatgatttcgaacaccctaagttctttcatcaattatttaaacttttagaggatgtacgtatatttgaacatattagacaacaaagacctagcactacaaaaatgattgatttacgcatagaaacacgattatctttcacagaatctcaaattaatttttacaaaactaaaactgtatatactgatttactttttctttatttagagcatgcatttttaagtcaaaacttttttaatattccatccatacatccagcatttgatgacattttagttcatatgtatcagtacttaccaaatatttttcagaatcatacatcagaagataatatgtatttagcagaacgtatcatgtatcaagtggatgatttattaaaggaagatatgctaaatgaatattactacttacctcaaaaattatatgaagatatttatgcagatagttttgaagacttaaaacgtacagatgcgagcaatactgatggtaaagataatcatcagacagaggaagatgtagaaacagctgaagctgaaacaaaagccgcagacagtgagtctaaaggcggggcatatttagaaatggagctacatgagggtgaaaacagtgaagttatggctgataatgatacggctcgagaaggtgacagcactgatgatatgactgatatgatgaccaaaaaaggtaaagggtcagaaaatacacttgatcacgatgaaggtggatttacaggacaaaaccagacttttgctttaaaaggcattaataaagacgtaagtattgaatggaatatccctgatattacaccgcaaaatgtgatagattatcaatattcaaaaaatgatgtacagtttgaaattaaagatttaatacaaattatcgaaaagaccatcgacagagaacatgaagatgaaagacacaatttaacaaagggacgcttacaaaaagaccttattaattggtttattgatgatcaatttaagttattttacaaaaaacaggatttaagcaagactttcgatgcaacatttacattactcatcgatgcatcagcgagtatgcacgataaaatggatgaaacgatcaagggtgtcgttttgttccatgaaactttaaaatctttgaatattaaacatgaaatactagcatttaatgaagatgcttttgaagctgacgaacgtcaacaaccaaatatcattgatgaaatcattaattataattactctatctttgaaaaagaaggcccacgtatcatgacattagaacctcaagatgataatcgtgatggcgtagctatcagaattgcgagcgagcgtttattacaaagaagtcatgaacaacgctttttaatcgtattctcagatggagaaccgtctgcatttaattacagtcaagatggtattttagatacgtatgaagctgttgaacgtgcgcgcaaatttggtatagaagtatttaatgtctttcttagccaagagccaattactgaagacatcgaacaaaccattcataacatatatggccaatttgctatatttgtcgaaggcgtggaacatttaccgagtcacttatcaccattactaaaaaaattgttacttaaatcttta

SEQ ID NO: 34378 - DNA, 1257 bp, Staphylococcus epidermidis
atgtctgtagagaaaagaacgccaatatcagttaaagaagcaattaaacgtattatgaaacaacatgttgaagtgaagaatatcaatattaatttagatgaaagtttaggacatattcttgctgaagatattgttgcgacctatgatataccaagatttaataaatcaccctacgatgggtttgcaattagaagtgaagattcacaaggtgcaagtggcgaaaaccgtattgaatttgaagtaatagatcatatcggtgcaggttcagtttcagaaaaaacaattgataaaaaccaagcaattcgaataatgactggtgctcaaattccttctggagctgatgccgtagtaatgtttgaacaaactattgaatctgaaacaacttttacaattagaaaatcctttaaacatttagaaaatatttcgctacaaggtgaagaaataaaagctggtgatattgtactacataaaggtatgcgtattaactcaggtgtgatagcagtcttagctacatacggttatactaaagtgcgagtggctcgaaaaccaactgttgcagtaattgctacaggtagtgaattgcttgaagtagaagatgagcttgaaccaggaaagatacgaaattcaaacggaccaatgattaaagcattagctaaacaatttggaatacaagttggaatgtataaagttcagcatgataatctcgaaaagagtattgaggttgtaaaaaaagctttatcagagcatgatttagtaattactaccggaggtgtgtcggtaggagattttgattacttaccagaaatatacaagtccatccaagcacagatactatttaacaaagtggctcaaagaccaggtagtgttactacggttgcatttgcagatggtaaatatttatttggcttatctggaaacccttcagcctgctatacaggatttgaattatatgtcaaacctgctgtaaataagctcatgggagctaaagcttgttatccgcaaataatcaaagctacacttatggaagattttaataaagctaacccatttacacgattgattcgtgctaaggcaacattaacaaaagctggaatgacagtaataccatctggatttaataaatcaggtgcagttgtagccattgcgcacgctaatgctatgattatgcttcctggtggcacacgtggatttaaagcgggcaacattgttgatgtgattttgaccgaatctaatagttttgaagaggaattgatacta

SEQ ID NO: 34379 - DNA, 2802 bp, Staphylococcus epidermidis
atgactaagaacaagaaagaatttacagaggctcctgtaaacttcggtgcaaatcttggccttatgctagatttgtatgatgattatctacaagatccatcatccgtacctgaagatttacaagtcttgttcagtacaattaaaacaggtgaagctcatatcgaagctaaacctaccactgatgggggtggttcacaagcgggagatagcacaattaaacgtgttatgcgcttaatcgataatattcgtcaatacggacatttaaaagcagatatttatccagtaaatcctccagagcgtcaaaatgttcctaaattagaaatcgaagattttgatttagataaagaaactttggaaaaaatatcatctggaattgtctctgaacattttaaagacatttatgacaatgcctatgatgcaattgttcgtatggaaagacgttacaaaggaccgatagcttttgaatacactcacattaataataataaagaacgtgtgtggttaaaaagaagaattgaaacgccttataaagcaagtttaaacgataatcaaaaaaaagaacttttcaaaaaactcgcacacgtagaaggttttgaaaaatatttgcacaaaaattttgttggggctaaacgtttttcaattgaaggtgtcgatacgttagttccaatgcttcaacacacaatcacattagcaggtaacgaggggattaaaaacattcaaatcggtatggctcaccgtggacgtttaaatgtattaacgcatgtcttggaaaaaccttatgagatgatgatttcagaatttatgcatacagatccaatgaagtttttaccagaagatggtagtttagaattaacttcaggttggacatcagatgtgaagtatcacctaggtggcgttaaaacgactaactcatatggaatagaacaacgtatttctttagcgaataatccaagtcatttggaaatcgttgcacccgttgttgctggtaaaacaagagcagcacaagataatacacatcaagtaggaggtccatctaccgacttccataaagcaatgccgattattatacatggtgatgcggcatatccaggtcaaggtattaattttgaaacgatgaacttaggtagtttaaaaggatattctacaggtggttcacttcatattattacaaataatagaatcggttttacaactgaaccttttgatggacgttcaacaacgtactcttccgacgtagctaaaggttacgatgttccaatactacacgtaaatgccgatgatgtagaagcaacaattgaagctattgaaattgcaatggagttccgtaaagaatttcataaagatgtagttattgatttagtaggttatcgtcgttatgggcataatgaaatggatgagccttctattactaatccagttccataccaaaatattagaaaacatgattcagttgaaattttatatggtaaaaagttagttgatgaaggtattatttctgaagacgaaatgaatgaagtcattgacagtgttcaaaaagaaatgcgaacagcacatgataaaattgataaaaatgacaaaatgaataacccagatatggaaaaaccagaatcactccaactacctttacaaagtgatacgaaagatttctcatttgatcatttaaaagaaatcaatgatgcaatgcttgattatccaaaagattttcatgtactgaaaaagctcaataaagtacttgaaaaacgtagagaaccttttgaaaaagaaggggggctcgtcgattgggctcaagcagagcaacttgcttttgcaaccatattacaagatggaacttcaattcgtttaacaggtcaagatagtgaacggggaacatttagtcatagacatgctgtgcttcatgatgaagaaaatggtaatacattcacgccattgcatcatgtacctcaacaacaggctacttttgatattcataattcgccgctatctgaagcagctgtagttggatttgagtatggttataacgtcgaaaataaaggtaactttaacatatgggaagctcaatatggcgacttttctaatatgtctcaaatgatgtttgacaatttcctctcaagttctcgcgcaaaatggggtgagcgttcaggtttaacacttttcttaccacatgcttttgaagggcaaggaccagagcattcatcggcacgcttagaaagatttctacaattagccgctgaaaataattcaactgtagttaatctatctagtgcaagtaattacttccatttactacgtgcgcaagccgctagtttagatacattagaaatgagaccattaattgtcatgtcacctaagagtcttttaagaaataaaacagtagctaaacctattgatgagtttacatctggcggttttaaacctatcatcacagaagatatcgatgaacaaaaagtcaaaaaagtgattttagcatcaggaaagatgtatattgacctaaaagaatatttagctaaaaatcctaacgattctattcttctcatagcagtagaaagattatatccgttcccagaagaagaaattaaagaagtattaaaatcgttacctcatcttgaaaatgtgtcatgggttcaagaagaacctaaaaatcaaggtgcatggttatttgtgtatccttatctaaaagcacttgttgctaataaatatgatttaacttatcacggtagaatacaaagagctgcacctgctgaaggcgatggagagattcataaacttgtacaaactaaaattattgaaagtagcattaacaat

SEQ ID NO: 34380 - DNA, 528 bp, Staphylococcus epidermidis
atgcacaaacatcaacatcagaatattcatttaaacagaccgattcatgtagcaattttgactgtatcggatacgagagattatgattctgataaaggtggtcaactgattcaatctttgataaatcaacatgagaatcatgttgatattaaccactatcgaattgttaaagatgatatagaagctattacacaccaacttaagctttggttaacttcgtcaaatcaactagatgtcattattacaacgggaggaacaggtatctcacaaagagatgtgacaatagaagctgttcgcccattgttaactaaagaattagaaggttttggtgaattatttagatacttaagttataccgaagatgttggtacaagagcattattaactcgagctattgcaggtacctgtgatagcaccttaatttttgcacttcctggctcaactggtgcaattaaacttgcaatagaaaaattaattaaacctgaattgagtcacttagtgtttgaattaaataaagacattaggaat

SEQ ID NO: 34381 - DNA, 999 bp, Staphylococcus epidermidis
atgcaagaaagatactcgagacaagtgttgtttaaggaaattggtttaaaaggtcaaagtctacttgagaaaaaacatgtgcttatagtaggtatgggtgcgttaggaacacacttagctgagggattagtgagagcgggaataaataagttaaccattgttgatagagattacattgaatttagcaatttacaacgacaaacgctctttatagagcgtgatgcagaagatgtactaccaaaagtaatcgctgcacagaaagttttaaaagagatacgtaaagatgtagagatagatgcttatattgagcatgttaattacaatttcttagagcaacatggcatgcatgtcgatatcatattagatgcaactgataattttgatacacgtcagttaattaatgactttgcttataaacatcagattccttggatttatggtggtgttgtacaaagtacatatgttcaggcaacgtttattcctggtgaaacaccgtgttttaattgcttaatgcctcaattaccatctattaatttaacatgtgatacggttggagttattcaaccagctgtaacaatgacaaccagtttacaactcgttgatgcattgaagttgctgactggtaataaggttaataaacacttcacttacggggatatttggacaggagatcattatacatttggttttagtcgtatgcaaaatgaagattgtaaaacttgtggtaatgctccaacatatccacaccttaatcaacatcaacaagattatgcgaccttatgtggaagagacactgttcaatataaaaatgctgatatttctcaggaaatattactatcatttctcgagcgaaatcatattcaatatcgcacgaatttatatatgacaatgtttaggtttagagaacatcgaattgttgcattttctggaggtagatttttgatacatggaacgacagaacctaaaaaagcaattcaattaatgcatcaactatttggt

SEQ ID NO: 34382 - DNA, 618 bp, Staphylococcus epidermidis
atgctcacaattaaagtgaatggtgttcttaatcagacgaaaattaatataaatataaaggatcaacaccctaagatatatgcgatacagggaccatctggaattggaaagacaacaattttaaatataattgccggtttgaaagctataaattattcatatataaaggttggtaaacgtgtattaactgattcacgacaccatttgaatgttaaggttcaacaacgtcgtataggatatctatttcaagattatcaacttttccccaatatgaatgtttataacaacataacgtttatgactaaaccttctgaacatatcaatgaacttattcatactctaaaaatagagcatttacttgaaaagtatcctgtgaccttatcaggaggtgaagctcagcgcgtcgctttagcaagggcgctaagtacgaaacccgatttgattttgcttgatgagcctttttcaagtttagatgataaaacaaaaaacgaaggtatcaaattaattttaaaaatattcgaagcatggcaaattcctattatatttgtaacgcattcaaattatgaagcgcaacaaatggcgcatgagattataacaattgaagattgtatacaaata

SEQ ID NO: 34383 - DNA, 1071 bp, Staphylococcus epidermidis; identical to SEQ ID NO: 34313

SEQ ID NO: 34384 - DNA, 612 bp, Staphylococcus epidermidis
atgaatcgatggaaacgcatttcattgcttattgtttttacacttatttttggtataatagctttttttcatgaatcaaggcttggaaaatggatagataacgaagtatatgaatttatttattcatctgaaagtttcattaccacatctattatgttaggtgtaacaaaaattggtgaagtttgggcaatggttgcgctatccttattattagttgcttaccttatgctaaaacgtttcaagattgagacattattctttgtaatagtaatgagcttatctagtacactcaatccactattaaagaatatctttgatagggaacgtccaacattattgcgtttaattgacatttcaggctttagttttccaagcggtcatgctatgggctcaacttcattctttggaagcgctatatatgtaataaaccgtcatgattcgggtatctctaaaggcgtgttaatcggtttatgcgcacttttcattttattaatatcaacttctagagtgtatctaggcgttcattaccctacagatattattgccggcattattggtggtgtattctgccttttactcagtactttattactacctaaacagttaatagct

SEQ ID NO: 34385 - DNA, 1986 bp, Staphylococcus epidermidis
atgaattttccatgggatcaactactagttaaaggaaattggatgattatctcagcacaaattgctgcgccattcttagtcatcggccttatagcagttatatcttatttcaaattatggaaatatctatataaagaatggttcacatccgtagaccataaaaaaatcggtatcatgtatttaatttctgccgtattaatgttcgttcgtggtggtatcgatgcgttaatgttacgtactcaattaacaattccagataacaaattcttggaagcaaaccactataatgaagtatttactacgcacggcgtaattatgattatatttatggctatgccatttatctttggtttatggaatgttgttattccattacaacttggtgcacgcgatgttgccttccctgtaatgaataacgttagtttctggctattcttcgctggtatgattttattcaacctatcatttattgtaggtggatcaccagctgctggttggactaactacgcaccacttgctggtgaattcagtccaggtccaggtgttaactattatttaattgcaattcaaatatctggtatcggatcgttaatgactggtatcaacttctttgttacgattctaagatgtaaaactccaacaatgaagtttatgcaaatgccaatgttcagtgtaacaacattcattacaacattaatcgttatattagcattcccagtgttcactgtagcacttgctttaatgactgctgatagaatttttggaactcagttcttcactgtagcaaatggcggtatgccaatgctttgggcaaacttcttctgggtatgggggcaccctgaagtttatatcgttattttgccagcattcggtatgtactcagaaatcatccctacttttgcccgtaaacgtttattcggtcatcaaagtatgatttgggcaactgcaggtatcgcattcttaagtttcttagtttgggttcaccatttcttcactatgggtaatggtgcgttaattaactcattcttctctatctcaacaatgttaatcggtgttccaaccggagttaaactatttaactggttgctcacattatacaaaggtagaattacatttgagtcacctatgctattctcattagcattcatccctaacttcttattaggaggggttactggtgtaatgcttgcaatggcatcagctgactatcaatatcacaacacttatttcttagtagctcacttccactatacattggttactggtgtagtatttgcctgcttagctggtttaatcttctggtatccaaaaatgatgggctacaagttaaatgaaacattaaacaaatggtgcttctggttcttcatgatcggatttaacgtttgtttcttaccacaattcattctaggtttagatggtatgccacgtcgtctatacacttacatgccttctgatggttggtggttactaaacttcatctcaactatcggtgcagtattgatggcaattggattcttattcctagttgcaagtatcgtttatagtcatatcaaagctccacgtgaagctactggagataactgggatggacttggtcgtactttagaatggtctacagcatcagctattccacctaaatacaactttgctatcactcctgattggaatgactacgatacattcgttgatatgaaagaacatggtcgtcattatttagacaaccataactacaaagatattcatatgccaaacaatactccagtaggattctggatgggtatatttatgactattggtggtttcttcttaatcttcgaatctattgttccagcacttatctgtttagcaggtatcttcattactatgatttggagaagtttccaaattgatcatggttaccacatccctgcttcagaagttgcagaaactgaagctcgtttaagagaagctcgaattaaagaaagggaggctgtaagtcatgagtca

SEQ ID NO: 34386 - DNA, 783 bp, Staphylococcus epidermidis
atgaaaattaaacatatttttgttatcattttaacattgtgtgtagtgttagcaggttgtaccaacgagaaaggtcagaataaagaacagaatgaaaaacaaccgacaaaaggtgataaacaagaacttcaagtttctgctgcagcaagtttgactgaagtcagtaaagcattaggaaatgaatttaaaaaggaccatccaaatgtagaaattaaatttaactatggcggatcaggtgcgttaagacaacagatagaagcgggtgctccggcagatgtcatgatgtcagctaacactaaagatatagacctgttgaagaaaaaaaacaaagcacatgacacttataattatgcaaagaatcaacttgtattaattggcgataaaaataaaagttatacctctgtaaaagatttaaatcaaaacgacaaactcgcactaggacaaataaaaacagtgcctgctggtaaatatgcaaaacaatatttagatgatcaacatttatatggtgatgttaaagataaaattatttttgctaaagacgtaaaacaagtattaaattatgtggaaaaaggaaatgcacaggaaggattcgtttacaaaacagacttatatcaacaaaagaaaaaagcaaataaagttaaagtcatcgaagaaattaaattaagcaaaccaattacttataaagcaggtgcaacttcagataaaaaattagctaaagaatggattaacttcttaaaatctaataaagctaaacaaattcttaaagaatatcaattttctgta

SEQ ID NO: 34387 - DNA, 1071 bp, Staphylococcus epidermidis
atgacaaaaattgcatatacaggtggaggaacagtaggacacgtttcagtgaatttaagtttaattcctacttcgattgaaaaaggacacgaagcattttatattggttcaaaacatggtattgaaagggaaatgatagagtcacaactccctgatattcaatattatccaatatcaagcggtaaattacgtcgttatctatcttttgaaaatgcaaaagatgtctttaaagttttgaaaggaattttagatgcacgtaaaatacttaaaaaacaaaaaccagacttacttttttcaaaaggtggttttgttagtgttccggtagttatagccgcacgttctttaaaaattccaactatcatacacgaatcagatttaactcctggattagctaataaaatttctttaaaatttgctaagaaaatatacacaacctttgaagatacacttacatatcttccaaaagataaagctgattttgttggggctactgtacgtgaggacttaaaacaagggaataaagaaagaggatatcaactcactgattttgataaaaataaaaaagtgttattagtcatgggaggaagtttaggtagtaaaaaacttaataatatcattcgtcaaaatattgaggcacttctccatgattatcaaattatacacttaactggaaaaggacttgttgatgactcaatcaataaaaaagggtatgttcaatttgaatttgttaaagacgacttaactgatttattagcaatcactgatactgttgtaagtcgtgcaggttctaacgcaatttatgaatttttatcgctacgtataccgatgttactcatccccttaggacttgatcaatcaagaggagatcaaattgataatgctaaaaactttgaatctaagggttatggtcgtcatattcctgaagatcaacttacagaagttaacttattgcaagaattaaatgatattgaattacatcgtgaatctattattaaacaaatggaaacatatcaagagagttacacgaaagaagatttatttgataaaattattcatgatgcattaaacaag

SEQ ID NO: 34388 - DNA, 1122 bp, Staphylococcus epidermidis
gtgtcaaaatttaagtctttgcttctattatttggcacactaattttacttagtggttgttcaaatatagaagtttttaatgcaaaagggccagtagcaagcagtcagaagttcttgattatctattcaataattttcatgcttgttattgttgctgtagtgctttccatgttcgctatttttatttttaaatatagctacaaaaagaatagcgaatctggtaagatgcaccacaattctctaattgaaacaatttggtttgtggtacctattttaatcgtaattgctttagctattcctacagttaaaactttatacgattatgaaaaaccaccagaaaaagacaaagatccacttgtcgtttacgcagtaagtgctggctataaatggttctttgcctaccctgatcaacatattgaaactgttaacacattaacaattcctaaagatcgaccagttgtattcaagcttcaatctatggatacaatgacaagtttctggattccacaattaggtggtcagaaatatgccatgactggtatgactatgaattggactttaacagctgatcaattaggtactttcagaggtcgtaactcaaacttcaatggtgagggattctctcgtcaaacatttaaagttcactctgtaagtcaaaatgattttgataagtgggtaaaagaggctaaaggtaagaaaactttaagtcaagatacttttgacaagcaactcttaccaagcacatctaacaaagaattaacatttagtggaactcatatggcgtttgttgaccctgcggctgatccagagtatatcttctacgcttacaaacgttacaactttgaacaaaaagatcctaacttcacagctgaagaggatttatacaaagatgtaaaagataaaccaatcaaacctgctcgtaaggttcatataacaaaccctaactatgaacgtcacggtatgaaacctatgattctcggcaacaatgaaaaatacgataatgagttcaaaaaagaagaggatcataactctaaagaaatggaaaaaatttctaagggagcaaaagacgaaaatgcgtctaaacttcacaaaaaagaacacgatgatcatggaggtggacat

SEQ ID NO: 34389 - DNA, 501 bp, Staphylococcus epidermidis
atgattagattagcaactaaaaatgatttacttagtattactcaattagtcaaagaggctaaacagattatggaagaattcaacaacaaccaatgggatgatgaatatcccgcgaaagagcattttgaagaagacatcgaaaataaaacactatatgttttagacgttgatcatacaatttatggttttattgttatcgaccaaaatcaatcggagtggtatgatgacattgattggcctgttaatcgaaatggggcatacgttattcacagattagctggatcaaaacaatataaaggtgctgcgactgaacttttccaatttgccattgacttagcaaatgaacatgatattcatgtcattttaacagatacatttgccctcaataaacctgctcaaggattatttgaaaagtttggttttactaaagttgatgagatagagatagattatcatccttttgatagaggggcacctttttatgcatattataaaaacata

SEQ ID NO: 34390 - DNA, 2439 bp, Staphylococcus epidermidis
ttgcactttacacaacgtgaacaagacaaattgatgatagttgtagctgctgaggttgcacgtcgtagaaaagcaagaggacttaaacttaatcatcctgaagcacttgctttaatcagtgatgaattattagaaggcgcgcgtgatggtaaaacggtagctgaactcatgagctatggaaaaacaattttaaacgaggaagatgtcatggatggcgtagctaacatgattacagaacttgaaattgaagcaacttttccagatggtactaagttaataacagtccatcacccaatcgtttaaggaggctatatcaatgattcctggtgaaattattgttaaaaatactgaaatagaagtcaataaacatcatcccgaaacggtgattgaagtaaaaaatacaggcgatagacctatacaagtaggttcacatttccactttttcgaagcaaataaagcattagaatttgatcgtgagaaagcatatggtaaacatttggatattcctgcaggagctgcagtgagatttgaacctggagatgaaaaaaaagtacaacttgtcgaatattctggacgacgtaaaatttatggattccgtggtttagtcgatggcgatattgacgaagaacgcgtattccgtccaaatgattcaaatcaaaacgccgccgttaaaaacgatgcaggcgaagacaatgcgaataaaaaaggtggtaaataagcatgagttttaaaatgacacaatctcaatacacaagtctttatggaccaactgtaggagactctgtgagattaggagatacgaacttgtttgcacaagttgaaaaagactatgcaaattatggagatgaagctactttcggtggcggaaaatcaattcgtgatggtatggctcaaaatcctaatgtgacaagagatgataaaaatgtagccgatttagttttaactaacgcattaattattgattatgacaagattgttaaagcagatatcggaattaaaaatggttatatttttaagatcggtaaagctggaaacccagatataatggataacgttgacatcatcattggtgcaacaactgatattattgctgctgaaggtaaaattgttactgccggcggtatcgatacacacgtgcacttcatcaatcctgaacaagctgaagttgcacttgagagtggtattacaacgcatatcggtggaggaactggtgcttctgaaggtgctaaagcgactactgtaacaccaggaccttggcatattcatcgcatgttagaagcagcagaagagatgcctattaatgtaggatttactggtaaaggtcaagctgtcaatcatactgcacttattgaacaaattcatgcaggcgctataggtcttaaagtacatgaagattggggagctacaccttcagcattaagtcatgcattagacgttgcagatgagtttgatgttcaagtcgctttacatgcagatacattaaatgaagctggatttatggaagatacaatggctgctgtgaaagatcgtgtattgcatatgtatcatactgaaggagctggtggtggtcatgcacctgacttaatcaaatcagctgcatattcaaacatcttaccttcttctacaaacccaacattaccttacactcacaacactgtagatgaacatttagacatggttatgattactcaccatcttaatgcttcaataccagaagacattgcatttgcagattctcgtatacgtaaggaaactatagcagcagaagacgtattacaagatatgggcgtatttagtatggtaagttcagattcacaagcaatgggacgtgtcggtgaagttgtaacacgtacttggcaagttgcacaccgtatgaaagaacaacgcggaccattagatggtgactttgaatatcacgataataatcgtattaaacgttacattgcaaaatatacaatcaatcctgccattacacatggtatttctgactatgttggatctgtagaagcgggtaaacttgccgatttagtaatgtgggaaccagaattcttcggtgccaaacccgatcttgttgttaaaggtggcatgattaactcagcagtaaatggtgatgctaatggctccataccaacatcagagcctttgaaatatcgcaaaatgtatggtcaatttggtggtaacattacacatactgctatgacttttgtttctaacactgcatatgaaaacggtatttatcgtcaactcaatctaaaacgaatggttcgaccagttagaaatattagaaatttaactaaggcagatatgaaaaataataatgctacacctaaaatagatgtagatccacaaacatatgaggtattcgttgatggtaataaaatcacaagtgaagcagcaacagaattaccattaacacaaagatacttcttattctaggag

SEQ ID NO: 34391 - DNA, 483 bp, Staphylococcus epidermidis
atgacattatcaataattgtcgctcacgataaacaaagagtcattgggtaccaaaatcaattaccttggcacttaccaaatgatttaaagcatgttaaacaactgaccactgggaatacacttgtaatgggacggaaaacttttaattctatagggaaaccattgccaaatagacgtaacgtcgtactcactaaccaagcttcatttcaccatgaaggggtagatgttataaactctcttgatgaaattaaagagttatctggtcatgtttttatatttggaggacaaacgttattcgaggcaatgattgaccaggtagatgatatgtatatcacagtaatagatggaaagtttcaaggagacacattctttccaccatacacattcgaaaactgggaagtcgaatcttcagtagaaggtcaactagatgaaaaaaatactataccgcatacattcttacatttagtgcgtagaaaagggaaa

SEQ ID NO: 34392 - DNA, 954 bp, Staphylococcus epidermidis
atgtataatccattcgacgaagcttatcatggcttatgcgaagagatattagaaatagggaatagacgcgatgatcgcacacataccgggacaatttccaaatttgggcatcaattgcgtttcgatttaaccaaagggtttcctttacttacaaccaaaaaggtttcttttaaattagtagcaactgaattattatggtttattaaaggagatacaaacattcaatacctacttaaatataataacaatatatggaatgaatgggcatttgaaaattatgttcagtctgatgattatcatggaccagacatgacagattttggacatcgttcccagcaagaccctgaatttaacgagcagtataaagaagaaatgaaaaaatttaaagaacgtattctaaacgatgatgcatttgctaaaaaatatggcaacttagggaatgtttatggtaaacaatggagagattgggaagataaaaatgggaatcattacgatcaattaaaatcagttatacaacaaattaaaaccaatccaaactctcgacgtcacattgtttcagcatggaatcctactgaaatcgattcaatggcattaccaccttgccacacaatgtttcaattttacgtacaagagggtaaattaaattgtcaattatatcaaagaagtgctgatatatttttaggtgttcctttcaatattgcaagttatgctttactgacacatcttgttgcaaaagaatgtggacttgaggtgggtgaattcattcatacatttggagatgcacatatttattccaatcatatggatgcaatacatacacaattatcaagagatagttatctaccacctcaattaaaaattaatacagataaatcaatttttgatattaattatgaagatttagaattgataaattatgaatcacaccctgctattaaagcacctattgcggta

SEQ ID NO: 34393 - DNA, 687 bp, Staphylococcus epidermidis
atgattgatcaccaacatttaagactttttcagttctgtgattctcagtttcctacaggtgcatttagtcattcttttggacttgaaacatatattcaacgagaaactgtacatgatactgagacatttattaaatggttacatttgtttataaacgaacaattaacttattcagatgggatagctatgagaattgtctaccacgcattaattaacaatgacaaagataaaattttagatattaaccaaaaactcttcgtacaaaatctacctaaagaaacgcgtattggcgctaagcaaatgggtacacgcatggtaaaattagctttagatctttatgatagtgaatggattcaatggtattataatcaaatgaaaaacaataaaattaagcttcatcctgctgtgtgctttactatgctaggacattttttaggtgtagatgtggaatccatcattgattattatttatatcaaaatatctctagccttacccaaaatgcagtaagagcgattcctttaggacaaacagctggacagcaagtcgtaactgaaatgatagcccatattgagaagacacgacatcacatactagaattggacgaaatcgattttggtatgactgctcccggcttggaacttaatcaaatggaacatgaaaatgttcatgttcgaatctttatttca

SEQ ID NO: 34394 - DNA, 612 bp, Staphylococcus epidermidis
atgtcaaacccaattaaaattggtatcggggggcctgttggtgcaggtaaaacccaattaatagaaaaagtggttaaacgccttgcgaaaaaaatgagtattggcgttattactaatgatatctatactaaagaagatgaaaaaatactagttaatacaggtgttttaccagaagatagaattatcggtgtggaaactggaggttgtcctcatacagctattcgtgaagacgcctcaatgaacttcgcagccatagatgaattattagaacgtaatgatgatattgaacttatttttattgaatcaggtggcgataacttagcggctacttttagtccagaactcgttgacttttcaatttatatcattgatgttgctcagggcgaaaagattccacgtaaaggtggacaaggtatgattaaatctgatttcttcattattaataaaactgaccttgcaccatatgtgggtgcttcattagatcaaatggctaaagatactgaagtatttcgtggaaatcatccattcgcttttacaaatttaaaaactgatgaaggtttagaaaaagttattgagtggattgagcacgacgtcttactgaaagggttaact

SEQ ID NO: 34395 - DNA, 702 bp, Staphylococcus epidermidis
atgtataatgaaatatttggtattgcgtcatttattgttacattcgctttaatggtactgatgtatcgctgttttggtaaacaaggactaattgcttgggtagcaataggaacgattatcgctaatatacaggtcataaaagcggttcatatttttggtattacggctacacttggaaatgtcatgtttgcttctatatatttagctactgatatattaaatgacatctatggtcgtaaagttgctaaaagagcggtgtggcttggtttctcttctaccttagtaatgattatagtcatgcaaatgtcattgcattttattcctgctccagtagacaatgcgcaaaactcattaaaaatgatttttgatttagttcctagaattgctataggttccattattgcttatatcataggccaacatattgatgtatttatattcagtatgattaaaaagatatttagctctgataagaccttttttattagagcatatggtagtaccattttaagttctatcattgataccggtttatttgtttcaattgcttttattggtactatgcctggtactgctgtttttgaaatatttattaccacttacttgttaaaactagtgtcaactatttttaatgtaccatttggatatatcgctaagtcactatatcgaaaaggaaagatagaacaactagataatgggtat

SEQ ID NO: 34396 - DNA, 19922 bp, Staphylococcus epidermidis
aaatctaaggtagagcaagcactcagtgaattgaacaacgccaaatcagcgcttagagctgataaacaagaattacagcaagcatataatcagttgattcaaccaacggatttaaataataagaaaccagcttctatcactgcgtacaatcaaagatatcaacaatttagtaacgaattgaacagcactaaaacaaatacagatcgcattttaaaagagcaaaatccaagtgtagctgatgtcaacaatgcactaaataaagtaagagaagtacaacaaaaattaaacgaagccagagcacttttacaaaataaagaagataatagtgcactagttcgagccaaagaacaacttcaacaggcagttgaccaagtcccttcaacagaaggtatgacgcaacaaactaaagatgattacaattcaaaacaacaagctgctcaacaagaaatatcaaaagcacaacaagttatcgataatggcgatgcgactacacaacaaatttctaacgccaaaacaaatgttgaacgcgctttagaagcattaaataatgcaaaaactggtttaagagcagataaagaggaacttcaaaatgcatataatcaattaactcaaaatattgatacgagcggtaaaacgcctgcaagtatcaggaaatacaatgaagctaagtcacgtattcaaactcaaattgattcagctaaaaatgaagcaaacagtattttaacaaatgacaatcctcaagtatcacaagtgactgctgcgttaaacaaaataaaagctgttcaacctgaattagataaagcgatagcaatgcttaaaaataaagagaataataatgcattggttcaagcgaaacaacaacttcaacaaattgttaatgaagtagatccaacacaaggcatgacaacagatactgctaataactataaatcaaaaaaacgtgaagctgaagatgaaatacaaaaagctcaacaaatcattaacaatggcgatgccactgagcaacaaattactaacgaaacaaatagagtaaatcaagcgattaatgcaataaacaaagccaaaaacgatttacgtgctgataagtctcaattggaaaatgcttataaccaattaatacaaaatgttgatacaaatggtaaaaaacctgctagtattcaacaataccaagctgctcgacaagctattgagacgcaatacaataacgctaaatcagaagcacatcaaattcttgaaaatagtaacccttcagttaatgaagtagcacaagcattacaaaaagttgaagctgtacaacttaaagttaatgacgcgattcatatacttcaaaataaagagaataatagtgcacttgtcacagctaaaaatcaacttcagcaatcagttaatgatcaaccattaacaacaggtatgactcaagattctattaataactatgaagctaagagaaatgaggctcaaagtgctatcagaaatgcagaagctgtcatcaacaatggcgatgcaactgcaaaacaaatttcagacgagaaatctaaagttgaacaagcactagcacatttgaatgatgctaaacagcaattaactgcagatactactgaattacaaacagcagttcaacaattaaacagaagaggcgatacaaataataaaaagccaagaagtatcaatgcatataataaagcaattcaatcattagaaacacaaattacttctgctaaagataatgccaacgctgtgatacaaaaacctatacgtactgttcaagaggtaaataatgcattacaacaagtaaatcagttgaatcaacaattaactgaagcaattaatcaacttcaaccgctatcaaataatgatgcattaaaagctgcaagattaaatttagaaaataaaattaatcaaactgtacaaactgatggtatgacacaacaatctatagaggcttatcaaaacgctaaacgcgtagcccaaaatgaatctaacactgctttagcattaattaataacggcgatgccgatgaacaacaaattacaactgaaacagaccgagtcaatcagcaaactacaaacttaactcaagcaattaacgggttaacagttaataaagaaccattagaaaccgctaaaacagcgttacaaaataacatcgaccaggtacctagtacagatggtatgactcagcaatctgttgcaaattataatcaaaaactacaaatagctaaaaacgaaattaacacaattaataacgttttagcgaacaatccagatgttaatgcaatcaaaacgaataaagcagaagcggaacgaatcagtaacgatttaacacaagctaagaataacttacaagttgatactcaacctttagaaaaaataaaaagacaacttcaagatgaaattgatcaaggtactaacacagatggaatgactcaagattcagtggataattacaatgatagcttaagtgcagcaattatagaaaaaggcaaagtaaataaattacttaaacgtaatccgacagtagaacaagttaaagagagcgttgctaatgcacaacaagtcatacaagatttacaaaatgctcgaacttcacttgttccagacaaaactcaacttcaagaagctaaaaatagattagaaaacagtattaaccaacaaacagatactgacggcatgactcaagattcgcttaacaattataatgataaattagcaaaagctagacaaaaccttgaaaaaatatctaaagttttaggtggtcaacctactgtagctgaaattagacaaaatacagatgaagcaaatgcacataaacaagcattagacactgcacgttctcaacttacattaaatagagagccatatatcaatcatattaataatgaaagtcatttaaataacgcgcaaaaagataattttaaagctcaagttaactcagcacctaatcataatactttagaaacgattaaaaataaggctgatactttaaatcaatctatgacagcattaagtgaaagtattgcagattacgaaaatcaaaaacaacaagaaaattatttagatgcatctaacaataaacgtcaagactatgacaatgcagtcaatgcggctaaaggtattttaaaccaaactcaaagtccgacaatgagtgctgatgtgattgatcaaaaagctgaagatgttaaacgtacgaaaactgcgttagatggaaatcaaagattagaagttgctaaacaacaagcacttaatcatttaaataccttaaatgatttaaacgatgctcagcgacaaactttaactgatactataaatcactctccaaacatcaattcagtgaatcaagctaaagaaaaagctaatactgttaacacagcaatgactcaactgaaacaaactattgctaactatgacgatgaattgcatgacggcaattacattaatgcagataaagacaaaaaagatgcttataataacgctgttaacaatgctaaacaactgattaatcaatctgatgctaatcaagcacaacttgatccagctgaaattaataaagttacacaaagagtcaatacgactaaaaatgatctaaatggtaatgacaaattggctgaagctaaaagagatgctaatacaaccattgatggtttaacttatctaaatgaagctcaacgtaacaaagctaaagaaaatgtaggcaaagcttctacaaaaacaaatattacgagtcagttacaagattacaatcaattgaatattgctatgcaagcattacgtaacagtgtgaacgacgttaacaatgttaaagcaaatagcaattatataaatgaagataatggtccaaaagaagcttacaatcaagccgttactcatgctcaaacattgataaatgcacaatctaaccctgaaatgagccgtgacgtagtaaatcaaaaaacacaagcagtaaatactgcccatcagaatttacatggacaacaaaagttagaacaagcacaaagtagtgctaatacagaaatcggtaacttaccaaacttaactaatactcaaaaagctaaagaaaaggaactggtaaatagtaaacaaactcgtacggaagtacaagaacaacttaaccaagctaagtcactagatagttctatgggcacgttaaaatcattagttgctaaacaacctacagtacaaaaaacaagtgtttatattaacgaagatcaacctgagcaatctgcctacaatgattccattacaatgggacaaactataattaataaaacagctgatccagtacttgataaaactttagttgataacgcaatcagtaacatttcaactaaagagaatgcactgcatggtgaacaaaaattaacaactgctaaaacggaagcaattaatgcacttaatacattagctgatttaaacacacctcagaaagaggctattaaaacagctattaacactgctcatacaagaactgatgtaactgcagagcaaagtaaggctaatcaaataaatagtgcaatgcacacgttgagacaaaacatttctgacaacgaatcagtaacaaacgaaagtaattatattaacgctgaacccgaaaaacaacatgcctttactgaggctctaaataatgctaaagaaatagttaatgaacaacaagccactcttgatgccaattcaattaaccaaaaagcacaagcgattcttactactaaaaatgctttagatggtgaagaacaattacgtcgtgctaaagaaaatgccgatcaagaaatcaatacgttaaatcaattgactgatgcgcaaagaaatagtgaaaaaggtttagtcaacagttctcaaactagaacagaagttgcttctcaattagcaaaagctaaagaactaaataaggtgatggaacaactgaatcaccttatcaatggtaaaaaccaaatgataaatagcagtaaatttatcaatgaagatgcgaaccaacaacaagcatattcaaatgcgattgcaagtgcagaagcgcttaaaaacaaatcacaaaaccctgaattagataaagtaacaattgaacaagcaattaataatattaattctgcaattaacaatctaaacggtgaagctaaactgactaaagctaaagaagatgctgttgcttcaataaacaacctaagcggattaacaaacgagcaaaaaccaaaagaaaatcaagccgttaatggcgctcaaactagagaccaagttgctaataaattacgtgatgctgaagcattagatcaatcaatgcaaacattacgtgacttagttaacaatcaaaatgcaatacattcaacaagtaattattttaacgaggattcaactcaaaagaatacttatgataatgcaattgataatggctcgacatatataactggtcaacacaatccagaattaaataaatctactattgatcaaacgattagccgaattaacacagctaaaaatgatttacatggtgtagaaaagttacaaagagataagggaactgctaatcaagaaattggacaattaggttatttaaatgaccctcaaaaatctggtgaggaatccttagtcaacggttcaaatacacgttctgaagtagaagagcatcttaatgaagctaaatcattaaataatgcaatgaaacaattaagagataaagtagctgaaaagactaatgtcaaacaaagtagcgattacattaatgattcaactgaacatcaacgtgggtatgatcaagcacttcaagaagcagaaaatattattaatgaaatcggtaatccaacattaaataaatcggaaattgaacaaaagttacaacaattgactgacgctcaaaatgcgttacaaggttcacatctattagaagaagctaaaaataatgcgattactggaatcaataaacttacagcattaaatgatgcacaacgtcaaaaagcaattgaaaatgttcaagcacagcagacaatcccagcagttaatcaacaattaactttggatagagaaataaatactgcaatgcaagctttacgagataaagtaggccaacaaaataacgttcaccaacaaagtaattatttcaatgaagatgaacaaccaaaacataactatgataattctgtacaagccggtcaaactattattgataaacttcaagatccaatcatgaacaaaaatgaaattgagcaggctattaatcaaatcaatacgactcaaacagcgttaagtggagaaaataaattacacactgaccaagaaagcacaaatagacaaatagaaggtttatctagtttgaacacagctcaaatcaacgccgaaaaagatttagtcaatcaagctaaaacaagaacagatgttgctcaaaagttagctgcagctaaagaaataaattctgctatgagtaatttaagagatggcattcaaaataaagaggacatcaaacgtagcagtgcatatatcaacgcagatccgactaaagttacagcttacgatcaagcactacagaacgcagaaaatatcatcaatgccacaccaaacgtagagcttaataaagctacaattgaacaagcgctatcacgcgttcaacaagcacaacaagatcttgatggtgttcaacaattagctaatgctaaacaacaagctacacaaactgtcaatgggttaaatagcttaaatgacggtcaaaagcgtgaattaaatctattaattaattcagctaatacccgtacaaaagtacaagaagaattaaacaaagcaactgaattgaaccatgcgatggaagctttaagaaacagtgttcaaaacgttgatcaagtaaaacaaagtagcaattatgtcaatgaagatcaacctgaacagcacaattatgataatgctgtcaatgaagctcaagctacaatcaacaacaatgctcaacctgttctagacaaattagctatagaacgtttaactcaaactgttaacactacaaaagatgcattacatggtgctcaaaaactgacacaagaccaacaagctgctgaaactggaatacgtggtttaacgagtctcaatgaacctcagaaaaatgctgaagtagctaaagtaactgcagcaacaacacgtgatgaagtgagaaatattcgtcaagaagcaacaacattagatactgcaatgcttggtttacgtaaaagcattaaagataaaaacgatactaaaaatagtagtaaatatattaatgaggatcatgaccaacaacaagcttatgacaatgctgtaaataatgctcaacaagttatcgatgaaactcaagcaacgttaagctcagatacaatcaatcaattggcaaatgccgtaactcaagctaaatctaatcttcatggagatactaaactacaacacgataaagatagtgctaaacaaacgattgctcaattacagaatttgaattcagctcaaaaacatatggaagattctttaattgataatgaatctacacgtacgcaagtccaacacgatttaacagaagctcaagctttagatggtttaatgggtgccttaaaagaaagtattaaagattatactaatattgtttcaaacggtaattacatcaatgcggaaccatctaagaaacaagcatatgatgcagctgtacaaaatgctcaaaatataataaatggaacgaatcaaccaacaattaataaaggtaatgtcactacagcaacacaaaccgtgaaaaatactaaagatgccttagacggtgatcatagattagaggaagctaaaaataatgccaatcaaacaatcagaaatctatctaatttgaacaatgcccaaaaagatgcagagaaaaatctagttaatagcgcatcaacattagaacaagttcaacaaaacttacaaaccgctcaacaattagataatgctatgggtgagttacgacaaagtattgctaaaaaagatcaagtgaaagcagatagtaaatatctaaatgaagatcctcaaattaagcaaaactatgatgatgcagttcaacgtgttgaaactattattaacgaaactcaaaaccctgaattacttaaagcaaacattgaccaagcaactcaatccgttcaaaatgcagaacaagctttacatggtgctgaaaaattaaatcaagacaaacaaacgtcttcgacagaactagatggattaacagatttaacagatgcacaacgtgaaaaactcagagaacaaattaacacttctaatagtagagatgatattaagcaaaaaattgagcaagcaaaagcactaaatgacgcaatgaaaaaacttaaagaacaagttgcgcaaaaagatggtgttcatgctaacagtgattatacaaatgaagattctgcacaaaaagatgcgtataataatgcacttaaacaagcggaagacattattaataacagctcaaatcctaacttaaatgcacaagacattactaatgctttaaataatattaaacaagcacaagataaccttcatggagctcaaaaattacagcaagacaaaaatacaactaatcaagccattggtaacttaaatcatcttaatcaacctcaaaaagatgcgcttatacaagctattaatggagctacatctagggaccaagttgcagaaaaacttaaagaggccgaagcgcttgatgaagctatgaaacaacttgaagatcaagtgaatcaagatgatcaaatttcaaatagcagcccattcataaatgaagactcagacaaacaaaaaacttataatgataaaatccaagctgcaaaagaaataattaatcaaacatctaatccaaccttagataaacaaaaaattgctgatacacttcaaaatattaaagatgcagtgaataatttacatggtgatcaaaaattagctcaatctaaacaagatgctaataatcaattaaatcatttagatgacttaaccgaagaacaaaaaaaccattttaaaccgttaattaataatgctgatactcgagatgaggtaaataaacaactagagattgctaaacaattaaatggtgatatgagtacacttcataaagtcataaatgataaagatcaaattcaacatttaagcaattacattaatgctgataatgataaaaaacaaaattatgataatgctattaaagaagctgaggatttaattcataatcatccagatacattagatcataaagcattacaagatttattaaacaagatagaccaagcgcataacgaattaaatggagaatccagatttaaacaggctttagacaatgctttaaacgacatagatagcttaaacagtctcaatgttccacaacgccaaactgttaaggataacatcaaccatgtgacaactctagaaagtttagctcaagaattgcagaaagcaaaagagcttaatgatgctatgaaagcaatgagagatagcattatgaatcaagagcaaattcgtaaaaatagcaattatactaatgaagacttagctcaacaaaatgcctataatcatgcagtagataaaataaataacattattggtgaagacaatgcgacgatggatcctcaaataatcaaacaagcaactcaagatataaatacagctataaatggattaaaggagatcaaaaacttcaagatgcaaagacagatgctaaacaacaaattactaactttactggtttaactgaaccacaaaaacaagcattggaaaacatcattaaccaacaaacaagcagagcaaatgttgctaaacagttaagtcatgctaaattcttaaatggaaaaatggaagaattaaaagttgcagtagccaaagcgtcattagtaagacaaaatagtaactatattaatgaagatgtctctgaaaaagaagcatatgaacaagctatcgcaaaaggtcaggaaataattaattcagaaaataatccaacaataagtagtactgatatcaatcgtaccattcaagaaattaatgatgctgaacaaaatcttcatggtgataataaattaagacaagcacaggaaattgcaaagaatgaaatacaaaatctagacggattaaattcagctcaaataacaaaattaatccaagatataggcagaacaacaactaaacctgcagtaactcagaaactagaagaagcaaaagcaataaaccaagctatgcaacaacttaaacaaagtatagccgataaggatgctactctaaattctagtaactatctcaatgaagattctgagaaaaagttagcgtacgataatgctgtaagccaagctgaacaactcataaatcaacttaacgacccaactatggatataagtaatattcaagctattactcaaaaggtcattcaagcaaaagattcattgcacggtgcgaataaacttgcacaaaatcaagcagattcaaatttaataataaatcaatcaacaaatttaaatgataaacaaaagcaagcattaaatgacttaattaatcatgctcaaactaaacagcaagtggcagaaataattgcacaagctaataagttaaataacgaaatgggcacactaaaaacactcgtagaagaacagtcaaacgttcatcaacaaagtaaatatattaatgaagatccgcaagttcaaaatatttataatgactccattcaaaaaggtcgagaaatattaaacggcactacagatgatgttttaaacaacaataaaatagcagatgccattcaaaacattcatttaactaaaaacgatttacatggtgatcaaaaattacaaaaagcacaacaagatgcaaccaatgaattaaactatttaacaaatctaaacaattctcaaagacaaagcgagcatgatgagattaactctgctccttcaagaactgaagtttctaatgatttaaatcatgctaaagcacttaatgaagctatgcgtcaacttgagaatgaagttgctcttgaaaacagtgttaaaaaattaagcgactttatcaatgaagatgaagcggcacaaaatgaatatagtaatgcacttcaaaaagctaaagacattatcaacggcgttccaagtagcactttagataaagctacaattgaagatgctttattagaattgcaaaatgctagagaaagtttacatggtgagcaaaaacttcaagaggctaaaaatcaagctgttgctgaaattgataatttacaagcattaaatcctggacaggttcttgctgaaaaaacattagttaaccaagcatcaaccaaaccagaagttcaagaagccttacaaaaagcaaaagaacttaatgaagctatgaaagcactgaaaactgaaataaataaaaaagaacaaatcaaggctgatagtagatatgtaaatgctgacagtggtcttcaagcaaattacaattctgcgttaaattatggttctcaaattattgcaactacccaaccaccagagcttaataaagatgtaataaatagagcaactcaaacgattaaaactgctgaaaataatttaaatgggcaatctaaattagcagaggctaagtcagacggaaatcaaagcatcgaacatttgcaaggattaacacaatcacaaaaagataaacaacatgatttaattaatcaagctcaaactaaacaacaggtagatgatatcgtaaataactctaaacaattagataactctatgaatcaactacaacaaattgttaacaatgacaatacagtaaaacaaaatagtgatttcattaatgaagattccagccaacaggatgcttataatcatgcaattcaagcagcaaaagatttgataactgctcatccaactatcatggataaaaatcaaatagatcaagctattgaaaatatcaaacaagcacttaatgatttacacggtagtaataaactatcagaagataaaaaagaagcttcagaacaactacaaaaccttaatagcttgacgaacgggcaaaaagatacgattttaaatcatattttcagtgcaccaacaagaagccaagtaggagaaaaaattgcaagtgctaaacaattaaataatacaatgaaagcacttagagattctattgctgataataatgaaattttacaaagtagtaagtacttcaatgaagattctgaacaacaaaatgcttataatcaagccgtaaataaagctaaaaatataattaatgatcaaccaacaccagtaatggcaaatgatgagattcaaagtgtcctaaatgaagttaaacaaactaaagataatttacatggtgatcaaaaacttgctaacgacaagacagatgctcaagcaacattaaatgcgttaaattacttaaatcaagcgcaaagaggtaatcttgaaactaaagttcaaaactctaattctagaccagaagtacaaaaagtagttcaattagcaaatcaacttaatgatgcgatgaaaaaattagatgatgctttaactggtaatgacgcaataaaacaaacgagtaattatattaatgaagatacttctcaacaagttaactttgatgagtatacagatagaggtaaaaacatagttgctgaacaaacaaatccaaatatgtctccaactaatattaacactattgctgataaaattactgaagctaaaaacgatttacatggcgtacaaaaactaaaacaagctcaacaacagtccatcaatactattaatcaaatgactggtctaaaccaagctcaaaaagaacaattaaatcaagaaattcaacaaactcaaacccgttctgaagtacatcaagtaattaataaagcacaagctttaaatgattcaatgaatactttacgtcaaagtattactgatgaacatgaagttaaacaaacaagtaactacatcaatgaaactgttggtaatcaaactgcatataacaatgccgttgatcgtgtaaaacaaataatcaatcaaacatctaatccaactatgaatcctttagaggtggaacgtgcaacatcaaatgtaaaaatttctaaagatgcacttcatggtgaacgtgaattgaatgacaataaaaattcaaaaacttttgcagtcaatcacttagataacctcaatcaagctcaaaaagaagcattaactcatgaaattgaacaagcaactatagtttcacaagtaaataatatctataacaaagcgaaagctttaaataatgatatgaaaaaacttaaagatatcgttgctcaacaagataatgtgagacaatcaaacaattatataaacgaggatagtacacctcaaaatatgtacaacgatacaattaatcatgcacaatcaatcattgatcaagtagcaaaccctacgatgtctcatgacgaaatagagaatgcaatcaataacataaagcatgccatcaatgcactcgatggagaacataaattacaacaagcaaaagaaaatgcaaacttattgattaatagtttaaacgatttaaatgcaccacaaagagatgccataaatagattggttaatgaagctcaaacaagagaaaaagtagctgaacaacttcaaagtgctcaagctttaaatgacgctatgaagcatttaagaaacagcattcaaaatcaatcatccgtaagacaagagagcaaatatattaatgcaagtgatgctaaaaaagagcaatataatcacgcagttagagaagtcgaaaatattatcaatgaacaacatccaacattggataaagaaataattaagcaactaacggatggtgtaaatcaagcgaataatgacttaaatggcgttgaattattagatgctgataagcaaaacgcacatcaatcgatacctacattgatgcacttaaatcaagcacaacaaaacgcattaaatgaaaaaattaataacgcagttaccagaactgaagttgcggctattattggccaagcaaaactactcgatcatgctatggagaatttagaagaaagtatcaaagataaagagcaagtcaaacagtcaagtaactatattaatgaagattctgatgttcaagaaacatacgataacgccgttgatcatgtgacagaaatacttaatcaaacagtaaatccaactttatctattgaagatatagagcatgctatcaacgaagttaatcaagcgaaaaaacaactcagaggtaaacaaaaactttatcaaactatcgatttagctgataaagaattaagtaaattggatgatttaacatcacaacaaagcagttcaatatctaatcaaatatatactgctaaaacgagaacagaagttgcccaagcaattgaaaaagcaaaatcattaaatcatgcaatgaaagcacttaacaaagtatataaaaatgcagataaagtgttagatagtagtcgattcattaacgaagatcaacctgaaaaaaaggcgtatcaacaagctataaatcatgttgattcaatcattcatagacaaacaaatcctgaaatggatccaacagtaatcaatagcataactcatgaactcgaaacagctcaaaataacttacatggtgatcagaaacttgctcatgcacaacaagatgccgctaatgtaattaatggtctaattcatcttaatgttgctcaacgtgaggtaatgataaatacgaatacaaatgctacaacacgcgaaaaagttgcaaagaacttagataatgctcaagctcttgataaagctatggaaacactacaacaagtagttgctcataaaaataatatattgaacgatagtaaatatttaaatgaagattcaaaatatcaacaacaatacgatcgagttattgctgatgccgaacaactacttaatcagacaacaaatccaacattagaaccttataaagtcgatattgttaaggataatgtcctagctaacgaaaaaatactatttggcgcagaaaaactatcatatgacaaatcaaatgcaaatgatgaaattaaacatatgaattatcttaataatgcacaaaagcaatctataaaagatatgatttctcacgcagcattaagaactgaagttaaacaacttctgcaacaagctaaaatccttgatgaagccatgaaatcacttgaagataaaactcaagtagtgattacagatactactttgcctaattacactgaagcttcagaggataaaaaggaaaaagtagaccaaactgtatcacatgctcaagcgattattgataaaataaatggctcaaatgtaagtttagatcaagtacgacaagcactagaacaattaactcaagcatcagaaaacctcgatggtgatcagcgagttgaagaagctaaagttcatgctaatcaaacaattgatcaattaacacatcttaattcattacaacaacaaactgcgaaagaaagtgttaaaaacgcaacaaaactagaagaaatcgctactgttagtaacaatgctcaggcattaaacaaagtaatgggtaaattagaacaattcattaatcatgctgattctgttgaaaatagtgataattatagacaagccgacgacgacaaaatcatcgcttatgatgaagcacttgaacatggacaagatatacaaaaaactaacgcaacccaaaatgaaacaaaacaagcgttacaacaattaatatatgcagaaacatcgttaaatggtttcgaaagattaaatcatgctagaccacgagctttagaatatatcaaatcactagaaaaaataaacaatgctcaaaagtctgctttagaggataaagtaacgcaatcgcatgatttattagaattagaacatattgtcaacgagggcacaaacctcaatgacattatgggtgaattagctaacgcaatcgttaataactatgctccaaccaaagcaagtataaattatattaacgccgataacctacgcaaagataactttactcaagctatcaacaatgcacgtgatgcactcaacaaaactcaaggtcagaacttagatttcaatgcaattgatacatttaaagatgatatattcaaaactaaagatgcacttaacggtattgaacgtttaacagctgcaaaatcaaaagcagaaaaactaattgatagtttaaaatttattaataaagctcaattcacacatgcaaatgatgaaattataaatactaattctattgcacaattgtctagaatcgtgaatcaagcatttgatttaaatgatgcaatgaaatctttaagagatgaacttaataatcaagcttttcctgtccaagcaagctcaaattatataaattcagatgaagatttaaaacaacaatttgaccatgctttaagtaatgctcgaaaagttcttgcaaaagaaaatggtaaaaatttagatgaaaaacaaattcagggactcaaacaagtgattgaggatactaaagatgctttaaatggtatccaacgtttatcaaaagctaaagctaaagcaattcaatacgtacaatctttatcttatatcaatgatgcacagcgtcatattgctgaaaataatattcacaactctgatgatttatcatctttagcaaatacattatctaaagctagtgatttagataatgcaatgaaagacttacgagatactatagaaagtaattcaacttctgttccaaatagtgtgaattatattaatgctgataagaatttacaaattgaatttgatgaggcgctacaacaagcaagtgcaacaagttctaaaacttcagaaaatccagcaacgattgaagaagtattaggtcttagtcaagccatttacgatacaaaaaatgcattaaatggtgaacaacgacttgcaactgagaagagcaaagatctaaaattaataaaaggattaaaagatttaaataaagcacaacttgaagatgtcacaaacaaggtaaattcagcaaatactttaacagagttatctcagctcactcaatcaacgttagaattaaacgataaaatgaaattattgagagataagcttaaaactttagtaaatcctgttaaagcaagtttaaattatagaaacgctgattataatttaaaacgtcaatttaacaaagctttaaaagaagctaaaggcgtattaaataaaaatagcggtacaaatgtcaatatcaatgacattcaacatcttttaacacaaatagataatgctaaagaccaattaaatggtgaacgacgtctaaaagaacatcaacaaaaatctgaagtatttattattaaagaattagatatacttaataatgctcaaaaagctgcaataattaatcagattagagcgtctaaagacattaaaataattaatcaaatcgttgataatgcaatagaattaaatgatgctatgcaaggtttaaaagaacatgtagctcaattaacagcaactacaaaagacaacattgaatatttaaatgctgatgaagaccataaattacaatatgattacgctatcaacttagcgaataatgttcttgacaaagaaaacggtacaaataaagacgctaatatcataattggaatgattcaaaacatggatgatgctagagcacttctaaatggaattgaaagacttaaagatgctcaaacaaaagcacataatgacattaaagatacgctcaaacgtcaacttgatgaaattgaacacgctaatgcaacatcaaattctaaagctcaagctaaacaaatggtaaatgaggaagctagaaaagcgctttctaatattaatgacgcaacatcaaatgatttagttaatcaagcaaaagatgaagggcaatctgcaattgaacacatacatgcagatgaattacctaaagcaaaactagatgctaatcaaatgattgaccaaaaagttgaagatataaatcacttaattagtcaaaatccaaacttatcaaatgaagaaaaaaataaactaatatctcaaattaataagttagtaaatggaattaagaatgaaattcaacaagctataaacaaacaacaaatagaaaatgctacaacaaaactagatgaagtcattgaaactactaaaaaattaattatcgccaaagcagaagctaaacaaatgataaaagagttatcacaaaagaaacgagatgcaataaataacaacactgatttaacaccttctcaaaaggcacatgctttagcagatattgataaaacagaaaaagatgcacttcaacatatcgaaaattctaattcaattgatgatatcaataacaataaagagcatgcatttaatactttagctcatatcattatttgggatactgatcagcaaccattagtttttgaactacctgaattgagccttcaaaatgctctagtaacaagtgaggtggttgttcacagagatgaaactatttcattagaatctataattggagctatgactttaactgatgaacttaaagtcaatattgtttcattaccgaacactgataaagtagctgatcacctaaccgctaaagttaaggttattttagctgatggctcatatgtcactgtaaatgttccagtcaaagttgtagaaaaagaattacaaatagctaaaaaggatgctataaaaacaattgatgttctggtaaaacaaaaaatcaaagatatagattctaataacgaattaacgtctactcaacgtgaagatgcaaaagctgaaattgaaagattgaaaaagcaagccatcgataaagtgaatcattcaaaatcgattaaagatattgaaacagtaaaacgaactgattttgaagaaatagatcagtttgatcctaaacgctttacgctaaataaagctaaaaaggatatcattactgatgttaatactcaaatccaaaatggtttcaaagaaattgaaacaataaaaggtttaacttctaatgaaaaaactcagtttgataaacaattaactgcactacaaaaagaatttttagaaaaagtcgagcatgctcataatttagtagaattaaatcaattacaacaagagtttaataatagatataaacatattttaaaccaagcacatttactaggtgaaaaacatatagcagaacataaattaggatatgttgtagtaaacaaaactcagcaaatactaaataatcaatctgcttcttactttataaaacaatgggcacttgatagaattaaacaaattcaactagaaacgatgaattcaattcgtggtgcgcataccgtacaagatgtacacaaagcattattacaaggtatagagcaaatcttgaaagtaaatgtaagtattataaatcaatctttcaacgattccttgcataactttaattatcttcattcaaaatttgatgctagattaagagaaaaggatgttgcaaaccatatcgtacaaactgaaacattcaaagaagttctaaaaggaacgggtgttgaaccaggtaaaatcaacaaagaaacacagcaaccaaaacttcataagaatgataatgatagcctattcaaacatttagttgataatttcggcaaaactgtaggtgttattacattaactggtttactttctagtttctggttagttttggctaaaagacgtaaaaaagaagaagaagaaaaacaatcgataaaaaatcatcacaaagatattcgtctttcagatactgataaaatagatccaattgtaataactaagcgtaaaatagataaagaagaacaaattcaaaacgatgacaaacattcaattccagttgctaaacataagaaatctaaagaaaagcaattgagtgaagaggatattcattcaatccccgtcgttaagcgtaaacaaaacagtgataacaaagatacaaaacagaagaaagttacttctaaaaagaagaaaacgcctcaatcaactaaaaaagttgtaaaaaccaaaaagcgttctaaaaagtaaaatatatctttaaca

SEQ ID NO: 34397 - DNA, 3369 bp, Staphylococcus epidermidis
aaaaataacaacggcaaatggacgataaataataaaccaaattatgtcgagttcaatcaggataatggtaaagttgtattttcggccaatacaattaaacctaattctcaaattacaataactcctaaagcaggtcagggtaacactgaaaacacaaatcctactgtaattcaagcacctgcgcaacatactttaacaatcaatgaaattgttaaagaacagggtcaaaatgtgactaatgatgatattaataatgcggttcaagtgccaaataaaaatagagttgcgattaaacaaggaaacgctcttccaacaaatttagctggtggtagtacatcacatattccagtagttatttattacagtgatggaagttctgaagaagctactgagactgttagaactaaagttaataaaaccgaattaatcaatgctcgtcgtcgactagatgaagaaattagtaaagagaacaaaacaccatcaagtatcagaaactttgatcaagctatgaatcgtgctcaatcacaaattaatacagctaaaagtgatgctgaccaagttataggcacagaatttgcaacacctcaacaagtaaattcagctttatctaaagttcaagcggcacaaaataaaataaatgaagctaaagcattattacaaaacaaggctgataatagtcaacttgtgagagcaaaagaacaattacaacaatcgattcaaccagccgcttcaactgatggtatgactcaagatagcacaaggaactacaaaaataaacgccaagcagctgaacaagcaatacaacatgcaaatagcgttataaataatggagatgcaacatcccaacaaattaatgatgctaaaaacacagttgaacaggcacagagagattatgttgaagctaaaagcaacttacgtgctgataagtcacagttacaaagcgcttatgatacgttaaatagagatgttttaacaaatgataaaaagccagcatctgtaagacgctataatgaagccatttcaaatattagaaaagaattagatacagctaaagcggatgcaagtagtactttgcgaaacaccaatccttccgttgaacaagttagagacgctttaaataaaataaatactgttcaacctaaagtgaatcaagcaattgctttacttcaaccaaaagaaaataattcagaacttgtacaagctaaaaaacgtttacaagacgctgtaaatgacatacctcaaacacaaggtatgacacaacaaacaattaataattataatgacaaacaacgtgaagctgaaagagcacttacatctgcacaaagagtgattgataatggggatgctacaactcaagaaattacttctgaaaaatctaaagtagagcaagcaatgcaagctttaactaatgctaaaagtaatctgagagctgataagaatgagttacagactgcatataacaaattaattgagaacgtatctaccaatggtaaaaaaccggcgagtatacgtcaatacgaaacagccaaagccagaatacaaaatcaaattaatgatgctaaaaatgaagcggagcgaattttaggtaatgataatccacaagtatcacaagtaactcaagcattgaacaaaatcaaagctattcaaccaaaattaacagaagctatcaacatgcttcaaaacaaagaaaataatacagaattagtcaatgctaaaaacagacttgaaaatgcagtaaatgatacagatccaacacacggtatgactcaagaaacaattaataattacaacgctaaaaagcgagaagctcaaaatgaaatacaaaaagcgaacatgattattaataatggagatgctactgctcaagatatttcttctgaaaaatctaaagtagagcaagtattacaagcattacaaaatgctaagaatgacttaagagctgataaaagagaattacagactgcatacaataaacttatacaaaatgttaataccaatggtaaaaaaccatctagtattcaaaactataagtctgcaagacgaaatatcgaaaaccaatataataccgctaaaaatgaagcacataatgttcttgaaaatacaaaccctactgtaaatgcagtagaagatgctttacgtaagataaatgcaattcaaccagaggttacaaaagctattaatatacttcaagataaagaagataatagcgaacttgttagagcaaaagaaaaattagatcaagcgattaatagtcaaccatcactaaatggtatgactcaagaatctattaataattacacaacaaaacgtagagaagcacaaaatatagcaagttctgctgacactattattaataatggggatgcatctattgaacaaataacagaaaataaaattcgagttgaagaggcaactaatgcacttaacgaagcaaaacaacatttaacggcagatacaacttctttaaaaactgaagtacggaaattaagtaggagaggcgacacaaacaacaaaaagcctagcagtgttagtgcttataacaatactattcattcgctacaatctgaaattacacagactgaaaatagagcaaatactatcatcaataagcctattcgttctgttgaagaagtaaataatgcattgcatgaagtaaaccaattgaaccaacgcttaacagatacaattaacttattacaacctttagcgaataaagaaagcttaaaagaagctcgtaatcgacttgaaagtaaaattaatgaaaccgttcaaacagacggtatgactcaacaatctgttgagaattataagcaagctaaaataaaagctcaaaatgaatctagtattgcacaaactcttattaataatggtgatgcatctgatcaagaagtttctacagaaatagaaaaattaaatcaaaagctgtctgaattaacaaattcaatcaatcacttaacagttaataaagaacctttagaaactgccaaaaatcagttacaagcaaatattgaccaaaaacctagcactgatggtatgacgcaacaatctgtacaaagctatgaacgtaaactacaagaagccaaagataaaataaactcaattaataatgtcttagctaacaatccagatgttaatgctatcagaacaaacaaagttgagacggaacaaatcaataatgaattaacacaggcgaaacaaggtcttactgttgataaacaaccattgattaatgcaaaaactgctttgcaacaaagtctagataatcaaccaagtactactggtatgactgaagcaacaattcaaaattataacgctaaacgtcaaaaagcagagcaagttatacaaaatgcaaataaaattattgaaaac

SEQ ID NO: 34398 - DNA, 543 bp, Staphylococcus epidermidis
cgtgataaattacaaaaatttagtattcgaaaatacgcaattggaacattttctactgtgattgcaacacttgtgttcatgggtatcaatacaaaccatgcaagtgccgacgagttgaatcaaaatcaaaagttaattaaacaattaaatcaaacagatgatgatgattcgaatacgcatagtcaagaaatcgaaaataacaaacaaaattctagtgggaagactgaatcattacgttcatcaactagtcaaaatcaagcaaatgcacgactgtcggatcaattcaaagacactaatgaaacatcgcaacaattacctacaaatgtttcggatgatagtatcaatcaatcgcatagtgaagcaaatatgaataacgaaccattgaaagttgataatagtactatgcaagcacatagtaaaatagtaagcgatagcgatgggaatgcttctgaaaataaacatcataaactaacagaaaatgtacttgcagaaagccgagcaagtaaaaatgacaaagagaaagagaatctacaagagaaagat

SEQ ID NO: 34399 - DNA, 948 bp, Staphylococcus epidermidis
atgcaaagatcagataaaagaaaaatgagcctgccgatgaaaatactactatgggtagtgggaattttatttctattagcaatcattgcagttatttatgttagtgcaaaaatatttattacaggagacaaaatacataatccgttaaatagaaatcattctgaattacgttctggaaaagtaaatttaaaaaatggtgatccatttactattgcactttttggcgtagattctgatgaaaagcgaaagcaacaaggcggtggggaacgaagtgatacaatcatggtactttccattaatccgaaagaaaagaaaactgagctagtaagtattccacgtgataccaaagcagaaatagcaggtcgaggtactgaagaaaagattaaccatgcatacgcttatggcggtcctaacatggctgttaaaacaattgaaaaattaatgaatgttccaattgaccattacgctacgattgacatggatggactacatgacatgattgatacattaggtggcgttgatgtcgtaagtaatagtacatttacaatgggggctaatcactttgttaaaggtgaaaaaacacacgtagatggtgatgctgccatggactttattagaagtcgtaaagaagatggggcaggaggcgattttggtagacaagagcgtcagcaacttatcttagaagcgatggcagataagatgacaagcgcttcttcaatcactcattttaatacattaatgaatcaaattcagaaaaatgttaaaacagatttaaaattaggtgatcttaatacaattagaactaagtataaagatgctaatgaccaagttaatcgacatcagttagagggtgaaggtggtatacaaaatgacggtttgtactatttcataccaagtgatgcatctaaaaatgaaaatacacaattactaagagacaatttaaattta

SEQ ID NO: 34400 - DNA, 336 bp, Staphylococcus epidermidis
atgtcagatgtttcattaaaattatcagcgaaagatatttatgaaaaagatttcgaaaaaactatggcaagaggctatagaagagaagaagtagacgcttttttagatgatatcattacagattatcaaaaaatggcggatatgaacaatgaagtagtaaagctttctgaagaaaatcacaaattaaaaaaagaacttgaggaattaagattacgtgttgctacatcaagaccacaagacaataaaaacttttcttcaaataattcaagcagtgcttcaaataatgtagatattttaaaacgtatttcaaaccttgaaaaagcagtattcggcaaa

SEQ ID NO: 34401 - DNA, 1050 bp, Staphylococcus epidermidis
atgcttggtttctcagtctatctaggacagaatttagatcgagattatattttaaatatggctgacttaggctatgatgtagtttttacttcactacagatacctgaggaagacaagaaaaatcaaatggcttatttgggagacttatgccaactattatcagcctatcaaatcacttatattatcgatgtaaccccttcattacttaatcaaactatttacagttatttgaaccaattacctcatggggatttttatattcgtatagataatcaattaaatattgaccttatcaaagacattatcagtcacggcttcaaatgctgtcttaatgctagtacattaactgatagcatgttagcgcacatatattgtactgattttaataatcaacttttatactgtcataattattatcctagacctgatactggtttatctatctcatttattgaagaaaaaaatcaactcataagaaaatacgatgcgcatgcaaaaatttgtgcttttatacctggcacgcagaagagaggccccttattcaaaggtcttcctacagttgaaaaacatcgttttgaacaccctcttattgctgcacaagaccttcaattaacgggtatatctgacattataattagtgatacgctattatcacacatttatgcggaacaattatctaatatgtggctatatcgacactttattttacacttagatcaactagactcctcatttacatcacaagttttaaagatacacacatcaagattagattcacctgaacatgtaattcgatctcaatattctcgtacagataatcaacagactgtcccaatgataggatcggcacatagagatcaaggagatatcacaattgataatcacttgaatggtcgttatgaaggagaaattcaagttataaaagctcctatgccaggtcattcccacatcaattgtattggtcatgtttgtgataaagatgttccattgttatcactgattcaacctggagatacttttaaatttgtatatacgaaggagaataacaaa

SEQ ID NO: 34402 - DNA, 2229 bp, Staphylococcus epidermidis
atgacggaaaataaagggtcttcccaacctaaaaagaacaacaatgggaagtccaatggaaaaaagaataggaatgtaaagagaacgattattaagattataggttttatgattattgcctttttcgttctattgctactcggtatcttgttgtttgcttattatgcgtggaaagctccagcatttagcgaatcaaaattagatgatccaattccagcaaagatttacgataaaaacggagaacttgtaaaaacacttgataacggacagcgacatgaacatgtgaatatcaaagatgttcctaaagacatgaaaaacgctgttttagctactgaagataaccgtttctaccaacatggagcattagattacaaacgtttatttggtgccattggtaaaaacttaacaggtggatttggttcgcaaggtgcgtctacacttacacaacaagttgtaaaagactcattcttgacacaacaaaaatctatcggtcgtaaagcacaagaagcttatctttcttatagattagaacaagagtacagcaaagatgaaatattccaagtttacatgaataagatttattattcggatggcgttactggaattaaggccgccgctaaatattacttcaacaaagatatgaaggatttaaatttagctgaagaagcttatctagctggtttacctcaagttcctaacctttacaacatttacaacaatcctaaggaagctaataatcgtaaagatactgtgctttatcttatgcataaacataaccgtattaatgataaacaatatgcggatgcgaagaagattgatcttaaagctaacttagttgaacgtactaaaaaagaacgtcaagtcactggaaatgaaaaaaatcctgagtatgattcttacgttaatttcgttcaatctgaattaatgaataacaagtactttaaggataaaaatttaggttcagttcttcaaagtggtataaaaatttatactaatatggataaagatgttcaacaaacgttacaagatcgaattaacaatggttctttctacaagaatgaagaccaacaagttggtgcaacaattctagatagtaaaactggtggattagttgcgatctcaggtggacgtaattataaaaatgttgttgaaagaaaccaagctactgaccctcaccctactggttcatcattaaaacctttcttagcttatggacctgcaatagaaaatatgaagtggtcaacaaatcatgcgattcaagacgaatcatcatattgggtagatggttctcaattcaagaactatgatacgaaaggccatggaacagtttctatctatgatgcattgcgtcaaagtttcaatattccagctttaaaaacttggcaacaagttaaaagtcaagctggtaatgatgcacctcagaaatttgcatctaaattaggattggattatagtggcaaaattggaccttctgaagtattaggtggatcttcatcagaattctcacctactcaactagcttccgcttttgcagcaatagcaaatggtggtacttataataacgcgcattcaatacaaaaagttgttactcatgaaggagatacaattgagtatgaacatacgagtcacaaagctatgaaagactatacatcatatatgttagctgaaattcttaaaggtacatttaaagcatatggttcggcttatggacatggtgtgtcaggcgtaaacatgggtgcgaaaactggtactggtacgtatggacaagaaatatacgaaaagtataatttacctgataatgctgccaaagatgtttggattaatggtttcagtccagaatatactatgtcggtatggatgggcttcaataaggttaaacaatatggaacaaattcatttatcggtcattcagaacaagattatccacaatacttgtatgaagatgtgatgtctagtatctcatctaaagatggtgaagatttcaaaaagcctaatgatgtacaaggaagttcaccggacagtctatctgtatcaggtcattctgataataatactactaaccgtagtgttcatggaagtagcgatacatcttcttcatcaaatggtggctctaactcagcatcaagtggaaacaactcgaatagttcgaatggtaccagtcaaggtaactcaggcaatgcatttacacgtctgttcaatttaaactctatattcgattataaagtttca

SEQ ID NO: 34403 - DNA, 885 bp, Staphylococcus epidermidis
atgaatcatttaactactgaaacgagaaatatacaaacgatgcatctggatgaaatgaatctaagtgatgcattaaaaactatgaatcaagaagatcaattagtacctaaagcgatagaacctgttattcctaatttaacaaaagtgatagagagtgcaattcaacgctttaataatggaggacgaattatttatattggtgcaggtacaagtggaagacttggcgtactagatgcagcagaatgtgttccaacttttaacgtttcaccaaatgatattattggaatcatcgctggtggacaaaaagctatgacggtagctattgaaggtgcagaagatgatgctgaacaaggtgcacaggatttaaagaacatccatcttcaatccaaagatattgttgtgggtatttctgctagtggacgtacaccatatgtaaaaggtgcactagtttatgcaaataaaatgaatgcagaaacagtcgcactctcttgtaacgttcacagtgatataagtaaaaattcaaatcacgtattagaaatcaatgtgggacctgaagtattaacaggctctacgagattaaaatcaggtactgctcaaaaattagttttaaatatgatttctacaatgacaatgattggcgtgggtaaagtttatgataatttaatggttgatttacgacctacaaatcaaaagttaatccatcgttctattcgcataattcaagatgtgtgtgatttaaatcatcaagaggctatagaattatatgaaaaatcagaccacaatatcaaaatagctatcgtaatgcacttatgttccacaactcaacaagatgcaagacttcgtttaaaacaaaataatggagtgattaagcaagctatcaacact

SEQ ID NO: 34404 - DNA, 1422 bp, Staphylococcus epidermidis
atgagtaaagaagaacgtcttgccaaagacattacccacgcattaggcggttctcaaaacataagcaatatcatccattgtatgactcgagttcgtattaaagtacacaatgatgcaaaagttaattatgatgaattaaaatcaatcaatggcgtattaggcgttgttgaagatgaaagaattcaagttgttgttggaccggggattgttaataaagttgctaaacttatggctgaccagtcaggagcaactctagctgaagagacgactgaaaatcaaagttataaatcacaggcagaaaaacgtgcgtatgaacataaaaaacaattccaaagtcaacgaaaacaaagtaaatggaataaagtgttaaaatctattgctaatatctttatacctttaataccagcatttataggtgcaggattaatcggtgggattgcagcaatacttagtaacttgcttacagcaggttccatttcaggtcaatggattcaacaaattgttactgtcttaaatgttattaaagatggtatgttattttacttagctattttcactggtattaactcagcgaaagtattcggtgctacaccaggtttaggtggagtaatcggtggtactacattactaaccggtatcacggatgaaaatccaattaaaaatattttcactggagaacatctagctgctggacaaggtggtattattggtgttattttcgcagtttggttattaagcatggttgagaaacgactacataaaataatacctaactctattgatatcatcgtaacgcccacaataaccttactacttattggtttgttaactatatttataatcatgccactagctggctttgtctccgatggtcttgtttatgtaattaactggattattggagtaggaggcattttcagtggattcattataggagcattctttttacctttagtcatgctaggattacatcatatcttcaccccaatccatatcgaattaatcaatcaaactggctccacttacttgttacctattgccgctatggctggtgctggacaagtcggtgcggcgattgcattgtgggtgagatgcggtaaaaataaagaattacgtaatacgctcaaaggtgcccttcctgtagggttcttaggtataggtgaacctttaatttatggtgtaacacttccattaggtcgccctttcttcactgcgtgtataggtggcggtgttggtggtgctgtcattggtggtatcggtcatattggggcgacagctgtaggaccaagtggtatttcattattaccattgattgctaataatatgtatctcggttacatcgtaggtttactagctgcttatgcgggtggctttatctttacttatttcttcggcacaactaaagaaatgagaaatcctgaa

SEQ ID NO: 34405 - DNA, 1290 bp, Staphylococcus epidermidis
atgaaaactacgattaaacaagcgaaaaaacatcttaaccaagaagtaacaattggtgcttggttaactaataaacgttcaagtggtaaaatagcgtttttacaattacgcgatggtacaggatttatgcaaggagtagtagtaaaatctgaagtagatgaagaaacatttcaactagcaaaagatataactcaagaatcatctttatacatcacaggaacgattacagaagataatcgttctgatttaggctacgaaatgcaagttaaatcaatcgaaattgtacatgaagcacacgattatcctattacaccaaagaatcatggaacagaatttttaatggatcatcgtcacttatggttacgttcaaaaaaacaacatgctgtcatgaaaataagaaatgaaattatccgtgcaacatatgagtttttcaatgaaaatggcttcactaaaattgatccacctattttaacagcaagtgcaccagagggaacaagtgagttattccatacaaaatatttcgatgaagatgcattcttatcacaaagtgggcagttgtatatggaagcagccgcaatggctcacggacgtgttttttcatttggcccaacttttcgtgcagaaaaatctaaaacacgccgtcatttaattgaattctggatgattgaaccagaaatggcctttacaaatcatgcagaaagcttagaaatacaagaacagtatgtgtctcacattgttcaatctgttttaaatcattgccaattagaactcaaagctttagatagagatacaactaaactagaaaaagttgctacacctttccctagaatttcttatgatgatgctatcgaattcttgaaaaaagagggattcgatgatattgaatggggtgaagactttggtgcacctcatgaaacagccatcgctaatcactatgatttaccagtattcattacaaattatccaactaaaattaaaccattctatatgcaaccaaatccagacaatgaagatacagtattatgtgctgatttaattgcgcctgaaggttacggtgaaattattggtggttccgaacgtattaatgatttagaattattagaacaacgcattaatgagcacgaattggatgaggaaagttatagctattatttagatttacgtcgctatggtagcgtaccacatagtggttttggcttaggcttagagcgaacagtagcttggatttctggagttgaacatgttcgtgaaacatccccattcccacgtttacttaatcgcttatatcca

SEQ ID NO: 34406 - DNA, 1200 bp, Staphylococcus epidermidis
atgagtcatgagatatttgaacaagcaaaacctattttaaaaaagattcaaaataaaggttttaaggcttatttcgttggcggatcagtacgtgattacatcatgcaacgacctatacatgatgttgatattaccaccagtgcaacgcctgacgaaatagaatctatattcgataaaaccataccagtggggaaagaacacggtacgatcaacgtggtctttcaaaatgacaattatgaaattactacattcagatctgaagatgaatacatcgatcatcgtaggccaagtgaagtgtattttgtaagagacttatatcaagatgttcaacgtagagattttacaatgaatgctatagcaatggatttaaattaccggttgtatgattattttaatggtcaacaagatataaacaatcgagtaattcgtactgttggtgtaccaagtgaaaggttttcagaagacgcgcttcgtatcattagaggattacgttttcaatcacaacttaattttcaaattgattcagacacattacatgcaatgtcttctcagatttcagatatacaatatttatccgttgaacgtgtagtagtagagcttaaaaaacttatcatgggaaacaatgttaaacaaagttttgaagtcatgcaaaacatgaaagcatttaattatataccttttttcaaatcatttgagatgtctcatcttcatatagatgagcccatcacatttgaactttggattgcaatcttaatcgtccaacaaccaaaagatatacaattaagcaccttgaaaatcagcaatcaagaaaaagcaactatcaaaaaatgggttacactcatccaaacattgcctaagatacagtcaaagcaatctttaataacattagtatatgattacaatttaaatgatattgaaatcctattatcattacatcatttgcttaaacaaaatgggcttacaacagccaatcatttaatcattaatgaaataagtattcgcgaagcaaatgaaaaattacctatccattgcagaaaagaattggcaataaatggtaaagatatactcaatcatacgaataaaaattcaggaccatggctaaaagatacacttagagaaatagaaatcgcagtcatatcaaatcaaatagtcaacactaaagaagaaatattagaatgggtggatgcacatgtcaaaata

SEQ ID NO: 34407 - DNA, 1140 bp, Staphylococcus epidermidis
atgaaaatcggtataacgtgttacccgtccatgggtggttctggcattattgctacagaactcggtattaaaatggcagaacgtggccatgaagttcactttattacctcaaacataccctttagaatacgcaaacctttacctaacatgacgttccaccaagttgaagtcaatcaatatgccgtattccaatatccaccatacgatattacattaagtacaaaaatttctgacgttatacaagaatatgatttagacatattgcatatgcattatgctgtacctcacgctgtatgtggtatattagcgaaacaaatgtcaggtaaaaacgtcaaaattatgacaacactacatggcactgatataactgtgttaggttatgaccatactttacaaaacgcgataaaatttggcatagaacaaagtgatattgtaacaagtgttagccattctctagcacagcaaacttatgaaattatcaatactaaaaaggaaatcatccctatatataattttgtaagggaaaatgaattcccaactcggcataatgaagaattaaaagattgttatggtatttcacctgaagaaaaggtattgatacatgtttctaatttcagaaaagtaaaacgtattgatacagtgattgagacatttgcaaaagttcatgagagtataccatccaagttgatacttttaggagatggtccagaattaatcgatatgcgacataaagcacgagaacttgatgttgaaacacacgtactctttttaggcaaacaaaatgacgtaagcgcattctaccaactatctgatttagtactactcttaagtgagaaagaaagttttggattaactctcttagaagcaatgaaaacaggcgtcttacctatagggagtcatgcaggtggtattaaagaggtcatcagacatgaagaaactggatttatagtagatataggggatagtacacaagctgcaaaatatgctattaaacttttatcaaatccagagttatatcaaaaaatgcaatcacaaatgctgaaagatattgaagcaagatttagttcagatttaattactgaccaatatgaaaactattatcgaaagatgctagaacaaggtgagaacaacaatgagtca

SEQ ID NO: 34408 - DNA, 1587 bp, Staphylococcus epidermidis
atgaatgcaattaaacgatttggtagtgcaatgatagtacctgttttaatgtttgcttttttcggtattgttttgggattcgctacattatttaaaaatccaaccattatgggaggattagctgatcagcaaacattttggtttaaattttggtctgttattgaatcaggtggttgggtaatatttacacatatggaaattgtctttgtagttggcttaccattatctcttgctaaaaaagcaccaggacatgcagctttagcagctctaatgggatatttaatgtttaatacttttatcaatgcaattttaactcaatggccacatacttttggcgctaatttaaaaaaaggtgtagaaaacacaacaggattaaaatcgattgcaggtattgaaacgttagataccaatattttaggtgcaatcattatctcaggaataataacgtggatacataatagatattacagtaagcgtttacctgaaatgttaggtgtatttcaaggattaacattcgttgtaacaatctctttctttgtcatgctaccagtggcagcaatcacttgtgttgtttggccaacgattcaacacggtattgcttcaattcaatattttattgttgcatcaggttatataggtgtttggttatatcatttcttagagcgtgtactaatacctacaggattgcatcattttatctatgcaccaatcgaagtaggtccagtagttgttaatcatggtttgaaagcagaatggcttcaacacttaaaccagtttgccgaaagtaataaaccacttaaagaacaattcccatatggatttatgttgcaaggaaatggaaaggtttttggttgtctaggtatagcattggcaatgtatgcaactacaccaaaagaaaatcgtaaaaaagttgctgcattattaataccagcaacacttacggcagtagtagctggtattacagaaccacttgaatttacattcttatttattgcgccatttttattcgtattacatgcactactagcagcaactatggatacactgatgtatggatttggtgttgtaggtaatatgggtggcggtgtactagattttattgcaactaactggataccattaggaaaagcacattggatgacatatgtctttcaagtagtaattggtttaatctttgttgcaatttactacttcttatttaaatatttaattttaaaatttgatattccattaccaggacgtaagaaaggtgaagaagaagttaaattattttccaaacaagattataaagataaaaaaggagattcaactcgcaatcattcacctaatagtgaatatgaagaaaaggcgatgtactacctagaaggtcttggaggaaaagaaaatattaaagacgttacaaattgtacgacacgtctacgtttaactgttaaagacgaaagtaaagttcaagaaagtgcctattttacacataatcaaatgtctcatggtttagtaaaaagtggcaaaagtgttcaagtcgtcgttggaatgtctgtacctcaggtaagagaagcatttgaaaatattgtaaatgatgatctatct

SEQ ID NO: 34409 - DNA, 1071 bp, Staphylococcus epidermidis; identical to SEQ ID NO: 34328

SEQ ID NO: 34410 - DNA, 1164 bp, Staphylococcus epidermidis
atgagataccttacatccggtgaatcacatggaccacaacttacagtcatcatagaaggtgtaccagctaatttagaaattaaggctgaagatattaataaggaaatgtttaaacgtcaagggggatatggtcgggggcgtcgtatgaaaattgaaaaagatactatagaaattgtgtcaggcgtcagaaatggctttactttaggaagtccaataactttagtagttactaacgacgatttcactcattggagaaaaataatgggcgtcgcaccaattagtgatgaagaaagagaaaatatgaaacgtaccattacaaaacctagaccgggccatgctgatcttataggtggcatgaaatataatcatcgtgatttaagaaatgtgcttgagcgttcatctgctagagaaacagcagcaagagttgctgtgggtgctgtttcaaaaattcttttagaacaattagatatccacttatatagccgtgtagtcgaaattggtggtattaaagacaaaggtttatatgatgtagatatgttcaaaaataatgtagataaaaatgatgtacgtgtaattgacgaaaatattgcgcaacaaatgagagataaaatagatgaagcgaaaaaagacggagattcaatcgggggcgtagttcaagtaatggctgaaaacatgcctattggagtgggaagttatgtacactatgaccgtaaattagatggacgcattgcacagggtgttgtgagtatcaacgccttcaaaggtgtaagttttggtgagggatttaaagcagctgaaaaacctggtagcgaaattcaagatgaaattcattataatcaagattcaggctattttagagctacaaatcacttaggtggatttgaaggaggcatgagtaatgggatgcctataattgttaatggtgtcatgaagcctattcctactttatataaaccactaaactcagttgatattaatactaaagaagacttcaaagctactatagaacgctcagatagttgtgcagtgcccgcagctagcgtagtatgtgaacacgttgtcgcttttgagttagcaaaagcagtactcgaagagtttcaatctaaccacatggaccaactcgtagcacaaattaaagagcgtcgacaactcaacatagaattt

SEQ ID NO: 34411 - DNA, 879 bp, Staphylococcus epidermidis
atgtcagctcaagatccgcgcaataaatttaaaactgataattatgaaaaacaagaacaagaagttccaggtatacaagctaaaatgtcaccacaaccagattgtggggaagattcttatcatggccaccatcgattagatggctttaaaatactagtgactggtggcgattcagcaattggacgtgcggcagcaattgcttatgctaaagaaggtgcagatgtagcgattaattatttaccaagtgaacaacaagatgccgatgatgtaaaacagattattgaaaatgttgggcaaaaagctatcttaattcctggtgatattagagatgaacaattcaactatgacatggttgaaaaggcttatcagcaattaggtggtttagacaatgtaacgttggttgctggtcatcaactttatcaagatgaattatcggagtttaaaactcaagattttaccgaaacgtttgaaacgaatgtctatccggtattttggacagtccaaaaagcgcttgagtatttacaaccaggaggctcgattacaacaacatcttcagttcaaggttataatcctagtccaattcttcatgattatgctgcaacgaaagctgcaattatatctttaacaaagagtttttcagccgaacttggccctaaaggtattcgtgttaactgtgttgcacctggaccgttttggtcaccacttcaaattgtcggtggacaaccacaaagcgctatacctacttttggacaaaacacaccgttaggacgtgccggccagccagttgaatgtgctgggacatatgtgttattagcctctgatgatgcaagttatattaccggtcaagtatatggtgtgactggtgggactcaaatagat

SEQ ID NO: 34412 - DNA, 957 bp, Staphylococcus epidermidis
gtggcaaagttaaacattaacaacgaaataaagaaagtagaaaagcgacttgaagaagcaattataagttctgatcaaacattacaagaagcctcattccatttactatcttcagggggaaaaagagttagacccgcttttgttattttaagtggtcaatttggctctaacaacaaaccttcagaagacacgtatcgtgtagcagtagctttagaactaattcacatggctaccttagtccacgatgatgtgatagataaaagtgataaacgtagaggccgactcactatttcaaaaaaatgggaccaaagtacagctattttaacaggaaatttcttacttgctatggggctcaagcatttatctgaaatcagtgatactcgtgtccattcgaccatttctaaatcaattgttgatgtgtgtagaggagaactattccaatttcaagatcaatttaatagcaatcaaacaattactaattacttacgtcgtatcaaccgtaaaacagcacttcttattcaactgtctacacaagttggtgcgattacttccaatgcgtcaaatgacgttattcgtaaattaaaaatgatcggacattatataggtatgagtttccaaataatagatgatgtgctagattttactagttctgaaaagaaacttggtaagccggttggtagtgaccttatgaatggtcatattacattacctgtactattagaaatgcgaaaaaataagacttttaaagataaaatttcacaacttaatcctgacagtcctcaacatgcctttgaaacttgtataacaataattagacagtccgaaagcatagaacaatcaaaacaaataagtgaaaagtatttaaataaagcaatcaatttaatcgatgaattagaggatggtcctaataaagaactatttagaaagcttattaaaaaaatgggaagtcgaaataag

SEQ ID NO: 34413 - DNA, 933 bp, Staphylococcus epidermidis
atgtatcaacttgcacaatctaatctatggacaggtcgtttagatagtgaaactgatcctacacaatttagacacttccaaactgttaaattcggtgatttaagtcaattagatttttcggatgaacacaaaggcgtgggcttattaggatatgcaattgataaaggagtagaattaaacaaaggacgtgtaggtgcaaaagaaggtcccaatgccattaagcgagcttttgctggattgccagatttgaatcaatgtgaagagattatagattatggtaatgtagaacacaatcatgagttgctaatagatacacagcgcgaattcgcagatcttgctgctaagtctatcaaacgacataaacaaacatttttacttggtggcggtcatgatatagcatatgcacaatatttagctactcgtaaagtttatcctgagtcgtcaataggtgtgattaatatagatgcgcactttgacacacgcgatgagggttattcaacctctggtactagttttagacagattctagaagaagatgataatgcagattatttagtgttaggtatatctcaaggtggtaatacacaagctttatttaattatgctaaagaaaaagatattcaatttgtatatgcagatgaattactacatcaggtatctccccccattaaagatatgatagaacgttttatccataatcatgatacggttatgttcacaatttgcatggatgtagtagatagtgcatttgcaccaggagtcagtgcaccagctgtcctaggaatatatccacatacagttttcgaacttgctaaacgggtcattccaagtgaaaaagtaaaatctataagtatagctgaaatgaatccgacgtatgattcagatcaaagaactgctaaattagttgctaatttagtacatcattgtttaatt

SEQ ID NO: 34414 - DNA, 723 bp, Staphylococcus epidermidis
atggctgaaaatcaagctaaaaaagaacaagttcatacagtattccaaaatatttctcaaaaatacgatcgactcaacaacatcataagtttcgaacagcataaagtatggagaaaacatgttatgagtactatgaatgtacaaaaaggcagtaaagctttagatgtgtgttgtggtactgcagattggactattgcattaagcgaagcagtaggctcaaaaggccaagtaactggtcttgattttagtgaaaatatgcttgaggtaggtaaacagaaaactgcttcattggaaaatatccagcttgttcatggtgatgctatgaatttaccttttgatgataactcatttgattatgttactattggttttggcttacgcaatgttccggattatttgtcagcactcaaagaaatgcatcgagttttaaaaccaggaggcatggtggtatgtcttgaaacaagccaaccgacattgccattattcaaacaaatctatagtttatactttaaatttgtgatgccaatttttggtaaaatgtttgctaagtccaaagaagaatatgaatggttgcaacaatcaacatttaattttcctgacaaacaaacattgaaaggcttattcttcgaagcaggatttaacgatatcattgtacgtagctttacaggtggcgttgctgcaatgcaccttggctataaagaaaacagttctagcaaaggtgat

SEQ ID NO: 34415 - DNA, 1146 bp, Staphylococcus epidermidis
atgaaaaactctagattttctgggttccaatgggctatgatggtctttgtatttttcgttatcacaatggcattgtccgtgatactcagagattttcaagcgactatcggagtgaaacgttttgtctttagtattaaagatttagctcctttcatagctgcaattgtgtgcatattagtatttaagcacagaaaagaacaattagcaggattgaaattttctatcagtttaaaagtgattgagcgtctacttttagcactcattctaccacttatcattttaatgattggcttgtttagctttaatacttatgctgatagtttcatcctattacaaacttcagatttatcagtatcattattaactatattaattggtcatattttaatggcttttgtagtggagtttggtttccgttcttacttacaaaatattcttgaaacaagaatgaacacattttttgcgagtattgtcgttggtcttatttattcagtatttacagctaacacgacatatggtgtagaatacgccggataccatttcttatatacattcatgttttcaatgattattggtgaattaattagagctactaatggtcgtacaatttatattgcaactgcttttcacgcatccatgacttttgctctcgtctttttatttagtgaagaaacaggcgaccttttctcaatgaaagtcatcgcactttctacaacaattgtgggtgtttcatttattattattagtctaatcattcgtgctattgtttataaaacgacgaaacaaagtttagacgaagttgatcctaataattatttatctcatattcaagatgaagaaccaagtcaagaagacgcctcttcaacttcaaatcatgatgtatcatctaaagatgaaacaaagcaacaagatattgataatgacaaacatcaatcaaagaaacctaataagagtgacgatgcacttactacttctaattataaagaagacgcctcttcagttaataaagaaacggatacaactcacaatgataacattaaagatcattcaacttataccgaagatagacactcatctgttgtcaacgatgttaaagatgaaattcacgaagttgaagatcataaagccgacacagataaatcacat

SEQ ID NO: 34416 - DNA, 270 bp, Staphylococcus epidermidis
atgaataaaactgatttaattaatgcagttgcagaacaagctgacttaactaaaaaagaagctggttcagcagtagatgctgtatttgaatctatccaaaactcacttgctaaaggtgaaaaagtacaattaatcggtttcggtaactttgaagtacgtgaacgcgctgctcgtaaaggtcgtaaccctcaaacaggtaaagaaattgacatccctgcaagtaaagtaccagcatttaaagctggtaaagcattaaaagatgctgtaaaa

SEQ ID NO: 34417 - DNA, 996 bp, Staphylococcus epidermidis
atgagaaaaattacagtttttggtatgggtagttttggtactgcattagctaatgtattagctcaaaatggtcatgatgttttaatgtggggcaaaaatgtagagaatgtagatgaacttaacacacatcatatgaacaaaaattatcttaaagatgctaaattagattcatctataaaagcaactgtagatttaaataaggcagtgcaattttcagatatctatcttatggcactacctacaaaagcaattagagaagtatcaaaagatatcgatcaattactcacatctaaaaagacttttattcatgttgctaaaggcattgaaaacgatacatttaagcgcgtatctgaaatgattgaggactctatctcttcagaacataatggaggaatcggcgtcttatcaggtccaagtcatgctgaagaagttgttataaaacaacctacaactgtagctgcatcatctaaagataataatgtgagcaaacttattcaagatttatttatgaacgactatttacgtgtttacacaaataatgatttagtaggtgtagaattaggtggtgctttaaaaaatattatagctatagctagtggtatcgttgccggcatgggttacggtgataatgcaaaagcagctttaatgacacgaggtttagccgaaatcagtcgacttggtgagaaacttggtgcagatccaatgactttcttaggtctaggtggcataggtgacttgatcgtaacttgtacgtccacacattcacgaaattacacacttgggtttaaattagggcaaggcaaaacagcagaagaagctttaaaagagatgaaaatggtggttgaaggtatttatacaactaaatcagtatatcatcttgctcaacaagaaggagtagagatgcctatcactaacgcattatatgaagttttatttgaagatgtccctgtaagtaaaagtgttagaacacttatggaaagagacaaaaaagcagaa

SEQ ID NO: 34418 - DNA, 1308 bp, Staphylococcus epidermidis
atgactaaaccgatagtagcaattgtaggaaaaccaaatgtaggaaaatctacaatttttaatagagttgtcggcgaacgtatatctatcgtagaagatacgccaggcgttactcgtgatcgtatttattcatctggcgagtggttaactcatgaatttaacatcattgatacaggtggtattgaaattggagatgctccttttcaaactcaaatccgtgcacaggcagaaatagcaattgaagaagcagatgtcatcatttttatggtcaatgttagagaaggacttacacaaagtgacgaaatggtcgcacaaatgctttataaatctaagaaacctgttgtattagctgtgaataaagttgataatcttgaaatgcgtaatgatatctatgatttctattctttaggctttggagatccatatcctatttctggttcacatggattaggacttggagatttgctagatgcagttgttgaaaactttaataaagaatcagaagatccttatgacgaagatacgatacgtctttctatcatcggtagacctaatgttggtaaatctagcttggtcaatgctattttaggcgaagaacgtgttattgtgtctaatgttgctggtacaactcgagatgccattgataccgagtactcttatgatggacaagattatgtattgattgatactgctggaatgagaaaaaaaggtaaggtgtatgaatcgactgaaaaatattctgtattacgtgcattaaaagcgattgagcgttcagaagtagtattagtagttatcgatgctgaacaaggtataattgaacaagataaacgtgtagctggctatgcacatgaggaaggtaaagctattgtcattgtagtaaataaatgggatacagttgaaaaagatagtaagacaatgaaaaaattcactgatgatgttagaaatgaatttcaatttttagattatgctcaaatcgcgttcgtatcagcaaaagaagggctaagattaaaaacattattcccttatatcaatcaagccagtgaaaatcataaaaagcgtgtccaaagttctacactaaatgaagttgttactgatgccatctctatgaatccaacacctactgacaaaggtagaagacttaatgtattctatacaactcaggttgcaattgaaccaccgacatttgtagtatttgtcaatgatgttgaattaatgcatttttcttataggagatatttagaaaatcaaatacgtaatgcttttggttttgaaggaacacctattcatattattccaagaaaaagaaat

SEQ ID NO: 34419 - DNA, 1176 bp, Staphylococcus epidermidis
atgactgaagaattcaatgaatcaatgattaatgatattaaagaaggtgacaaagtcactggtgaagttcaacaagtagaggataaacaagttgttgtgcatattaatggtggcaaatttaatggaattattcctattagccagctttcaacacatcatatcgaaaaccctagtgaagttgtaaaagtcggtgatgaagtcgaagcatatgtcactaaaatcgagttcgacgaagaaaatgatactggggcatacattttatcaaaaagacaacttgaaactgaaaaatcttatgaatatttacaagaaaaactagataacgatgaagtgattgaagctgaagttactgaagtagttaaaggtggtttagtcgttgacgttggtcaaagagggtttgtacctgcttctctaatttcaactgatttcattgaagatttttctgtattcgatggtcaaacaatccgtattaaagtggaagaacttgatcctgaaaacaatagagtcattttaagccgtaaagctgtggaacagttagaaaacgacgctaaaaaagcttcaatattagattctttaaatgaaggcgatgttattgatggtaaagttgctcgattaactaactttggtgctttcattgatattggtggcgtagatggtttagttcacgtttctgaattatctcatgaacatgttcaaacaccagaagaagttgtgtcagtaggtgaagcagtcaaagttaaagttaaatctgtagaaaaagattctgaacgtatttctttatctattaaagacactttaccaacaccatttgaaaacattaaagggaaatttcacgaagatgatgttattgaaggtactgtagtacgtttggcgaactttggcgcattcgtagaaattgctccatccgtccaaggtttagtgcatatttctgaaatcgatcataaacatatcggttctcctaacgaagtattagaacctggacaacaagttaatgtaaaaatattaggtatcgatgaagataatgaaagaatttcattatcaatcaaagcaacgttacctaaagaaaatgtcattgaaagtgacgcatccacaactcaatcatatcttgaagatgataatgatgaagataaaccaacattaggcgatgtttttggtgataaatttaaagaccttaagttt

SEQ ID NO: 34420 - DNA, 645 bp, Staphylococcus epidermidis
atgagttcaattaatattgcactagatggcccagctgctgcaggtaagagtacaattgctaaacgtgtagccagtcgtctatcaatgatatatgttgatacaggagcaatgtatcgtgccattacatataaatatttacaaaatggcaaacccgaaaattttgattatctgattaataacactaaacttgagcttacttatgatgaagtaaaagggcaaagaatcttactagataatcaagacgtcactgattatttaagagaaaatgatgtaacacatcacgtatcttatgttgcttctaaagaaccagtgcgttcatttgcagtgaaaatacaaaaagaattagctgctaaaaaaggtatcgttatggatggccgagatattggtacagttgtattaccagatgccgaattaaaagtttatatgattgcatctgttgctgaacgtgctgaacgtcgacaaaaagagaatgagcaacgtggcattgaatcaaatttagaacaattaaaggaggaaattgaagcacgagatcattatgatatgaatcgtgaaatttcgccattacaaaaagccgaagatgctattacacttgatacaactggcaaatctatagaagaggtaacaaatgaaatattatctctactt

SEQ ID NO: 34421 - DNA, 1380 bp, Staphylococcus epidermidis
gtgtctaataataattttaaagatgatttcgaaaagaatcgtcaatctattaatccagacgaacatcaaacagaattaaaagaagatgataaaacaaatgaaaataaaaaagaagctgactctcaaaacagtttatctaataactcaaatcaacaatttcctccgagaaatgcccaacgacgaaaaagacgcagagagacagcaactaatcaaagcaaacaacaagacgacaaacatcaaaaaaatagtgacgctaaaactacagaaggttcattagatgaccgttatgacgaagcacagttacagcaacaacatgataaatcgcaacaacaaaataaaactgaaaaacaatcacaagataatagaatgaaagatggaaaagatgcagctattgtaaatggaacatctgagtcaccagaacataaatcaaaatcaacacaaaatagacccggccctaaagctcaacaacaaaagcgtaaatcagaaagtacgcaatcaaaaccgtcaacaaacaaagataaaaaagcagctacaggtgctggaatagctggtgcagctggtgttgctggtgcagcagaaacatccaaacgtcatcataataaaaaagataaacaagattctaaacactcaaaccatgagaatgacgaaaaatctgttaaaaatgatgaccaaaagcaatctaaaaaaggcaaaaaagcagcagtcggtgctggcgcagctgcaggagttggtgcggctggtgttgcgcatcataataatcaaaataaacatcataatgaggaaaaaaattctaatcaaaacaatcagtacaatgaccaatcagaaggtaagaaaaaaggtggtttcatgaaaatcttgttaccacttatagcagccattcttattctaggtgcaatagcaatattcggtggtatggctctaaataatcacaacgatagtaaaagtgatgaccaaaaaatagcgaatcaaagtaagaaagactcagataaaaaagatggtgcgcaatccgaagataacaaagacaaaaaatctgatagtaacaaagacaaaaaatctgattctgataagaacgcagatgatgactctgataatagttcctcaaatcctaacgctacttcaactaataataacgataatgtagccaataataactcaaattatacaaaccaaaatcaacaagataatgcaaaccaaaatagcaataatcaacaggcaactcaaggtcaacaatcacatacagtatacggtcaagaaaacttatatcgtatcgccatacaatattatggagaaggaactcaagctaacgtagataaaattaaacgtgcgaatggattaagcagtaataatattcataatggtcaaacattagttattcctcaa

SEQ ID NO: 34422 - DNA, 246 bp, Staphylococcus epidermidis
atggcaaaatatacaatcgttgatatggatacatgtatagcatgcggtgcttgcggtgcagctgctccagatatatatgattacgatgatgaaggtattgcatacgtaatccttgacgataaccaaggtactgctgaagtgcctgaagagttatatgaagatatggaagatgcgctagaaggttgtcctactgactcaatcaaaattgaagacgaaccatttgatggtgacgcactgaaatttgaa

SEQ ID NO: 34423 - DNA, 726 bp, Staphylococcus epidermidis
gtgccagtgattaatattaaaaatttaaataaaaaatttggagcaaatgaagtattgagagatattaatcttactgttgaaaagggtgaagtggttgcaataattggaccatctggaagtggtaaaagcactttactccgttgtatgaatttgttagatgtaccttcaaaaggtaaagttatatttgaagataatgaattaactcaacataatgttcatttagataatttacgacaaaaaatgggtatggtatttcaaaattttaatttatttcctcataaaaaggtcattgaaaatgtaatgttggcaccacttttattacataaagatagtaaagatcaattaaaagagaaagctttatatttacttgaaaaagtggggcttaaagacaaagcagattcatatcctaatcaactgtctggaggtcaaaaacaaagagttgctattgcaagagctttggcaatggaacctgatgttatgttatttgatgaaccaacatctgcacttgatcctgaagtagtaggggatgttttaaaagtaatgagacaattagcgaatgaaggtatgacaatggtgattgtcacgcatgagatgaactttgctaaagaaataagtgataaagtagtatttatggccgatggtgttgtggttgaatctggtacaccacaaaacatatttgaaaatcctcagcacagtcgaactgaaaattttttatcacgagtgtta

SEQ ID NO: 34424 - DNA, 846 bp, Staphylococcus epidermidis
atgaaaaagagatttttatctatatgtacaatgacaattgcagcgttagcaactactacaatggtaaatacttcttatgcaaaaaccgatacagaaagccataatcattcctcacttggcacagaaaacaaaaatgttttagatattaatagttcgagtcataatatcaaaccaagtcaaaataaaagttacccaagtgtaatattacctaataataatagacatcaaatttttaatactacacaaggtcattatgatgctgttagttttatttatataccaatacatggtggatatatgagtggttcaggtgttgttgtaggtgaaaatgaaatattaactaataaacacgttgttaatggagctaagggtaatccaagaaatattagtgtccatccttcagctaaaaatgaaaatgattatcctaatggcaaatttgtgggtcaagaaatcataccgtatcctggtaatagtgatttagcaatcttaagagtgtcaccaaacgaacataatcaacatattggtcaagtagttaaacctgcaactataagtagcaatacagacactagaattaatgaaaacatcactgttactggttaccctggtgacaaaccattagccacaatgtgggaaagtgtaggtaaagttgtctatattggtggcgaggaattaagatatgacctaagtactgtaggtggaaactctggatctccagtatttaatggtaaaaatcaagttattggaatacattatggtggcgtagataataaatacaatagcagtgtttatattaatgatttcgttcaacaattcctaagaaacaatatacctgatataaatattcag

SEQ ID NO: 34425 - DNA, 366 bp, Staphylococcus epidermidis
atgctttcagcacttatcccgtccatacatagctacccagctatgccgttggcacgacaactggtacaccagaggtatgtccatcccggtcctctcgtactaaggacagctcctctcaaatttcctacgcccacgacggatagggaccgaactgtctcacgacgttctgaacccagctcgcgtaccgctttaatgggcgaacagcccaacccttgggaccgactacagccccaggatgcgatgagccgacatcgaggtgccaaacctccccgtcgatgtgaactcttgggggagataagcctgttatccccggggtagcttttatccgttgagcgatggcccttccatgcggaaccaccggatcac

SEQ ID NO: 34426 - DNA, 1767 bp, Staphylococcus epidermidis
gtgatgaaccgactaaatagtgttgttataaaactgtggttaactattattttaatagtagcgacagttttaattttattaagtgtttcattaatcacttttatacaatattactttacgcaagaaacagaaaatgcaattaaagaagatgccaaaagaattagttcacttgttgagaagtctcataacaaaacattagctatccaaaatagccaaacactcattgatggtgatggaccgggtggcctcattattatgaaagacatgagcgagaaaccagactcatcgtataaagacactaaaaaacaaatgtttaatgaaataaaaaagagtactaaatttaaaaaagtgtttaaagaaggtgagtatgaaactcaaaatattacaataaaaaataaaggtaattctcaatcttatcttttgctaggatacccaatgaaagctcaaaaaggtgctcaaagtcattatagtggtgtttttatatataaagatttgaaatctatcgaagatacaaataatgctattacaattattatattaataactgctattatatttactatagcaagcacaatatttgcattctttttatctaatagaataacgaaacccttacgtcaattaaaaacacaagcacaaaaagtttctgaaggggattatagtcaaatttcaactgtcgctactaaagatgaaataggtgatttatcacgtgcatttaacaacatgaacgtagaaattcaagaacatatcaaagcaatttcttcatctaagaatataagagatacattattaaactctatggtagaaggcgttctaggcattaataatcaacgtgaaatcatattgtcgaacaagatggctgatgatattatgcgtcacattgatgatttttcaaaagaatctattgaacagcaaattgaagcaacatttgaatcacaacagaatgagtatttagaattagaaattaatacaaggtactatgtatttatctccagttatatagatagaattcaaacaaatggtagaagtggtattgtcatggtcatccgtgatatgacaaatgaacataatcttgatcaaatgaaaaaagattttatagcaaatgtatcacatgaattacgtacgccaatctctttattacagggttacactgagtccatagtagacggtatagttaccgaaccagatgaaatacgtgactcattagcaatcgttttagatgaatctaagcgacttaatcgtttagtcaatgaattactaaatgtagctcgtatggatgctgaaggattatcagttgagaaggaattacaacctattcaacaccttcttgataaaatggagtctaaatatcgcatgcaaagtgaagaattaggtttaacaatgacgtttgattctaataatgacgaacaattatggaactatgatatggatagaatggaccaagtgttaactaatttaattgataacgcaacaagatatacacaagctggtgattctataaagatttctattgatgaagattcagatttcaatattttaacaataactgatacaggcactggtatagcaccggaacatctgaaacaagtatttgaccgtttttataaagtggacgctgctcgaaaaagaggtaagcaaggcaccggattaggacttttcatttgtaaaatgattattgaagaacacgggggacgtattgatgttgagagcgaattaggcaaaggtacttcatttattattagactacctaaatcaaaacaaattagt

SEQ ID NO: 34427 - DNA, 632 bp, Staphylococcus epidermidis
gggtctttccgtcctgtcgcgggtaacctgcatcttcacaggtactatgatttcaccgagtctctcgttgagacagtgcccaaatcgttacgcctttcgtgcgggtcggaacttacccgacaaggaatttcgctaccttaggaccgttatagttacggccgccgtttactggggcttcgattcgtagcttcgcagaagctaaccactcctcttaaccttccagcaccgggcaggcgtcagcccctatacatcaccttacggtttagcagagacctgtgtttttgataaacagtcgcttgggcctattcactgcggctcttctgggcgtgaaccctaaagagcaccccttctcccgaagttacggggtcattttgccgagttccttaacgagagttcgctcgctcaccttagaattctcatcttgactacctgtgtcggtttgcggtacgggcacctgttatctatctagaggcttttctcggcagtgtgaaatcaacgactcgaggaaacaatttcctctccccatcacagctcagccttatgagtgccggatttgcctaacactcagccttactgcttggacgtgcactccaacagcacgcttcgcctatcctactgcgtccccccatcga

SEQ ID NO: 34428 - DNA, 393 bp, Staphylococcus epidermidis
acctgttatccatcgcctacgcctgtcggcctcagcttaggacccgactaacccagagcggacgagccttcctctggaaaccttagtcaatcggtggacgggattctcacccgtctttcgctactcacaccggcattctcacttctaagcgctccacatgtccttgcgatcatgcttcgacgcccttagaacgctctcctaccattgtccaaaggacaatccacagcttcggtaatatgtttagccccggtacattttcggcgcagtgtcactcgactagtgagctattacgcactctttaaatgatggctgcttctaagccaacatcctagttgtctgggcaacgccacatccttttccacttaacatatattttgggaccttagctggtgg

SEQ ID NO: 34429 - DNA, 735 bp, Staphylococcus epidermidis
atgagtaaagaacaagagagattacaaaaaagaatcgctaatagcggatatacatctcgtcgaaaagcagaagtacttatcactgaaggacgagttaaagtcaatggacaaactgtaacagaattaggttccaaagtgatgccatcagatttagttgaagttgatggtattaaaatcgaacaagaagacaaaatttatattttattttataaaccaactcaagtcattacaagtgtctctgatgatcgtggacgtagggtggttacggattactttgatgatctagaatcacgtatttatccggttggacgattagattatgacacatctggagttttattattaactaatgatggagaatttactaatttgatgacacatcctcgatatcacattaaaaagaaatacgttgctaaattaaaaggttatttaatgagagaggaaattaagcaacttgaaaaaggaatagaattagaagatggttacacacaaccagcacaagttaaaataaaaaagcaagataaagaaaaaaatacgactttagttgaaattacaattagtgaagggcgaaatagacaagttagacgtatgtttgagtatttcggtcatcaagttaataagttaacaagaattcaatttggccctatagatttaaaaggtttgaacgccggtgaaggaagagttcttacaccacatgaagtaaaaatattaagacatttggcagaaaacggtaaa

SEQ ID NO: 34430 - DNA, 171 bp, Staphylococcus epidermidis
atgacgtcaaatcatcatgccccttatgatttgggctacacacgtgctacaatggacaatacaaagggtagcgaaaccgcgaggtcaagcaaatcccataaagttgttctcagttcggattgtagtctgcaactcgactatatgaagctggaatcgctagtaatcgtagat

SEQ ID NO: 34431 - DNA, 885 bp, Staphylococcus epidermidis
atgaatactatcattgaagaatatttaaatttcattcaaattgaaaaaggattaagtaacaatactataggagcgtatcgaagagatttaaaaaaatataaagattatcttgaagataacaagatttcacatatcgattttattgatagacaaattatccaagagtgtcttggacaccttatagatatggggcaatcttcaaaatctctcgcaaggtttatttctacaataagaagctttcatcagtttgcattacgcgaaaaatatgctgctaaagacccaactgttttaattgaaacacccaaatatgaaaagaaattaccagatgtgcttgaaatagacgaagtaatagcattactggaaacgcctgatttaactaagaataatggatatcgtgatcgtacgatgttggagcttttatacgccacaggtatgcgtgtaactgaaattattcaattagatgttgaagacgtaaacttaatgatgggatttgtaagagttttcgggaaagggaataaggaaagaatcgttcccttaggagataccgtcatcgaatatttaactacatatattgaaaccgtaagacctcaattactcaaacaaaccacaactcaagcgctatttcttaacatgcatggaaagtctttatcaagacaaggcatttggaaaatcattaaacaatatggtttgaaagctaatatcaataaaacgcttacaccacatacattacggcattcatttgcaacacatctcttagaaaatggtgctgatttaagagccgtacaagaaatgttaggtcactctgatatttctacaactcaactttatacacatgtatctaaatcacaaattagaaaaatgtatacgcagtttcatccaagagct

SEQ ID NO: 34432 - DNA, 1287 bp, Staphylococcus epidermidis
atgaaatttactgaaagcgaacgtcttcagcaactttctaatgaatatattttgggaggtgtgaattcaccttcaaggtcgtataaagcagtaggtggtggggcaccagtagtaatgaaagaaggtcatggcgcttacttatatgatgtagatggtaataaatatatcgactatctacaagcttatggtccaataataactggtcatgcacacccacatatcaccgaagctatccaagatcaagcagcaaaaggcgtactttatggtacccctactgaattagaaataaatttctcaaaaaaacttagagaagcagttccttctttagaaaagattcgtttcgtgaactctggtactgaagcagttatgacaacaattagagttgctcgtgcttatactaaaagaaacaaaatcattaagtttgcaggctcttatcatggtcattctgatttagttttagtggcagctggaagtggaccttctcaacttggttctccagattctgctggtgtcccccaaagtgttgcacaagaggttattacagtaccgtttaatgatatagaatcatatagagaagctattgattattggaaagacgacattgctgcagtattagtagagccgattgtgggtaattttgggatggtcatgccacaaccaggtttcttagaagaagtaaataaaatttctcatgataatggaacattagttatctatgatgaagttatcactgcttttcgtttccattatggtgcagctcaagatttattaggtgttaaaccagacctcactgcttttggtaagattgttggcggtggtttaccaattggaggctatggtggtcgacaagatattatggagcacgttgcaccattaggtccagcttatcaagcaggaacaatggccggtaacccgttatctatgagagcaggtattgctttattagaggtacttgaacaagaaggtgtttatgataaacttgatcaattaggtcgtcgtcttgaagaagggttacaaaaattaatagataagcatcatattacagcaacaataaatcgaatctatggctcactgacattgtatttcacaaatgaaaaagttacacattatgaacaagttgaaaactctgatggagatgctttcgctcaattctttaaattaatgttgaaccaaggcattaatctcgcgccttctaaatttgaagcatggttcttaactacagaacatactgaagaagatatcgatcgcacactagaagcagctgattatgcatttagtaaaatgaaa

SEQ ID NO: 34433 - DNA, 906 bp, Staphylococcus epidermidis
atgcaaaaaaatattctaaaaagtggcatcgaaatttctgaacttgggttaggttgcatgagtttaggcacagattataaaaaagcgcaaccaattattgaaagtgcaattgataatggtattacgtattttgatactgcagatatttacgatcaaggagttaatgaagaaattgttggtaaagccttaaaaaaatatcaaaatcgtgatgacatcgttatcggaactaaagttggaaatcgattaactgacgatggacatatgacgtgggatccttcgaaaaaacatattaaagaaagtgttaagggatcattgaaacgattaggattaaaccatttagacttatatcaattacatggcggaacaatagatgatcctctagacgaaactattagtgcatttgatgaattaaagcaagaaggatatattcgtgcatatggaatttcatctatacggcctaacgtgatagactattatcttaaaaatagtcaaattgaaacacttatgtcccagtttaatttaatagataatcgccctgaaagtcttattaatgacgttcatgataagcaagttaaaattctagcacgtggccctgtatttaaaggtttattaacttcaaaaagtgttgatgttatagatgaaaaatttaaaaacggtgtgttagattacactcaagacgaattaggtagcacgattgcttctattaaagaattggaaagtaatttaaccgcgttatcatttaaatatttaacttctcatgatgctatggggtcaattattgtaggagctagtagcgttgaacaacttgaagagaatgtccgcaattattataaagaaatcagtttagatcaaatcaaatctgcacgtaatagagttaaagatattgaatatacacaacatttgaaa

SEQ ID NO: 34434 - DNA, 1734 bp, Staphylococcus epidermidis
atgataaaacgatatttaaagtttgtaaaaccttatagatatcgtattattgcaacaattatagtagggattattaaattcggtattcccatgctcatacctttattgattaaatatgctatagatggcgtgattaataatcattcgcttacaaatcaagaaaaatttagtcaccttggtgtagcaataggaattgcattatttattttcttaattgttcgcccgccgattgagtttattagacaatatttagctcaatggacaagtaataaaatactatatgatattcgtaaacaattgtataatcacttgcaagcactaagtgttcgcttttatgcaaataatcaagtcggtcaagtcatttcaagagtgattaatgatgtcgaacaaacaaaagactttattcttactggattgatgaatatctggcttgactgtataacgattattatcgcactttctattatgttcttccttgatgtaaaattgacgtttgctgcaatttttatttttccattttatattttaactgtttattttttctttggaagattacgaaaacttacacgtgtgcgctcacaagctctagcagaagtacaaggtttcttacatgagcgggttcaaggaatgtctgttattaaaagttttgctattgaagacaatgaagctaaaaattttgataaccataacaagaattttttacaacgagccttccaacatacaagatggaacgcatattcttttgctgctattaatactgttacagatttaggcccaataattgtgattggcgtgggttcatatttggcaattacaggatcgattactgtcggaactctagcagcatttgtcggttatctagaacaattatttggaccacttagaagactagtatcttcatttactacacttacacaaagttttgcatctatggacagagtatttcagttaatggatgaggattacgacatcaaaaatggcattggagcacagccaattaaaatcagtaagggtcaaattgatttaaaacatgtgagtttcaaatataatgaaaatgaaaaagaagtattacacgatattaatttaacaattaacaaaggcgaaactgtagcatttgtaggtatgagtggtggtggaaaatctactttgattaatcttataccaagattttatgatgttactcaaggtgaaatacttatcgatcatcataatgttaaagatttcctaactggtagtttaaggaatcaaataggcttagtacaacaagataatattcttttttctgatacggttaaggagaatattttgttgggtaggcctgatgcgactgatgatgaagtcgtagaagctgcaaaaatggcgaatgcccatgattttatttcaaatttaccgaatggatatgatactgaagtaggagaacgaggagttaaattatctggtggacaaaaacaaaggttgtcaattgcacgtatctttttaaataatcctcctgttttaatattagatgaagcaacaagtgcattggatttagagagtgaagctattattcaagaagcacttgatgttttaagtaaggatagaacaacattaattgttgcacatcgtctatctaccattactcatgcagatagaatagttgtaatggaaaatggacgaattgttgagactggcacacaccaacaattaattaataaacgcggtgcttatgagcatctttatagtattcaaaattta

SEQ ID NO: 34435 - DNA, 1482 bp, Staphylococcus epidermidis
ttgagtactaaacaaaaacacattccctgtttgattacaatattcggtgccacaggagatttgagtcatagaaagctatttccttctatattccatttatatcaacaagacaatttagatgaacatattgctattattggtataggacgtcgcgattataataacgaacaatttcgcgaccaagttaaagcgtcaattcaaacttatgttaaagatacagatagaattgatgagtttatgacgcatgttttttatcataaaactgacgtgagtgataaagaaagttatcagtcattacttcaatttagtgagcgactagattcagaatttgctttaggtgggaatcgtctgttttacttagcgatggcaccacaattttttggagtgatctcagattaccttaaatcttctggtcttactcaaactacaggatttaaacgcttagttatagagaaaccatttggcagtgatcttaaatctgctgaatcattaaataatcaaataagacgttcgtttaaagaagaagaaatttatcggatagatcactatcttggcaaagatatggtgcaaaatatagaagttttgcgattcgcaaacgcgatgtttgaacctttatggaataataaatacatttcaaatattcaagttacatcatcagaagtattaggtgtcgaagatcgtggtggctactatgaatctagtggtgcacttaaagacatggtacaaaatcacatgctacagatggttgctttacttgcaatggaagcaccgataagtttgaatagtgaagatatacgtgcagaaaaagtcaaagtacttaaatctcttagacaattaaaaccagaagaagttaaaaagaatttcgtgcgtggtcaatatgatcaaggcaatatagatggtaaacaggttaagtcatatcgagaagaagatcgcgtagcaaaggattcggttacaccgacatttgtatcgggtaaattaacaattgataactttagatgggctggagttcctttctacattagaacgggtaaacgtatgaaatcaaaaacgatacaagtcgtagtagaatttaaagaagtacctatgaatttatattatgaaactgacaatttactagattctaatttgctagtcattaatattcaaccaaatgaaggaatttcattgcatttaaatgctaaaaagaacattcaaggaattgatactgagccagtgcaattatcatacgcaatgagtgctcaagataaaatgaatacagttgatgcatatgaaaacttattgtttgattgtcttaaaggtgatgcgactaattttacacattgggaagaattaaaatctacttggaaatttgtagatgcaatccaagatcaatggacaatggttgaaccatgtttccctaactatgaagcgggtacgaatggacctcttgaaagtgatcttttattaagtcgtgatggaaatcattggtgggatgatatccac

SEQ ID NO: 34436 - DNA, 1653 bp, Staphylococcus epidermidis
atgaaaagaaattggtggaaagaagcagttgcatatcaagtatatccacgaagttttaatgatagtaatggagatggaataggtgatctacctggattaattgaaaaattagattatctagaaaatttaggaatagatgtcatttggttaagcccaatgtatccatcaccaaacgatgataatggatatgatattagtgactacaaaggcattatgagtgaatttggtacaatgaacgattttgatcaattgttatcaagcatacatcaaagagggatgaaattaatattagacttagtggttaatcacacatcagatgaacacccttggtttattgaatcaaaatctagtaaaacaaatgcaaaaagagattggtatatttgggcagatcctaaaccggatggatctgaacctaataactgggaaagtatctttaatggttcaacttgggagtttgacgaatcgactaagcaatactatttccatttatttagcaaaaagcagccagatttaaattgggaaaatccagatgtaagacaagctgtgtttgaaatgatgaattggtggtttgaaaaaggtattgacggatttagagttgatgccattactcatattaaaaagaattttgaagcaggagatttacctgtacctgatggcaaaaaatttgctccagcatttgatgtagatatgaatcagccaggaatacaagaatggctccaagaaatgaaagataaatcgttaagtcggtatgacattatgactgtaggcgaggctaatggtgttactcctaatgatgctgaagaatgggtaggagaagaaaatgggaaatttaatatgatattccagtttgaacatcttggtttatggagtactggcgatacgaaattcgatgttaaatcctataaacaagtcttaaatcgttggcaaaagcaactagaaaatgtaggttggaatgctttatttatcgaaaaccatgatcaaccacgtcgtgtttcaacctggggtgatgataaaaattattggtatgaatcagcaactagtcacgctactgcctactttttacaacagggcacaccttttatttaccaaggtcaagaaataggtatgactaattatccatttgaaagcattgaaagtttcaacgatgtcgcagtgaaaactgaatatcaaatagtcaaaaaagaaggtggagatgtcaatcaattactagataaatataaaatggaaaaccgagacaatgcaaggactccaatgcaatggaataattctatcaatgctggattcactactggtaagccatggtttcatgtaaaccctaactatacagaaattaatgttaaacaacaactaaatgataagttttcgatactttcttattataaagcgttaattcaactaaaaaaatctgatttgatttacacctacggtaagtttaatatggtcgatgctgaaaataagcaggtttttgcatatacacgcacatttaaaaacaatactgtattaattgtagccaatctcacaaatgaagtatcagaactaaacctaccttttgaattagatatttcatctgtagatataaaattgcataattatcacttaaatgatataaatttagaccatattaaaccttatgaatcattcgtcgttgaaata

SEQ ID NO: 34437 - DNA, 1404 bp, Staphylococcus epidermidis
atgacacaacaaattggagtagtgggtttagcagtaatggggaaaaacctagcttggaatattgaatcacgtggttatagtgtttctgtttataaccgatcaagacaaaaaactgatgaaatggttaaagaatcgcctggaagagaaatttacccaacatactcattagaagaatttgtagaatctttagagaaacctcgtaagattttattaatggtaaaagctggacctgcaacagatgccactatagatggtttattacctttattagacgatgatgatattttaattgatggtggtaatactaattaccaagatacgattcgtcgaaataaagctttagctgaaagtagtattaactttattggtatgggagtttctggtggagaaatcggcgcactcacgggcccttctttaatgccaggtggtcaaaaagatgcttataacaaagtcagcgatatcttggacgcaattgctgctaaggcacaagatggtgcttcatgtgtaacttacattggccctaatggtgcaggacattatgttaagatggtacacaatggtatcgaatatgcagatatgcaattaattgctgaaagttatgcaatgatgaaagatttattaggcatgtcacataaagaaatttctcaaacttttaaagaatggaatgctggagaacttgaaagttatttaatagaaattacaggtgatattttcaataaattagatgatgacaatgaagcacttgtagaaaaaatattagatactgcaggtcaaaaaggcacaggtaaatggacttcaattaacgcactagaattaggtgttcctttaacaatcattacagaatctgtatttgcgagattcatctcatcaattaaagaagaacgtgttactgcttctaaatctttaaaaggacctaaagcacattttgaaggcgataaaaaaacattcttagaaaaaatacgtaaggcactttatatgagtaaaatatgctcatatgcacaaggtttcgctcaaatgagaaaagccagtgaagataatgagtggaatttgaaattaggcgaattagcaatgatttggcgtgaaggttgtattattcgtgcacaattcctacaaaaaattaaagatgcctacgataataatgaaaacttacaaaacttattattagacccttacttcaaaaacattgttatggaatatcaagatgcactacgtgaagtagtagctactagcgtgtacaatggcgtgccaacacctggtttttcagcaagtataaattattatgatagttatcgctcagaggatttacctgcaaacttaattcaagcacaacgtgattactttggcgcacatacttatgaacgtaaagaccgtgaaggtattttccatacacaatgggtagaagaa

SEQ ID NO: 34438 - DNA, 975 bp, Staphylococcus epidermidis
atgcttaagttaaatccctataaaataggatttagaactgtcaaaactgctgtgggaatgactttaggagtaatcatatgtaaacttctaagcttagataattatgcatccagtgctattttagttgtattgtgcataaagcacactaagatgcattcagtacaagcaattttatctcgactagtttcatgtttactcatattatttttaggttcagcaatttttagtcttttaggacaacatgcatttgttttaggtttaattgttttgttgtttattcctttgacagttgttctaaatgtgcaagaaggtgttatcactagttgtgtcatattattacatgtctttaacgccaaagctattaatgggcaccttattttaaatgaaataatgctattaatagtgggcttaggtatagcatttctaatgaacttaatgatgcctagtttagataagaaattgaatcattttaagcaggatatagaaaatcaaataactgaaatatttaatatttttagtcaagcctgctcaatgcataatgatcatttaaatattaaatttgattcattacttttaaatattaaaaaagcaaaatcacttgcttttagagatgttaaaaatcactttgtacgaaacgaaaattcattttatcattattttgatatgagagaagaacaagttgaattattaaaacgtatgacatcgttattagaaagaataaatacagatgatcctatactcgaaaagatttcacaattaatgtatgaaattggaagtaacgtaaatagcaatgattatacggctctaagactacattcactttatgaaatacgtttatctctcgatgatttaccattaccgactactcataagactttaaattcccgagcacatattattcaaattctaaatgaactagaagaatacttaaatattaaatctcaatttggttctttaaaattgcatagtgaaata

SEQ ID NO: 34439 - DNA, 528 bp, Staphylococcus epidermidis
atggctaacacaaatagaaaaagcaaaaaaatgtcagatgctaaatgcatcaaaacaagacaggtatatccacaagataccaatcatcatcacacaatgttcggtggaactttaatggcaaatattgatgaaatagctgctattactgctatgaagcacgctggcaacccagttgttactgcatcaacagattctgttgactttttaagacctattacaactggagatattttatcatatgaagcaatggtttcttatgcaggaacaagttcgatggagatatgtgttcaaattgttattgatgatgtttataaaaacgagcgccacttggccgctttaagttttttaacttttgtagcattggatagtgatggaaaaccaacatcagtacctgatgttgaacctgaaacatctgtagaaaaatggttccatgaaactgcgccacaacgtgttgctagacgtaaagaacgtcgtaaagaaagtatagatacaattgaatatttatctagagttagacatatcgaaaag

SEQ ID NO: 34440 - DNA, 462 bp, Staphylococcus epidermidis
atgatacatgtagcatttgtatgtctcggtaatatatgtcgttctccaatggctgaggctatcatgagacaaagactacaagaaagaggtatttcagatataaaagttcattctagaggaacaggacgttggaatttaggcgaacctccacataacggaacacaaaaaattctacagaagtaccatattccttatgatggtatggtgagtgaacttttcgaacctgatgatgattttgactatattattgctatggaccaaagtaacgtagacaatatcaaacaaatcaatccaaatttacaaggacaattgttcaaattgctagaatttagtaacatggaagagagtgatgtaccagatccatactacacaaataattttgaaggtgttttcgagatggtgcaatcatcttgtgataatttaatagactacatcgtaaaagatgcaaatttgaaagagagg

SEQ ID NO: 34441 - DNA, 1044 bp, Staphylococcus epidermidis
atgaatcactacataagagctataggctcaatgcttatattagtatatagtatgcttattgcttttttatttattgataaagtgtttgtaaatattatcttttttcaggggatgttttatacacaaatatttggaatacctgtttttctatttttaaatttattaattgttcttttatgtattatagttggatctgttttagcttataaaattaatcaacaaaatgattggattatttcacaaatagaaagatcaatagaaggacaaacagtaggtatcaatgatcaaaatatcgaattatatacagaaacgatagatatttatcatacactagttccattaaatcaagaattacatcgacttagaatgaagactcaaaatttaactaatgaaaactacaatattaatgatgtaaaagtcaaaaagattatcgaagatgagcgacaacgacttgccagggaattacatgattctgttagtcaacaattatttgctgcgagcatgatgctatcggcgataaaagagtcgaaattagaaccacctttaaatcaacagataccaattcttgaaaaaatggttcaagactcacaacttgaaatgagagctttgttattacatttaagaccgataggtttaaaagataagtctttaggtgaaggaattaaagatttagtcatcgatttacaaaagaaagtaccaatgaaagttgtgcatgaaattcaagattttgaagtgccaaaaggcattgaagatcacttgttcagaattacacaagaagctatttcaaatacattgagacattcaaatggtacaaaagtaactgtggaattatttaatcaagaggattatcttttactaagaattcaagataatggaaaagggtttaatgtagatgaaaaatttgaacaaagttatggtttgaaaaatatgcgagaacgagcgttagaaattggtgcgacgtttcatattgtatctttacctgattcaggtacacgaattgaagttaaggcaccattgaataaggaggagaattcaagtggcgat

SEQ ID NO: 34442 - DNA, 723 bp, Staphylococcus epidermidis
atgaatgaactaacggtttatcatttcatgtcagataagcttaatttatacagtgatattggtaatatcatggcattaaaacaaagagctaaaaaaagaaatattaagataaatgttaaagaaatcaatgagactgagggagtcacatttgatgattgtgatattttcttcattggtggtgggagtgatagggaacaagcgcttgccacgaaagaattaagtaaaattaaaacttctttaaaaaatgcaattgaagatggtatgcctgggttaactatatgcggtggttatcaatttttaggtcataagtatattactcctgatggtaccgagttagaaggattgggtgttcttgacttctataccgagtctaaaaaagaacgcttaactggagatatcattatagagagtgatacttttggcacgattgttggatttgaaaatcatggtggtagaacatatcatccgtatggaacattaggccgagtaacgtatggttatggtaataatgataacgatcgaaaagaaggtatacactataaaaatctattaggttcttatcttcacggcccaattttaccaaaaaatcatgaaataactgattatctacttgagaaagcatgtgaaagaaaagggatactatttgagcctaagaagatcgataacacagaggaagaagctgctaagcaagttcttattaaacgtgcaaaagaaaataaaaaa

SEQ ID NO: 34443 - DNA, 761 bp, Staphylococcus epidermidis
atacctaaatcaacaaattaccgatggaaaaacaaaacccataaaaatgataccgtaacacaaaaagtcattgaattatgtaaagctaaccactatacctacggttatcgtaagattacagcattgattaatcaatgttatacatcaccaattaatcataagagagtacagagaatgatgcagaagcatcatttgaactgccgagttagacctaaaaagacgacaagaataggtaaaccgtattataaaacggacaatttattacaaagacaatttaaagcgagttgtccaatggaagtattaacaaccgatattacttatttaccatttggtcattctatgttgtatttatcttcgataatggatatttataacagagaaattgtggcgtataaaatagatgataaacaagaccaaagtttagttaatgatacattaaatcaaatcgatatacctgagggttgtatattacatagtgatcaaggcagcgtttatacatcttatgcttattatcaattgtgcgaagaaaaaggcattatcagaagtatgtcccgaaagggaacacctgccgataacgccccgatagaaagtttccattcctcgctaaagtctgaaactttttacatcaataatgagcttaatcgctctaatcatattgtaatagatattgtcgaaaagtacattaaaaactataataataatcgaattcaacaaaactaggctacttatcccctgtaaaatacagagaattaatagcctag

SEQ ID NO: 34444 - DNA, 978 bp, Staphylococcus epidermidis
atgaaagaaaatttttggagtacattgccacgtccgttttttattctggcacctatggaagacgtgacagatattgtctttcggcatgttgtcagtgaagctgcgagaccagatgtattttttactgaatttaccaatactgagagttactgtcaccctgaaggtattcatagtgtgcgcggacgcttaacttttagtgacgacgaacaaccaatggtagcgcacatctggggcgataaaccagaacaattccgagaaatgagtatcggcttagcggatatgggttttaaaggtatagatttaaatatgggttgccctgtcgcaaacgttgcgaaaaaaggtaaaggatccggcttaattctacgacctgaaacggcagccgaaatcattcaagcttctaaagcaggtggtctaccggtcagtgtaaaaacacgtttaggttattacgatatcgatgaatggcgagactggttaaaacacgtcttcgaacaagatatcgcaaatttatccattcatctacgtacccgtaaagagatgagtaaagtagatgcacactgggaattaatcgaagcaatcaagacattacgtgatgaaattgcgccaaatacactattaactatcaatggtgatatccccgatagacaaactggtctagaactcgcaaataaatatggtattgatggcattatgattggtagagggatcttccataacccattcgcatttgaaaaggaaccacgcgaacattcaagcaaagaattattaggtttattacgcttacatctctctttatttgaaaaatatgataaagatgaagcccgacacttcaaaagtttacgcagattcttcaaaatctacgtacgcggcattagaggcgctagcgaactccgccatcaattaatgaacacccaatccattgccgaagcaagagaactactcgatacttttgaagcacgtatggatgcacgttcagaagta

SEQ ID NO: 34445 - DNA, 1311 bp, Staphylococcus epidermidis
atgagacaatggactgcaacccacatggctaagttagcaaggaaagcaagtatagctgtaggtaaaaagggtacagacttgccgggacagattgcaagacgtgtggatcataatattttaagaaaattagctaaacaagtagatgacattgtttttataagtgggactaatggtaaaacgactacatctaacttaattggacatacattaaagaaaaatcaaataaacattattcacaataatgaaggagcaaatatggcagcagggataacttctgcttttattatgcaaagctctaagaatactaatattgcgataattgaaatagacgaaggatctattccacgtgttttaaacgaagtcacaccttctatgatggtgtttacaaatttctttagagatcaaatggatcgatttggtgaaatcgatattatggttgataatattgcaaaatcaataagtaacaaagggataaaattattattaaatgcagatgatccgtttgtgagtcgcttgaaaattgcaagtcattccattgtgtattacggaatgaaaaaatttgcgcatgactttgaacaaagtacaatgaatgaaagtaaatattgtcctaattgtggacgattattgcaatatgactatatacattataatcaaattggacattatcactgtgaatgtggatttaagcgagaagaacctacatatgaagtgtcatcatttgatgcttcaccattcttaaaaatgataataaaccaaagtgagtttaatatgaaaattgcaggagattttaattcttataatgcaatagcagcctataccgtattaagagaattaggattaaatgatgatgcaatacgcaaaggatttgaaacatatacgtctgataatggtcgcatgcagtatttttcaaaaaataagaaggaagctatgattaatctagcaaaaaatccagctggaatgaatgcaagtctatcagtaggcgagcaaattgatgataaaaaaatttatgttattagtcttaatgacaacgcggcagatggtcgagatatttcatggatatacgatgcagactttgaaaagctagctacccaagatatcgaagctatcattgtaagtggtacacgtgctgaggaactacaattacgtctcaaacttgctgaagttgaagtgcctattaaggttgaaaaggatatctacaaagcgactgcattaactatgaaatacagttcatttacggtagcaattccaaactatacatcattaacaccaatgcttgaacaacttaatcgctcatttgaaggagggcaatcg

SEQ ID NO: 34446 - DNA, 948 bp, Staphylococcus epidermidis
atgagaaaacgtgcaagaattatatataatccaacatcaggaaaagaactttttaaacgtgtattaccagatgcactgattaaacttgagaaggcaggttatgaaacgagtgcatatgcaactgaaaaaattggtgatgctacttttgaagctgaaagagcactagaaagtgaatatgatttactcattgcagctggaggtgacggtacgttaaatgaggtggtcaacggaatcgccgaacaacccaatcggcctaaattaggtgtaataccaatgggcaccgttaatgactttggaagagcacttcatttaccaagcgatataatgggggcgattgatgtaatcattgatggtcacacaaccaaggtagatattggaaagatgaataatcgttatttcattaacctagctgcaggggggaaactaacacaagtatcttatgaaacaccaagtaagttgaaatcaattgtaggaccgttcgcgtattacattaaaggattcgaaatgttacctcaaatgaaagcagtagatgtacgtatcgaatatgatgataacatcttccaaggagaagctttactattccttttaggtttaacgaattcaatggctggctttgaaaaattagttccagatgcgaagcttgacgacggttatttcacgttaattattgtagaaaaagcaaatcttgctgaattgggtcatattatgacactagcgtctcgaggtgagcatacaaaacatcctaaagtcatttatgctaaagcgaagtctattaatatttcatcatttactgatatgcaacttaatgttgatggtgaatacggtgggaaattacctgcaaatttccttaatttagaacagcacatagaaatttttacacctaaagatgtatttaacgaagaactattagaaaatgatacgataactgatattacgcctgataagcaa

SEQ ID NO: 34447 - DNA, 1425 bp, Staphylococcus epidermidis
atgcattttgaaacagtaatcggacttgaagttcatgttgagttaaaaacggactcaaaaatgttctctccatcacccgcacattttggagctgaaccaaattcaaatacaaatgttatcgacttagcttatccaggtgtattaccagtagttaatagacgtgcagtagattgggcaatgagagcttcaatggcattaaatatggatattgctacaaattcaaaatttgatcgtaaaaactatttctatccagataatccaaaagcatatcaaatttctcagtttgatcaacctattggagaaaatggctatattgatattgaagttgatggagaaacaaaacgtatcggtattacacgtcttcatatggaagaagatgcaggtaaatcaacacataaagatggttattctctagtagacttaaaccgtcaaggtacgccattaattgaaattgtatctgaacccgatattcgttcacctaaagaagcatatgcttatctagaaaaactacgttcaatcattcaatatacaggtgtatctgattgtaaaatggaagagggatccctacgttgtgatgctaatatttcacttcgtccatatggtcaaaaggaatttggtacaaaaactgaattgaaaaaccttaactcatttaactacgttaaaaaaggtttagaatatgaagagaaacgtcaagaagaagaattattaaatggtggagagattggtcaagaaacacgtcgatttgatgaatctactggtaaaacaattttaatgcgtgtgaaagaaggttcagatgattatagatatttccctgaaccagatattgtaccattatatgtagatgaagattggaaagcacgtgtaagagaaacaattccagaattgccagatgaacgtaaagctaaatacgtaaatgatcttggactaccagaatatgatgcgcatgtattaacattaactaaagaaatgtctgatttctttgaaggcgcaattgaccatggtgcagatgttaaacttacttccaactggttaatgggaggtgttaacgagtatcttaataaaaatcaagttgaattaaaagatacgcaactaacacctgaaaatttagctggtatgattaaattaatagaagacggaacaatgagtagtaaaatcgctaaaaaagtttttccagaactagcagaaaatggtggagatgctaaacaaattatggaagataaaggtttagtacaaatttctgatgaagcaacactacttaaatttgtaacagatgcattagataataatccacaatcaatagaagattataaaaatggtaaaggtaaagctatgggattcttagtgggccaaattatgaaagcttctaaaggtcaagctaacccacaaaaagttaatagcctattaaaacaagaattagataaccgt

SEQ ID NO: 34448 - DNA, 1455 bp, Staphylococcus epidermidis
atgagtattcgttttgaatctatcgaaaaattaactgaattaatcaaaaataaagaaattaaaccttctgatgtagtaaaagatatatacgcagctattgaagaaactgatccaacaatcaagtcattcttagctttagataaagaaaatgcaataaaaaaagccgaagaattagatgaattacaagctaaagatcaaatggatggtaaactatttggaattcctatgggaatcaaagataatatcatcacaaaagatgtagaaactacatgtgcaagtaaaatgttagagggatttgtacctatttatgaatcaactgtaatgaacaaactacatgatgaaaacgcggttttaattggtaaattaaacatggatgagtttgcaatgggtggctctacagagacttcatattttaagaaaacattaaatcctttcgatcacacagcagtaccaggaggatcttcaggtggttctgcagcagcggttgcagcaggtttagttccttttagtttagggtcagacactggtggttctattagacaacctgcatcttattgtggtgttgttggtatgaaaccaacttatggccgtgtatcacgtttcggtttagttgcatttgcttcttctttagatcaaattggaccaatcacgcgtaatgttaaagataacgcattagtacttgaggcaatttccggtgtagatgcgaatgattctacaagcgcacctgttgatgatgtagattttacttctgatattggtaaagatattaaaggtcttaaaattgcattacctaaagaatatttaggtgagggtgtaagtgaagaagttaagacttctgtaaaagaagcggttgaaacgttaaaatcacttggtgctgaagttgacgaagtctcattaccaaatacaaaatatggtattccatcatattatgttattgcgtcatcagaggcttcagtaaatttagcgcgatttgatggtattagatatggatatcattctaaagaagcacaatcgttagaagaattatataaaatgtctagatcggaaggctttggtgaagaagtcaaaagacgtatcttcttaggtacttttgctttaagctcaggttattacgatgcatactataaaaaatctcaaaaagttagaacgttaattaaaaatgattttgacaaagtatttgaatcttatgatgttgtggttggaccgacagcacctacaacagcatttaatattggcgaagaaattgatgatcctttaacaatgtatgcgaatgacttattaactacaccagttaatcttgccggtttacctggtatttcagttccttgtggacaatcaaacggacgcccaattggtttacaattaattggtaaaccttttgacgaaaaaacgttatatcgtgtcgcttatcaatttgaaacacaatacaacttacatgacgcatacgaaaattta

SEQ ID NO: 34449 - DNA, 783 bp, Staphylococcus epidermidis
atgcgttatctcaagaaagtaactatatacataagtttattaattttaacgatttttattggaggatgtggttttataaataaagaagatagcaaagaaacggaaatcaaacaaaactttaataagatgttaaacgtgtatcctactaaaaatctagaagacttttatgataaagaaggttttcgagatgaagaatttgataaaggagataaaggaacttggattattaggtctgaaatgacaaaacagccaaaaggtaaaattatgacctcaagaggtatggttctctatatcaatcgtaacactagaacagccaaagggtattttttaatagatgagataaaagatgataatagtggtagaccgatagagaatgaaaagaaataccctgtaaaaatgaaccataataagatctttccaacaaagccaatatctgatgataaattaaaaaaagaaattgaaaacttcaaattttttgtacaatatggagattttaaaaacttaaaggattataaagacggagagatatcttacaatcctaacgttcctagttactcagcgcaatatcaattgaacaataatgataataatgttaaacaattaagaaaaagatatgatattccaaccaatcaagcccctaaattattgttaaaaggggatggcgacttaaaaggatcatctgtaggttctaaaaatttagaatttacttttgtagaaaataaagaagagaatatattttttacagatgcagtacaattcactcctagcgaggatgatgaatca

SEQ ID NO: 34450 - DNA, 777 bp, Staphylococcus epidermidis
atgaaacattcaagcaaaataatagtatttgtaagtttcttaattttaacgatttttattggaggatgtggttttataaataaagaagatagcaaagaagctgaaatcaaacaaaactttaataaaacgttaagtatgtatccaactaaaaatctagaagacttttatgataaagagggctatcgtgatgaagagtttgacaaagatgacaaagggacatggattattaattctaaaatgattgttgaaccgaaaggggaagagatggaagcaagagggatggttttacgtataaatagaaatacgagaacagctaaaggtaactttattataaaacgaataacagaaaataataaaggaatacctgatgttaaagacaaaaaatatccagtaaaaatggaacacaataaaattattccaacaaaacaaattaaagataaaaaattaaaaaaagaaattgagaacttcaaattttttgtacaatatggaaattttaaaaacttaaaggattataaagacggagagatatcttacaatcctaatgtgccaagttactcagcgcaatatcaattgaacaattatgataataatgttaaacaactaagaaaaagatatgatattcccacgaatcaagctcctaaattattattgaaaggtacaggagatttaaaaggatcctctgtaggttataaacatcttgaatttacttttgtagaaaataaaaaggaaaatatttattttactgacagtataaactttaacccgagtagggggaat

SEQ ID NO: 34451 - DNA, 882 bp, Staphylococcus epidermidis
atgttagattcaattatggaatttataaaaacatttgtgatgttgttttttgaattattaacactattcatcatcgtgagctttattgtaagtttaattcaacaagtagtttcggaagaaaaaatcaaaagatttttgagcaagcctaatcaagcaattagttatgtattggggatggtgtttggtgctatgacaccattttgttcttgttcaactattccaatacttgcaggtctattaaattctaaagttccatttggtcctgcagtgagtttcttgattgcatcgccattaatgaatccattaatgatatttatgttatgggccttattaggttggaaagttgcaatagtttattttattgtactaacaatctttagtatcttaacaggttttgtattttcaaaaatgaatttagctgaaacttataaaggtgtaaatgttaaaggcgatggattttttgctaataaaacggaatctcgttttaaacaagcattaaatgatgcgtgggcatttttatatccaatgcttccttacctatttattggtgtatttattggagcgttcatatatggatttgtacccgaaacatttattactaaatatgcgagtggaggtggcattatatccgtatttattgcttctattataggtattcctatgtatattagacctgaaacaatgttacctatagctgaagcattagcttcaaaaggaatgtcgcttgggacagttgttgctttgatcattggtggtgctggtgcaagtattccagaagttgtattattatcgaaactattcaagaaaaaatttgtaatctcattcgttatcgccattttagttgtagctatttctacaggtttgatggtgaacatcgttatt

SEQ ID NO: 34452 - DNA, 312 bp, Staphylococcus epidermidis
ttgaattatagtgaaatatcgcaatacttgaaagtgatggctgatagtagccgtcttgaaatattagatttgttatcttgtggtgaattatgcgcttgtgatttattacagcatttttctttttctcaacccacattaagtcatcatatgaaagtattaaaagacaataatttaattacatctagaaaggatggtaataaaaatttatataaattgaatcatgctgtattagatgacattacatcacgactcactctattgagttccagtactgtcccatgtatatgtgaaactgtagagaaaggtgaatgt

SEQ ID NO: 34453 - DNA, 300 bp, Staphylococcus epidermidis
atgactaaagtaacacgtgaagaagttgaacatattgctaatttagctagacttcaaatttctcctgaagaaacagaagaaatggctaatactttagaaagtattttagattttgcgaaacaaaatgatagtgccgatacagaaggtattgagccaacttatcacgtattagatttacaaaacgtattacgtgacgataaagcaatcgagggcattcctcaagaattagcattgaaaaatgcgaaagaaacagaagatggtcaatttaaagtgccatccatcatgaatggggaggacgct

SEQ ID NO: 34454 - DNA, 1995 bp, Staphylococcus epidermidis
atgcaaggtgttaaaaagcgtgtggaaaaattacatgacttattgaatcaatatagttatgaatattatgtacaagataatccctcagtgcctgacagtgagtatgataagttattacatgagctgattgaaattgaagaaaaatatccagaattcaaatcgacagactctccaacagtgcgtgtgggtggcgaagctcagtcttcttttgaaaaagtaaatcacgacacgcctatgttaagtttaggtaatgcttttaatgaagaagatttaagaaaatttgatcaacgtattcgtgatagtattggtaaggtcgaatacatgtgtgaacttaaaatagatggtttggctgtttcgctcaaatatgaaaatggtcgttttgttcaaggacttacacgtggtgatggtacgacaggtgaggatatcactgaaaatctaagaactatacatgctataccactaaaaattaaagaacctctcaattttgaggtccgtggggaagcttatatgccacgtcgttcattcattcatttgaataatgaaaaagaacaaaatggtgaacaaccttttgcaaatccacgaaacgctgctgcaggctctttaagacaacttgactctaaactagctgcgaaaagaaagttaagcgtcttcttatatagtgtgaatgacctaaccgagtttaatgcaacaacacaaagtgaagcgctagaggaattggaccaattaggttttaaaactaaccaagaacgtgaacgagtatcagatattgagggcgtacttaattatatagagaaatggacaagcaaaagaggatctttatcttacgatattgatggtattgttataaaagttaacgatttatctcaacaagaggaaatgggttatacgcaaaaatctccaagatgggcgattgcttataaatttccagctgaagaagttattacaaaattattggatattgagctaagtattgggcgtacgggtgttgtgacaccaactgcaattctagaacctgtaaaagtagctggtactacagtttcaagagcctcacttcataatgaagatttaatacatgaaagagatatacgtatcggagatagtgttgttattaaaaaagccggggacatcatccctgaagttgtaaaaagtattttagatagacgacctaacgaatcggaaatttatcatatgccaacacattgtcctagttgtggacatgaattagttcgtattgaaggagaagttgctttacgttgtattaatccaaaatgtcaggcacagcttattgaaggacttatacatttcgtttcaagacaagcgatgaatatagatggtttaggtactaaaattattcatcagctatacgaaaatcagttaatcaaagatgtcgcagatattttctatttgaaagaagaagatttattaccattagagagaatgggaaagaagaaagttgataatcttttattagcgatagaaaaatctaaagaacagtcattagagcatttattatttggactgggtattagacatttaggtgtaaaagctagtcaagtacttgctgagcgatatgaaacgatggatcaactttttaaagtaactgaaagtgaattaattgaaattcaagatattggagataaacttgcacaatctgttgtaacatatctcgaaaatagtgatattcgttcattaattgaaaaattaagtaataaaaatgttaatatgtcttataaaggaattaaaacaactgaaatcgaaggtcatcctgattttagtgggaaaacaattgtattaacagggaaactcgagcaaatgacgagaaatgaagcatctgaatggttgaaaatgcaaggtgctaaagttacaaacagcgtgactaaaagtactgatattgtcatagctggagcagatgcagggtctaaattagccaaagctgagaagtatggtactgaaatttggactgaagcagcatttattgaaaaacaaaatggaatc

SEQ ID NO: 34455 - DNA, 2187 bp, Staphylococcus epidermidis
atgaatgcgctagtaaaaaatatgaattcagagcaaagtgaagcggttagaacaacagaaggcccattgcttattatggcaggtgctggatcaggaaagacacgtgtgttaacacatcgcattgcgtatttattagatgaaaaagatgtatcaccttataatattttagctattacgtttacaaataaagcagctaaagaaatgaaggcgcgtgtcgaacatcttgtgggagaagaagcgcaagtgatttggatgtccacttttcactctatgtgtgtaagaattctgagaagagatgctgatcgtattggcattgaaagaaatttcactatcattgatcctaccgatcaaaaatcagtgattaaagatgtattgaaaagtgaaaatatagacagtaagcgatttgagccacgtatgtttattggtgcaattagcaatttgaaaaatgaattaaaaacacctgaggatgctcaaaaagaggcgaatgattttcactctcaaatggttgcaacggtttacaaaggttatcaaagacagttatcacgtaatgaagcactcgactttgatgatttaattatgacaactattaatttatttgaacgtgtacccgaaactctagaatactatcaaaataaatttcaatatatacatgtagatgagtatcaagataccaataaagcacaatataccttagtaaaactattagcaaacaaatttaaaaatttatgtgttgttggtgattctgaccaatctatttatggttggagaggagctgatatacaaaatattttatcttttgaagaggactatcctgaggcaaagacaattttcctcgaacagaactatcgttcaactaagaatattttaaatgctgcaaatgaagttataaaacataattctgaacgtaaacctaaaggtctatggactgcaaattctggaggagacaaaattcagtattatgaagctatgactgaaagagatgaagcagaatacgttgttaaagaaataatgaagcatcaacgcagtggtaaaaaatatagtgaaatggctatattatatagaacaaatgcccaatcacgtgtacttgaggaaacatttatgaaatcaaatattccttatacaatggttgggggtcaaaagttctatgaccgtaaagaaattaaagatttacttagttatttaagagttattgctaatagcaatgatgatattagtttgcaacgtattattaacgtgcctaaacgtggtattggaccttcatctgttgaaaaaatccaaacctatgcacttcaaaataatataagtatgtttgacgcattggctgaggtagattttataggtctctctaaaaaggtaactcaagaatgtatcagtttttatgaaatgattcaaaatttaatcaaagaacaagaatttctcgaaattagtgaaatcgtagatgaagtactacaaaaatcaggctatagagacatgcttgatcgagaacaaagtattgaatcacgaagtcgattagaaaacttagatgaatttatgtctgtacctaaagattatgaggaaaatactcctttagaggaacaatcacttattaattttctaacagatttatcattagttgctgatattgacgaagcagatacacagaatggtgtaacattgatgacaatgcattcagcaaaaggtcttgaatttcctatagtttttattatgggaatggaggagtcgttgttcccacatatcagagcaataaaaagtgaagatgatcatgaaatggaagaggaacgtcgtatttgttatgtagcaattacacgagcagaagagttgctttatatcacaaatgcaacgaccagaatgttgtttggtcgttctcaatccaatatgccatctcgatttttaaaagaaatcccagaagacctacttgatagtcataccggtcaaaaaagacaaactatatatcccaaatctcaacctaaaagaggttttagtaagcgtactacatcaactaaaaaacaagtttcatcatctgattggaaagtaggagataaagttatgcataaagcatggggtgaagggatggttagtaacgtgaatgaaaaaaatggatctgtagagttggatattatatttaaatcagaaggtccaaaacgattattagctcagttcgcaccaataacaaagaaggaggactca

SEQ ID NO: 34456 - DNA, 1293 bp, Staphylococcus epidermidis
atgatagaacgttattcaagagatgaaatgtctagtatttggacggatcaaaatcgctatgaagcatggttagaagtagagattctagcgtgtgaagcatggagtgagttaggttatattcctaaagaagatgtaaaaaaaattcgtgaaaatgccaaagtaaatgttgaacgcgctaaagaaattgaacaagaaacacgacacgatgtagttgcatttacacgccaagtttctgaaactttaggtgatgaacgtaagtgggtacattatggattaacttccactgatgtagttgacactgccttaagttatgtaattaaacaggcaaacgaaatccttgaaaaagatttagaaagatttatagatgtattagctgccaaagctaaaaaatatcaatatacattgatgatggggcgtacacatggagttcatgctgagcctacaacttttggcgtaaaaatggctctttggtatactgaaatgaaacgtaatcttaagcgttttaaagaagtgcgtaaagaaatagaagtagggaaaatgagtggagcagtaggaacatttgccaatattccacccgaaattgaggcttacgtatgtgaacatttaggaatagacactgcagctgtttctactcaaacattacaaagagatcgtcatgcttattacattgctacattagcactaattgctacatcaatggaaaaatttgcagtagaaattcgtaatttacaaaaaactgaaactagagaagtcgaagaggcatttgcaaaaggacaaaaaggatcatcagcaatgccacataaaagaaatccaatcggttctgaaaatattacaggtatatctcgtgtgattcgaggatatattactactgcatacgagaatatacctttatggcatgaaagagatatctctcattcttctgcagaacgtatcatgttaccagatgttacaattgctctagattatgcacttaatcgatttacgaatattgttgatcgactaacagtttatgaagataatatgagaaataatattgataaaacgtatggtttaatcttctcacaacgcgtactactagcattaattaataaaggcatggtacgtgaagaagcttatgataaagttcaacctaaagcaatggaatcttgggaaacaaaaacaccatttagagagctaattgaacaagattcatctataactgacgttctatcaagtgaagaattagatgattgcttcgatcctaagcatcatcttaatcaggtcgacactatattcgcgcgtgctggtttatct

SEQ ID NO: 34457 - DNA, 825 bp, Staphylococcus epidermidis
atgagtagattgcaagatgttgtggttaatgaaatgaaagtaaaaaaacaaattgacagtgtagaggaaatccaggaaattaagcaatttattaaagcgtatgtaaaatcacattcatttatacaaactcttgttcttggaatatcaggtggtcaagactctactctaacaggtaagttagcacaattagcagtaaatgaattgaaagaagagggacgtaactgtaaatttatagcagtgaaattaccttatggtgtgcaacaagacgctcatgaagtagaagatgcacttgagtttattaatcctgacacaacatatacagttaatattaaaccagcagttgatcagagtgttcaatcacttagtgaagcaggcatcaaacttactgattttcaaaagggtaatgaaaaagcacgtgaacgaatgaaagttcaattttcaattgcttctaatactcaaggtatagttttaggaactgatcactctgccgaaaatattacaggattttacactaaatatggagatggtgctgcggatattgcgcctatctttgggttaaataaaagacaaggtaaacaattactagcttatctaggagcacctaaacacctttatgaaaaagtgccaacagctgatttagaagatgataaacctcagttaccagacgaggaagcactaggcgtatcttatcatgatattgatgattatttagaaggtaaagaaattcctggaactgctcgtgaaacaatcgaaaaacattatgttagaaatgcacataagcgtgaacttgcttatacacgatattcatggcctaaatataacaaa

SEQ ID NO: 34458 - DNA, 1467 bp, Staphylococcus epidermidis
gtgtaccaatataacgacgatagcttaatgttacacaatgatttatatcaaattaatatggctgaaagctactggaatgatggtatccatgaaagaatagcagtgtttgatttgtattttcgaaaaatgccatttaatagtggatatgcggtattcaacggattgaaacgcgttgtgaatttcatcgaaaactttgggtttacaaatgaagatatcacatatttaaaatcgataggttacgaagaagattttctaaactacctaaaagatttgaaatttacagggaatattaaatctatgcaagaaggtgaaatttgttttggtaatgagccattattaagagttgaagcacctttaatccaagcgcaacttattgaaactattttgttaaatatcattaatttccaaacattaattgcaactaaagccagccgaattcgtcaaatagcaacgcatgacactttgatggaatttggtacaagaagagctcaagagatcgatgctgcactgtggggcgctagagcagcctttattggagggtttgattctacaagtaatgttagagcaggaaaactttttaatatacctgtatctggcacacatgcacacgcactagtacaaacatatggtgatgagtatatagcattcaaaaagtatgctgagcgacataaaaattgtgtgttcttagttgatactttccatactttaaaatcaggagtaccaaccgcaattaaggttgcaaaagagttaggagatactattaattttataggtatcagattagattctggtgatattgcgtacctatctaaagaagctcgtagaatgttagatgaggctggttttacagaagctaaaattatcgcatcaaatgatttggatgagcagactattacaagtttaaaagcacaaggcgctaaagttgacggatggggagtaggtacaaaactgattacaggatatgatcaaccagccttaggcgcagtttataaattggtttctattgaaacagatgatggcacaatgagtgatcgcattaaattatcaaataatgctgagaaagttactacaccaggcaaaaaaaatgtttatcgtattattaataataaaacaggcaaggctgagggcgactatattacgctagaaggtgaaaatcctaatgacgaatctccattgaaaatgttccatcctgttcacacttacaaaatgaagtttattaaatcatttaaagcggttaatctacatcaatctatatttgaaaatggcaaacttgtataccatcttccagatgaatatgaagctcaggactatcttaaaaataatttaagtattttatgggaagaaaataaacgatatcttaacccgcaagattatccagtagatttaagcactaaatgttgggaaaataagcataagcgtatttttgaagttgctgaacacgttaaagagatggaggatgaaaatgag

SEQ ID NO: 34459 - DNA, 552 bp, Staphylococcus epidermidis
atgagtaacaaagcattaatcattgtagattactcttttgattttattgacgataatggtaaattaacatgtggcaaacctggacaagaaattgaaacttttattactcagcgtataaaaaattatcataataatcaacaggaaatatttttcctaatggacttgcattatgaaaatgataaatttcatcctgaaagtaaattattccccaatcataatattcatcaaacaccaggtcgtgagttatatggcgaggtaggtagattatacaactcaattaaagaccaaatgaatgtacattatttagataaaacgagatacgattcattctacggtacaccattagatagtttattacgtgaaagacaaatcaatgatattgaaattgtgggtgtttgcacggatatttgtattttgcataccgctgtttcagcatacaatttaggttataacatcactatcccaattagaggcgtagcatcttttaatcaagatggtcatcaatgggcactctcccattttaaaaattctcttggtgcaaaagtagaagaa

SEQ ID NO: 34460 - DNA, 927 bp, Staphylococcus epidermidis
atgacaaaaacttttattttcgggcacaaaaatccagatactgatgctatttcttcagctttaattatggctgattttgagcaacaaactggtaatactgaagcaaaagcttatcgtttaggtgaaataagtgcggaaactcaatttgcactagatcattttaacgtagaagctccagaattattaaacgaagatttaaaaggacaagatgttattttagtcgaccataacgagtttcaacaaagtgcagatactatttcaaacgctacaattaaacatgtgatagatcatcacagaatttctaactttgaaacagctggccctttatactatagagcagaaccagttggttgtagtgcaacaattttatataaaatgtataaagaacgtggatttgaaattaaaccagaaatcgctggacttatgatttcagctataatttctgatagtttattatttaaatcacctacctgcacaaaagaagatgtagatgctgctcaagcacttaaagatattgcaaatgttgatttagaagcatatggtttagaaatgttaaaagcaggtgcttcaactacagataaatctgctgaaacacttgtcaatatggatgctaaatcattcaatatgggagattatgtaacacgtattgctcaagtcaatactgtagatattgatgaagttttagatcgtaaagaggaatttgaaaaagttatgttagaaatgagtgccaatgaaaaatacgatttattcgttcttgtagttactgatattattaacagcgattctaaaatccttgtagttggtgctgaaaaagataaagttggagaagcatttaaagtacaactagatgatggtatggctttcttatctggcgttgtatcacgaaaaaaacaagttgttcctcaaatcactgaagttttaactcaa

SEQ ID NO: 34461 - DNA, 759 bp, Staphylococcus epidermidis
atgcgttatctcaagaaagtaacgatatacataagtttattaattttggtaagtggttgtggaaacggtaaagaaacggaaatcaaacaaaactttaataaaatgttagacatgtatccgactaaaaatctagaagacttttatgataaagaaggctatcgagatgaagagtttgataaaaaggataaagggacatggatagttggatctaccatgacaattgaaccaaaaggcaagtacatggaatctagaggtatgtttctatatattaatcgcaatactagaacaactaaaggttattattatgtgaggaaaacaacagatgacagtaaaggtagactaaaagatgatgaaaagagatatcctgtaaaaatggaacacaataaaattattccaacgaagccaatacctaatgacaaactaaaaaaagaaatagaaaacttcaaattttttgtacaatatggagattttaaaaacttaaaggattataaagatggtgacatttcatacaatcctaatgtacctagttattctgcaaaatatcaattgagtaataatgactataatgtaaaacaattacgaaaaagatatgatattcccaccaaccaagcccctaaattattgttaaaaggagatggtgacttaaaaggctcatctataggttccaaaagtttagaatttacttttatagaaaataaagaagagaatatctttttttcagatggtgtacaatttactcctagcgaggatagtgagtca

SEQ ID NO: 34462 - DNA, 708 bp, Staphylococcus epidermidis
atgaataaagacgatggtaaagaaacggaaatcaaacaaaactttaataaaatgttaaacgtgtatcccactaaaaatctagaaaacttttatgataaagagggctatcgagatgaagagtttgataaggatgacaaaggaacatggatagttcattctaaaatggttattgaaccaaaaggcaaaaacatggaatctagagggatggttctctttatcaatcgcaatactagaacatcaaaaggctattttatagtcaatgaaatagaaaaggatagaaaaggaagacccattaataataaaaagaaatatcctgtaaaaatgaaaaataataaaattattccaaccaaaccaatatctaatgataaattaaaaaaagaaattgaaaactttaaattttttgtacaatatggcaattttaaagatattaaaaattataaagatggtgacatttcatacaatcctaatgtacctagttattctgcaaaatatcaattgagtaataatgaatataacgtacaacaattaagaaaaagatatgacatcccaactaaaaaagtacctaaactattgttgaaaggtgatggggatttaaaaggttcatccgtaggttctaaaaatctagaatttacttttatagaaaataaagaagagaatatctattttacagattctgtactatttagccctagcgaggataatgaatca

SEQ ID NO: 34463 - DNA, 714 bp, Staphylococcus epidermidis
ttggtgagtggttgtggagacagcaaagaaacggaaatcaaacaaaactttaataaaatgttaaatgtgtatccaactaaaaatctagaagacttttatgataaagagggttatcgtgatgaagagtttgataaggatgacaaaggaacatggattattagatctgaaatgacaaaacagccaaaaggtaagattatgacttcaaaaggtatggtgttacatatgaatagaaatactagaagtacaactggttattacgttattaggaaaatttctgaagataataaaagtgaaattgatgatgaagaaaagaaatatcctataaagatggtaaataacaagataattccaactcaaaaaattaatgacaataaattgaagaatgaaatagaaaactttaagttctttgtacaatacggaagctttaaaaattcagatgattataaagaaggggatattgaatacaatcctaatgcaccaaattattctgcacaatatcatttaagtaatgatgactataatattaaacaattaagaaaaagatatgatattaaaacgaaaaaaactcctagattattaatgagaggcgctggagatccaaaaggatcttctgtaggttataaaaatcttgaatttacatttgttaagaataatgaggaaaatatttattttaccgatagtattaattttaatccaagcaagggtaaatcattg

SEQ ID NO: 34464 - DNA, 780 bp, Staphylococcus epidermidis
gtgaaacattctaaaaagttacttttatgcatcagttttttattaataacgatttttattagtggatgtggatttataaataaagacgatagcaaagaaacggaaatcaaaaaaagttttaataaaacgttaagtatgtatcctattaaaaacttagaagatctatacgataaagaggggtatcgagatgaagaatttaataaaaatgacaaaggaacatgggtaataacttctagtattaatattcaacaaaagggggaaggtttaaaaactagacgaatggttttatttatgaatcgaaatacaagaacgtccaaaggtaagttcatgataactgaagtaaaagaaaaaagtgatataggatttcagactcgaaagaaagaatatccagtcaaattgattgataataaattcattccatctaaacaaataaaagatgaaaaaataaaaaaagaaatagaaaactttaagtttttctcacaatatggcaattttaaagatttaaaagattataaagacggtgaggtatcttataatcctaatgcgcctaattattcagctaaatatcaactcagtaataatgattataatgtaaaacaaataagaaaaagatatgatattccaaccgaacaagcccctaagttgttattaaaaggtacaggtgatttaaaaggttcatccacaggttctaaaaatattgaatttacttttgtagagaaaaaaggagaaaatatttattttactgacagcgttgaatacactccaagtggggatgataaa

SEQ ID NO: 34465 - DNA, 702 bp, Staphylococcus epidermidis
atgacaaaagaagataataaagaagaaaaaattaaaaagggttttgagaaaacattaggtatgtatcctatcaaaaatcttgaggacctatacgataaagaaggttatcgagatgaagaatttgatgagggtgataaaggaacctggatattgtattctgaaatggttatacaacgtaaaggtgatgatcttgtaacgagaggtatgattttgaaagtaaatcgaaatacaaggacatcaaaaggaaattatataataaataaaatatctacggatagtaaaggggttagtcgaaatactcaaaaaaaattccctgtaaaaatggaaaataataaaataatccctattaaaaaaattgaagatagtaagataaagagagaaatagatgaatttaaattcttcgctcaatatgcaaattttaactctttaaaagattataaaaatggagatatagcaaccaatccgaaagttcctagctattcagcagagtatgatttagaaaatagtgactacaatgtaaaacaattaagaaagagatatgatattcctacccaacaagcacctaaattattgttgaaaggtacaggtgacttaaaaggttcttctattgggtctaaagatattgaatttacttttatagaaaaacctaaaaagaacatatatttttctgacagtttagactataaaccaagtgagggtcat

SEQ ID NO: 34466 - DNA, 777 bp, Staphylococcus epidermidis
atgaaacattctaaaaagttacttttatgtatcagttttttattaataacgttttttattagtggatgtggatttatgaataaagacgatagtaaagaaacggaaatcaaaaaaagttttaataaaacgttaagtatgtatcctattaaaaacttagaagatttatacgataaagaaggatatcgagatgaagaatttgataaggatgataaaggaacatggttacttcactcggaaatggctatacaacgtaagggagaagatttagaaactagaggtatggtgttaaaaataaatagaaatacacaaacatctaaaggtgattatataaccaataaaattacatacgataataaaggaagacctcaaagtaataagaaaaaatatccagtcaaaatggaaaacaataaaataatccctattaaaaaaattgaagatagtaagataaatagagaaataaatgaatttaaattcttcgctcaatatgcaaattttaaagaattaaaagattataagaatggaaatatatcatacaatcccaatgtacctagttactcagcagaatatgatttagaaaataccgattataatgtaaaacaattaagggaaagatatgatattccaacgaaacaagcaccaaaattattattgaaaggtacaggtgacttaaaaggttcttcaattggtacgaaagatgtagaatttacctttgttaaaggcaagcaagagaacatttatttttctgatagtatgaactttatgccaagcgaggatgat

SEQ ID NO: 34467 - DNA, 912 bp, Staphylococcus epidermidis
atgaacgcgatagaacttaaagatgttaattatcgatctaacgcatttcaattgcaagatgtctccttcaatgttcctaaaggatatgttacaggttttataggtggaaatggtgcggggaaaactacaataatacgattaattatggatttaattcaatctgaaagtggtacaatctctgtttttgagaaagatataaaaattcatcctcgtgaaataaaaaataaaattggatttgtgtattctgagatttattttaatcaaaaatggacagtaaaaaaattagaaaatatcattgcccctttttatgatcgttgggatcatgaaatatttataaagtatttaaaattttttcagctgccatataaaaataaaataaaaactttctcaaccggtatgaaaatgaaactatcgttagcaattgcattcagtcatcatgcagaattatttatcttagatgaaccaacttcagggttagacccattaataagaaatgaattacttgaaattattcaacaagaattgatagatgaaaataaaacagttttcttttcaacacatattatttctgatttggaaaaaattgcagattatatcgtttttctcagtgagggtgaaatcatattcaatgagtctagggataaactatcgcaaaaatacaaaatcgttagtggttctaatgaagacttagatgaagagttggacgaacttttgatttacaaagaaagtaagcaaacaggctatattggtttaacagaatattatcaaacatttaatgaattgtttggtagtggtgttgaaataaaagatgcatctatagaacaattgatgatttatttagaaaaaagtaaacataaacgaaatacaaattcaaaatacaaagtgagatttaactatgaagcaattaatgat

SEQ ID NO: 34468 - DNA, 375 bp, Staphylococcus epidermidis
atgaaaataattttgaagaacaatagtgaaagtcctatatatgaacagattaagcaacaaattaaagaaaatgttttgaaaggttatgtttcccctggtgaacatcttccatcaatgcgtgagttagctaaagatttaaaagtgagtttaataacgacaaaacgagcatatgaagatttggaaaaagatggatttgtaacaactattagaggtaaaggaacctttgtaaaggaacaagataattctattctaaaggaaaagcaattttttgttattgaaaatttagctcactctatgtcaaaagaagccaaaacaattggaatgcctttagaggaattaatagaaatattgactatgatttatgaggaggacgac

SEQ ID NO: 34469 - DNA, 1617 bp, Staphylococcus epidermidis
atggcaaaagatcttaaattctctgaagatgcgcgtcaagcaatgttacgtggtgttgataaattagcaaacgctgtaaaggttacaattggacctaaagggcgaaatgtggttctagataaggattacacaacacctttaattaccaacgatggtgtaacaattgctaaggaaatagagttagaagatccatatgagaatatgggtgcaaaattagtgcaggaagttgcgaataaaacaaatgaaatcgctggggacggtacaactacagcaacagttttagcacaatcaatgattcaggaaggtcttaagaatgttacaagtggtgcaaatcctgtaggcttaagacaaggtattgacaaagcagtgcaagtggctatagaagcgcttcatgagatttctcaaaaggttgaaaataagaacgagatagcgcaagttggagctatttcagcagcagatgaagaaatcggtcgctacatttctgaagcaatggataaagtaggtaacgatggcgttatcactattgaagaatcaaatgggtttaatacagaattagaagtagttgaaggaatgcaatttgatcgcggttatcaatcaccatatatggtaactgactcagataaaatgatagctgaattagaacgtccatatatattagtaacggataagaaaatttcatcattccaagatattcttccattattagaacaagttgtgcaggctagtcgaccaattttaattgttgcggatgaagtagaaggcgatgcacttactaatattgttttaaaccgtatgcgtggaacatttactgctgtagcagttaaagccccaggatttggtgatcgacgtaaagcaatgttagaagacctagcaatattaactggtgctcaagtcattactgatgatttaggtttagaacttaaagatgcatctcttgatatgctaggtactgctaataaagttgaagtgactaaagatcatacaacagtcgtagatggtaatggtgatgaaaataatattgatgctcgtgtaggtcaaattaaagcacaaattgaagaaactgattcagagtttgataaagaaaaattacaggaacgtttggcaaaactagctggcggcgtagctgttatcaaagtaggggctgcaagtgaaacagagcttaaagaacgtaaattaagaattgaagacgcattaaattcaacacgtgcggcggtggaagaaggtatcgttgctggtggtggtactgcgttagtcaatatatatcaaaaagtaagtgaaattaaagcagaaggtgatgttgaaacgggtgttaatatcgtattaaaagcattacaagcacctgttagacaaattgctgaaaatgcaggattagagggttcaattattgttgaacgtttaaaacatgctgaagcgggcgttggtttcaatgcagcaacaaatgaatgggttaatatgttagaagaaggtatagtagatccaactaaagtaactcgttcagcgttacaacatgcagcaagtgtagctgctatgttcttaacaactgaagcagtcgttgctagtattccagagccagaaaataatgaacaacctggaatgggtggcatgccaggtatgatg

SEQ ID NO: 34470 - DNA, 1554 bp, Staphylococcus epidermidis
atgtcaacgacggaaaaacaaagacaacagcaagcagaattacaaaagaaattatggagtattgcgaatgatttacgtggaaacatggatgcaagtgaatttagaaattatatactaggacttattttctatcgctttttatcagaaaaaacagaagaagaagtggctgagttattaaaagaggacaatatttcatatgcagaagcttgggaagacgaagcatatcgtgaagcgttacaacaagaattaattaatttaattggttttgtgattgaacctcaagatttatttagtcacttaattcagaaaattgaaactcaaacgtttgaaattgaagacttgcataaagcgattaataaaatcgaagaatctacacgtggtgaagacagtgaagaagactttgaccatttattcgctgatatggatttaaattctacacgtttaggtaataccaatgcagcacgtacgaaacttatttcgaaggtcatggttaatttagctacacttccttttgtgcatagtgatattgaaattgatatgttaggggatgcttatgaatatttaattggtcaatttgcggctaatgcaggtaaaaaagcaggagaattctatacaccacaacaggtctctaagatattagctaagattgtcacaacgaataaacctaatttaaaaaatgtttatgacccaacatgtggttcaggttcattattgttacgtgtcggacgtgaagccgatgttcgtttctattatggtcaagaatataacaatactacattcaacttagcgcgaatgaatatgttacttcatgatgtgaactatacacgttttaaaattgataatgatgataccttagaaaatcctgcatttagaggagaaaaatttgatgccgtggttgccaatcccccttatagtgcgaaatggagtgccgatccatcattcttagatgatgaacgctttagcggttatggtaaattagcaccgaagtcaaaagcagattttgccttcattcaacatatgattcattatttagacgataatggcacaatggctgtcgttttaccacatggtgtgttattccgaggtgcagctgagggcacgattcgtaaatatttaattgaagaaaagaaccatttagatgcagtgattggtttaccagcaaacctattctttggcacaagtattccaacaagtatattagtatttaaaaaatgtcgtgaagatagtgataatgtattattcattgatgcttctcagtcattcgaaaaaggtaaaaaccaaaatctactgacagatgaagatgttgataaaatcgtagagacatatcgcaacagagaaaccattgataaatttagttatgtagtatcgttagatgaaatcatagaaaatgactacaacctaaatattccaagatacgttgatacgtttgaagaagaagaaccaattgatttagatcaagttcaacaacagctctcagatatcgataaagaaatcgccaacgtagaatcagaaatcaacgactatcttaaagaactaggagtgttaaaacatgac

SEQ ID NO: 34471 - DNA, 2790 bp, Staphylococcus epidermidis
atggtttatcaaagtgaatatgcattagaaaatgaagtgcttcaacaacttgaaaatttaggatatgaacgagtaaacatacataacgttgaacaattacatgataattttcgtactataattaatgaacgtcataaggaaaaattaaatggaaaacccctaacagaccgtgagtttgaacgtttaatgacggggattaacggtaaatctgtatttgatagtgcgatgcaattacgcgatagttatgtacttaagcgtgatgatgatactgatttatacctaaatttcatgaacttaaaacaatggtgtcagaataaattccaagtaaccaatcaaatcagtgtgaaagataaatataaaagccgttatgatgtgacaattttgattaatggcttgccattagtacaaattgagttaaaacgaagcggtgtagcaattaccgaagcatttaatcaaatagaacgatatcgtcgtcaaaactatactggtttattcagatacatacaattatttgttgttagcaataaaatggaaacgcgctactatgccaacagtgatcgtgaaattttcaaaggacaaatgttttattggagtaatgaacaaaatgagcgtattaattatcttaaagactttattgaagatttcttagaatcatgtcacatttctaagatgattagtcgttatatggtcgtcaatgaaacagacaaatttctaatggcattacgtccttatcaagtatatgcagtggaagctattttaaatcgtgcgttagaaacaaataacaatggttacatttggcatacaacaggtagtggtaaaacgctgacttcgtttaaagcgagtcaattattatcgcaagaagaaaatattaagaaagtgattttcttagttgatcgtaaggacttagataatcaaaccttagctgaatttaataaattccaagaggactcagttgattttacggataatacacgtaaattattgaaacaacttgccgatccaactttacctttaattgttacaacgattcaaaaaatggcgaatgcagtaaaatccaatcattcagtaatggaatcatataaacaagataaagtcatttttattattgatgagtgtcatcgtacgcaatttggagatatgcatcgtttgattaagcaacattttgaaaatgcacagtattttggatttacggggacaccacgttttgaagaaaacaagagtcaagacgggcgtgctacagctgacatttttgataagtgtctacatcactatctcattaaagatgctattagagatcataatgtccttggattttccgttgaatacaatcaaacatttaattcacatgaagatttagatgaagaatatatttctaaaattaatacgtcggaaatttggatggcagatgaacgtattgaagctgtttgtcgacatttgatttcaaattatcataagaaaacagataacggaaattatacatctatgtttgcggttcaaagtattccaatggcgattaaatattatgataccttccaaagactaaaaaacgaaggtgttcatgatttaaatgttgcaactatttttacatatcaagccaatgaagatgcgcaagaggatgaaaatcatgttcattcaagagaagttctcgaccgcattatgaatgattataatcaaacatttaaaacgaactataatacggataatttcgaaggctacttttctgacgtatctaagcgtatgaaagaagttgttcgtgatgacaaaattgatattcttatcgtcgttaatatgtttttgactggttttgacagtaagaaactgaataccctttacgttgataaaaacttgaagcatcatgatttaattcaagcctattcaagaacaaatcgtgttgaaaaagaacgtaagccatacggtaatattgtatgttatcgtgatttaaaaaaacaaacggacgaagccattgaaattttctctcaaacagataatacagatacggtgttaagcttatcttacgaagaatacttagataatttcaaagatatcttacaagacgtttttcaactagcgccaacgcctttagatgtcgataaactagaggctgaagatttaaaaaaagagtttgtcatttcattccgtgatttatcaaatacactaattaaactaaaaacctttgatgaatttcaatttacagaagacgaacttggcattgcagaacaaacctatgaagattataaaggtaaatacttaaatatttatgaagaagtcatgcgtggtaaaaaagtggatggtgaagagggtgtttccgttttagatgatattgatttccaagttgaattaatgcgtaatgatttgattaatgtgaagtatattatggatctcattggtcaaattaatctatctgatgcaaaagcacgcgatgaaaaacgtcatcaaattcataagttgttagataaagcagatgatcaacaattacgtttaaaagctgatctcattcgtagcttcttagataaagttgtgccatcactaaaagaagattctgatattaatgaagcgtattatgaatttgaagacaaagaaaaaacgaaagaaattgatgcatttgcagaacaaaaagccttttctgctatgttacttaacgaagctgttaatgagtatgaatatagtggtaatattgaccgtaaatctatcggtcaaaatatttcagaaccttttatgaaacgtaaaagaaaaaccgaccaaattatacagtttatcgaagatacagtagaaaagtacggtgttgtcgaa

SEQ ID NO: 34472 - DNA, 2019 bp, Staphylococcus epidermidis
atggctgaaactactaaaatatttgaatcacatttggtcaaacaggctctaaaagacagtgtattgaagctctatcctgtttatatgattaaaaatccgattatgtttgttgtagaagtgggcatgctgcttgccttaggattaaccatttatccggatttatttcaccaagaaagtgtatcacggctatatgtgttcagtatctttatcatattattactgacacttgtctttgcgaacttctctgaagcattagctgaaggtcgcggtaaagcacaagccaacgctttacgccaaacacaaactgaaatgaaggcacgtcgtattaaacaagacggcagttatgaaatgattgacgctagtgacctgaaaaaaggacatatcgtacgtgtcgcgacaggtgaacaaatcccaaatgacggtaaagttattaagggcctcgcaacagtggatgaatctgcgattacaggtgaatctgcacctgtaatcaaagaaagcggtggagatttcgataatgtaattggaggaacttctgtagcttcagactggttagaagttgagattacttcagaaccaggtcattcatttttagataaaatgattggtttggttgaaggggctacaagaaagaaaacacctaatgaaattgcgttatttactttattgatgacattaacgattatcttcttggtcgttattttaacgatgtatccattggcgaaattcctgaatttcaatttatccattgcgatgctgattgctttggctgtgtgtttaattccaacaaccattgggggattattatcggctatagggattgcagggatggatcgtgtgacacagtttaatatcttggctaaaagcggacgttctgtagagacttgtggtgatgtgaatgtcttgattttagataaaacaggtaccattacctacggcaaccgtatggcagatgcgtttattccggtgaaatcatcaagctttgaacgtttagttaaagcggcctatgaaagttctatcgcagatgacacaccagagggacgtagtattgtgaaattagcttataaacaacatatcgacttaccgcaagaggtcggagaatatattccgtttactgctgaaacacgtatgagcggtgtgaaatttacgacacgtgaagtatataaaggtgcaccgaatagtatggttaagcgtgtgaaagaagcagggggacatattccagttgatttagacgctcttgtcaaaggggtgtctaaaaaaggtggcacaccgctggttgtgcttgaagataatgagattttaggtgttatttatttgaaagatgtcattaaagatggactcgtagaacgtttccgtgaattacgtgagatggggattgaaacggtgatgtgtacaggagataacgaattgacagctgcgacaatagcgaaagaagcgggtgtggatcgctttgtggcagagtgtaaacctgaagataaaatcaatgtgattagagaagaacaagcgaaaggtcatattgttgcgatgacgggtgacggtacgaatgacgcgccagctttagcagaagctaatgtaggtttggcaatgaactcaggaaccatgagtgccaaagaagcggcgaatttaattgatttagattctaatccaaccaaactgatggaagtcgttctaattgggaaacaattattaatgacacgtggctcactcactacatttagtattgcgaatgacattgcgaaatactttgcgattttaccagccatgtttatggcggctatgcctgcgatgaatcatttgaatattatgcatctgcattcacctgaatcagcagtattatctgcgttaatctttaatgcgttgattattgtattattgattccgattgcgatgaaaggcgtgaaatttaaaggtgcctcaacgcaaaccatattgatgaaaaatatgttagtttacggcttaggcggtatgatcgtgccatttatcggcattaagctcattgatctcatcatccaactctttgtc

SEQ ID NO: 34473 - DNA, 2718 bp, Staphylococcus epidermidis
atggataatatgttgtatattaattatgatgtgattaagagggggtgcctcatggaaagtacatataaaaaaagagggaaacttaccatttatttaggctatagcccaggggtaggtaaaacgtatgaaatgttatcaaatggtattgatcagtatcaagaaggtgcagatattaaaattggttatatcgaaccccatcaacgccctgaaaccaatgcactggttcaacaattgcctgaaatttcgacctccagccgtaaatttggcagccacacctttcactatatagatgtctctaaaatcatagaagctaatccagatgtggtcttaattgatgaactagcacatacaaacatttcaaaagagcgccatttaaaacgttataaggatatagaagaaattctatcgcatggtatcgatgtctggacaacactcaacatccaacatatcgagagtctaagcggacaaattgcgttaatgacaggtattcaagttacagaacgtgtgcccgaccaattcattacgtcagcagatgcctttgaagttgtggatatttcaccaaatatgttgattcagcgccttaaagcaggaaaagtatataaaaaagaacgcttagaaacagccttttctaatttctttacgtatgaaaatctgacagagctgcgtgaacttacactcagaactgtcgcagatattatgagtcaaaaaggacaacaatataaaactaaacataccgacattacaccgcatattgcggtagctatcagcggcagtatttataacgaacgggtcatacgagaagcaagacgtgctgcctataaagaacatgctaaattcacagctgtgtatattgatgtctttgagacaccgtcagaaagcagaaaacaagatcattatgtccataaaaatctaatgctcgccaaagcgttaggtgcagaaatcaaagtgttgtatgcacaagatattgcgaaagcgttaaccgattggtgtgatctcgcttttgtgacgaagctagtccttggacagtcagaacagccacgttggaaagattactttaaacagtcactcattgaacaaattaatcacgtaccacaccatttcaagttagaaattgtaccgattcattatattcattcagacaaacctacaaatacacctaagcaagctcaaaaatcctctcgtttaactgtagagattatgaagatgcttgtaattcaaacgatctgtgtcttgctcggtatatgggtttacaacttagataaaagcgaatccagtgccattatcttgctgatgttctttatcggtattatcgtgctttctatttggacccaatcctatttaatcggattctttgcgtctatcttaaatgtgtttgtttttaattatttctttacggtgccaagattcactttagaaatgtatcgctttgaatatccgattacgtttgcgaccagtatttttgctagtatctttacgagtgccatcttaaagaatttaaaacatcagcattccttaacagaacggcagttatatcggaccaatattatgctgcaatttaaccagtccattaaagaatcttattcaattgaacgcttattaaatattgctggtgatcagattcatcagctactcaatcaggatgtcacggtattcttaattcaaagtaagaaagtcgctgcttccaactcatttggaaacagaagcatttcaagctcagataagacacatgatgctgagacattgagctgggtcattgaaaatgaaagccgtgccggtaaattaaccgatacctttcctggcagtaaatttttgtgtattcccattggcacaaatccagtcaaaggtgtgatttctatccgcttcaccgacgaaacttacatcgacacctatgacaattcaatattagactctatgttgaacgatattaccctggcaatagagaatgtggatctattaaaacaaaccagacaatccatattgaaagctgaacgagaagccacacgttcaaacttcttgcattcaatttcacatgatattagaacaccactgacttccattatgggcaacttagatatgctgaaataccataacgagcatttaaacgatcaacaacaagcagaactcttaactgcttcttatggcgaagcacaatatctgcataccttagtcacaaatattttatctttgactaagttagaaagctctgacattcaaatacaacgcaccccttatttagtagaagaacttctagaagaatttgaagaaggcctcatacgcagacaccaagcaaatcatgtcattattgaaaatgaggatgacgcttcactcattaatatcgacagtaaattaatactgcaagtgctattcaaccttatcgataatgctttaaagcatgcagaatcacattctgaaataaaactgcacgttcaacatgaaacaaacaaaataaaattcgaaatgatagattgcggaaaaggtattccagaagaagaacgtcaattgatttttaatccctattattcaggagacaactttaaagacaataaaaaagatagtttgggattagggctctatttagtacaactcatcttgaaacaacacaacagtgaattagaatatcaaccgaatacaccacaaggcagtattttttatttttatttgactgttaatccaattgaaatggagggagccatggatgaaaacaacattattggtcgt

SEQ ID NO: 34474 - DNA, 396 bp, Staphylococcus epidermidis
atgaaaagagtcattacttatggtacatatgacttgcttcattatggtcatattgaattacttagaagagctcgtgagatgggggattatcttatcgttgcgctttctactgatgaattcaaccaaatcaaaaacaaaaaatcatattatgattatgaacaacgtaagatgatgttagagtctattagatacgtagacttagttatccctgaagaaggatggggacagaaagaaaaagatgttgatcgttttgatgttgatgtatttgtgatgggtcatgattgggaaggggagtttgacttccttaaagataagtgtgaagtcatttatcttaaccgcacagaaggtatctcaactaccaaaatcaagcaagaattatacggaaaagatacaaaa

SEQ ID NO: 34475 - DNA, 795 bp, Staphylococcus epidermidis
atgagtcgtttaagtggtgaacaagtgaaaattggctacggtgattctacgattattaataatttggatgtcgcaattcctgatggaaaggttacttctattattggacctaacgggtgtgggaaatcaactttattgaaagcgttatctagactattgtcgattaaagaaggtaaaattaatttggatggtaagagtattcatgccacatccacgaaagaaatagctaaaaaaatagcaattttaccacaatcaccagaggtcccagatggacttactgtaggagaacttgtttcttatgggcgttttccacatcaaaaaggatttggtcgtttaactgcagaagataaaaaagaaattgattgggcattgtcagttacaggtacaagtgaatttcgtcatcgtactataaatgatttaagtggtggacaaagacaacgcgtgtggattgcaatggcactagcccaacgtactgatattattttcttagatgaacctacaacttatttagatatttgtcatcaattagaaatattaaatttagtcaaaaagctcaacgaagaagaaggttgcactattgtgatggttttacatgacattaatcaagcaattcgcttctcagatcatctcattacgatgaaagctggagatattgttgctactggtcaaactgatgaagtgttaactaaggacattttagaaaaggtatttaatattgatggtgttttagatatagatccgagaacagggaaaccaattttagttacttacgatttattctgtcagacgtattcg

SEQ ID NO: 34476 - DNA, 315 bp, Staphylococcus epidermidis
atgaaggaaatcaatattgtttcactacaaatgataaaaacagatacattaagttatctaaaaaatcgtatttcaaaccctgaggatgcggcagaaatcatgcgttcattcattggaaacagtgaccgagagcatctcattctcatatgtatgaacagtaaaaatgaacctacacatattcaaacactatcgattggatctattaaccaaacggtgattcaccctagagaaatattcaaaacagcgatactcagtaacgcaaatagtataatgctcggtcataatcatccaagtggagatgtattaaccatagta

SEQ ID NO: 34477 - DNA, 1008 bp, Staphylococcus epidermidis
atgtcatatattttaattgtcacgatagctatagttatattttcattaatatttgactttatcaatggtttccatgatacagctaatgctgtagctactgcggtttctactcgagcattaacaccaagaagagctattttattagcagcagtcatgaactttattggggcattgaccttcacaggtgttgctggaactattacaaaagatatcgttgatccattcaaattacaacatggtttagttgttgtgttagcagctattattgctgccattatttggaatttaatcacttggttgtatggaataccaagttcatcttctcacgcactaatcggatctatagcgggtgcagccattgcatcgcaaggttcgtttgcagtattacactatcaaggttttacaaaaattattatcgtattaatcatttcaccaattatagctttttgtgtaggttatatgatgtatacgattgttaaaatcgtttttaaaaattcaaatttaacacgtactaatcgtaattttaggtttttccaaatctttactgcagcattacaatcattctcacatggtacaaacgatgctcaaaaatctatgggtattatcacattagctttaattgtaggtaatttacaagatggtagtaatgttgaacctcaagtatgggttaaagttgcgtgtgcaacagctatgggattaggtacagcagtaggtggttggaaaatcatcaaaactgttggcggaaatattatgaaaattagacctgctaacggtgcagccgctgatatttcttcagcattaacgattttcgtagcgtcatcattacatttcccattatctactacacacgttgtgtcttcatctattctaggtgtaggtgcttcaaatcgtgcgaaaggtgttaaatggagtactgctcaacgtatggttgtaacatgggtgattactttacctatctcagctgttttagcagcaattatttattttattattcatctgttcttaaaa

SEQ ID NO: 34478 - DNA, 714 bp, Staphylococcus epidermidis
atgggacgtaaatggaacaacattaaagagaaaaaagcccaaaaagataaaaatactagtagaatatatgccaaatttggtaaagaaatatatgtagctgcaaagtctggtgagcctaatccagagtcaaatcaaactttaagattagtattagaacgtgcaaaaacatattcagtacctaatcatattatagatagagctattgataaggctaaaggcgctggtgacgaaaactacgatcacttaagatatgaaggttttggtccgaatggttcaatgcttatagttgacgcattaacaaacaatgtaaatcgtacagcatcagatgtacgtgctgcgttcggtaagaatggaggaaatatgggagtatctggttcagtagcttatatgtttgaccatactgcaacctttggtgtagaaggtaaatctgtagatgaagtcttagaaacactaatggagcaagatattgatgtaagagatgtaattgatgacaatggcttgactattgtttacgcagaaccagatcaatttgcacaagttcaggatgcattacgtgaagctggcgttgaggaatttaaagtagcagagtttgaaatgttacctcaaactgatattgagttgtctgaagaggatcaagctatttttgaaaaattaatcgatgcacttgaagacttggaagatgttcaaaatgttttccataatgtagatttaaaa

SEQ ID NO: 34479 - DNA, 672 bp, Staphylococcus epidermidis
atgattacaaaagaagatattgttgcagatgttgtaacagattatcctaaaagtgcagatatatttagaaatgctggaatagatttttgttgtggcggacaagagagtatcgcttcagctgtcaatcataaaccaaatattgacttaaattccttattaaataagttgaatcatattgataatacagaaggtaacagtaccattaatcctaaatttttaaatgttgaatctcttatacaatatatacaatcagcttatcacgaaacgcttaaagaagaatttaagaatcttacaccttacatgactaaattggcaaaagtacatggtcctagtcacccatacttattaaaattacaagacttatatcgcgagtttcgtgatagtatgttggatcatatacgtaaagaagatgaggaagattttcctaaactcattcaatatagtcaaggacaagatgtacaaaacattaaaatcatattagaagatttaattaatgaccacgaagatactgggcaattattaaatgttatgaatcaactaacctctgattatcaaaccccagaagaagcatgtggaacatggaagcttgtttaccaaagattacaaaatatcgaacgtcaaacacaccaacatgtacatcttgaaaaccatgtgttatttaaaaaggtaagt

SEQ ID NO: 34480 - DNA, 1206 bp, Staphylococcus epidermidis
atgtttacagcattattgcaaataaagaattataaattgtttgtggtcaatatgttgttactaggtatgggaatagcagtgactgtaccttatttaattttatttgctacaaaagatttggggatgacgacaacacaatatggactgctacttgcacttgctgcgataagtcagtttatagtcaattccattattgcaagattttctgatacacatcatcttaatagaaagattctaatcatcactgctttgtttatgggggcagtgagcttctcaatttatttctacgttcatcaaatatggttattcatcgtgttatatgcgttgtttcaaggattatttgcaccagcaatgccacaattgtatgcctctgccagagaatcaatcaatgcttcaagttcacgtgatcgtgctaagtttgctaatactgttttacgttcaatgttttcacttggttttttatttgggccatttataggtgcacaacttattgagttaaaaggttattctggattatttggtggcacaatagctattattttatttactttaattttacaagtgtttttttataaaaatttaccggtaaaaaatcaaatttctgaacaacagcatattgagaaaatcgcaccaaatatgtttaaagataaatcattatttattccatttatagcgtttatattacttcatattgggcaatggatgtatacgatgaatatgccactttttgtgacagattatttaaatgaaaaggaaagatatgtaggctatttagcaagtttatgtgcaggtttagaagtgccgtttatggttatattaggtatattatcagctaaattgccaactcgaactttattgataattggttctgtatttggtggcgcattttactttagtattggtgtatttaaaaattttcatatgatgcttgttggacaaatatgtttagccatctttctagcaatattactaggtcttgggattagttattttcaagatattcttcctgattttccaggttatgcatcaacactttttgccaatgccatggtaataggacaacttggtggtaatttgctaggtggtgtgatgagtcattgggttggtttggaaaatgtattctttgtctcagcaagttctatcttcgtagggatgatactcatcttgtttacgaaagatcaaaaaattacaatagaagatgtggag

SEQ ID NO: 34481 - DNA, 564 bp, Staphylococcus epidermidis
atgaaaagaattgctgtttattgtggtgcaagtaaagggaaaaacccatcttatgttaaagaggcatacgaattaggaaaatatatggctgaacaaggatacgagcttgtattcggagcaggatcagtcggcattatgggagctattcaagatggcatacttgagcatggcggtaaagctatcggtgtcatgcctaaaatgttagatgaacgagaaataacaagccaaaaagtaagtgagcttatattagtagattctatgcatgaacgaaaaaataaaatgactgaacttgccgatgcttttattatggctccaggcggtgctggttcattagaagaattttttgaaatgtatagttgggctcaaattggtatacaccaaaagcctataggtgtatttaatttaaatggattctttgagccactacaacacttaatcgaccatatgattaaagaaggatttattgatgagaaatatcaaaagcttgcacctttatatgatactaaagaatcactcatcgaaggacttaaacattacaaaccacttggtgtacgtacatacgat

SEQ ID NO: 34482 - DNA, 1161 bp, Staphylococcus epidermidis
atgaaaaaacaattattcattctttattttaatatatttcttatatttttagggattggattagttattcctgtacttcctgtatatttgaaggatttaggattaaaaggtagtgacttaggaatgctagttgctgcttttgcattatcacaaatgattatttcaccatttggtgggacactagctgataaattgggtaaaaaattaattatatgtatcggtttagtattctttgctgtctctgaatttatgttcgcagccggtcaaagttttaccattttaatcatttcacgtgttttaggtggctttagtgcaggcatggtcatgcctggtgtaacaggtatgattgcagatatttctccaggagctgataaagctaaaaactttggttacatgtcggcaattattaattcaggttttatattaggacctggatttggaggctttttagctgaaatttcacatagattacctttctatgttgctggaacattaggtgttgttgcattcattatgtcagttttattaattcataatcctcaaaaagcaactacagatggattccaccaatatcaacctgaattattcactaaaattaattggaaagtatttattactccagtcatattaacacttgtattagcatttggtttatctgcttttgaaacattattttctttatatacagctgacaaagtaaattatactcctaaagatatttcgatagctattatcggtggaggcgtgtttggcgcattattccaagtattcttctttgataaatttatgaaatatatgagtgaacttaattttattgcatggtcattactatattcagccattgttctcgttatgttagtgcttgcaaacggttattggacgattatgattattagctttgttgtttttataggttttgatatgattagaccagctttaaccaattacttctcgaatatagcaggcaaacggcaaggttttgcaggtggattgaattcaacttttaccagtatgggtaactttataggtcctcttgtagctggtgcattattcgatgttaatttagagtttcctttatatatggctattgcggtttcattaagtggaattatcattatttttattgaaaaaggacttaagtcacgccgtaaagaagcaaat

SEQ ID NO: 34483 - DNA, 918 bp, Staphylococcus epidermidis
atgatatatacagttaccttcaatccttcaatcgattacatcatttttactgatggatttgaaatatcaggattaaaccgggcaaaagcaacgtataaatttgcaggaggtaagggaatcaatgtatcaagagtacttaaaactttagatgttgattctacagccttaggattttcaggaggtttccctggagattttattgctcaaacacttgaggacagtaatatccaatcagattttgttcaagtagatgaggatacgcgtattaatgtaaaactaaaatcaggtcaagaaacagaaatcaatgcacccggacctaaagtgacacacgcgcaatttgaacaacttttatctcaaatacgtcgtactacaaacgacgatattgttattgtagctggaagtgtaccgaacagtattccaagtgatgcttatgcacaaatagcacaaatcactgaaaaaactggtgcgcaactagttgttgatgcagaaaaagatcttgttgaaacagtattaccatatcgaccattatttattaaaccaaacaaagatgaattagaagtaatgtttaacactacagtcaagagtgatgaagatgttataaaatatggtaaagaaattttgaaaaaaggggcacaatcagtcatcatttcacttggtggcgatggtgcaatatatgttgatcaacatcaaagcattaaagctgtgaatccacaaggacatgtagttaatacagtaggatctggtgatagtacagtggcaggtatggtagcagggttgtccatgggtcttaatatagatgaagcttttcaacaggccgtagcttcaggaacagcgactgctttttcagaagatttagcgacaagagatgctatagaaaatattaaatctcaagtgacaatttctgtacttgatggggag

SEQ ID NO: 34484 - DNA, 1950 bp, Staphylococcus epidermidis
atgagaattactgaactgttaactaaagaaacaatagcgatggatttagatgcttctgataaaagtggggtgattactgagcttgttaatcaattggataaagcaggtaagttaagtgaccctgtatcgtttaaagaggcaattcataatcgtgaatctcagagcacaacaggaattggtgaaggtattgctataccacatgctaaagttgcagcagttaaaacacctgcaattgcattcggtaaatctaaagaaggtgtggattatcaaagtttagacatgcaacctgcacacttattctttatgattgcagcgcctgaaggtggagcacaaacgcatttagatgcgcttgcgaaactttctggaatattaatggatgagaaaatacgtgaaaaattaattcatgctgaatctcctgaagaagtgttaaacattatcgatgaagcggatgatgaggcaacaaaagaagaagaagcagaagcgaacgaaaatgcaactgtttcaactgacaactcaaatcaagataataatgagccatatgttttagctgttacagcatgcccaactgggattgcccacacatatatggcacgtgatgctttgaaaaagcaagctgagaagatgaacatcaaaattaaagttgaaacaaatggttctagtggtattaaaaaccatttaactgaacaagatatagaacgtgcaactggaataattgttgcagcagatgtccatgtagaaactgatcgttttgatgggaaaaatgtggttgaggttcctgttgctgatggtattaagcgtcccgaggaactaattaatacagctttagatacaaatcgtaaaccatttgtagcgcaaggtggatctaaaaaacatgacgataatgaagaaaagttaagtccaggaaaagcattctataaacacttaatgaatggtgtttctaatatgttaccacttgttatttcgggtggtatcttaatggcaattgtattcttattcggcgcaaactcatttaagcctgatagttcagaatataatgcatttgccgaacaattatggaatattggtaaaaatagtgcctttgctttaattattccaattttagctggtttcattgcacgtagtattgcagataaaccaggttttgcagctggtttagttggtggtatgttagctatttctggaggttctggctttattggtggaattattgctggtttcttagcaggttatttaactcaaggaattaaatatattacacgtaaattgccacaagcaattgaaggcttgaaacctactttaatctatccattactttcagtttcaattactggattgttaatggtgtatgtctttaatccgccagcagcttggttaaatcatttgctactaaatggtttaaatagtctgtcaggctctaatattatgttacttggtcttgtgattggagctatgatggcaattgacatgggcggtccatttaataaagcagcttatgtatttgctactgctgcattaacggaaggaaatgcagctcctattactgcagcgatgattggtggtatgattcctccattagctatcgctacagcaatgttaatctttagaagaaaattcactaaagagcaaagaggctcaattgtaccaaactatgtcatgggattatcatttattactgaaggtgccatcccattcgcagctgccgatccattacgtgtgattccttcaatgatggttggctcaggtgtggctggagcaattgctttaggtttaggatcaagtatcaaagcacctcatggtggaattttcgtcattattggtactgattttaaccatatacttcaaactcttattgctttagttgtgggtacgttagtttcagctttaatttatggtttcttgaaaccaaaagtaacagaaaatgaaattcaagcatctcaagctatggatgaa

SEQ ID NO: 34485 - DNA, 1170 bp, Staphylococcus epidermidis
atgtcagaatatgttttaacgaatggcatcgtatatacagaaaatgaaatgattaacaatggatatgttcatattaaagatgggaaaattttagacgttggtaagtgtccttttcatccgtcatcgtcgcataatacaattgacattattgatgtaaaaaaacgacatatactgccaggatttatagatattcacatccatggggggtatggtgaagatgccatggatgcatctgaacaaggcttacaacatttagcagaatcactcctttctgaggggacaacatcttttttagcaacaacaatgacacagtcaacagtcaatattgagcgagcacttcaaactattgctaaatatactcaacaacaagatgttacaaatgctgccgaaattgtgggagtacatcttgaaggtccatttatttcagaacataaagtaggcgcacaacatcctcaattcgtacaacgtcctacggttgataaaataaagtcgtttcaggaagtagcgaatggactaattaagattattacgtacgctcctgaagttgatggagcaacagaaacgttaaagacaatgaaaaatgatatcattttttcaatcggacatacggtggcaacgtttgatcaagcgaatacagctgtgagtcatggtgccaaacacatcactcatttgtataatgcagcgaccggctttcaacatagagaaccaggtgtatttggtgcagcctggttaaatcaagggttgcatactgaaatgattgtggatggtgttcattcacatcctgcatccatcgcacttgcatatagacttaaggggaatcaaagctgttatttaattacagatgcgatgagagctaaaggaatgccagaaggacattatgatttaggtggtcaggatgtgattgtaaagggaagtgaagcacgcctgtcttctggggctttagctggaagtatactcaaaatgaacgaaggacttaaaaatttaatacaatttacaggtgacacgattgagcatttatggagagtaacaagtttaaatcaagcgataacattaggtatagacgacataaaaggtagtattaaaatcgggaaagatgcagatattgttatcatagatgatgcatgtaatgttgaaacgacgattaaaaatggaaaatatcatgctttcaaa

SEQ ID NO: 34486 - DNA, 1347 bp, Staphylococcus epidermidis
ttggaaacttcgaccataattagtttagctatattttttcttttgattgcattaacaacagtattcgttgggtcagaatttgcactagtaaaagtgagatcaacgcgtattgaacaattagtagatgagggtaataagagcgcaaaaattgtcaaaaaaatgatagacaatcttgattattacttatctgcctgtcaattaggtattacagtaacatctttaggcttaggttggttaggtgaaccgacatttgaaaagatgatgcacccactattcgagttattacatttacctagtcctttaacaacgacgatttcatttgttgtttcattcattgttgtgacatatttacatgttgtattaggcgaattggcacctaaatcatttgctattcaacatacagaacaacttgcacttttatattcaagaccattattttattttggtaattttatgaaaccacttatatggttaatgaatggttcttctcgtgtgattgtcagaatgtttggatttgatccagatgctcaaactgatgcaatgtcagaagaagaaataaaaattattataaacaatagttataacggtggagagattaaccaaaccgagcttgcgtatatgcaaaatattttttcatttgatgaacgtcatgcaaaagatattatggtgccacgtacacaaatggttacgctcaacgaaccatttaatgtagatgaattattagatactatcaaagaacatcagtttacaagatatccaatcactgaagatggtgataaagaccatgtaaaaggttttataaatgtcaaagagtttttaacagaatatgcgtcaggtaaaccgattaaaatcgccaattatattcatgaattacccatgatttcagaaacaactagaataagtgatgctcttgtaagaatgcaaagagagcatgtacatattagtttgattatagatgagtatggtgggacagctggtattttaacaatggaagatattttagaagaaattgttggtgaaatcagagacgaatttgatgatgacgaagttaacgatatagttaaacttgatgatcatacttatcaaattaatggtcgtgttttacttgatgatttaaatgaaaaatttggcatagagtttgaagattcagaagatattgatactattggtggttggttacaatcacaaaatactaatttgcaaaaagatgacttcgttgatactgaatatgatcgttggacgattacagaaatcgacaatcatcaaattatttgggtcaacttaaattatgaatttaatagtggacgtccttctgttaatgaagaacaagaagatgacgaacgtgat

SEQ ID NO: 34487 - DNA, 417 bp, Staphylococcus epidermidis
atgcaacaaatatatccaagtgtcactcacccatatcaattcgaacttaacaaagattttaacttttcagctgcacattacattccctttgaagaagcgggaaaatgtattcgtacacacggtcatacgtattacgtcaacttaacaatcgctggtaatacactagataaatgtggatttttagttaattttagagatttaaaaaagctagttcatgaacaatttgaccattatttgcttaatgacttacctgcttttaaggataaaagtccctcaacagaaattgtcgcacaaacgatttaccacattattcaaaaagagttaaatcaaagagagaatcaaccgaaatgtgttcaagtttatcttagagaaacaccttcaagttacgtagtttatagaccaaaggaagatcaagtg

SEQ ID NO: 34488 - DNA, 2187 bp, Staphylococcus epidermidis
atgtctaaatttatcgaaccaagtaatgaagagattaaacttgaaaaactttatcaagatatgggattaagtgataaagaatatgacaaagtggttgaaattcttggtagagaacccaacttcacagaagtaggaattttctcagtgatgtggagcgaacattgctcatataaacattctaaaccatttttaaaacaatttcctacgacaggagagcacgtattaatgggaccaggagaaggtgcaggtgttgtagatataggcgataatcaagccgtagtatttaaagttgagtctcacaatcatccatctgcaattgaaccatatcaaggtgcggcaactggagtcggaggtattattagagatattgtttcaattggtgcccgtccaattaatttactaaatagtcttcgttttggtgagttaactgtaaaacaaaatcaacgattacttaaaggtgttgtaagtggtattggtggatatggcaactgtattggtattcctactacggctggtgagattgaatttgatgaacgctatgatggcaatccattagtcaatgctatgtgtgtaggaatcattgatcatgatatggtccaaaaaggaacagctaagggtgttggtaattccgttatatatgtaggtttaaaaactgggcgtgacggtattcatggtgcaacatttgcatctgaagaacttactgaggaaagtgaaagtaaaagaccttcagtacaaattggagatccatttgtaggcaaaaagctaatggaagcaacattagaagcaattacttttgatgaactagtaggtatacaagatatgggagcagctggtttaacttcatcttcatctgaaatggcagctaaaggtggtagtggtttacatttaagacttgatcaagttccaacaagagaacctggaatttccccatatgaaatgatgctttcagaaacgcaagaaagaatgctgttagttgtagaaaaaggtacagaacaaaagtttttagatttattcaataaacacgaactagatagtgcagtaatcggtgaagtaacagacactgatagattcgtgcttacatacgatgatgaagtgtatgcagacattcctgtgcaacctcttgctgatgaggcaccagtgtatattttagaaggagaagaaaaggaatataatacatcaaaaaacgattacagcaatatagatgtacatgatacatttatcaagttattacaacacccaacaatagcatctaaacatcatttatatgaacaatacgatcaacaagtaggagcaaatacaattattaagccaggtttacaagcttcagttgtgcgcgtagaaggaacacaaaaagctattgcttcaactatagatggtgaagcacgttatgttttcaaccaaccttatgaaggtggaaaaatggttgttgctgaagcctatcgaaatttaattgcagtaggggcgacaccattggctatgactgattgtctaaactatggttctccagagaagaaagaaatctatcaacaattaatagattcaacaaaaggtatgtcagaagcttgtaaagtgcttcaaactcctgtagtttcaggaaatgtttcattatataacgagacacgtggaacctctatcttccctacacctgtcgtaggtatggttggtcttattgaagacgtgagctatctaaaagagtttaaacctaaagcaggagataagatttatttagttggtgaaacgcgtgatgactttggtggtagtcaattggaaaaattgttgtatggatcagttaatcatgagtttgaatctattgatttaagtgatgaagtttcaaaaggaaaattaatcaaacaggctattcgtaatggcattgcatctcatgtacaaacagttggtaagggcggcttattagttactttagctaaaattagtgcccattatgatttaggtatgcaagctcaattggatgttaccaatgcacaattatttagtgaaactcaaggacgatatattgttgttgttaaagaagggcaaactttggatatagatcaagctcaagaaattgggcatttaactcatcagcagttatttgatatatctaattcagacgtaaaaatgaaagaaaacgtttcagatatcaaacaaaaatgggaaggggctatagttcaatgtctaactactcaggat

SEQ ID NO: 34489 - DNA, 1938 bp, Staphylococcus epidermidis
atgagtttacccaagaagaaaataggaatttttgcgttcttcttattaacggtattcaccattactttgaagacatatttttcatattatgttgacttttctttaggtgtcaagggtttagtacaaaacttaatattgcttatgaatccctatagtttgattgcacttgtactaagtgttttcctattttttaaaggtaagaaggcattttggttcatctttattggaggatttttacttacgtttctactatacgcaaacgttgtgtacttcagatttttctcagatttcttaacttttagtacactaaaccaggcaggcaacgttgaatcaatgggtggtgcagtaagtgcttctttcaaatggtatgactttgtctacttcattgacactattatctatcttgctattttaatatttaaacgcaaatggttagataatagagcattcagtaaaaaattcgtacccgttgtgatggctacatcagtagcattatttttcttaaatttagcgtttgcagaaacagatcgtcccgaattattaacaagaacttttgaccataaatatcttgtgaaatacttaggaccatataacttcactgtttatgatggtgtaaaaacaatcgaaaataatcagcaaaaagcactagcttctgaagacgacttaactaaagtgctgaattacactaagcagaaacgtactgaacctaatcctgaatattatggtgcagcgaaaaagaaaaatataattaaaattcaccttgaaagtttccagactttcttaatcaataaaaaggtaaatggtaaagaggttacaccgtttttaaataaattatctagtggtaaccaagattttacgtatttcccaaactttttccatcaaacagggcaaggtaaaacatctgactcagagtttacaatggacaacagtttatatggcttgccgcaaggctcagcctattcactgaagggagataatacgtatcaatcattaccagctatactagaccaaaagcaaggttatacatctaatgtaatgcatggtgactacaaaacattttggaatcgagatcaagtttataaacatttcggtattgacaatttctatgatgctacttactatgacatgtctgacgacaatattgttaatcttggtttaaaagataaaccattctttaaagcatcagcagattatcaatctaaaatgaaaaagccgttttattcacacttaattactttaactaaccactatcctttcacattagatgaagaggatgcttctattgataaacctaataccggtgactcaacagtagacggttatatacaaacggcacactatctcgaccaagctttagaggaatatattactgaccttaagaaaaaaggtctatatgataactcagtcattatgatttacggtgaccattatggtatttctgaaaatcataataatgctatggaaaaattattaggtgagaagattacaccagctaaatttacagatttaaaccgcactggcttctggttaaaagttccaggtaaatcagggggcgtaaataaagagtatgctgggcaaatggatgttatgcctacattactacatcttgttggtattgatagcaagaattacctaatgtttggttctgacatgttctctaaacaacacaataacgtagtaccgtttagaaatggtgattttatcactgaagattataagtatgtgaatggtaaaatttactcaaataaagataatgaattgcttactgaaaaacctaaagacttcgataaaaataaaaaacaagtagagaaagatcttgaaatgagtgacagcgtgttaaatggtgacttgttcagattctacaaaaatcctgactttaaaaaagtaaatcctggtaaatatgaatataaatcaggtccaaaagggaacgaaaaaaaa

SEQ ID NO: 34490 - DNA, 1071 bp, Staphylococcus epidermidis; identical to SEQ ID NO: 34313

SEQ ID NO: 34491 - DNA, 1881 bp, Staphylococcus epidermidis
atggaagcatacaaaattgaacatttaaataaatcctatgcagataaagaaatttttaatgatcttaacctatctatatctgagcatgaaagaattggattagtaggtatcaatggaacaggtaaaagtacactattaaaagtcattggtggtctagatgaagattttactgcagatattacccaccctaatcaatatcgcattcgttattcctctcaaaaacaagacctcaatggccatatgactgtgttcgaagctgttttaagttcggatactcctacattaagaattataaaaaaatatgaagaagcagttaatcgctatgcgttagatcaaagtgactctaattttaataaaatgatggaagcacaagaagaaatggatcaaaaggatgcatgggactataatgcagaaattaaaacgattttatctaaactagggattcacgatacaactaagaaaatagttgaactttcgggtggtcaacaaaaaagagttgtattggctaaaactctaatagaacaaccggatttacttttgctagatgaaccgacgaaccatcttgactttgaatccatccgttggctcattaattatgtcaagcaatatccacatacagttttatttgtaacacatgatcgctactttttaaatgaagtatcgacgcgaattattgaactggatagagggaagttaaaaacatatccaggtaattatgaagattacatagtaatgcgtgcagaaaatgaattagtagaacaaaaacaacaagaaaaacaaaaagcattgtataaacaagagttagcatggatgcgagcaggagcaaaggcaagaactactaaacaacaggcacgtatcaatagatttaatcaactagaatcagacgttaagacgcaacatacacaagataagggtgaacttaatcttgcatattcaaggttaggtaaacaagtatatgaattaaagaatttatcaaaatcaattaataataaagttttatttgaagatgtcactgaaattattcaaagtggtagacgtataggtattgtaggacctaatggagcgggaaaaacaacattacttaatattttaagtaatgaagatcaggactatgagggtgagcttaaaatcggtcagactgttaaggtagcttattttaagcaaacagaaaagacacttgaccgtgatattagagtgattgactacctaagagaagaaagtgaaatggctaaagaaaaagatggtacctcaatttcagttacacaattgttagaaagatttttatttccgagcgctacacacggtaaaaaagtttataaactctcaggtggagaacaaaaacgtctgtatttattgcgtttacttgttcataaacctaatgtactccttttagatgaaccgactaatgatttagatactgaaacacttacgattttagaagattacattgatgatttcggtggttctgtcattacggtcagtcatgatcgttatttcttaaataaagtggtacaagaatattggtttattcatgatggtaaaatcgaaaaaattattggatcatttgaagattatgaatcttttaaaaaggaacatgaacgccaagccatgctatctaaacaaactgaacaacaaaataaacataagcatcaaccaaaaaagaaaacaggactatcttataaagagaagttagaatacgaaacaattatgacgcgtatagaaatgactgaaacgcgtttagaagaccttgaacaagaaatgattaatgcaagtgataattatgcaagaatcaaagaacttaatgaggaaaaagagcaacttgaagcaacctatgaagcagacatcacgagatggagtgagcttgaggaaattaaagaacaa

SEQ ID NO: 34492 - DNA, 1776 bp, Staphylococcus epidermidis
atgcaagagactttatcgcattattttggttataagtcatttcgaccaggacaagaagaaattataactaaaatattaaatcatcagcatacactgggggtactacctaccggtggcggtaaatcgatatgctatcaagtaccaggtttaatgcagggtggcacaactattgttataagtccacttatttctttgatgaaagaccaagttgatcaactacaagcaatgggaattcaagctgcatatttgaatagtagtttgactcataaacaacaaaaagagattgaagagcaaataaagcgtggtgccattcagtttttatatgtagctccagagcgctttgaaaatactttttttctaaatttattacgtaaaatagaaataccccttatcgcttttgatgaagcacactgtatatcgaagtggggacatgattttagacctagttaccaaagtgtcatacaaaaagtttttaccttacctcaaaacttcacaatagttgcacttacagctacggcaactgctgaagttcaacaagatatcatgtctaagttatcaattggacaaaatgatgttgtcaaaacaagtactaaaagacgcaatttaatcttcaaagtcaatccgacttatcagcgacaaaaatttgttgtggattatgttgcaaatcatgaaggacaggcaggaatcatttattgttccactcgtaagcaggtagaagaattacacgaagctctaaatagtgaaaaaattaagagcacaatttatcatgctggtttaacgaataaagagagaattgaggcgcaaaatgatttcttgtatgatcgtgtagaggttgtcattgcgacaaatgcatttggtatgggtattgataaatcaaatgtacgttatgtcattcactataacatgcctggagatttggaatcttactatcaggaagctggacgcgcgggacgtgatggtttaaaaagtgagtgtatccttttgtttagtgaacgagataagggattacatgagtattttattactgtatcccaagctgatgatgactataaagataaaatgggcgaaaaattaacgaaaatgattcaatataccaaaacgaaaaagtgtttagaagcgacaattgttcattattttgaacccaatgaaaatttagaggaatgcaatcaatgtagtaattgtatacaggaaaataaaacgtatgatatgactcgtgaagcgaaaatgattattagctgtattgctcgaatgaagcaacaggaaaattatagtgttattatacaagttttacgtggagaagtgacagattatataaaacaccatcattataatgaattaacgacacatgggttgatgaaaaattatacaacatctgagttatcacacttaattgatgagctacgtttcaaaggatatttaaatgaaaatgatgaaattcttatgtgtgatacatcagtgaaacaattactaaataatcataccaaggtttataccactccgttcaaacaaaaaactaaagagaaggtatttatcaacactgttgaaggtgtggatagagcgttatatcgtgagcttgttgatgtacgtaaacagctaagtgataaacttggaatagcacctgtaagtatattttctgattacacgctcgaagaatttgctaagcgtaaacctgaatcgaaacaagaaatgattgctattgatggtgtaggtagttataaattaaagcattattgtcctaagtttatcgaaaccatacaaagctataaaactagaata

SEQ ID NO: 34493 - DNA, 1170 bp, Staphylococcus epidermidis
atgaaacttgctacgctaaataaaggcaaagaaacaaagtatttaaaccactatccattaatagatgaagaagatttatttgaacatgatcatcttaaagaaggtgatttgataacactggtgacagagcaacaacaatatatagctactggatatattggaagacaacataaaggattaggatgggtattgagttataatcaaaatgaagagattaacactttgttttttaaacgtttatttgaagctgcattagaagagcgacaatactatttcaacatagaaggtacaaatgcatttagattatttaatgctgaaggtgacggtgtaggtggcctgacaattgataattataacggacatcttttaattcaatggtattcgaaaggaatatataaatttagatttcctatcttagaagcaatcaaagaggtatatgaatacacttcaatttttgagaaaatgcgttttaaaggtacttcctacactggtggctttgtagaaggtaatgctcctgaatttcctatcgttgtagaagaaaattttaccttttataatgtagacctaaacgatggtcttatgactggtatatttttagatcaaaaagaagttagaaaaaaattaagagatcagttttcagaaagacgacacgtacttaacttattcagttacactggagcgttttcagtaatagcagctgaaaatgcaaactcaacaacaagtgtagacttagcaaatcgctctagagggctaactgaagaaaattttggtttaaatggtattaatcctaaatctcaatatatttatgttatggatacgtttgatttttataattatgcaggacgacatggacatcaatacgatacaattgttattgatccacctagctttgcgagaaataagaaaaaaacattctctgttcaaaaagattataatttattaattgaaggagcccttaacattttatcgccaggaggtacattactattatgtacgaattcaagtgcattttctcttaaggcatttaaaaacgtaataaagaaaacattagcccaaaataatattgtatatgaaataaatgaagtaatggggttacctaaagattttaaaactcatcctcactacaaaccttcaaaatatttaaaagcagtatttgtaacaataaaacat

SEQ ID NO: 34494 - DNA, 1554 bp, Staphylococcus epidermidis
atgtgtttacttatttatctcttaataaggaggaagcgacacatgaatgagttctttgcgacattaagtgatagaaaagggcagctattttctactataattgaacacattcaactttcttttatagcgcttttcattgcaactcttatagcagtaccaattgcaattttgctcactaaaacaaaaaaactttcagaaatcgtcatgaatattgcagctgttctacaaacaattccatcactggcactacttggtttgatgataccaattttcggaattgggagacttccggcaattatcgccttagttgtatatgcgttacttcctattctacgtaatacatacacaggtattaaggaggtcgatccctctcttattgaagcggctaaaggcattggaatgaaaccacttagaagattgaccaaagtcgaactccctattgcaatgcctgttatcatggcaggaatacgcacagctatggtattaatcattggtactgctacactcgcagctttaataggcgctggtggtctaggagatttaatattattaggcattgatcgtaacaatagtgcactcattttaataggtgctattccagctgcacttctagctattatttttgattttattttaagatacatggaacgtttatcatataaaaaattgctcatttctttagggacaattgtaattgtgattatcatagctattgccatacctatggcagcgcaaaaaggtgataaaatcacattcgcaggcaagctaggttcagaaccgtcaattattacgaatatgtataaaatacttattgaagaagacacagatgatactgtagaagtcaaagatggcatgggtaaaacctcattcttatttaatgcgcttaagtcagatgaaattgatggttatttagaatttacaggtactgtattaggtgaattaacgaaagaagatttaaagtctaaaaaagaaaacgatgtatatcaacaagcaaagtctagtttagaaaaaaaatatgatatgacaatgcttaaaccgatgaaatataataatacgtatgcattagctgtaaaacgtgactttgcaaaaaaatatcaaattaagacaataggtgatttacgcaaggtagaagataaacttaaaccaggttttacattggaatttaatgatagaccagatggatacaaagctgttaaaaaaacgtatcatcttaatctttctaatgttaaaactatggaacctaaattacgttatactgcagttaaaaagggagatattaatctcatagacgcatactctactgatgcagaattaaaacaatataacatggtagtattaaaagatgatcaacatgtatttcctccataccaaggagcaccgctatttaaagaaaaatatttaaaagaccatcctgaagttaaaaaaccgctcaataaattggcgaatagaatcacagatgaagaaatgcaagaaatgaactataaggtaacagtgaagaaagaggatccttataaagtagcaagagaatacttagaaaaagaaaaattaataaaa

SEQ ID NO: 34495 - DNA, 264 bp, Staphylococcus epidermidis
atggaacaaaaatcatatgtaatcacagacgaaacagggattcatgctcgccctgctacaatgctagtacaaactgcatcaaaatttgattcagatattcaattagaatataacgggaagaaagttaatttaaaatcaatcatgggtgtaatgagcttaggtgtaggtaaagatgctgaaataactatttatgctgacggtagcgatgaaactgacgcaattcaatctatcactgatgtcttatcaaaagaaggtttagctgaa

SEQ ID NO: 34496 - DNA, 1716 bp, Staphylococcus epidermidis
atgtctaaattaattaaagggattgctgcatcagatggtgtggcaatcgcaaaagcttacttaattgtagagccagacttatcctatgacagtaacgaaaaagttactgacatagaaagtgaagttgaaaagtttaatgacgctatcgaagcttcaaaaatcgaattaactaaaataagaaataatgccgaagctcaattaggtgctgataaagcagcgatttttgatgcacatttacttgttttagatgatccagaattaatacaacccattcaagacaaaattagaaatgacaaagtcaatgctgcaactggtttggatgaagtaacgacacaatttatttctatttttgagtcaatggataatgaatacatgaaagaacgtgcagctgatatcagagatgtttctaaacgtgtattggctcatattctaggtgtagatttacctaatcctagtttaatcaatgaaagtgctgtcattgtaggtaatgacctcacaccttcagatacagcacagttaaataaagaatttgttcaaggttttgtaactaatatcggtggtagaacaagccactctgcaattatgagtcgttcattagagattgcagctgttgtcggtactaaatctatcactgaagaagttaaacaaggtgatatgattattgtagatggtatgtccggagatgttatcatagatcctacagaagatgagttaattgcttatcaaaataaacgtgagcgtttctttgaagataagaaagaacttcaaaaattgcgcgatgctgatacagtaacagttgacggtgttcatgctgaactagctgctaatattggtactccagatgacttatcaggagttattgataacggtgcacaagggataggtttataccgtacagaattcttgtacatgggtagagatcaaatgcctactgaggaagaacaattcgaggcttataaaaaggtacttgaaactatggacggtaaacgtgtagttgtacgtactttagatattggcggagataaggagcttccatacttagatttgcctaaagaaatgaatccattcttaggttatcgtgcgatacgtttatgtttagcacagccggaaatctttagaccacaattacgtgcattactacgtgcttcagtctatgggaaattgaatattatgttcccaatggtagcaacaattaaagaattccgtgacgctaaatcaatgcttcttgaagagaaagaaaatcttcttcgcgaaggttacgaagtttcagatgatattgaattaggtattatggttgaaattccagctaccgcggcacttgctgatgtatttgctaaagaagtagatttctttagtataggaacgaatgacttaattcaatacacattagctgctgaccgtatgtctgaacgagtttcatacttatatcaaccatataatccttcaattttacgattagttaaacaagttattgaagcttctcataaagaaggtaaatggactggtatgtgtggtgaaatggctggagatcaaacagctgtgcctttattattaggtttaggtttagatgagttctcaatgagtgcgacttctatcctaaaagctagaagacaaatcaatggtttaagtaaaaatgaaatggctgaactcgctaatagagctgttgaatgctcaacgcaagaggaagtcgttgatttagttaaccaattagctaaa

SEQ ID NO: 34497 - DNA, 2607 bp, Staphylococcus epidermidis
atgttatctgtaactaaaaaaaatacatatgaatcaaacaaagatgaagtcacacaaatgattgattcattagcagaaaaaggacaagaagctctaaaagaactatctaaaaaatcacaacatgagattaatgacattgtacatcagatgagcatggctgctgttgatcagcatatgcatttagctaaactagcttacgacgaaacaggtagaggtatttatgaagacaaagctatcaaaaatttatatgcctcagagtacatatggaattcaatcaaagacaataaaacagtaggtatcataggtgaagataaacaaaaaggattaacgtatgtagctgaacctataggcgtgatttgtggagtgacaccaacgaccaaccctacatctacaactattttcaaagcaatgattgctattaaaacaggtaatccaattattttcgcatttcatccaagtgcacaacaatcatcaaaatatgctgctaaagtcattttagaagctgcaacaaaagcaggtgctcctaaagattgtattcaatggatagaagtgccatcaattgaggcaactaaacaattaatgaatcataaagatattgctttagttctagcgactggaggctctggaatggtaaagtccgcatattcgacaggtaaacctgcattaggagtcggtccaggtaatgttcctacttatattgaaaaaactgctcatatcaaacgtgctgttaatgatatcattggttctaaaacttttgataatggtatgatttgtgcttctgaacaagtcatggttgttgataaagaagtatacactgacgtcgttaaagaattcaaattacaccaaacatattttgttaataaaaatgaactacaacaattagaagatgccatcatgaatgaagataaaactgcagttaaacctgatatagttggtaaatctgctgtagatatagcgaaattgtcaggaattagtgttccagaaaaaacaaaattattagtcgcagaaattgatggaattggaaaagattatcctttatcacgtgaaaaattatcacctgtactcgcaatggtaactgcaaaatcaacaggacatgcactacaaatttgtgaagacatattaaaatttggtggtttaggtcacactgctgtaattcacaccgaggatagtcaattacaacaaaaattcggtctaaaaatgaaagcttgccgtgtattggtaaatacaccttctgctgtcggaggaattggaaatatgtataatgaactcattccttcactcacgttaggttgtggttcatatggtagaaattctatttctcataatgtaagcgcagtagacttattaaatattaaaacaatagcaaaacgtcgtaataatatgcaatggtttaaactcccacctaaagtttattttgaagaaaattcagttatgtatttgacagagatggataatgttgaacgtgtaatgatagtttgtgatccaggaatggttaatattggttatactgatatagttgaacaagtgctgagacgccgagaaaaccaaccacaaatcaaagtgtttaacgaagttgaacctaatccatcaactcatacagtctataaggggttagaaatgtttataaatttccaacctaatactattattgcactcggtggcggttcggcaatggatgcagccaaagcaatatggatgttctttgagcatccagaaacttcattttttggggcaaaacaaaagttcttagatattcgtaaacgtacttataaaattaccaaacctaaaaacgcaaaatttatatgtataccaacgacatcaggaactggttctgaagtgacaccttttgcagtaattactgatagcgagacacacgttaagtatccactagcagattatgcgttaactcccgatattgctatcgtcgatccacaattcgtattaagtgtacctaaagatgttgccgcagatacaggaatggatgttttgacacatgccattgaatcttacgtctctgtcatggcttcagattatacaagaggcttaagcttacaagcaataaagttaacttttgattatctaaaatcatcagttcaagaaaatgacaaacactcacgagaaaaaatgcataatgcttcaacaatggccggtatggcatttgccaatgcttttttaggaatttctcattctatcgcacataaaattggtggtgaatatggtattccccacggcagaacaaatgctattttattaccacatgtcattcgctataatgccaaagatccacaaaaacatgcactgtttcctaaatatgatttctttagagcagatactgactatgctgacattgcaaaatttttaggactcaaaggtaatacaactgaagaattagtggatgctctagctaatgcggtgtatgatttaggatgttcagttggtattgatatgaatttaaaatcacaaggcgtaactgaagagcttcttcactctactatagacagaatggctgaattagcatttgaagatcaatgtacaactgctaatccaaaagaaccgctaattagtgaacttaaaggcattatcgaaacagcatatgattatgaaaga

SEQ ID NO: 34498 - DNA, 234 bp, Staphylococcus epidermidis
atgactgatacagtgattatttatacacaagatgactgtccaccttgtgcttttattaaaaattatttagtaaataaaaatataaaatttacagaaaaaaatatcaaaaaccaaaaatataaaaatgaaatgatggattacgatgcttttgctacaccttttattttgcttaaagggatgccaatgtatcaagtagatatggaaaaattgaatgatgaattgaatattacacct

SEQ ID NO: 34499 - DNA, 1680 bp, Staphylococcus epidermidis
atgaaacaactacattcaaatgaagtaggtgtatatgcacttggtggtttaggtgaagttggaaaaaatacctatgctgttgagtacaaagatgaaattgtaatcattgatgctggaatcaaattccctgacgataatcttttaggaattgattatgtaattcctgattacacttacttagaacagaaccaagataagattgtcggtctgtttattactcatggacacgaagaccatataggtggtgtgcccttcctattaaaacaaattaatgtacctatttacggtggtccattagcgttaggtctcattcgcaataaactagaagaacatcatttgcttagaacgactgaattacatgaaatagatgaaagtagcgtaattaagtctaagcattttgaaatttctttctatctaaccacacatagtattccagaagcatatggcgttatagtcgatacacctgaaggtaaaattgttcatacgggagacttcaaatttgactttactcctgtaggtgagcctgctaatatagctaaaatggcccaattaggtcatgaaggtgtgttgtgcttactatcagactcaacaaatgcactagttccagatttcactttaagtgaacgtgaagttggacaaaatgtcgataaaattttcagaaattgtaagggtcgtattatctttgcaacttttgcttctaatatttatcgtgttcaacaagccgttgaagcagcaattaaatataatcgtaaaatcgttacatttggacgttcaatggaaaacaatatcaaaattggtatggaactaggatatatcaaagcgccaccagaaacgtttatagagcctaataaaataaatagtgtacctaaacacgagttactcattctttgtactggttctcaaggtgaacctatggctgcattatcaagaattgcaaatggtacacataagcaaataaaaattataccggaagacactgtagtatttagttcttcgcctattccaggtaacactaagagtatcaatcgtacaattaatgcgttgtacaaagctggtgcagatgtgattcatagtaaaatttcaaacattcacacttctggacacggttctcaaggtgatcaacaattaatgttacgtctgattcaacctaaatacttcctgccaattcacggtgaatatcgtatgcttaaagctcatggtgagactggtgttcaatgcggtgttgatgaagataatgtatttattttcgatatcggtgatgtacttgctttaacacatgattctgcacgaaaagcaggaagaattccttccggcaatgtacttgttgatggcagtggtataggtgatattggcaatgttgtcatcagagatcgtaaattactttcagaagaagggttagttattgttgttgtgagcattgactttaatactaacaaattactatctggccctgatattatttcacgcggttttgtttatatgcgggaatctggtcaattaatttatgatgctcaacgtaaaattaaaggcgatgtcatttctaaacttaacagcaataaagatattcaatggcatcaaattaaatcttcaattatcgaaacattacatccttatctttatgaaaaaacagctcgaaaacctatgattttacctgtgataatgaaagtaaatgaagataaa

SEQ ID NO: 34500 - DNA, 417 bp, Staphylococcus epidermidis
ttgacgaaagaaggtgattcaatgaaagtagtatattattcattttctggtaatgttagacgatttattagtcgtgctggtattaaagatacatttgaaattactcaagataattgtaacgaatcagttaatgaaccctacattttagttactggcactattggatttggagaggtgccgcagccggttcaatcttttttaaatgtaaatcatactcagttacaagctgttgctgcgagtggaaatcgaaattggggacaaaatttcgctaaagctggccatacaatttctgaggaatataaagttccattaatgatgaagtttgaagtacaagggacaaataaagacattattgaatttaaggataaggtgggcaatttcaatgaaaaccatggaagaaaagaaatacaatcatat

SEQ ID NO: 34501 - DNA, 2103 bp, Staphylococcus epidermidis
atgaaaaccatggaagaaaagaaatacaatcatattgaattaaataatgaagtgaccaagagaaaagacaatggtttctttgatttagagaaagatcaagaagcattgaaagtgtatcttgaagaaatccatgataaaatgatttcttttgatgatgaaatcgaaagacttcattatcttgttgataataatttttattttaatgttttcgaaaaatatagcgaagcagaattaattgaaattactgaatacgcaaaatcaattcacttccaatttgctagttatatgtcggcaagtaagttttataaggattacgctttaaaaacgaatgataaaactaagtttcttgaggattataatcagcacgtcgcaatcgttgcactttatttagcgaatggtaatgttaaacaagcaaaacaatttatttctgcaatggtggaacaacgttatcaaccggcgacaccaacattcttgaatgcaggtagagcaagacgtggagaacttgtttcatgtttcttattagaagtagacgatagcttaaattctatcaatttcattgattcaactgcaaaacaacttagtaaaattggtggtggtgtggccattaatttatcgaaacttcgtgcacgtggagaagcaattaaaggaattaaaggtgtagctaaaggtgttttacctgttgctaaggcacttgaaggtggatttagttatgcagatcaattaggacaacgtcctggcgctggggcagtgtacttaaatattttccattacgatgttgaagagtttttagatactaagaaagtgaatgcagatgaagatttacgtttatctactatttcgactggtcttattgtaccttctaaattctttgatttggctaaagagggtaaagatttctatatgtttgcacctcatacagttaaacaagaatacggtgtgactttagatgatattgatttagaaaagtattacgacgatatggttgcaaaccctaatatcgataaaaagaaaaaagacgcacgtgaaatgttaaatatgattgcacaaacacaattacagtctggttatccatatcttatgtttaaagataatgcaaacaaagtacatgcgaattcaaatattgggcaaattaaaatgagtaatttatgtactgaaattttccaattacaagagacatcagtaattaacgactatggaattgaagatgaaattaaaagagatatttcatgtaacttaggctcattgaatatagtgaatgttatggaatcaggtaaattcagagattctgtgttcacaggtatggatgctcttacagttgtaagtgatgaagcaaatattcaaaatgcaccaggtgtaaaaaaagcgaatagtgaactacattctgttggactaggagtaatgaacttacatggttatctagctaaaaataaaattggctatgaatctgaagaagcaaaagactttgctaatatattctttatgattatgaactattattccatcgaacgttcaatggaaattgcaaaagagcgtggagaaaagtatcaagactttgagcaatcagactatgcaaatggtaaatattttgaattctatacatctcaagaatttgaaccaaaatttgaaaaggttcgccaactttttgatggtatcgatatacctacttcaaatgattggaaagaattgcaaaataaagtagaacaatatggactttatcacgcttatagattagctattgctccgactcaaagtatttcttatgttcaaaatgcgacaagttctgttatgcctattgttgaccaaattgaacgtcgtacgtatggaaatgcggaaacattttatccaatgccatttttatcaccagaaacaatgtggtactacaaatcagcatttaatactgaccaaatgaaacttattgacttagtagctacaattcaaactcacgtagaccaaggtatttcaacgatactttatgttaattcagaaatttcaacacgtgaactttcaagattatatgtatatgcacaccataaaggccttaaatctttatactatacacgtaataaattattaagtgtggaagaatgtacaagttgtgcgatt

SEQ ID NO: 34502 - DNA, 966 bp, Staphylococcus epidermidis
atgaaggcggtaaattggaacacccaagaagatatgactaatatgttctggcgtcaaaatatctcacaaatgtgggtggaaacagaatttaaagtatcaaaagatatagcaagttggaaaacattaacagattctgagaaaaatacttttaaaaaagcgcttgcaggtttaacaggtttagatacacatcaagctgatgatggtatgccattaatcatgcttcatactactgatttaagaaagaaagctgtttattcatttatggctatgatggaacaaatccatgcgaaaagttattctcatatcttcactacattattaccatctagtgaaaccaactatttattggatacttgggttattgaagagccacatttaaaatataaatcagataaaattgtagaaaattaccacaaactttggggtaaagaagcatcgatttacgatcaatatattgctcgtgtttctagtgtattcttagaaacatttctattctattctggcttctattatccattatatctcgcaggacaaggaaaaatgactacgtcaggtgaaattatacgtaagatacttttagatgaatctatacatggagtgttcacaggtttagatgcacaaagtctacgtaatgagttatctgaaagtgagaaacaaaaagctgatcaagaaatgtacaaattattaaatgaactttatgataatgaagtttcatatacacatttattatatgatgatattggtcttgctgaagatgtattaaattatgttcgatataatggaaataaagcattatcgaatttaggttttgaaccatatttcgaagagagagagtttaaccctattattgaaaatgcactagatacatctacaaagaaccacgatttcttctctgttaaaggtgatggctatacattggctttaaatgttgagcctctacgtgatgaagactttgtttttgataat

SEQ ID NO: 34503 - DNA, 1110 bp, Staphylococcus epidermidis
atggctcctaagttacaagcccaattcgatgcagttaaagttttaaatgagactcaatcgaaatttgaaatggttcaaattttggatgaagacggaaatgtcgttaatgaagacttagtacctgatttaacagacgaacaattagtggaattaatggaaagaatggtatggactagaattcttgatcaacgttctatttcgttaaatagacaaggacgtttaggtttctatgcaccaacagcaggacaagaagcttcacaattagcatctcagtatgctttagaaagtgaagacttcattttacctggttatcgtgatgtgcctcagattatttggcatggcttacctcttacagacgcattcttattctcaagaggacacttcaaaggtaaccaattccctgagggagttaatgcacttagccctcaaattattatcggtgcacaatatattcaaactgccggtgtagcgtttggacttaaaaaacgtggcaaaaatgcagtcgcaattacttatacaggtgatggtggttcatcacaaggtgacttctatgaaggaattaactttgcatctgcatacaaagcacctgcaatttttgtaattcaaaacaataactatgccatctctacaccacgtagtaaacaaacagctgcagaaacattagcacaaaaggctatttcagttggtatccctggaattcaagttgatggtatggatgctttagctgtttatcaagcaacattagaagcacgtgaacgtgcagtagcaggagaaggtcctactgttatcgaaactttaacttatcgttatggaccacatactatggctggtgatgatcctactcgttatagaacttcagatgaagatgctgaatgggagaaaaaagacccattagtacgtttcagaaaatatttagaagctaaaggtctttggaatgaagacaaagaaaatgaagtggttgaacgtgcaaaatctgaaataaaagcagctattaaagaggctgacaatacagaaaaacaaactgttacttctctaatggatatcatgtatgaagaaatgcctcaaaatttagcagaacaatatgaaatttacaaagagaaggagtcgaag

SEQ ID NO: 34504 - DNA, 972 bp, Staphylococcus epidermidis
atgaaatttatttttaaaggttataccttatttattttattagtgattttaactattgtctctttatttataggggtgagtcagctctctttaatagatattttccatttaagtgatgaacaaataaacattttgttttcgagtcgaattcccagaacagttagtattctactttcgggtagttcactagctttatcaggattaattatgcaacagatgatgcaaaataaatttgtaagcccaacgactgctggtactatggagtgggcaaaattaggtattttaatgtcattgttgttctttcctaatggtcccattttaatcaaattattatttgctgttgttctaagtattgttggaacgtttttatttgtccaattaattaatcttatccgtgtaaaagatgtaatctttgttccacttttaggcattatgattggtggtattttatccagttttactacatttgtagcgttgagaaccaatgctttacaaagcattggaaactggttaactggtaactttgcagttataacgagtggtcgttttgaggtgttgtatctcacaataccattacttattttggcatttgtatttgcaaatcattttactattgcaggtatgggaaaagactttagtcataatttaggtgtaagttatgaaaaaatcattaaaatagcattattcataacagcaacgctaacagcattagttgttgttactgttggaacattaccatttttaggtttaatcgtaccgaatatcatatctatctatagaggcgatcatttgaaaaatgctttaccacacacgcttatgctcggtgcaatttttgttttaattgctgatattattggtagaataattgtttacccttacgaaattaatattggattgacgataggtgtatttggcacaattattttcctaatcttgctaatgaaaggtaggaaaaattatgcaaatgagcgc

SEQ ID NO: 34505 - DNA, 975 bp, Staphylococcus epidermidis
atggcacaaatgacaatggttcaagcgattaacgatgcgcttaaaagtgaactcaaaagagacgaagacgttttagttttcggtgaagacgttggtgttaacggtggtgtattccgtgttactgaaggtttacaaaaagaatttggcgaagatcgagtatttgatacaccattagcagagtctggaattggtgggcttgcactaggcttagcagtgactggcttccgtcctgttatggaaattcaattcttaggattcgtttatgaagtatttgacgaagtagctggtcaaattgctcgtactcgtttccgttcaggtggaactaaaccagcgcctgttacaattcgtacaccttttggtggtggcgtccacactccagagttgcatgctgataatttagaaggtatcttagctcaatcacctggtttgaaagtagttattccatcaggtccttatgatgctaaaggattattaatttcttctattcaaagtaatgatccagttgtatatctagaacatatgaaattatatcgttctttccgtgaagaggttcctgaagaagaatacaaaattgacattggaaaagccaatgttaaaaaagaaggtaatgatattactctaatatcttacggggcaatggtacaagaatcactaaaagctgctgaagagttagaaaaagatggttattcagttgaagttattgacttacgtactgtacaaccaattgatatagatactttagtagcatcagttgagaaaactggacgtgctgtagttgtacaagaagcacaacgtcaagctggtgtgggtgcacaagtggcagcagaattagcagagcgagcaattctttcattagaagctccaatagctcgagtagccgcatcagatacaatttatccatttactcaagctgaaaacgtttggttaccaaataaaaaagatattatagagcaagctaaggcaactttagaattc

SEQ ID NO: 34506 - DNA, 1299 bp, Staphylococcus epidermidis
gtggcatttgaatttagattacccgatatcggggaaggtatccacgaaggtgaaattgttaaatggtttattaaagccggcgatacaattgaagaagatgatgtattagcagaagttcaaaatgataaatctgtagtagaaattccttctccagtaagtggtactgttgaagaagtgttagtagatgaaggaacagtggcagtagtaggagatgtcatcgttaaaattgatgcacctgatgcagaagaaatgcaatttaaaggtcatggcgatgatgaggattctaagaaagaagaaaaagaacaagaatcaccagtgcaagaagaagcttcatcaactcaatcacaagaaaagacagaagtagatgaaagtaaaactgttaaagcgatgccgtcagtgcgtaagtatgcacgtgaaaatggtgtcaatattaaagctgtaaatggttctggtaaaaatggacgaatcacaaaagaagacatcgatgcatacttaaatggtggtagttccgaagaaggttcaaacactagcgcagcatctgaatcaacttctagtgatgtcgttaatgcttctgcaacacaagcattaccagaaggcgacttccctgaaactacagaaaaaatacctgcaatgcgcaaagcaattgctaaagcaatggttaattctaaacacactgcacctcatgttacattaatggatgaaattgatgtgcaagaattatgggatcaccgtaagaaatttaaagaaattgctgctgaacaaggtacaaaacttactttcttaccatatgttgttaaagcattagtttctgcacttaaaaaatatccagcacttaatacttctttcaatgaagaagctggagaggttgtacacaaacattactggaatattggtattgctgcagatacggataaaggattattagtaccagtagttaaacatgccgatcgtaaatcaatattcgaaatttctgatgaaattaatgaactagctgtaaaagcacgtgatggtaaattaacttcagaagaaatgaaaggtgcaacatgcacaattagtaatatcggttccgctggtggacaatggttcactccagttatcaatcacccagaagtagctatcttaggaattggccgtatcgctcaaaaacctatcgttaaagatggagaaattgtagctgcaccagtgttagctttatcattaagctttgaccatagacaaatcgatggtgctactggacaaaatgctatgaatcacattaaacgcttattaaataatccagaattattattaatggagggg

SEQ ID NO: 34507 - DNA, 1404 bp, Staphylococcus epidermidis
atggtagttggagatttcccaattgaaacagatactattgtaataggagcaggtccaggtggatatgtcgcagccattcgcgcggctcaattaggacaaaaggtaacaatcgttgagaaaggtaatttaggtggtgtatgcttaaacgttggttgtataccttcaaaagcattactacatgcttctcatcgctttgttgaagcgcaaaattcagaaaacttaggggtaattgctgaaagcgtttcgttaaactatcaaaaagttcaagaattcaagacttctgtagttaataaattaactggcggtgttgaaggacttttaaaaggtaacaaagtagagattgttagaggtgaagcttatttcgttgataacaatagtttacgtgtcatggacgaaaagagtgctcaaacttacaatttcaaacatgcgattatagctacaggttcaagaccaattgaaattccaaattttgaatttggtaaacgtgttatcgattcaacaggagctttaaatctacaagaagtacctaacaaactagttgtagttggtggcggatatatcggttctgaattaggtactgcttttgcaaactttggctctgaagttactatccttgaaggtgcaaaagatattttaggcggatttgaaaagcaaatgacacaacctgttaaaaaaggtatgaaagaaaaaggtatcgaaatcgttactgaagcaatggcaaaatctgcagaagaaactgaaaatggtgtcaaagtaacttatgaggcaaaaggtgaggaacaaactatcgaagctgattatgtattagttacagttggccgtcgccctaatactgatgaattaggattagaagaacttggtctgaaatttgctgatcgtggattactagaagtggacaaacaaagtcgtacttctattgaaaatatctttgcgattggagatattgtacctggattaccattagctcacaaagctagttatgaaggtaaagttgctgctgaagcgatagatggtcaagccgcagaggtagactatattggtatgccagcagtttgctttacagaaccagaattagcacaagttggttatactgaagctcaagcaaaagaagaaggtttatcaattaaagcttctaaattcccttatgcagctaatggacgagctttatcattagatgatacaaatggttttgttaagttaattacacttaaagaagatgatacgcttattggagcacaagttgtaggtactggcgcatctgatattatctctgaattaggtttagctattgagtcaggtatgaatgctgaagatatcgcattaactgtacatgcacacccaactttaggtgaaatgacaatggaagctgctgaaaaagcaattggttatccaattcatactatg

SEQ ID NO: 34508 - DNA, 312 bp, Staphylococcus epidermidis
ttggcaaaggtttatggatcactcatagataatgaaacacgatgtacacattattattcatctttagatgttattgccattaaatttaaatgttgcaacaaatattatccgtgttataaatgtcataatgaacacgtatctcatacaattgaaagatgggctgaaaatgagtttgatgaaaaagctattatgtgtggtgtttgtaaacatgagatgcgtattcgtgactatatgatggtagaaatgtgtcctcgttgtaaagcgcattttaacagtcgttgtaaatttcattatcatttatattttgaagta

SEQ ID NO: 34509 - DNA, 918 bp, Staphylococcus epidermidis
ttgaataaaaatgacatcttacgcggattagagtcaattcttcctaaagatattattaaagtggatgaacctctcaagcgttatacatatacagaaacaggaggagaggcagatttttatttatcccctaccaaaaatgaagaagtccaagccatcgtaaagtttgcccatgagaacagtataccggtaacttatttaggaaatgggtctaacattatcattcgagaaggtggaattcgaggaatcgtcctcagcttattatctctcaatcatattgaaacctctgatgatgcaattatagcaggtagtggtgcagcaattattgacgtttcaaatgttgcacgtgaccatgtattaaccggtttagaatttgcatgcggtatccctgggtcaattggtggcgccgtattcatgaatgctggtgcttatggcggagaagttaaagactgtattgactatgcattatgtgtcaatgaaaaaggtgatttattaaagctcactacagctgaactggaattagactatagaaatagtgtggtacaacaaaaacatttagttgtattagaggctgctttcaccttagaaccaggtaaattagatgaaattcaggccaaaatggatgatcttactgaaagacgtgaatctaaacaaccgcttgaattcccttcttgcggaagtgttttccaaagaccaccgggtcattttgcaggtaaactcattcaagattctaatttacagggctatcgaatcggtggcgttgaagtttcaactaagcatgcgggattcatggttaatgtagacaacggtacagcaactgattatgaagcacttatacatcacgtacaaaaaatagttaaagaaaaattcgatgttgaattgaatactgaggtacgtattataggtgatcatcccacagat

SEQ ID NO: 34510 - DNA, 1071 bp, Staphylococcus epidermidis
atgaagcgattttttcaacttatcatttctgctatagttattggtattttatgtttaatgattagtcattggtttaaatcaaaagataatacccactcaaatgagaagttatatgtttacaattggggagaatatattgatcctagcttaattaagaagtttaaaaaagaaacaggtatacaagtcgtatatgaaacctttgattcaaatgaagcaatggaagcgaaaattcgaaatggaggcacacactatgatgtagcttttccaagtgaatatactgttcaaaaattaaaaaaagctaaactgcttgagactttaaatcatgacaaaattccaaatatcagaaatttagacaatgattatatgaacttgtcatatgacccaaacaatcgatattcaattccatatttctttggtaccgtaggaattttatatgataaagagaaatatcctaatgaaacgttcgatagttgggacgatttgtatcattctcaattcaaaaatgatattttattagtagacggtgcacgcgagataattggaatgggattaaataaattagggtatagtcttaatgacaaaaatccgacccatattcatcaagcagaaaaagatttgcataatttagcacctcaagttagagggatagtaggcgacgaaattactatgatgcttcaacaaaacgaaggacatgttgcagtagtttggagtggcgttgctgcaccacttgtacaggaaaatactcgttataattacgtgatacctaaagaaggctctaacctatggtttgataatatggtgatacctaaaactgcacaaaataaagaaggtgcgtataagtttatgaatttcttactagacgcgcaaaatagtgcccagaatacggaatgggtaggatatgcaacacctaataaagcagctcgaagtaagttgcctaaaaaggtaagaaatgattatagattttatccatcaaatcaagaacagcaacggttagaagtctataaagatttaggtcaaacgtctctcagtgaatataatgaaagctttttaaattttaaaatgtctttaaaa

SEQ ID NO: 34511 - DNA, 1128 bp, Staphylococcus epidermidis
atgaaagttttagtagccatggatgaatttaatggaattatttctagttaccaagctaatagatatgttgaagaagcggtagcaagtcaaattgaagatgcagatatcgttcaagttccactatttaacggtcgtcacgaattattagattcagtctttctttggcaatcaggaaataaatatcgtgtgagtgcgcatgatgctgacatgaaagaaaccgaagcaatatatggacaaacggatagtggtatgactattatcgaaggtcacttatttttaaatggcaaaaaacctattcaacatcgatcaagttacggtttgggagaggttataaaagcagcattggacaatcatacagaacatcttgttatttctttaggtggaataggaagttttgatggcggtgcaggcatgttgcaagcattgggtgcaacattttatgatgatgaagcacaaattgtcgatatgaggaaaggtgcatatttaataaaatatattagacgtattgatttatcaggtgttcatccacaattaacaaaggtaaacattcaattaatgtcagatttctcaagtcgattgtatgggaaaaaaagtgaaatcatgcaaacatacgaatcattagatttgtctcaaaatgaagcagccgagatagataatttaatttggtattttagtgaattatttaagaatgaattgaaaatagcaatgggaccaatcgagcgcggtggtgctggaggtggtatagcagctgtattaaatagtctctatcaagctgagattttaacaagccatgaattagtgaatcaaatcacacatttagaaaacttaattcaacaggcagatcttattattttcggagaaggtttgaaagaagaagatcaaattctagagactacaacaatacgtatagcagaacttacccaacaatacagcaagccagctattgcaatttgtgctacaaatgataaatttgatttgtttgaatcattgaatgttacagcaatgtttaatacatttattgatatgcctgattcatatacagattttaagatgggtattcaaatcagacattacacagtacaagcactaaaattattgaaaacgcaaataaacttaccgctttcatcc

SEQ ID NO: 34512 - DNA, 1344 bp, Staphylococcus epidermidis
ttgaattccaataataacaatcatgaacaacaacgaagtttagatgaaatcaataacaccataaacttcaatcataatgatagtgcaagtcaaaaatttctggcttttttaggaccgggattgcttgttgcagttggttacatggatcctggaaattggattacatccatgcaaggaggagcacaatatggctataccttgttattcataatcttaatctctagcttatctgctatgctgttacaaagtatgactgtgagattaggaatagcaactggtatggatttagcacaaatgacacgtcattttttaaataagcctgtagcaattatgttctggattattgcagaattagcaattatcgctactgatattgcagaagttataggtagcgctatcgcattagatttaatcttcggcataccattaattgtaggcgcattaatcactgtatttgatgtatttttattattattcatcatgaaatttggctttagaaagattgaagctatcgtgggaacgttaatctttaccgtattggccatttttgtatttgaagtttatatttcttctccacaaataacagatatgcttaatggttttgtgcctcataaagaaattattacaaaccaagggatactttatattgcactaggtatcataggtgctactattatgccacataacttatatttacattcttctattgtacaatctcgaaaatatgatagacacagtattcatgaaaaagcacaagcgattaagtatgctactatcgactctaatatacagctatccatcgcttttgtagtcaattgcttattacttacacttggtgcagcgctattttttggaactaaaactgaagatttgggtggtttttatgatctttatttggctctaaaaacagaacctgctttaggtgcaacgcttggcggtattatgagtactttatttgctgttgcccttttagcttctggtcaaaattcaactataacgggaacgttagcaggccaaattgtgatggaaggatttcttaaattatccattccaaattggttacgtcgtcttatcactcggtctttagcagtgatacctgttatcatttgtcttatagtatttaaaggaaatactgaaaaaattgaacaattacttgtcttttctcaagtgttcttgagtattgctttgccattttcgttaataccgcttcaattagctacaagtaatcaaaatcttatgggtccttttaagaataaaacatggattaacatcatttcttggttactcataattgtcttaagtggacttaacgtatatcttatcattcaaacattccaagaatta

SEQ ID NO: 34513 - DNA, 1236 bp, Staphylococcus epidermidis
atgaagaaacaaattatcgaaagattaacgagatatgtaaaaattgatacacaatctaatcctgattccaagacgacaccatctacgaataaacagtgggatttattaaatctattagaagaagagcttcaatcattaggtcttaaaacagacatggatgaacatggttacttatttgctacactcgaaagcaatattaattataatgtacctactgtcggttttttagcacatgtagacacttcaccagatttcaatgcttctcatgtaaatccgcaaatcattgaagcctataatgggcaacctatcaaacttggtgaatctcagcgtatcttagatcctgatgtttttcctgaattaaataaagttgtgggtcatacactaatggtgacagatggtacatctctactaggcgccgatgataaagcaggtgttgtagaaataatggaagggataaagtatttaattgatcatcctgacattaaacacggtacaattcgagttggctttacacccgatgaagaaattggacgaggcccgcatcaatttgatgttagtcgatttaatgcagattttgcatatacaatggatggcagtcaattaggagaactacaattcgaaagtttcaatgcggcagaggtaactgtcacttgccatggtgttaacgttcatccaggttcagctaaaaatgccatggttaatgcaattagtttaggtcaacagtttaatagtttacttccctcacatgaagtgcctgaaagaactgaaggatacgaagggttctatcatttaatgaattttacaggtaatgttgaaaaagcaactctacaatatattattcgcgaccatgacaaagaacagtttgagctacgtaaaaaacgcatgatggaaattcgtgatgatattaatgttcattataatcattttccaattaaagtagatgtgcatgaccaatattttaacatggcagaaaaaattgaacctttgaaacacatcattgatatacctaaacgtgtctttgaggctttagacatcgtacctaacactgaacctattcgaggtggtacagatggatcacaattatcttttatggggttacctacacctaatatttttactggttgtggcaatttccacggtccttttgaatacgcttctatcgatgtaatggaaaaggctgttcatgttgtcgttggtattgctcaagaagtagcaaacagccatcaatcttataaa

SEQ ID NO: 34514 - DNA, 1845 bp, Staphylococcus epidermidis
atgactaatttaagagaagatgttcgtaatatagcgattattgcgcatgtcgaccatggtaaaacaacattagtagaccagttgcttaaacaatcaggtatatttcgtgaaaacgaacatgtcgacgagcgtgcaatggactctaatgatttagaaagagaacgtggtattacgattcttgctaagaatacagcgatagattataaaggaacgcgtatcaatatattagacacacctggccacgccgattttggtggtgaagttgaacgtatcatgaaaatggttgacggtgtcgtactagtggttgacgcatatgaaggtacaatgcctcaaactcgttttgttcttaaaaaagctttagaacaaaacttaaaaccggttgtagttgtgaataaaattgataaaccagctgctagacctgagggagttgtagatgaagtattagacttattcattgaattggaagcgaatgatgagcaattagacttcccagttgtttatgcttcagctgtgaatggaacagcaagtttagactctgaaaagcaagacgaaaatatgcaatccctatacgagacgattattgactatgtaccggcaccagtagataattcagatgaaccattacaattccaaattgctttactagattataatgattatgtaggtcgtataggcgttggacgtgtgttcagaggtaaaatgcgtgtaggtgataatgtatcactaattaaattagatggtacagttaagaactttcgtgtgacgaaaatatttggttactttggtcttaaacgtgaagaaattgaagaagcacaagcaggagacttaatagctgtttcaggtatggaagatattaacgttggtgaaacagttacaccacatgatcatcgtgacccattaccggtgttacgtattgatgaaccaaccctagaaatgacttttaaagtaaataactctccgtttgctggacgtgaaggtgattatgtaacagctcgacaaattcaagaaagattagatcaacaacttgaaacagatgtttctttaaaagttacacctactgatcaaccagattcatgggttgttgctggtcgtggtgaactacacttgtctattcttattgaaaacatgagacgtgaaggctttgaattacaggtttctaaacctcaagttattttaagagaaatcgatggtgtgttaagtgaaccatttgagcgtgtacaatgtgaagtgccttctgaaaatgccggggcagtgattgagtcattaggtgcacgaaaaggtgaaatgttagatatgatgacgaccgacaatggtttgacgcgtttaatctttatggtacctgcacgcggtatgattggttatactactgaatttatgtctatgacacgaggttatggaattattaaccatacatttgaagaatttagacctcgcgttaaagctcaaatcggtggtagacgtaacggtgcattgatttctatggaccaaggtcaagcaacatcttatgcgattattaacttagaagatcgtggtgttaactttatggaaccaggtactgaagtatatgaaggtatgattgttggtgaacataaccgtgagaacgatttaacagtaaatattactaaagcaaagcatcaaacaaacgtacgttcagctactaaagatcaaacacaaacgatgaatcgtcctagaattttaacattagaagaagcgttacaatttatcaatgatgatgaattggtggaagtaactcctgaaagtattcgcttaagaaagaaaatacttaataaatctgcccgtgaaaaagaagcaaaaagagttaaacaattaatgcaagacgaacaa

SEQ ID NO: 34515 - DNA, 1071 bp, Staphylococcus epidermidis
ttgaatgacttagaccacccacaactcatttttgaatctacaggtatctattcaagaggtatggaacgattttgttgtgtaaatcaaattaactatattcaaatgaatccgttagaagccaaatttaaaacgagcgctctaagatcatggaaaactgatcaggcagatgctcataagcttgcttgtttaggaccgacgcttaaacaaacagacagcttacctatacatgagttaatattctttgaattaagagaacgcgtccgttttcatctagaaatcgagaatgaacaaaatcgacttaaatttcagatccttgaattactccatcaaacattccctggtttagaaagattgtttagtagtcgatattcaatcattgcactcaacatcgcagaaatctttactcattcagacatggttcttgatatcgacaaggaggtactgattacacatatattcaattctacagataagggaatgtcaatggataaagctacaaaatatgcacttcaattaagggtgattgctcaagaaagctatcctaatgtcgatagacattcctttctagtcgaaaaattacgcttacttattcaacaattaaaacaatctattcatcatctcaaacaattagatgatgccatgattcaattagcacaacaactcgattattttgaaaatattcattcgatacctggtattggtaagctaagcacagctatgattattggggagattggtgatattaagcgatttaaatcaaataaacaactcaatgcttttgttggcattgatatcaaacgatatcaatcaggtcatacacactgtagagataccatcaacaagcgtggtaataaaaaagcgagaaaacttttattttgggtgattatgaatataataagagggcagcatcattatgacaatcatgtcgtcgattattactacaaactaagaaagcagcctaatgagaaacctcataagactgccatcattgcttgtataaatcgattattaaaaacaattcattatcttgtaatgaatcataaattgtacgattatcaaatgtcaccacat

SEQ ID NO: 34516 - DNA, 273 bp, Staphylococcus epidermidis
atgtctaaccaatcgaagttaaatagtgcggcatatgaccaattgaataaagatgcagacagaatattacatctaattaaagttcaaatggataacttaactttaccttcttgtccactttatgaagaggttttagatactcaaatgtttggtttacaaaaggaagttgatttcgcagttcaacttggattagttgataaagaagatggtaagcaattaatgttaagacttgaaaaagaactttctaaattgcatgaagcatttacgaatgtt

SEQ ID NO: 34517 - DNA, 1221 bp, Staphylococcus epidermidis
atgaaaaattttaaaaatataatgcgatatattggaaagacttctaaatttatcgattatccattgttaataacttatgttgtcctctgtttgattggattagtaatggtttatagcgcaagcatggttgcagctacaaaaggtacgttaaccgggggagtaccagtttccggaacatacttctacaatcgacaacttttatacgttatcatgagctttgttatcgtattttttatggcttttattatgaatgttaaagtattaaaaaagcctaatgttcaaaaaggtatgatgattggtatttttatacttttactactaacattagtaataggaaaaaatatcaatggttctaaaagttggattaacttagggttcatgaacttacaagcttcggagttattgaagatttcaataattctatacataccatttatgattgaaaagaagatgcctgcggtgaggcataatataaaattaatattaggaccaattttgtttgttgtaacttgtttgatacttgttctttttcaaaaagatgttggtcaaacaatgctgattgtgatcatattcttctcaattattttttactcaggtatcggtgtgcagaatatgttaaaatggggcgctttggtagctattggttttatcatcgtagctacatttatgttcatgttagatatggttccaagttatttgcaagcacgttttagtacgttaaccaatccatttagtcaagaatcaggcacaggatatcatatttctaattctcttttggcaattggcaatggtgggttgttcggacgtggtctaggaaatagtattatgaagcttggttatttgccagagccacatacagactttatatttgctattatttgtgaagagatgggattaatcggtggcttaatcgttttaattttagagtactttattgtatatcgcgctttccaacttgctaataaaacgcaatcgtatttttataaattagtttgcgttgggatagctagttatatcggaagccaaacattcgtaaatatcggtggtatttctgctacaattccacttactggtgtaccgttaccatttattagttttggtggttcatcgatgattagtttaagtatagctatgggattactacttattacagcaaaacagataaaacaagatgataaacgactgaaacaacgtaaggtagatattaaacgtcgatataat

SEQ ID NO: 34518 - DNA, 1833 bp, Staphylococcus epidermidis
attaccgatactacatttagagatgcacaccaatctttacttgcaacacgtgtaagaacaaaagatatgatgaacattgcatctaaaactgctgaagtttttaaagatagtttttcattagaaatgtggggtggtgcaacatttgatgtcgcctataatttcttgaaagagaatccatgggaacgtttagaaagattgcgcaaagccattccgaatgtgttattccaaatgttattacgagcttcgaacgcagtaggttataaaaactatcctgataatgtaattaagaaattcgttcatgaaagtgcaaaagctggtgtagatgttttccgtatattcgactcattgaactgggttgatcaaatgaaagtagcgaatgaagctgttcaagaagctggaatggtatctgagggtacaatttgctatacaggtgatattttaaatgctgaacgttccaatatttatactttagattattacgttaaaatggctaaagaactggaaagagaaggattccatatattagcaattaaagatatggctggtttattgaaaccgaaagcagcttacgaattaattggtgaattacgtgaggcaacacatcttccaattcatttacatacacatgatactagtggaaatggattgttgacatataaacaagcaattgatgctggcgtagatattatagatactgctgttgcatctatgagtggtttaacgagtcaaccaagtgcaaattcattatattatgcactaaatggatttccacgtaatttaagaactgatattgatgggttagaagagttgagtcattactggtctgtagtcagaccttactatgcagactttgagagtgatatcaaatcaccaaatacagaaatttatcaacatgaaatgccaggtggccaatattcaaacttaagtcaacaagctaaaagtttaggattgggcgaacgttttgatgaagtcaaagagatgtatcgtcgtgtcaacttcctgtttggagatcttgtaaaagtaacaccatcttcaaaggtagttggagatatggcactatatatggtgcaaaatgatcttgatgaagatacggtcatcaatgatggttataaattagatttcccagaatctgttgtgtcattctttaaaggtgacattggacaacctgtcaacggattcaacaagaaattgcaagatgttattttaaaaggacagcaaccaattactgaaagaccaggtgaatacttggagccggtcgattttgaagcaatccgtcaagaattaagcgacatacaacaagacgaggtaacagaacaagatataattagttatgtactttatccgaaggtatataaacaatatattcaaacgaaagagcaatttggtaatgtatctttactggatacaccgacattcttatttggcatgcgtaatggtgaaacagttgaaattgaaattgatactggtaaacgtctaattattaaattagaaacaatcagtgaaccagatgagaatggtaaacgtacaatttattacgctatgaatggtcaagcaagacgtatttatattcaagatgaaaatgttaaaacgaatgctaatgttaaacctaaggcggataaatcaaatccaaatcatattggtgctcaaatgcctggttctgtaactgaagtcaaagtgtctgtaggcgatgaagttcaagctaatcagccattattaatcactgaagcaatgaagatggaaacgacgattcaggcaccatttgatggaattattaaacaaatcaatgttgctaatggagatgccattgccacaggagatttattagtggaaatt

SEQ ID NO: 34519 - DNA, 1047 bp, Staphylococcus epidermidis; identical to SEQ ID NO: 34278

SEQ ID NO: 34520 - DNA, 738 bp, Staphylococcus epidermidis
atggaacaaattacttctgctcaaaatagtaaaataaaaaatgcgaataaattaaaaaagaaacgtgaaagagataaaacaggtcttgctttaatagaggggattcatctcatagaagaagcttatcaaagtcaaattgaagtaatacaattgtttatcgttgatcccgatagaatgtcatcttcaatagttgattatgcgaaagaagtgtatcaaattaatctaaaagttgctgaagcactttctggaactgttacaccgcaaggtttctttgccattataaaaaaaccaacttatgataagacacaagccaaacaagtgttattaattgaccgtattcaagatcctggtaatctaggaactttaattaggacagctgatgctgctggattagatttgatagttatggagaaggggacggctgacccttttcaagataaggtgatacgtgctagtcaaggaagtatttttcatataccagtcatttttgatgacatctataattatattcatcaatttaatggtccagtgtatggtacggcacttgaaaacgcagtgagcttcaatgatgttgaagcacaagccaattttgcgcttgtattaggtaatgaaggagagggtgtcaacccagatttattaaaagaaacaacgcaaaatcttactattcctatttatggcaaagctgagagtttaaatgtagctattgctggaagtatcttaatgtatcagctgaaaggt

SEQ ID NO: 34521 - DNA, 1056 bp, Staphylococcus epidermidis
atgactcaaaatgatctaatgtctgagttgaagcaacaagctttagttgatattaatgaagcaaatgatgcgcaagcgttacaagaagtaaaggtgaaatatttaggtaaaaaaggttctgttagcgccttaatgaaaaatatgaaagatttacctaatgaagaaaaaccagcgtacggtcaaaaggtaaatgaattaagacaaactattcagagtgaattagatgaaagacaaaagctaatcaaagaagagaaattaaatcaacagctttctgaagaaacaattgatgtcacattgccaagtcgtcatattgaaataggatcaaagcatcctttaacacgtacagttgaagagattgaagacttgttcttagggttaggttatgaaattgttgatggttatgaagttgaacaagattactataattttgaagctttaaatttacctaaatcgcatccagcacgtgatatgcaagatagcttttatatcacagaagaaattttaatgcgtacacatacttcaccagtacaagcacgtactatggaaaaacgtaaaggacaaggaccagtcaaaattatttgtcctggtaaagtttatcgacgtgactcagatgatgcaacgcatagccaccaatttacacaaattgaaggtttagtagttgataaaaatattaaaatgagcgatttaaaagggactttagagttagttgccaaaaaattattcggtgcagatcgtgagattcgtttacgcccaagttatttcccgtttactgaaccatcagttgaagtagatgtatcatgtttcaaatgtaaaggacagggttgtaatgtttgtaaacacacaggttggattgaaattttaggagcaggcatggttcacccaaatgtattagaaatggccggattcgattctaaggaatattctggcttcgcatttggtatgggaccagatcgaattgcaatgttaaagtatggtattgaagatattcgtcacttttataccaatgatgtccgtttcttagatcaatttaaagctgtagaagatagaggtgaacaa

SEQ ID NO: 34522 - DNA, 2400 bp, Staphylococcus epidermidis
atgttaatttcaaacgaatggctaaaagattatgtgaatgttgaccagtcagttcaagcgttagcagagagaattacaagaactggaattgaagtcgatgatattattgactatacaaaagatataaaaaaattagtagttggacatgtcttgtcgaagacgccacatcccaatgctgataaattaaatatttgtcaagtagacttaggtgaagaagaaccagttcaaattgtttgtggtgcaccaaatgtagatgaagggcaacatgtgattgttgctaaagttggtggtcgtttacctggtggagttaaaattaaacgtgccaaattacgtggcgaacgctctgaaggtatgatttgctcattacaagaaataggtatttcaagtcatgtaactcctaaaaattatgaatcaggtatatatgtatttccagaagcagtaaaacctggaacagatgcgctagaagcactatatcttaatgaccaagtgatggaatttgatttaacacctaatcgtgctgatgcattaagtatgataggtactgcgtatgaagtcgcagctttatatcaaactaaaatgaataaacctcagttaacaagcaatgaaagtcaagagtctgctaaagatgaactaacaatagaagttaaaaacgaagataaagtaccttactatagtgcacgtgttgttcatgacgtgactattggtccttctccagtatggatgcagttccgattaattaaagcgggaatacgtccaattaataatgtggtagatatttccaattatgtacttttagaatatggccaacctctacacatgtttgatcaagagcaaattggttcgcaatctattgaagttagacaggctaaaaaagatgagacaatgagaactttagatggtgaagaacgtcgattgttagatactgacattgtcattacaaatgggaaagaccctatagcattaggaggtgttatgggaggagatttctctgaagtcactgaacaaacacgacatgttgtagtagaaggggctatctttgatcctgtatctattcgacatacatcacgccgtttaaatttaagaagcgaatcatcgagtcgatttgaaaaggggattgcaactgaattcgtcgatgaagctgtagacagagcttgttatttacttgaaacatatgcttcagcaacagttttaaaagatcgaatttcatatggagatttaggatcatttgtgactccaataaaaatcactgctgacaaagttaaccgtacaattggttttaatttaactgatgaagaaatcattgatatttttgagcaattaggatttaaaactgaaaataaaaatggtgacattatcgtgaatgttccatcaagacgtaaagatatttctattaaagaagatttaatagaagaagtagcgcgtatatatggatacgatgacataccatcaacgctacctgtatttaaagatgttacaagtggagaactaacagatcgacagtttaaaacgcgtactgttaaagaaacacttgagggcgctgggctagaccaagctattacttattcattggtatcaaaaaatcatgctacagattttgcattacaaaatcgttctacaattgaattacttatgcctatgagtgaagcacattccacattacgtcaaagtttattgccgcatttaattgatgcagtatcatacaatgttgctcgtaaaaatacaaatgttaagttatatgaaatcggacgtgtcttctttggtaacggtgaaggtgagttaccagatgaagtagaatacttgagcggtatattaactggagactttgttaataacaaatggcaaggcaagaaagagcccgttgatttctatttaactaagggtattgttgaacgtgttgctgaaaagcttaatcttcaattcgattttagagctggtcaaatagatgggttacatccaggaagaacagcaattgtgtcacttaatggtaaagatattggcttcataggtgagctacaccctacgttggctgctaacaatgatttaaagcgcacgtatgtatttgaacttaattatgatgcaatgatggaagtttctgtaggatatattaattatgagcctatacctagatttccaggtgtaacacgtgatattgcattagaagttaatcatgaagttacttcttctgaattgttatccattattcatgagaatggtgaagatattttaaatgatacactcgtatttgatgtatacgagggtgaacatttagaaaaagggaaaaaatctattgcaattagacttagttatctagatacagaaaacacacttaccgatgaacgtgtaaatgctgtgcatgataaaattttagaagcacttaaaaagcatggtgctattattaga

SEQ ID NO: 34523 - DNA, 2346 bp, Staphylococcus epidermidis
atgagacaaaaaacattagatgtcttggaatttgaaaagattaaatcatttgtggcagatgaaactataagtgatctaggtcgtgaaaaagtacaagagatggctcccgctagtaattttgatacagtagaatttcaaatgaatgaaacagacgaaatttcacaaatctataacaagcatcgattaccaagtttaagtggtctagcaaaagtgtctccacttgttcatagggccagcataggaggcgttttaaatgtggcagaattaaacagaattaaacgcctagttcaagtgcaaaatcaatttaaaacattttacaatcaaatgctagaagaagatgaagaggttaagtatcctatactgcatgataaaatgaatcatctaccgatacttacagatttatttaaagaaattaatgaaacatgtgatgcacacgatttatttgaccatgcaagttatactttacaaagtattagaagtaaaatttcaagaacaaaccaacgaattcgtcaaaatttagatagaatagtgaaaaatcaagggaatcaaaaaaaactatctgatgcaattgtaacagtaagaaatgatcgcaatgttattccggtgaaagctgaatatagacaagatttcaatggtattgttcatgatcaatcggcatcaggacaaacactatatattgaaccgaattctgttgtagagatgaataatcaaatcagtcgtttgcgtaatgatgaagcagttgaacgtgaacgtatattgactgaattgacgggatttgtttcggcggaagctgacgcattactcattgctgaatcggttatgggtcaaattgattttttaattgctaaagctcgttatgcgcgcactataaaagggacaaaacctacatttaaagaggatcgaactatatatttacctaatgcatttcaccctttattagacaaagatactgttgtagcaaatacaattgaatttattgacgatgtagaaacagtcataattactggaccaaacacgggtggtaagacggttactttaaaaacactaggattgataattgtcatggcacaatcaggattgttaattcctacactggatggaagtcaattaagtatctttgaaaatgtatattgtgatattggagatgaacaatctatagaacaatcattatcaacattttcatctcacatgaaaaatatagtagaaatattacaagatgcagatcaaaatagtctcattttatttgatgaactaggcgcaggtacagatccaagtgaaggtgcggcactcgcaatgagtatcttagattatgtacgccgtttagggtctttagttatggcaacaacacattaccctgaattaaaagcttatagttataatcgtgaaggtgtcatgaatgcaagcgttgaatttgacgttgaaacactgagcccgacttataaattattaatgggtgttccagggagatctaatgcctttgatatatcgaaaaaacttggtctaagtctcaacatcattaataaagctaagacaatgatagggacagacgagcaagagatcaatgccatgattgaatcattagaacaaaattcaaaacgtgttgatcaacaacgtatagaattagatcgacttgtgagggaagcacagcaaacccacgatgctttgtctaaacaataccaacagtatcaaaattatgagacatcattgatggatgaagctaaagaaaaagctaatcagcgtgtgaaatctgcgactaaagaagcggacgaaattcttaaagaacttagaaatctaagagatcataagggcgctgaggtaaaagaacatgaattaattgataaaaagaaacaacttgatgatcaatatgaggtaaaatcaattaagcaacatgttcaaaagaaaaagtatgatacgattcatactggagatgaagtgaaagttctatcttacggtcaaaaaggtgaagtgcttgaacttgtaggtgacgaagaagcagttgtacaaatgggaatcattaaaatgaaattacctattgaagatttagaaaaaacgaaaaagaaaaaagaaaaacctacaaaaatggtaacaagacaaaatagacaaactattaaaacagaactagatttaagaggatatcgttacgaagaagctttaaatgaattagatcaatatcttgatcaggcggttttaagcaattacgaacaagtttatattattcatggtaaaggtacgggggcacttcaaaaaggtgttcaacaacatttgaaaaaacataaaagcgttagacaatttaggggaggtatgcctagtgaaggtggatttggtgtcactgtggcagaactcaag

SEQ ID NO: 34524 - DNA, 801 bp, Staphylococcus epidermidis
atgaataaacctattggagtcattgattcaggtgttggtggtcttactgttgctaaagaaattatgagacagttaccaaatgaaactatttattatttaggtgatatagcacgttgtccatatggtccaagaccaggagaagaagttaaaaaattcacaacggaactagctcaaaaattgatggaatttgatataaaaatgctggttattgcttgcaatactgctacggcagttgcgttagattatttacaaaacatattacctattcctgtcattggtgttatcgaacctggagcaagaactgcgataatgactacaaaaaatcaaaatgtattagttttaggaaccgaaggaacaattaaatcagaagcgtatcgcacacatataaaaaagataaatccaaatgtgaatgtctatagtgttgcatgcccgggctttgttcctctagttgaacaaatgcgctataaagaccctacaatcactaatattgtgattcatcaaacgttgaagcaatggagaaacagtgatgcggacacggttattttaggatgtacacactatccgttgttatatcagcctatttatgaatattttagtggtactaaaacagttatctcatctggcttagaaacagcaagagaagtaagtgcattactcacgtttagcaatgagcatgccagttacacagaacatccccaacatcgattttttgcgactggtgacaccacacatattaaaaatattattgatgaatggttaaatatgaaagttgaagtcaaaagaataactgtaaatgattca

SEQ ID NO: 34525 - DNA, 585 bp, Staphylococcus epidermidis
atggaagatattgttattgcaactaataatcaaggtaagataaacgattttaaagctatttttaaaaatcaaaatgttattggaatttctgagttgattgaagattttgatgtagaagaaacaggtgccacatttgaagaaaacgctaagttaaaatccgaagcggcagcacatgcattaaataagcgtgtcattgcagatgatagtggacttgaagtgttcgcattaaatggggaaccaggcgtatattcagcgcgctatgcaggattaggtaagaatgatgaagataatattgaaaagttgttaacgaacttagaagatgttcaagaccgtcgtgctcaatttgtttgtgtgattagtatgagtgcgcctaatgaaaaaacaaaaacatttaaaggaacagtttccggagtgataacaactgaacgacatggaaaaaatggttttggttatgatccaatatttttcgttccagaattaaataaaacgatggcggaaattacaaatgatgaaaaaggtaaaatcagtcatcgtggaaatgctattctattgttaaaagaatatttagagggtgaacaacatgtc

SEQ ID NO: 34526 - DNA, 435 bp, Staphylococcus epidermidis
atggatttaaactttgatttatatatgaatgatgttgttgaacaagcacgaaacgaaattgagcatgctggttatcatcaattaacttctgctgaggatgttgatcaagttttacaacaaaaggggacatctttagtcatggtaaattccgtatgcggatgcgcaggtgggattgcacgtcctgcagcggcacatgcattacattatgataaattacctcaacgattagttacagtatttgcaggacaagataaagaggcaacacaacaagctagagaatattttgaaggatatgcaccctcaagtccatcttttgctttgattaaagatggtaaaatcaccgagatgattgaacgacatcagattgaaggtcatgatgtaatggacgtaatcaatcagttgcaagcattgtttgataaatattgtgaagaaaga

SEQ ID NO: 34527 - DNA, 1317 bp, Staphylococcus epidermidis
ttggatataaaaatgcctaagcttggtgaaagtgtgcatgaaggtacgattgaacaatggttagtatcagtaggagatcatgtagatgagtatgaaccattatgtgaagttattacagataaagtaacagctgaagtgccttcaacaatttctggaacaataacagaattagtggttgaagaaggacaaactgtcaatattaacacggtgatttgtaaaatcgattcggaaaatggtcaaaatcaaacagaatcggcaaatgagtttaaggaagaacaaaatcagcattctcaatcaaatataaacgtgtcacaattcgaaaataatcctaaaactcatgaaagtgaggtgcatacagcctctagtcgcgcaaataacaatggacgattttcaccagttgtctttaaattagcttctgaacatgatattgatttaacacaagtcaaaggaactggttttgaaggtcgtgttactaagaaagatattcaaaatattattaacaatccaaacgatcaagaaaaagagaaagaatttaaacaaacagataaaaaagatcattcaacgaaccattgtgactttttacatcaatcctcaactaaaaacgaacactcaccattatcaaatgaacgtgtcgtaccagttaaaggtattagaaaagctatcgcacaaaatatggttactagtgtcagcgaaataccacacggttggatgatggttgaagctgatgcaacgaatttggttcagactagaaactatcataaagctcaatttaaacagaatgagggttacaatttaactttctttgcgttttttgtaaaagctgttgcagaggctttaaaagtaaatccattactcaatagtacatggcaaggagatgaaattgttatccacaaagatattaatatctctattgctgttgcagacgatgataagttgtatgtgccagtcattaaaaatgcagatgaaaaatcaattaaaggtatcgcgcgtgaaatcaatgatttagctactaaagcaagattaggaaaattagcacaaagtgatatgcaaaacggtacatttacggttaataatactggttcttttggttctgtttcttcaatgggaatcattaatcatccacaagctgccattttacaagtagaatcagtcgttaagaaacctgtagttatagatgatatgattgcaattagaaatatggttaatttgtgtatttcaatcgatcatcgtattctcgatggtgttcaaacgggaaaatttatgaatcttgttaagaaaaaaatagaacaatattctattgaaaacacttctatttat

SEQ ID NO: 34528 - DNA, 981 bp, Staphylococcus epidermidis
atgactaaattatcatacttagaagctatacaaaatgcacaagacttagcactaaatcattttagtaatgcatttatacttggcgaagatgtaggaaaaaagggtggcgttttcggcacaaccaaaggattacaaagtaagtatggtgatgaacgtgtaattgatacacctcttgcggaatcgaatattattggtactgctattggtgcagcaatgctaggtaagagacctattgccgaaatacaatttgcagatttcattttgcctgctacaaatcaaattataagtgaagcagctaaaatgagataccgttcaaataatgactggaattgcccactgactatcagagcaccttttggtggtggagttcatggtggattatatcattcacaaagtgttgaaagcatttttgcttcaactcctggattaactattgttattccttcatcaccttatgatgctaaaggtcttctattgtcctctatagagtctaacgatccagtcttatactttgaacataaaaaagcatatcgttttctaaaagaggaagttcccgaaacatattatactgtacctctaggtaaagcagatgttaaaaggccaggcgaggacatcactgtattttgttacggattgatggtgaattactgtttacaagctgcagatattttggcaaatgacggcatcgatgttgaagtagtcgacttaagaacagtttatccactagataaagcaactatcattgaacgctctcaacgtactggtaaagttcttcttgttactgaagataatctagagggaagcattatgtctgaagtatctgcaattatagctgaaaactgtctgttcgatttagatgcgccaatcatgcgattagctgcaccggatgtcccatctatgccattttcaccaacattagaaaatgaaattatgatgaacccagaaaagatacaggacaaaatgcgtgaactcgcacaattt

SEQ ID NO: 34529 - DNA, 996 bp, Staphylococcus epidermidis
atgatagattacaagtcagcaggccttacagaagaagacctcaaaaaaatatataaatggatggacttaggaagaaaaacagacgaaaggctatggttactcaatcgtgcaggtaaaattccatttgttgtcagtggtcaagggcaggaagcaactcaaattggtatggcatatgcaatgcaaaaaggtgatatctcatcaccttattatcgtgatttagcatttgtcacttatatgggaatttctccattggatactatgttatcagcttttggaaaacgtgatgacattaactcaggaggtaaacaaatgccttctcattttagtcacaaagaaaaaggcattttatctcaaagttctccagtagccactcaaataccacattctgtcggtgctgcattagcacttaaaatggataacaagccaaatattgctaccgcaacagttggagaaggcagttcaaatcaaggtgactttcacgaaggtatgaactttgctgcagttcacaaattacctttcgtctgtgtaataattaacaataaatatgcgatatctgtaccagattcactacaatatgctgctgaaaagttatcagatcgtgcattaggttacggtatgcatggaatacaggtagatggaaatgacccaattgcagtatacaaagcgatgaaagaagcaagagaacgagcgctagcaggtgaaggtccaacattgatagaagctgtcacttcacgtatgacaccacattcatctgatgatgatgatacatatcgtacaaaagaagaaagagacctattgaaacaagaggattgtaatataaaatttaaaacggccttactcgatcaaggcatcataaacgaaaattggttgagtcaattggaaaaagagcataaagaactcattaatgaagctactaaatctgctgaagcagcaccatatccttcagaagaagaagctttgacatatgtttatgaagagggaggtcaacgaaatgac

SEQ ID NO: 34530 - DNA, 1419 bp, Staphylococcus epidermidis
atgtcagaaaaacaatacgatttagtcgtgttaggtggtggtacggcaggatatgtagccgccatcagagcttctcaattaggaaaaaaagtagcgatagtagaaaaatcactcttaggtggtacgtgtttacataaaggatgtatacctactaaagcacttttaaaatcggctgaagtcaatcatactattaaaaacgcgcatacatttggaattgatgtcaatcattttaaaattaatttccctaaaattttagaacgtaaagatgctattgttaagcaattgcatgaaggcgtcaatcaactgatgaaacatcatcatatagatatttataacggtattggacgaattatgggaacatctatattttctcctcaaagcggtacaatttctgtggaatatgaagacggcgaatcagatatactccctaataaaaatgtgcttatagctactgggtcatcaccacagtctcttccgttcattaaatttgaccataaacaaatactatcgagtgatgatatcctaaggttaaatacactaccacaaagattagcaatcataggtggaggtgttattggtttagaatttgcatctctgatgaatgatttaggtgctgatgtagtagtaatcgaagcgaatgacagagttcttcctaccgagagcacacaagttgcgtcattgctaaaagaagaattaactaatcgaggcgttacattctacgaaaatattcaattgaccaaagatcattttaaccaaactgataagggtgtaactattaatatttcagatgagcccgtccaattcgataaagtacttgttgcaattggtagaaagcctaatacaaatgatattggtttaaataacactcaaattaagacttctgatgctggtcatattataacaaatggttatcagcaaactgaagataaacatatatacgcagcaggagattgtatagggcaattacaattggcacacgtcggttcaaaagaagctatagttgcagttgaacatatgtttgattgttctcctatacctatcaattatgacctgataccaaaatgtgtttatacaaacccagaaattgcttcaattggtaaaaatttagaacaagcaaaaaaagcaggcatcaaagcaaaaagtatcaaagttccttttaaagctataggaaaggcaataattgaggatgtaacccaatcaaaaggattttgcgagatggtagttaacaaagatgacgatgaaatcataggtcttaatatgatagggccacatgttacagaattaataaatgaaatttcattgttacaatttatgaatggctcatctttagaacttggtttaacaacacatgcacatccttcattatccgaggtagtcatggaattaggtttaaaagctaatggtcaagcaattcatgta

SEQ ID NO: 34531 - DNA, 879 bp, Staphylococcus epidermidis
atgaagaaactacagatgaataaattaataaatataattaatacatcactgaataagtcaatacaatcatcaccattaaaaactaatttagaagaaagtatgaaatattcattaaatgctggtggtaaaagaatcagaccagtcatattattattaacactaaaaatgcttaacaaagattatcaacaaggactaaatagtgctttagcattggaaatgattcatacttattctttaattcatgatgatttaccagcaatggataatgacgattaccgtagaggaaaattaacaaatcataaagtttatggtgaatggaaagccattcttgctggtgatgcattattaacaaaagcttttgaattagtttctaatgatactaccattgaagatagtgtgaaagtaagtattataaaaagactttcaaaagcaagtggacatttgggaatggtgggtggccaagcgcttgatatggaaagtgaagggaagtcaattcgtttagaaactttagaatcaattcatgaaactaagacaggcgctttactaaatttttcagttatggctgcggtagacattgctcaagtagaacaaaatattgctaagaatttagatgaatttagtcatcatttaggaatgatgtttcaaattaaagatgatttactggatgtgtatggtgatgaatcaaaacttggcaaaaaagtaggcagtgatatagtaaatcataaaagtacttatgtttctttacttggaaaagaaggagcagaagaaaagttaaacaatcatcaatatcttgctatgaactgcttaaatcaaatttctgatcaatatgatacttctgaattaagtgatattgtagatttattctataacagagaccat

SEQ ID NO: 34532 - DNA, 429 bp, Staphylococcus epidermidis
atgttcatgggagaattcgatcatcaattggatacaaaaggacgtatgattataccgtccaagtttcgttatgatctaaatgaacgttttattatcacaagaggccttgataaatgtttatttggttacactctagaagaatggcagcaaattgaagagaagatgaaaaccttacctatgacaaaaaaagacgcgcgtaaatttatgcgtatgttcttctcaggtgctgtagaagtagaattagataaacaagggcgtattaatattccgcaaaatttaagaaaatacgccaatttaagtaaggaatgtacagtaattggtgtttcaaatcgtattgagatttgggacagagaaacttggaatgatttctatgatgaatctgaagaaagtttcgaagacattgctgaagatttaatagattttgatttt

SEQ ID NO: 34533 - DNA, 1335 bp, Staphylococcus epidermidis
atgactgaatatttaagtgtttctgcactaactaaatatataaaatataaatttgaccaagatcctcatctacagtcagttcttattaaaggagaattatctaactttaaaaagcattcaagcggacatttatattttaatgtcaaggacaaagaaagtgtcatcagtggaatgatgtttaaaggaaatgcttctaagttaggctttgagcctaaagaaggtgatgaggttttaattgaagctcgcgtttctgtttatgaaagacgaggaaattatcaaatatatgttaataagatgcaactcgatggtattggtaatttataccaaaagcttgaactactaaaaaagaaattgaaaaaagaaggctattttgatcaaagtaacaaaaaactcataccaaagtatccaaagaaaatagcggttttaacagcgagcacaggtgcagccattagagacatacatagtacgattaacaatcgctaccctttggtcgaacaaattcaaatcagtacccttgttcaaggcacgcaagctagacaagatataatagaaaagattcaatatgctgattcattagatgttgatacaataatagttggacgtggtggtggttcaattgaagatttgtggaactttaatgaagaagatgttgttaaaaccatctttaattgtcaaacacctattatatcagctgtaggtcatgagactgattttacattgagcgattttgtagcagatgttagagctgcgacacctactcaagctgctgttatagcaacacctgatcaatatgagttattacaacaaattaaacagtatgaatatacattatcaagatatataaaacaatatatcgaacatcagaagaaacaacttaatcacatatcatcatattacaaatttaagcaaccgagtttattgtacgatcaacaaattcaaaaacgagatgaattagaaagacaattaaatcatctattaaatactaaagttgaaaagtcaaaacatcacctcaagttacttcaacaaagttttaattttaaaaatttaaatcagcagattactcaggaaaagcaatctatttatcaattgcattctagattgtccaaaataatgtccaataacattactaatttaaaaacagtgctaaaaaacaaattagaaagtcttaataatttaagccccaccaatacgatgcttagagggtacgcaattgtcaataaagacaatgaagtggttacaagcacacataaattgaatgaaaacgaccaaatatctttaacaatgaaagacggaagtgtcgatgcaacggttaagaaagtaaggtgtaatgatgag

SEQ ID NO: 34534 - DNA, 933 bp, Staphylococcus epidermidis
atgtttcatcatgtgagcgtcatgttaaacgaaaccattgattatttaaatattaaagaagatggtgtgtatgttgactgtacgttaggtggagcaggacatgccctctatttacttaatcaattaaatgataaaggtagacttattgcgattgatcaagatttaacagccatagaaaatgcgaaagaagttttaaaagaacatttgcacaaagtcacttttgttcataacaactttcgagaattaacaaatattttaaatgaattagaaattgataaagtagatggtatttattatgacttaggtgtttcaagtcctcaattggatgtgcctgaaagaggtttcagttatcacaatgatgcgaaacttgatatgcgaatggatcaaacacaatcactttctgcatatgaagtagttaatcaatggtcttatgaagcattagttaagattttctatcgttacggcgaagagaaattttctaaacaaattgcacgtagaattgaagcccaccgagaacaacaaccgattgaaacaactttagaactagttgatgtcattaaagaaggcataccagcgaaagcaagacggaaagggggacatcctgcaaaacgcgtgttccaagctattcgaattgctgtgaatgatgagttgtcagcttttgaagattcagttgagcaagccattgaatgtgtgaaggtcggaggtagaatatcagtaattactttccactctttggaagatcgtttgtgtaaacaaattttccaagagtttgagaaaggtccagatgtaccaagaggtctacctgttattcctgaagcatatacacctaagttaaaacgagtgaatcgtaaaccgattaccgctactgatgacgatttaaacgaaaacaatcgagcacgtagcgccaagttacgcgtagcagaaatattaaaa

SEQ ID NO: 34535 - DNA, 387 bp, Staphylococcus epidermidis
atgagtcgtaaagatgcaagagtacaagcttttcaaactttatttcaacttgaaataaaagagacagatttaacaattcaagaagcaattgaatttattaaagatgatcattctgatttagactttgattttatatactggttagttactggagtcaaagatcatcaaatcgttttagacgaaacaattaaaccccatttaaaagactggtctatcgatcgtttactgaaatcagatcgtattattttaagaatggcaacttttgaaatattgcacagcgacacacctaaaaaagtagttgttaatgaagctgtagaactcacaaaacagtttagtgatgatgatcattataaatttgttaatggtgttttaagtaatataaatgat

SEQ ID NO: 34536 - DNA, 399 bp, Staphylococcus epidermidis
atggctgtagaaaaaatttatcaaccttatgatgaagcgacacaaaccagtatcccacaaagacaaccacaatcgagtcctgaaaaacaaaccgttaaaagaaaagttgttgttcaacttactagatttgaaaaaattttatacatagcattaataactgtaattgctctaataagtatttatatgctatctttaaaaatggatgcgtacgatacgcgaggaaaaattgcagatttggatcaaaaaatagagaaacaatctagtgaaaacagcgcattaaagtctgaaattaagaaaaattcttcatatgaacgcatttacgacaaggctaagaagcagggcatgagcctagagaacgacaatgtaaaggtagtgcgtaataatggcgaagcgaaaaat

SEQ ID NO: 34537 - DNA, 2325 bp, Staphylococcus epidermidis
atggcgaagcgaaaaattaaaattaaaaaaaataaaataggagcagtcctacttgttggtttattcggactgctcttttttatattggtgctaaggttttcttatataatgattactggccactccaatggtcaagatttaattatgaaagccaatgagaaatatttagtcaaaaattctcaacaaccagaacgaggtaagatttatgatcgtaatggtaaagttttagcagaagatgtagaaagatataaacttgttgcagttgtggataaaaaagcaagtaaagaaagtaaaaagcctcgacacgtggttgataaaaaaaagacagcaaaaaaattagctgaaatcatagatatggatgctgatgaaatagaaaaacgacttaataataagaaagcctttcaaatcgaatttggtcagaaaggtactaatttaacttatcaagaaaaagaaaaaatagagaaaatgaaattacctggtatagcactttacccagaaactgagcgcttttatcctaatggtaattttgcttcccatttaatagggatggcacagaaagaccctgatactggtgaattaaatggtgcattaggtgttgaaaaaatatttaatagttatttaaatggatcaagaggtgcacttaaatatattcatgatatatggggctacattgcacctaatacgaagaaagagcaacaacctaaacgtggagacgatgtacacttaacaattgattctaatatccaagtttttgtggaagaagcgcttgatgacatggttgaacgttatgctccaaaagatttatttgcagtagtaatggacgcaaaaactggtgaaatacttgcatatagccaacgtccgacttttaatcctgaaacaggtaaagattttggcaaaaagtgggcgaacgatttatatcaaaatacatatgaaccgggctctacttttaaaacatacggcttagctgcagcaattcaagaaggtaagttcaaaccggatgaaaagtataaatcaggtcaaagaaatattatgggctctgaaatttccgattggaataaaactggttggggacgtatacccatgtcgttaggttttacttattcatcaaatacattgatgatgcacttacaagatttggttggtgctgataaaatgaaatcttggtatgaacgctttggatttggcaaaaaaacgggtggtatgtttgatggagaagctgcaggtaatattggttgggcaaatgaattacaacaaaaaacgtcagcatttggtcaatcaacaactgttactcctgctcaaatgattcaagcacaatcggcattctttaataaaggaaatatgcttaaaccatggtttgtaagtagtatcgataatccaataactaaaaagaattattactctggtaaaaaagagtttgccggtaaaccagtaacgcaagaaacagccaataaagttgaagaagaacttgataaagtagtaaatagtaagaagagtcatgccatgaattatcgcgtaaaaggttatgatattgaaggtaagacaggaacagcacaagtagctgattcaaatggaggcggttatgttaaaggtgaaaatccttactttgtaagtttcatgggggatgcacctaagaaagatcctaaagtcattgtctatgcaggtatgagtcttgctcaaaaaaatgatcaagaagcatatgaaatgggtgtgagcaaagcatttaaaccaattatggagaatacgctgaaatatttaaatgttggaaaatctagtgatacttcatcaaaaactgactatagtaaagtgcctaacgtgcaaggagatgaagttcaaaaagcagaggatagcgtcaatgctcaatctcttaaacctattacgattggtaatggcaaacaaattaaacaacaatcagttaagtcaggtaccaaagtcctaccgcacagtaaagtaatgttaatgacagacggggaattaacaatgccggatatgaccggatggacaaaagaagatgtacttgcttttgaagatttaacgaaaattaaagtttctactaaaggtaatggatttgtcacgaatcaaagtatctcaaaaggtcaaatcattaaaaataaagataagatagaagtatcattatctgctgaagatacggatgatgaccaagagaaaactgatgaggactcttcggataaaaaatcaaagaaagataaagttgatgaggataattcaaatgcgtcttcatcaagtaagaatgaaaagtcgaacgccgactcgaaaaatgattctgatgacagcacaaatgaaacatcaggttctgagagaaataat

SEQ ID NO: 34538 - DNA, 963 bp, Staphylococcus epidermidis
atgatctttatatacgcgatcatcgcattactgataacatttattttagtcccaatacttattccaacattgaaacgtatgaaatttggacaaagtatccgtgaagaagggcctcaaagccatatgaaaaaaacaggtacacctactatgggtgggcttacatttttaattagtattataattacctccatcattgcaattatctttgtagaccattccaatcctattattttgttactatttgtaacaatcggttttggtcttattggatttattgatgactatattattgtagttaaaaagaataaccaaggattaactagtaaacaaaagtttctagcacaaataattattgcagttatattttttgtgctaagtgatgtttttcaccttgtacattttacgacagatttgcatattccatttgtgaattttgatattccgttgtcatttgcttatgtgatatttattgtcttttggcaagttggtttctcaaatgctgtaaacttaacagatggcttagatggattggcaactggtttgtcaataataggttttgctatgtatgctgtaatgagttacatgttagattcaccggctattggcatattttgtattataatgattttcgctttactaggtttcttaccttacaatttaaatccagcgaaagttttcatgggagacacaggaagtcttgctttaggtggtatttttgcgacgatttcaatcatgttgaatcaagaattatcattaatattaattggttttgtgtttgtagttgagacattatctgtaatgttacaagtagcctcatataaattaacgaagaaacgtattttcaagatgagtcctatacatcaccactttgaattaagtggttggggtgaatggaaggtagtaacagtattttggacggtaggtttaattacaggattaataggtttatggattggagtgcat

SEQ ID NO: 34539 - DNA, 1347 bp, Staphylococcus epidermidis
ttgctaaattacactgaattagaaaataaaaatgttttagtagtaggcttagcaaaaagtggatatgaagcggcgaaacttctccttaaattaggtgctaacgttaaagtcaatgatggaaaggatctttcacaggatgcacatgctaaagatttagaatctatgggcattgaggtaattagcggtagtcatcctttttctttattagatgataatcccatcattgtgaaaaatccaggtattccatatactgtatcaattattgaagaagcagcaaaaagagggcttaaaatcttaacagaggttgaacttagctatttaatttctgaggcaccaatcatagcagttactggaactaacggtaaaacaactgtcacttcactaatcggtgatatgttccaaaaaagcgtgttaactggacggctttctggaaatattggttatgtagcctcaaacgttgcacaagaagttaaatcagatgagtatttaataacagaattatcatcttttcaattattaggtattgagaaatataaaccacatatcgctatcattacaaatatttattctgcacatttggattaccatgaaacgttagagaactatcaaaatgctaaaaagcaaatatataaaaatcaaactaaagatgattatcttatttgtaattatcaccaaagacacctaattgaatcagaaaatctagaagcaaaaacattttatttttcaacacagcaagaagttgatgggatatacattaaagatggtttcatcgtttttaacggcattcgcattattaacactaaagacttagtactaccgggagaacataacctggaaaatattttagcagctgtattagcatcgatcattgctggtgtgccagtcaaagctattgtagatagtcttgttactttttctggtattgatcatagacttcagtatattggtacaaatcgcacaaataaatattataatgattcaaaagcaactaatactttagctactcaatttgcgcttaactcttttgatcaaccaattatttggttgtgtggtggattagatcgtggtaatgaattcgatgaacttattccttatatggaaaatgtacgtgtgatggttgtttttggagaaacacaagataaatttgctaaattgggaaatagtcaaggtaagtatgtgattaaagcaacagacgtagaggatgctgttgataaaattcaagatatagtcgagcccaatgatgttgttttattatcaccagcttgtgcaagttgggatcagtatcatacatttgaagaacgtggtgagaagtttatcgatagattccgagcgcacttgccatcatac

SEQ ID NO: 34540 - DNA, 1395 bp, Staphylococcus epidermidis
atgctcatggaagagaataaaaatcaacctaataatgagaatatgtcgaataaagacgataatacaatccatttgaatgatagtcaaagtaatgaagacttagagctttttagacggaataaaaacgctcgccaacgcagaagacgtcgcatagataaccaaagtaaagaaaaagatgctacgtctacacaatcacagttagaaactaaaccaatggataaatttattgataatcacaagtcgcataatcaagataaagaaataaaaagtgatttaattgaggataatgttaatgatgaagatgacaatcaaaaatataataatgataaattaaatgatcgtagtgttcaacaaacaagcgaaacgcgtcaaagtaatgaagacgaagaggaatttctaactgatcatcagagcgaaaaacaaactaaagactctcgtcattctaaaaaacataaattactaagtaaatttacttctaaaaaagaaaaggaaacatttacatcgttcaatagtaatgagaaggtaactcaaattaaaccgcttagtttagaagaaaaaagagccataagacgtaaaaagcaaaaaagaatccaatatacaattatcacactactcattcttatcattgttctcattttactctatatgtttacaccactaagtaaaatatcaaatgtaaatattaaaggtaataacaacgtaagtacgagtaaaataaagaaagaacttaacgttacttcacgttcacgaatgtatacttttagtaaaaataaagcgattaggaacttaaaacagaatcctttaatcaaagaagttgatattcataaacaattaccaaacacgttaactgttaacgtgactgagtaccaaattgttggtttagaaaaaaataaagataaatatgtgccaattatagaagatggtaaagaattaacagaatacaaagatgaagtttcacatgatggacctatcattgatgggttcaaaggagacaaaaaaacacgaattataaaagctttatctgaaatgtcacctaaagtgagaaacttaatagcagaggtgagttacgcaccaactaaaaataaacaaagtcgcataaagatttttaccaaagataatatgcaagtcattggtgacattacaacgattgcagacaaaatgcaatattatcctcaaatgtcacaatcattaagcagagatgattctggcgaacttaagacaaatgggtatattgatttatcggttggagcgtcatttattccttatcaaggttcatcaactgttcaatcgggtactgaacaaaatgtaaccaagtcaacacaagaagaaaatgatgcaaaagaagaacttcaaaatgtgttgaataaaattaataaacaatctaaagaaaataat

SEQ ID NO: 34541 - DNA, 1209 bp, Staphylococcus epidermidis
ttgaaaagagtgtatcagtcagaaaatcaatcattactttttattgttattttaggttcattaacagcatttggcccattggctattgatatgtttttacctggactacctaatattagtcatgattttgatatttctgcatctacaactcagcttactatctccttttttatgattggattagcgttaggaaattttttggctggccccatatctgatattactggtagaaaaaaaccattaattttctcactgattatttttactattgcgagtttaggtattatattcgtcacaaatatatggattatgattattttacgatttattcaaggattaactggtggtgcaggtgcagtcatctcaagagccattgctagtgatatgtactcaggtaatgcgctaactaaatttttatcattattaatgcttgtcaatggcattgcgccaattatcgcacctgcgcttggcggtatcattttaaattatgggccatggcgaattgtatttgtaatactaacaatgtttgggattgtcatgttaataggaactttatttaaagttcctgagtcgcttgaaaagagcctaagggaaagtagtaacataggtacgatgctaattaatttcaaagaactttttaaaacaccccgttttgtattacccatgttgatacaaggggtgtcatttgtattactatttacttatatttctgcatctccttttatagttcaaacaatttatggtttaacgccattaaacttcagtattatgtttgcttttataggcgttacactcattatttcaagccaattaaccggaaaacttgttgactatatagatagattactgttgctgagaatcatgtctactatacaagttattggtgttataatcgtatcactaactttactcaaccattggactttttggatactttcttgtggctttgtgattttagtggcaccagttacagggattgcaacgttaggattttcgatagcaatggatgagagtaaaggggccaaaggtagttcttcaagtttgttgggattgtttcaaactttacttggtggcgtcatctctccacttgttggtattaagggagacagtaatgcgataccttatataatcgttatcgttattacagcaataattcttatggttttacagttgattaatgtgaagatatttaaaaaagctaaaattcat

SEQ ID NO: 34542 - DNA, 666 bp, Staphylococcus epidermidis
atgggtttagttgttaaagatataagtaaaacttttggagaaaaaacctcaaaaacagaggtgttaaaagatattaactttgaagtgaaagatggagaattcatcattttaaatggtgcttcaggatcaggaaaaacaaccttattaactattttaggtggtttgttatctcaaacatcaggtgatgtagtatacgaggggaaatccttatttgaacgacatactaataaagcgcacttaagactaaatgatattggttttatctttcaagcctctcatttagttccatacttaaaagttttagaccaactaaccttaataggtaaagaaactggaatgtctagcaaagaagctcaagcaagagctaaagaattattaacaaaaattggattagaagagcaacttaatagctacccacatatgctttcaggtggacaacaacaacgtgtagcgattatgagagcacttatgaatcatccgaaaattgttttagcagatgaacccacagcaagtcttgatgctagtcgtgctcaagaggttgttgaaatgatcagaaaacaaataaaagctaaccaaatgataggtatcatgattactcatgatgaaagcttgttcaaatacgctgatcgtattgttcaattgtacgatggtaaaataaaaaacagt

SEQ ID NO: 34543 - DNA, 1050 bp, Staphylococcus epidermidis
atgaatctagcttggaaagagattaaattttataagttcagatttatattaatcatgttcattatttttctaatggcgattatggttttatttatcagtggacttgctcaaggcctagcacgagaaaatatatcaatatttgatcaaattaaaggtaatcaatttgttgttcaaaaaatgaaagaaccacaattagaaaaatctattctatcacgaagtaaacaagacaatatttcaaaaattattgatgaaaaaccttttaaaatggcaggtaaaactttcaaaatcaatggaaacgaagaaaacgtgatggctataaatagcgtgaaaaatcatcagccaaatttgaaatctggtcattatcctaaaaatggaaatcagatagcaataaatgaaaaactaactgcagaaggtctttatttagacgataaagttaaagtcaaaggtgacgatacaacttataaagttgtaggtatattaaaaaacacgatgtattctcatagtaacattgttatgatggaccaatccaaaatagaacaaagtagtaatgtcgcaacattttatgttacgaaccaattatctaaatcggataaaaataaaataaatcacatcaaaggcgttcaaacagcaactacagacaatataacaagtaatatcgcaagttataaagcagagcaaacaccattggatatgatgattattagtttatatattataactgcaattgtattgagtgcattcttttatgtaatgacgatacaaaagacatctgaaatcggtattttaaaagcaattggtataactacaaagcacttattgacatcattgattttacaaatttcaatgattacatttataggtgtagctatagcagaagtagttattttgctcatcagtcaaattttacctgtatctatgccattccatatagatatgcataatataatcattgtacttgtcatatttatgatagttggattaatcggtacatcattatcatttattaagttaattaaaattgatcctattgaagctattggaggtggccaa

SEQ ID NO: 34544 - DNA, 1356 bp, Staphylococcus epidermidis
atgaaaaagattttaatcgctaatcgtggtgaaatcgcagtaagaataataagagcggcacacgatttaggtattcaaacagtagctatatactcagaaggtgacaaagatgcattacatactcaaattgctgatgaagcatactgcgtcggtcctactttatcaaaagattcttatttaaatataccaaatattttatctatcgctacttctacaggatgtgatggtgttcatcctggatacggctttttggctgaaaatggtgattttgctgaattgtgtgaagcatgccaattaaaatttattgggccaagctatcaatcaattcagaaaatgggaataaaagatattgctaaagctgaaatgattaaagccaatgtacctgtagtaccaggaagtgaaggacttattcaaagtatagatgacgctaaaaaaatagctaaaaaaatcggctatccagttatcatcaaagccacagcaggtggtggtggaaaaggtattcgggttgctcgtgatgagaaagaacttgaaactggttaccgtatgacacaacaagaagctgaaaccgcgttcggaaatggtggtttatacttagaaaaatttatagaaaactttagacatatagagattcaaattattggcgatacttatggaaacgttatacatttaggtgaacgtgattgtacaattcaaagaagaatgcaaaagctcgttgaagaagcaccctcaccagttttaagtgaagataaacgccaagaaatgggtaatgctgcaattagagccgcaaaagctgtaaattatgaaaacgcaggtacaattgaatttatatatgatttagatgataaccaattttatttcatggaaatgaatacacgtattcaagttgaacacccagtaactgaaatggtaacaggagtagatttagtaaaattacaactcaaagttgctatgggtgaggcgttaccttttaaacaagaagatatttccattaacggtcacgctattgaatttcgaatcaatgctgaaaatccttacaaaaactttatgccatcaccaggcaagattacccaatatcttgctccaggcggttttggagtgagaattgaatcagcatgttatactaattatacgataccaccttactatgactccatggtggcaaaacttatagttcacgaacctacacgtgaagaatcaattatgacaggcattcgtgctttaagtgaatatcttgttttaggtatcgacactacgattccattccacttaagacttctaaataatcatatttttagaagtggggaatttaatacaaaattcctagaaaagtataatattatggacgataataaccaa

SEQ ID NO: 34545 - DNA, 465 bp, Staphylococcus epidermidis
atgaactttaaagaaataaaagaattaatcgaaattcttgatcaatctagtttaactgaaataaatattgaagataataaaggtagcgtagttaatttaaaaaaagaaaaagagactgaaatagttacaccgcaagttactcaacaaccaactcaaccgataaatcatacgcataatgaaacacaacaaaagccatcacatagctctaaagatgaacaaagtagtgataatgaatacaataccattaatgcaccaatggttggtacattttataaatcaccttcaccagatgaagaagcatacgttcaagttggagataaagttacgaatgaaagtactgtttgtatattagaagctatgaaattatttaatgagattcaagccgaaacaacaggtgaaatcatagaaattttagtagaagacggacaaatggtagagtatggccagccgttatttaaggtgaaa

SEQ ID NO: 34546 - DNA, 1476 bp, Staphylococcus epidermidis
atgaatactcaacatagcaaaacagatgtcatcttaataggtggcggaattatgagcgcaacattaggaactttactaaaagaattaacaccagaaaaagatatccaattgttcgaaagattgagtcaacccggcgaagaaagttcaaatgtttggaataatgcgggaacaggtcattcagcattgtgtgaattgaactatacgaaagaaggtaaagatggttcagtagatattactaaagcaattcatattaacgagcaatttcaaatatctaaacagttttgggcttatttaatacgtgaaggtcatattgaaagtccagataaatttattcaatcagtgccacatatgagctttgttaaaggggaagaaaatgttaaatttttaaaaagtcgagtggcgagtttacagaaaaatgtattatttgaaaaaatgaaaatttctcaagatccagaaaaaattaactcatgggttcctttaatgatggaaggacgccaatcagatgaagcaattgccattacgtatgacgagacaggtacagatgttaactttggtgctttgactaaaaagttaatagctaatttacaacaaaaaaatgttggcattaattataaacatgaagttttagatataaaaaaattaaataatggtaactggcaagttgtggttaaagatttaaatacatcaaatgtaatgaattatgaatctaagttcgtcttcatcggagctggtggtgcaagtttacctttattacaaaaaacaaagattaaggaatctaaacacattggtggtttcccagtaagtggattatttttacgatgtaaaaatccagatgtcatacatagacatcatgcaaaagtctacggtaaagccgaggttggtgcacctccaatgtcagttccacatttagatacacgatttgttaatggtgaaaaatcattactatttggaccttttgcagggttttcgccaaaattcttaaaaaacggttcatatttagatttagttaaatctgtgaaacccaataatatgataacaatgttaagtgctggcgtaaaagaatttaatttgacgaaatatttagtttctcaattaatgctttcaaatgaagaacggatcaatgatttgcgtgtattcttaccagaagcgaaagatgaagattgggaagtaattactgcaggtcaacgtgttcaagtaattaaagatacagataagtctaaaggtcaattacaatttggtacggaagtaataacatcagaagatggttcacttgctgcattattaggtgcttcacctggtgcttcgactgctgttgatatcatgtttgatgtcttgcaacgttgttacaaatcagagtttaagtcatgggaaccaaaaattaaagaaatggtcccatcatttggtttaaaattgtcagagcatgaagatatgtaccattcaataaacgaagaagtaaaaaaatacttgaatgtaaag

SEQ ID NO: 34547 - DNA, 1392 bp, Staphylococcus epidermidis
atggaggaacattactatgtgagcatagatataggttcatcaagcgtaaaaacaatagtaggcgaaaaatttcacaacggaattaatgtgataggtacagggcaaacctacacaagtggtatcaagaatggtttaattgatgattttgatattgcaagacaagcaattaaagatacaattaagaaggcttcaattgcctctggtgtagatataaaagatgtatttttaaaactacctatcatcggtaccgaagtatatgatgaatcaaatgaaattgaattttacgaggatactgaaattgatggcacgcatattgaatcagttttagaaggtatccgggataaaaatgatgtacctgaaactgaagtgataaatgtattcccaattcgttttgtagttgacaaagacaatgaagtttcagatccaaaagaattaattgcaagacattcattaaaagtagatgcaggtgtcatcgcaatccaaaaatctattttaatcaatatgattaaatgtgttgaggcatgtggtgttgacgtgttagatgtttattctgatgcgtataattatggttctattcttacaccaacggagaaagaattaggcgcttgtgtcattgatatcggtgaagatttaacgcaagttgctttctatgaacgaggagaacttgtagatgctgaatctatagaaatggccggtcgagacattacggatgatattgctcaaggactaaatactacatatgacacagctgaaaaggtaaaacatcaatatggtcatgcattttatgactctgcttcagatcaagatgtcttttcagtagatcaagttgattcagatgaacatgttcaatatactcaaaaagatttaagtgactttattgaacaaagagtcgaagatatattctttgaagtctttgatgttttacaagaactaggacttacaaaagtaaacggaggatttgtagttactggcggatctgcaaatttactaggtgtaaaagaattactacaagatatggttagtgaaaaagtgagaattcatacaccgtcacaaatgggtatcagaaaaccggaattttcttctgctatttctacaatttctagtagtatcgcttttgacgagttattagattatgttacaattagttatcaagataatgaagaatttgaagaagaagttatcgaatctgataaagatagtgaaacaaaatcaagcggttttgattggtttaagcgtaaatcaaacaaaaaagaaaatgacgaggtagcaccagaagcgcctcgtgaagagtcttatgaagaccgtgaaaatcatctagaagatgaacaacaaacagaaggcaaagccaaagaagaaagtaagtttaaaaaattaatgaaatctctatttgaa

SEQ ID NO: 34548 - DNA, 1182 bp, Staphylococcus epidermidis
atgttagaatttgaacaaggatttaatcatttagccacattgaaagtcatcggtgtaggtggcggcggaaataatgccgttaaccgtatgattgaccatggtatgaataatgtggaatttattgctatcaacactgatggacaagctttaaacttatcaaaagctgaatcaaaaattcaaattggtgaaaaattaacacgtggattaggtgctggtgctaatcctgaaattgggaagaaagcagcagaagaatcaagagaacaaattgaagatgctatccaaggtgctgatatggtattcgtaactgctggtatgggtggcggtactggaacaggtgctgcgccggttgttgctaaaattgcaaaagaaatgggtgctttaactgtaggtgttgttacgcgtccattcggtttcgaaggtcgtaagcgccaaacacaagcggcagctggtgtagaatctatgaaagcagcagtggatacattaattgttattccaaatgatcgcttattagatatcgttgacaaatctacgccgatgatggaagcatttaaagaagcggataatgtattacgtcaaggtgtacaaggtatttcagatttaattgcagtatcaggtgaagtgaacttagactttgcagacgttaaaacaattatgtctaatcaaggttctgcgttaatgggtatcggtgtgtcatctggtgaaaacagagcagtcgaagccgctaaaaaagcaatttcttctccattattagaaacatcaattgtaggtgctcaaggtgtacttatgaacattacaggtggagaatcactgtctttatttgaagcgcaagaagcagctgatattgttcaagatgctgcagatgaagatgtgaatatgattttcggtacagttattaacccagagctccaagatgaaattgtagttactgttatcgcaactggttttgaagataaaccttcttcacaaggtcgtaaagctacaagtactggttttggttcaagtgtaaatagtagttctaatcatcaatctggtgctagtgctaaagaagattcattctctgcacacacttctcattcacaatcaagtgaaagtgtaagtgaaagaagccacactactaaagatgatgatattcctagctttattagaaatagagaagaaagacgttctagaagaactagacgc

SEQ ID NO: 34549 - DNA, 666 bp, Staphylococcus epidermidis
atggatgttaaagagaatcttgctaagattgaaacggaaattgatgcaagcgttaaaaaaagtgcccattcagcacaacctcacgtgattgcagtaacaaaatatgttacaatagagcgagctagagaagcatataaagcaggaataagacatttcggtgaaaatcgattagatggattcaaagagaagaaagaatctctaccaagcgatattaaattacatttcattggttctttacaatcaaggaaagttaaagatattataaatgaagtcgattattttcatgctttagatcgtttgagtctagctaaggagattaataaaagagcaaatcatgttataaaatgtttcttacaagtaaatgtttctggagaaaaatctaaacatggcatagctcttgaagaagtgaatcaatttataaatcaaatcaaagaatacgaaaatatccaaattattggattaatgacgatggcaccattgactgatgatctatcgtacataaaaaatttatttaaagagttaagacataaaagaaatgaaatacaacaattcaatttagcacatgcgccttgtacagaattatctatgggaatgagtaatgattatcaaatggcagtcgaagaaggtgcaacctttgtcagaattgggactaaacttgtaggagaa

SEQ ID NO: 34550 - DNA, 1059 bp, Staphylococcus epidermidis
atgaataaattaagaaaagttctagatatcattgaacataagcacttagatgcaatcatagtattatcagattataatagacgttatctttcagattttactggtacaagtggtgcactaatcataacacctaaaaaacaatatcttattactgattttagatatatagaccaagctacagaacaggcacaggattttgaaattataaatcgaaaatcaagtttgatttctgaaattaaatccatattagaaagagaaaatttatcaaatattggttttgaaggtcatttaatcagttatgatacttatgttgaacttaataaaggattaattactttaataagcatatctaatgaaattgataagattagagaaattaaaaataaggaagaaattcagctcattcaaaaagcggctaagatagtagatcaaacatatgaatatatcctcactcaagtaagtatcggaatgacagaacgagaaattaaagctaaattagaaagtaagatgttagaattaggcgcagatggcccttcattcgacacaatagtggcttcaggttaccgaggtgcgttaccgcatggtgttgcaagtgataagcgtattgaaaagggtgatatgattacattagattttggtgcatactatagaggatattgttcagatattacgcgcacgtttgcaataggagaaccggatccaaaactcaaagaaatatttaatatagttctaacttctcaaaagaaagctattgaacaaatcaaaccaggtatgactgcaaaagaagcagatgctatatctagagagtatatttcatctcacaactatggtgagcagtttggccattcacttggtcatggtatcggccttgatattcatgaaggtccactattatctcaaaatagttcagatgaattaaaaataaataactgtgttactatagaaccaggcatatacattgagggattgggtggcgttagaatagaagatgacattcttattacagaaaatggatgtcatgtctttactaaatgctcaaaagaccttattattttagag

SEQ ID NO: 34551 - DNA, 591 bp, Staphylococcus epidermidis
ttggctttaaaggatttatttaataatttttttgtagttgaagaagaagaggaagttgaaggacctgaagagcgagaatcttctagatcacgtgaacgtgttcaagagcgcgaagattacaatcgtaatgagaatcaagcgacaccacaaacttttaacaataagcaacaagcgattaaatctgtacctcaaaagaacactttgagatcgaatacaacttctgaagaaaggaattatcgtatgaataataattcaaaaaataattctagaaacgttgtaacaatgaatcaagcatcacaatcatatactgctcaggaaagttcaaaaatgtgtctgtttgaaccacgtgtcttttcagatactcaagatattgccgacgaattaaaaaatagacgtgcaactttagtaaatttacaacgcattgatcaagtatcagcaaagcgtattattgattttttaagtggtacggtatacgcaattggtggagatattcagcgcgtgggtactgatattttcttatgcacacctgataatgttgaagtagccggcagtataactgatcacatcgagaatatggagcaacattacgaa

SEQ ID NO: 34552 - DNA, 654 bp, Staphylococcus epidermidis
atgccttttacaccaagtgagattaagaataaagaatttacacgagtaaaaaatggtttagaacctacagaagttgcaaattacttagagcaactaagtaatgaaatcgaacgtttaaaagaagataaaaagcaacttgaaaaagtcattgaagatagagattccaatattaaatcatataaagatgttcaccaatcagtaagtgatgcacttattcaagcacaaaaagtaggagaagagacaaaacaagcagcaactaaagaagctgaagccgttttatcaaaagcacaagtacaagctgacagtattgtgaatgatgcaattgaaaaagcacgtcgtctagctttccaaactgaagacatgaaacgacaatctaaagttttccgctctcgttttcgtatgcttgttgaagcacaacttgacttactcaaaagtgaagattgggattacttactcaattatgatttagacgccgagcaagtgacattagaagatattcatcatcttaatgaaaatgatttgacacctgaagaacgtgcaatgaaacaaaagcaaaatcaagaattatcggctaatcaaccttctacatcaagttcagaatctgtgagtcaatcaaatacaaatagcgaatcatcacaatcaacatcaaataat

SEQ ID NO: 34553 - DNA, 2757 bp, Staphylococcus epidermidis
gtgaatataatgaattacaaagataccctattaatgccgaaaactgattttcctatgagaggtggcttaccaaataaagaacctcaaattcaagaaatgtgggataatgatgaccaatatcgcaaagcgttagaaaaaaataaaaataatccatcattcattttgcatgacggaccaccatatgctaatggtaatttacatatgggacatgcattaaataaaatcataaaggattttattgttcgttataaaacaatgcaaggtttttatgcaccgtatgtgccgggttgggatactcatggtttaccaattgaacaggctttaactaaaaaaggcgttgatcgcaaaaaaatgtcagttgcagaatttagagagaaatgtaaagaatttgcattaaaacaaatcgacattcaaaagaaagattttaagcgccttggtgtacgtggtgattttaataatccttacattacattaacacctgaatatgaagccgcacaaataagattatttggagaaatggcagataaaggtttgatttataaaggaaaaaaacctgtgtattggtcaccttcaagtgaatcatcacttgcagaagctgagatagaatatcatgacaaacgttctgcatcaatttacgttgcttttgacgtaaaagacagtaaaggtaaagttgattctgatgcacaatttattatttggacaactacaccatggacaattccatcaaatgtcgcaattacagttcatccagagctaaaatatggtcagtataatgttgatggacataaatacattgttgcccaagcattatcagaagaagtcgcagaagcattaggttgggataaagattctatacaattagagaaagaattcacaggtaaagaattggaatttgtagaggcacaacatccattcctagatcgtgtatcgttagtaattaatggtgaacatgttacgacagacgctggtacgggatgtgtccatacagctcccggtcacggggaagatgactatattgtaggtcaaaaatatgatttaccagtaattagtcctttaaatgataaaggtgtattcactgaagaaggtggaccatttgaaggaatgttctacgacaaagcaaacaaagccgtaaccgatcttttaaaagaaaaagacgcactacttaaacttgactttattacacatagttatcctcatgattggcgtacgaaaaaacctgttatctttagagctacaccacaatggtttgcttccattaataaagtaagacaggatattcttgatgcaattgaagacacgaactttaaagtagactggggtaaaacacgaatttacaatatgattcgtgatcgtggcgaatgggtaatttctcgtcaacgtgtatggggtgttcctttaccggtattttatgctgaaaatggcgatatcattatgactaaagagacagtaaatcacgttgcagatttatttgaaaaacacggttcaaatatttggtttgaaaaagaagctaaagaattacttcctgaaggatttagtcatcctggaagccctaacggtgaatttactaaagaaactgatattatggatgtttggtttgattctggttcatcacaccgtggtgtattagaaacgagacctgaactttcattcccagcagacctttattttgagggtagtgatcagtaccgcggttggtttaactcttcaattacaactgctgtagctacacgtggtcaagcaccatataaattcttgttatcacatggcttcgtcatggacggtgaaggtaagaagatgagtaagtcattaggtaacgttatagttcctgatcaagttgttaaacaaaaaggcgctgatattgcacgtttatgggtaagcagtactgattacctttctgatgtgcgtatttccgatgaaattcttaaacaaacgtctgatgtatatcgtaaaattcgaaacactttaagatttatgttaggtaatattaacgatttcaatcctgaaacggatagtattgctgaaacaaatctacttgaagtagatcgctatttactaaatcgtttacgtgaattcactgcgagtacgattaataactatgagaattttgattatttgaatatttatcaagaagttcaaaactttatcaatgttgaactaagtaacttctatttagattacggtaaagatatactttatattgagaaaaaagattctcataaacgccgtagcatgcaaaccgttttatatcaaatacttgttgacatgactaaattactagcaccaattttagtgcatacagctgaagaggtttggtctcatacacctcatgtaaaagaagaaagtgtacacctttcagatatgcctaaagttgttgatgtagacgaagaattgttagaaaaatggaatacatttatgaatttacgtgatgatgttaatcgtgcattagaacaagcacgtaatgaaaaagtaattggtaagtcattagaagctaaagtggttattggaagcaatgaatcatttaatacagcggaatttttacaacaatttaatgacttacaacaattattcatcgtttcacaagttgaagttaaagataaagtgaatgatggtgtatcatatcaatatggagatatccatattaaacatgctgaaggcgaaaaatgtgaaagatgctggaactatacagaagaattaggttcagtaggtgaacttgaacatttatgccctcgatgtcaagaagtagtaaaaactttggta

SEQ ID NO: 34554 - DNA, 645 bp, Staphylococcus epidermidis
atgaaaaaagtattagcaagtgcaacgattttatcattaatgttagtaggttgttccaatggtggaaatgatgaatcaagtcataaagatgatagttctaaaacagaacaaaaggataaatcatcatctcaacatgactcaaaaaaagattcgaaacgtaatgatacaaataataagcaagacaatcaggaaaataacactaataaagaacaaacaaataatcaaaatccaaatgatggagaacaacgaacaagcgaaagaccaacaacaaattcaaacggaaattcatcggataatcaaaataaacaacagcaatcagtacaagataaccagaataaatatgtagcaccataccaaagtgaaaatgcgacacgtgttgctcgatgtctttctccatttgagggcgaccgcagtcaagctttgcaacaattaccaaattttgaaactgcactttccattgctaaaaacgaagctaatatgtatggaagcgaaaataaatcatataatgattattcaatagaacaaacagaagatggatttagatatgtgtttagctttaaagatccatcaaaaagtaatacttactcaattgtaacgcttaatcgacaaggtcaacctactgttgtagatcctaacttccaacct

SEQ ID NO: 34555 - DNA, 2163 bp, Staphylococcus epidermidis
atgaataaactgacaattattgtcacgtattataatgcggaggaatacatcacaggttgcttagagagtattaagcaacaacgtacacaagattttaatttgattattgtgaatgatgggtcgacagaccaaagtaaaaaattaatggatgaagctattaaagactatgataaaaacattcgatttatcgatttagatgaaaatagtggtcatgcacatgcgcgtaatattgcattagaagaagtagaaacaccttactttatgtttttagatgcagatgatgaattagcttcttatgcaatcacgttttacttagaaaagtttaataatactgatggtttaattgctccaatacattcttttactacacaacgtccgcaatttgttgatttagatcgagtaagggttgaatactttaatgccaaagagaatattaattcatttttaagaaaacagtcagcttgtaacattatttttagaacagctattgtcagggcgcatcatattcgatttaatgaaaatttaaatacatatgtggattggtcatttgttcttgaatatatgaagtatgtaaataagtttgtacgtatttttaacttcccattttatttccgtggggaagtctatgatccatttgaaacacttacattaagtgaacaaaattttgatattttatttaaagattacgtcaacagcttttatgatgccattaaacgagcaacaaatccaaaagttagagaatttattgtcactaaaatgggaaataaaattgctaatgaatttgaaccaactcgatatgatattaatgaacgctatcaaacacataaggatacgcttgttgaattatcgaaatttttacatgtacatttagttaaaaaccaaaagctaataaataaaattgaaacaattttgttaatgaataatgaaactgataaagcttttaaagttaatcaatttagaaaaacgttgcgacatgttaaaaatattgttctaagaagaaaaaataaagaacgttcattgtatgatttaacagataaagaagataatgttaaaccgaaaacgattgtctttgaatcgttcggtggtaagaattacagtgatagtccaaagtatatttatgaatatatgcaaaagtattatcctaattatcgctatatatggtcatttaagaatcccgataaaaatgtcgtaccgggtagtgctgaaaaggttaagcgtaattcagcagagtattatcaagcatactcggaagcaagtcattgggtatcaaatgcgcgtacaccactttatttaaataaaaaagaaaatcaaacgtacattcaaacttggcacggtacaccattaaaacgtttagcgaatgatatgaaagtggtacgtatgccgggtactacgacaccaaagtataagcgtaattttaatcgtgaaacatcacgttgggattatttaatttcgccaaatagatattcaactgaaatatttagaagtgctttttggatggatgaagaaagaatattagagataggttatccaagaaatgatgtattagttaatagagccaatgatcaagagtatttagatgaaattagaactcacttaaatttacctagtgataaaaaggttattatgtatgctccgacatggagagacgatgaatttgtgagtaaaggaaaatatttgtttgaattaaaaattgatttagacaacctttataaagaactcggagatgattatgtgattttattacgcatgcattatctcatttctaacgcacttgatttatctggttatgaaaattttgcaattgatgtttcaaactataatgacgtctctgaattatttttaataagtgattgtttaattacagactattcatcagtaatgtttgattatggtattttaaaacgccctcaatttttctttgcatatgatatagacaaatatgataagggattacgaggattctatatgaattatatggaagatttaccaggacctatttatacagaaccatatggcctagctaaagaactaaagaatttagataaagtgcaacagcaatatcaagaaaaaatagatgcattttatgatagattttgctctgtagataatggtaaggcatctcaatatattggggatttaattcataaggatatcaaggaacaa

SEQ ID NO: 34556 - DNA, 384 bp, Staphylococcus epidermidis
atgagtatctctttgtacattgcaattggtattattgttattatcattgcatatatgattatccaacaaattcttaataagcgagctgtaaatgaattagaccaaaataaattccataaaggtttaagaaaagctcaagttattgatgtgagggaaaaagtggattatgattatggacatattaatggtgcacgtaatattcctatcacagtatttaagcaacgatatcaaggactaagaaatgaccaacctatttatttatgtgatgctaatggtatagcaagttatcgtgctgcacgtatattaagaaaaaatggatataaaaatatttacatgcttaaaggcggttacaaaaaatggacaggtaaaataaaatctaaaaag

SEQ ID NO: 34557 - DNA, 1506 bp, Staphylococcus epidermidis
atgattagtaaatcaagtcctttaatatttgaaagatccaaaaaagatagatatgcgtattcattaccacaaaatgacattgagaatatcagtattgcttcactcttagatgataagtatattcgtaaacataaggctgaatttcccgaggtttcagaattagatttagttagacattataccgaactatcaaataaaaatttcggggtagatactggattttacccattaggttcttgtacgatgaaatataatcctaaaatcaatgaaaaggtagcgcgtatttctggttttagtgaatctcatcctttacaagaagaagaacacgttcaaggttctcttgaaattatatatagtttacaagaagaattgaaggaaattactggtatggatgaagttaccctacaacctgctgcaggtgcacatggtgagtggactgctttaatgattttcaaagcttatcatgaaaaaaatggacaaagccatcgtgatgaagtaatagtgcctgattcagcacatggtactaatcctgcttctgcctcatttgctggatttaaatcagtaactgtaaaatctaatcaacgtggggaagttgacatagaagatttaaaaagagtagtaaacgataatacagctgcaatcatgttaactaatccaaatacattaggtatatttgaacaggatattattgaaatagggaaaatcgttcatgaagcaggaggtttattatattacgatggagcaaatttaaatgctattttagataaagtacgtcctggtgatatgggctttgatgcggtacatcttaatttgcacaaaacattcactggtcctcatggcggtggtggaccaggatcaggaccagttggagtagtagagaaattagccagttatctacctaagcctatggttataaaagataacgataggtataaatatgataatgatattccaaattcaattggacgagtaaaaccgttttatggaaatttcggcatttatttaagagcatatacttatatcagatcaatgggagccaatggtttaaaagaagtatctgaagctgccgttcttaatgcgaattatataaaatctcgccttaaaaatcactttgaaattccgttcaatcaatattgtaaacatgaatttgtattaagtggaactttacaaaaacaatatggtgtcagaacattagatatggctaagcgactgttagattttggtgtgcatccacctacaatatattttcctctcaatgtcgaagaaggaatgatgattgagccaacagaaactgaatctaaagaaacacttgattactttattgatgcgatgattcaaatcgctgacgaaacaaaaaatgatccagataaagttttagaagcaccacatacgactataattgatcgattagatgagaccactgcagcacgaaaaccaattcttaaatttgaagaacttaaggacgaaaagtataaagaacacacaaatattgattctgaagataat

SEQ ID NO: 34558 - DNA, 399 bp, Staphylococcus epidermidis
atgactaagattcactttgaagcacctagtcccgaagattactgtaatttaagagctaatgctggaatgagtagtaaatcgattgaagcggcaataaaggggcttcctcatgcatgttttaatgtgaccctttatgagaatgatatgttgattggtatggggcgagtgattggggatggtggtacagttttccaaatcgtcgatattgctgtgaaagatatatatcaaggtttgggtcatggaatgacaattatgcatgaaataatgaagtatattgagagtgttgctgaagaaggtacatatgtgagcttgatagcagattatccggcagatcaattatacgagaagtttgggtttaaaagtactgagccttattcaaaaggtatgtatatcaaatat

SEQ ID NO: 34559 - DNA, 1089 bp, Staphylococcus epidermidis
atgacaacagatttgaaaaaaacacctttatatcaaaattacgttgatagtggtgctaaaattgttgagttcggaggatgggcaatgcctgttcaattctcaagtatcaaagaagaacataatgcagttagatataatgttggtctttttgatgtaagtcatatgggagagatagaaattagtggtaaagatgcagaacaattcatacaatacatcctttctaatgatacaaatcttctaacaaatgataaagcaatgtatagtgcgttatgtaatgatgaggggggcatcattgatgatttagttacatataaacttaatgaaaaccactacttgcttattgtaaatgcagccaataccaataaagattatcaatggattaagaaacatagctctaattttactgtagatgtgagcaatacttcagacaaatacggccaattagctattcaaggtcctcattcaagagcattaataaatgaattagtggatatagatgtaagccatatggcaatgtttgaattcaaacagaacgtacaaatctttggtaaatctattattctttcgcagtctggttatactggagaagatggctttgaaatttactgtaagcaagaagatactaaggatatatgggagcaattattagaatacgatgttacaccatgcggtttaggtgctcgtgatacgctaagacttgaagcaggattacctttacatggtcaagatttatctgaatcaattactccttatgaaggagggatagccttcgctgctaaaccgttaattgaaaatcattttattggcaaatccgtactcaaagctcaaaaagaaaatggttccgagcgtagaacagtaggtcttgaactattaggtaaaggcattgctagaacaggttatgacgtactagatgaaaatagtaatgaaattggtttcgttacatcaggaacacaatccccatcttctggtaaatctatagcacttgcaataatagatagagatgcatttgaaatgggcaaaaaagtaattgtgcaaatacgtaagcgtcaagttgaggcaaaaatagttaaaaaaaatcaaattgagaaa

SEQ ID NO: 34560 - DNA, 375 bp, Staphylococcus epidermidis
ttgaaagaacgcggaaaaatagaaaaattgtggcgtgaagaaaaatatcgtgtgctatttcatgatcagaatgcatatcattcgataagaacgttattaaaatcgcctaccacattgggtgaagtgaaagaacatataacgcacgctttaaccattacacctacaaaaggctcagttatcaatgcttttgaacatatgtgggggtatttcaaaaaacaatgtacacaatatgaaaagcaacatagccgagaattaaaagcgttgtatattgaaaatcaaattgactattttgagctgttgtcttttttaaaaaatttagcagataaatatgctgtcgagtacttacaacaaagtaccatactcaatattacaaaa

SEQ ID NO: 34561 - DNA, 549 bp, Staphylococcus epidermidis
atggataaaaaaggactacgtagaaatataattaaaaagatgaaatcttacgacaaagaacaaaaatatttggctgatgaatggttggctaagaaattatatcaaagtgaagcttatcgcaaagctaacacaattggttttgttttatcgatgcctcatgaagttaatacatatccaattattactcattcgctaaacaataataagaaaatttttgttcctgaaacaaattatcaacagcaagacatgacttttaagcaactattatcaattgaggatatcgagaaagatagcaaaggtatttatcattctatttccccagtcggtacaacgaataaaatggacttagttgtagtaccgggggttgcatttgacaaattgggctatcgaataggatatggtggtggttattatgaccgattcctgagccaacataaatgtaatacagttagtttactatacgattttcagttagcccaattcaatatagaaccacacgatcaacctgtagagcaattaattatttatcacaataaagtggtggaggaa

SEQ ID NO: 34562 - DNA, 2088 bp, Staphylococcus epidermidis
ttgctaaaaagattaaaagaaaaatcaaatgatgaaaaaatgagaaacaccatgaataaaagaatcaatttcatatttggatttatagtatttatctttgctatagtcgtattgagattaggttatttacaaatagcacaaggatctcattacaaacaattaatcaaaaacgatgaaaacataactgttaatgaatcagtaccaagaggccgaatactagatagaaatggcaaagtactagttgataatgcttcaaagatgtctattacatacactagaaaccgtaaaacatcacaaaaggaaatgttaaatactgctaagaaactgacagatttaattaaaatggatacagataaaattactgagagagataaaaaggatttttggattcaaatgtatccgtcatctgctaaaaagttaatgagaaaagaacaattaatgttagaggatggcagtatttcacaagaccaatttgatacccaacttagagataaaataggaaaaaaacaattaaaacagttaactaaaaaagatttgcaagttttagcaatttatcgggaaatgaacgctgggtcaactctagatcctcaaacaattaaaaatgaagacgtaagcgagaaagaatatgcagccgtatcacaacagctttctaaattacctggtgtaaatactacaatggattgggatagaaaatacccatacggtgatactttaagaggcatatttggagatgtgtcgacttcgactgaaggtatacctaaagaattaactgaacaatatttatcaaaaggttattcacgaaatgatcgggtcggtaaatcttatcttgaatatcaatacgaagatgttcttaaaggcacgaagaaacaaatgaaatatacaactgataaatctggaagagtaataagttcagaagtacttaatcctggctcaagaggtcatgatttacaattaactatagatattgatttacagaaaaaagtagaatctttattagaaaaacaaatttctaaattacgtagtcaaggtgctaaggatatggacaatgcgttaatggttgtccaaaatcctaaaaatggagacattctcgctattgcaggaaagcaaattgataagcaaggtaaactcaaagattatgatatcggcaactttacagctcaatacacagtaggttcttcagtaaaaggaggaacattattagctggataccaaaataaagctattaatgttggagaaactatggtagatgagccattaaaattccaaggtggtttaactaagcgttcttattttaataaaaatggtcatgtatctatcgatgataaacaagcacttatgcattcatcaaacgtatacatgtttaaaaccgcacttaaattagcaggtgacccctatacttcaggtatgtcattacctaataatatagcagatgctggtcgtaaattgcgtaaagggttaaatcaagtaggtcttggcttaaaaacaggtattgacttaccgaacgaaacgccaggccaaatagaacccttaactaataatcctggtaactatttagacttagctattggacaatacgacacatatacaccacttcagttgtcccaatacgtatcaactattgctaatgatggctatagaattcaaccacatattggattgtctatttatgaatctactaataaagatgaaactggtccattaaaacgtaaaattaagggtaatgttttaaataaggtaaataactcaaatgacgaaattaaagaagttcaagaaggcttcaaaatggctttcaatgaaaagcaaggtacaggttatgctagttttagaaatactgtagtaccttcagctggtaaaacaggaactgctgaagtttttcaagacggagaacctagagttaactcaacatatatcggttatgcacccgtcgatgatcctaaattatctttttcaattgtctatacaaatcaacctgttccaccaccttggttaaatggtggagatttaggtagagacgtaatcaactactattttaaagataaggataataaaaaagatgactctcaatctaataacgaagagaaagaagat

SEQ ID NO: 34563 - DNA, 1575 bp, Staphylococcus epidermidis
atgtcagttttaactgtcatgcaattcatagtcaatattatcatcatgattgtgttattaacgattatgattcttggggttatttggttatttaaagataaaggtcaaaatcaacacagtgtactaagaaattttcctgttttgggtcgaatccgttatatttctgaaaaaatcggtcccgaattaagacaatatttcttcgctaacgataatgaaggaaaacctttttcacgaagtgattataaaaacatcgttttagctggaaaatataaatcacgaatgaccagttttggtacagggaaagattacttagagggattttatattcaaaatacgatgttcccacttcaagcaactgaattacatatcgatcatactgaattcatttctacattcttatatcatattgagaatgagcgcctatttagtagagaagaatacagaaaaagcgctcaggttgatccgtttttcttaactgatgaacatgcagtagtattgggctctaaccttaagcatccctttaaaattaaacgcttagttggtcaatctgggatgagttatggcgctttaggtaaaaatgcaattactgcactgtcaatggggttagctaaagctggtacatggatgaatacaggtgaaggtggattatctgaatatcatttgaaaggtaatggtgacatcatctatcaaattggtccaggactctttggagtaagagatcatgatggcaattttaatagagacatgtttatcaatcttgccgaacacaataatgtacgcgcatttgaaattaagttagctcaaggtgctaaaacacgtggtgggcatatggaggggaacaaagtcacagaagagattgcacgcattagaaatgtgaaaccatatgaaactattaattcacctaatcgttttgattttattaaaaatccaacagatttactgaatttcgttaatcatttacaatcgataggtcaaaaacctgtcggcttcaaaattgttgtcagtaaagttgaagaaatagaggcgttagttaaaacaatgatagagatagacacctatccaagctttattactgttgatggtggtgaaggtggtacaggcgctaccttccaagagcttgaagatggtgttggtttaccgttatttacagcacttcctatcgtttcaagtatgttagaaaagtatggcataagaaacaaggttaaaatttttgcgtccggtaaattagtgactccagataaaatcgctattgcattaggattaggtgcggatctcgtcaatattgctagaggtatgatgataagtgtaggatgcatcatgagccaacaatgtcatttaaatacatgtccagttggagtagcaacaaccgatcctaaaaaggaaaagggacttattgttgatgaaaaacaataccgtgttacaaattatgttacaagtttgcatgaaggtttatttaacatcgctgcagctgtaggcgttcatagtccaacggagattacttccgaccatattatctatagacaattagatggcactacaacgtccattcaggattataaacttaaattaatttct

SEQ ID NO: 34564 - DNA, 816 bp, Staphylococcus epidermidis
atggaacgtttagaaaacaaaatcgcagtgattaccggtgcgagtactggtattggacaagcatcagccgtggcgttagcaatagaaggagcacatgtgttagcgcttgatatatcagatcaattagaagaaactgtgcagtctattaatgataatggtgggaaagcaactgcatatcgcgtagacatttcagatgataaacaagtcaaacaattctcagaaaaaatagcacaagaatttggacatgtagatgttatttttaataatgcgggtgtagataatggcgccggacgtattcatgagtatccagttgaagtgtttgataaaattatggctgttgatatgagaggaacgtttttagtaactaaatttttattacctttaatgatgaaacaaggtggttctattattaatacagcttcattctctggacaagctgccgatttataccgttcagggtataatgctgcaaagggcggtgtcattaatttcacaaaatctatcgctatagaatacggacgtgaaaatattcgtgctaatgccatagcacctggaacaatcgaaacaccacttgttgataatttagcaggtacatcagatgaagaagccggacaaacattccgagaaaatcaaaaatgggtaacaccattaggtcgactaggaacaccggatgaagtcgggaaacttgtagcatttttagcttccgatgatagttcatttataactggtgaaactattcgtatagatggtggcgttatggcttatacatggcctggagaaatgttaagtgatgaaagttggaaaaactctactaaa

SEQ ID NO: 34565 - DNA, 1161 bp, Staphylococcus epidermidis
atgaacatgaaaaagggtgtttctcagcttacgttacagacattgagtttggtcgcaggctttatggcatggagtatcatttctccattaatgccatttatttcacaagatgttgatatttctccaggacaaatatctgtcattttagctattcctgttattttaggttctgtactacgtgtaccatttgggtacttaactaacattgtaggagcgaaatgggtgtttttctggagttttattgtactattacttccaatttttcttttaggtcaagctcaatcacccggtatgctaatgttatcaggattctttctaggaattggtggcgcaattttttcagtaggtgttacttcagtacctaaatacttttcaaaagacaaagttggtttagcaaatggtatatatggtgtaggtaatattggtactgcagtttcatcattttgtgccccagtgttagcaggtgcaattggctggcaaaatacagttcgtagttatttaattattctaagtatatttgcaattttaatgttttttttaggagataaaaatgagccgaaagtgaagattcctttgatggctcaagtcaaagacctatctaagaattataagttgtattatttaagtttgtggtattttattacttttggagcttttgtggcttttgggatttttttaccgaactttctagttgatcattttagtattgataaagtggatgcaggtattcgttcaggtatatttatagcactagcgacgttcttaagaccggttggtggtgttataggtgataaatttaatgcagtacaagcgcttatcatcgacttcgtgataatgattattggtgcgcttatattaagcttatctagtcatattgttctgtttacgataggctgtttagcaattagtatctgtgcaggtataggtaatggtttaatatttaaattagcaccttcatacttttctaaagaagcaggttcagcgaatggtattgtatccatgatgggaggactaggcggtttcttcccaccactggtgattacttttgtaacgagtatcactggttcaagtcatctcgctttcttcttcttggctatatttggtgtaattgctcttattacaatgattcatttaaataaaaaagagaaagctattcgtata

SEQ ID NO: 34566 - DNA, 1029 bp, Staphylococcus epidermidis
ttggagcaaactgatttaagtttagagcaattacttaagaattattatgaaaccacgaacgagaaaattgtatttgttaatagacaaggcaaaattattgctatgaatgacgcagcaaaagatattttaactgaggaagataattataatgctatgacaaatgcgatttgtcatcgatgcgaaggatactctaatgaatatgatgtacaatcgtgtaaagattgttttttagagacaacgcaattacaacattccaatttccaagtatttatgaagacaaaagataatgaaattaagccttttacagctatgtatcaaaatattgatgaacaaagaggtattagtgcatttaccttacagaatgtggcgcctcagattgaaaggcaagaaaaaatgtatcaacaaaaaatgttacatcgttcaattcaagcacaagaaaatgaacgaaagcgtatttctagagaattacatgatagtgtaatacaggatatgctcaatatagatgttgaactaaggcttttgaagtataagcacagggataaggtgttagctgaaacatctcaacgtatagaaggcttattatcacagcttattgatgatattagaaatatgtctgttgaattaagaccttcttctctcgacgatttaggcattgaagcagcttttaaatcatattttaaacagtttgaagaaaattatggtatgcatattaaatatgattcgaacattaaaggcatgcgttttgataatgaaattgaaacagttgtgtatcgtgtagttcaagagggtgtatttaatgctctaaaatatgctgaggttaatgaaattgaggtaagtacgcatagtgatggcaagcagattgtagcagaggttgtggatcgaggtaaagggtttagtttagatcatcaccctaaaggctctggacttggattgtacggaatgagagaacgtgcagaattagttaacggtcatgttaatatagagacacatattaatagaggtactataattacattagatataccgatt

SEQ ID NO: 34567 - DNA, 417 bp, Staphylococcus epidermidis
atgaatacaaatgatgcaattaaagttttaaaggaaaacggacttaaatatactgataaacgtaaagatatgctagatatctttgttaaagaggataaatatttaaatgctaaacatattcaacaacaaatggataaagactatcctggaatatcatttgatactgtatacagaaatcttcatttatttaaagatttaggcattatagagagtaccgaattagatggagaaatgaaattcagaatcgcatgcacaaatcatcaccatcatcattttatttgcgaaaattgcggagaaactaaagtgattgatttttgtccaatagaaaagattaaaagtcaattacccaatgtaaatattcatactcataaattagaagtgtatggtatttgtgaagaatgtcaacgtaaagcaaac

SEQ ID NO: 34568 - DNA, 675 bp, Staphylococcus epidermidis
atgcttaatcaatttgtatgggttatttatccatatttatgtttagcaatatttgttattggacatatcgcaagatataaatatgatcaattttcatggacagcaaagtcgagtgaaatgattgaaaagaaacgattaaaatggggaagtttactttttcatttaggtattattccggtattctttggtcatgttgtgggattattgattcccgctaattggttagaggcgataggagtaaataatcatatctatcatataggtgcagtttatataggtagtgtttttggtataataacattaataggaatgttgttgctaactttaagacgactatccatcaaaaacgttagacgattaagttcattttcagatatatttgtgaatatcgttttgttgattattttaataatgggttgttattctacgcttgtaaccaatgcgattcaacctgaatttgattatcgtcaaaccattgcgatatggtttagacatttattcatgttttctccaaatgctgacttaatgttaaacgtgccttggtcgtttaaactgcacatattattagggtttacagtgtttgcgtgttggccatttactcgtttagtacatgtttggagtgtaccactgtcttatatgaacagaagatatattgtttatcgcaaaaacaaaatt

SEQ ID NO: 34569 - DNA, 888 bp, Staphylococcus epidermidis
atgttaataggatcacatgtttcaatgagtggcaaaaaaatgctgcaagggtcagcagaagaagcacataaatatggtgaatctacatttatgatttatacaggtgcgcctcaaaatacaagacgtaaaaatattgaagatttaaatatcgaaaaaggccagcaggcaatgaaaacatatggcttatcaaatatcgttgtacatgcaccatatatcattaacattgcaaatacaaccaaacctgaagtatttaatttaggagtcgactttctacaaaaagaaatcgaaagaactcaagcgctcggagcgaaagatattgtactgcatcctggagcgcatgtcggagcaggtgtagataaaggaattcaaaaaattattgaaggacttaatgaagtactcacacatgataatgatgtaagaatagcacttgaaactatggcgggtaaaggaacagaagtagggagatcttttgaagaaattgctcaaataattgatggtgttacacataatgatcgcttatcagtatgttttgatacgtgccacactcatgatgccggttataacgtcaaagaagatttcgatggtgtactagaaaaattcgacagcataattggagtagatcgaattaaagtagtacatgttaatgacagtaaaaacctaagaggtgcacagaaggatcgtcacgaaaatatcggctttggtcatattggctttgatgcacttaattacgtagtacatcatgatacttttaaaaatattcccaaaatattagaaactccatatgttggtgaagataaaaaaaataaaaaaccaccgtataaattagaaatagacatgttaaaatcacaaaaatttgatccagaactcaaaaacaaaattttaactcaa

SEQ ID NO: 34570 - DNA, 1344 bp, Staphylococcus epidermidis
atgtcaaaacatccatttgaacactttaatttagatgagaatttaattgaagctgttaaaaatctcaattttgaaaaaccgactgaaatccaaaatagaatcataccgagaattcttaaaggaacaaatttaataggacaatctcaaactggaactggaaagtcacacgcttttcttttaccattaattcaacttatagaaagtgacattcaagagccacaagccatcgtagtagctccaacacgtgaacttgctcagcaactatatcaagttgctatgcatttagtaaaattcaaaaaaggtataaatgtaaaacttttcattggtggtaccgatttagaaaaagataaacaacgatgtagccatcaaccacaactcattattggtacaccaacaagaattaatgatttagcacattcaggttatcttcatgcacatttagcgtcatatttaattatagatgaagctgatttaatgattgacctcggtctcattgaagatgttgaccatattgcagcgagattagatgatgaaaatgctcatctagcggtatttagtgcaacaatacctaaatcattacaaccatttttaaataaatatttaagtcaaccagaatttgtagaagttgatggcaaagctcataataaagaaaatatcgaattttatctaattcctacaaaaggttctgctaaggtagataaaacattggaattgatagatatattgaatccttatctatgtattattttctgtaacagtcgtgaaaatgccgatgaattggcagacactttaaataaagaaggaattaaaataggtatgattcatggtggtttaacaccaagagaacgtaaacaacaaatgaaaagaataagaaatttagattttcaatttgtcattgcaagcgatcttgcttctagaggaatagatattgaaggcgtaagtcatgttattaatttcgatgtacccaatgatatcgatttcttcacacatcgcgtaggtcgaacaggaagaggtaattataaaggtgtagccattacattatatagtcctgatgaagaaagtaatattactcttattgaagacagaggttataaatttgaaaatgtagatattaagaatggtgaattaaaaccgataaaggcatacaatatgcgtaaatcaagacagcgcaaagatgaccatttaacaaatgaagttaaacacaaagtaagaagtaaatcaaaacgtaaagttaaaccaggctataaaaagaagtttaaacaagaagttgaaaaaatgaaacgtcaagaaagaaagcagtatagtaaaaagcaaaatagacaaaaacgaaaaaataataaagga

SEQ ID NO: 34571 - DNA, 1104 bp, Staphylococcus epidermidis
atgtctgacaaccaagttaaaattaaaaagcaaacaattgatccgactttaacactagaagatgttaaaaaacaattaattgataaaggaaaaaaagaaggtcatttaagtcacgaagaaatcgctgaaaaactgcaaaattttgaaatggactcagatcaaatggatgatttcttcgaccaattgaatgacaatgacattacacttgttaatgaaaaagatagttctgacacggatgataaaatcaatcctaatgatttgagtgcccctcctggtgtcaaaatcaatgacccagtgcgtatgtatttaaaggaaattggtagagttaatcttttaagtgctcaagaagaaattgagcttgcaaaaagaattgaacaaggtgatgaaattgctaaatcacgattagctgaagcaaacttgcgtttagttgttagtattgctaaacgatatgttggtcgtggaatgttattcttagatttgattcaagaaggtaatatgggcttaattaaagctgtggaaaagtttgattttagcaaaggatttaaattttcaacatatgccacttggtggattagacaagctattacacgagcaattgctgaccaagcacgtacaattcgaataccagtacacatggtagaaacgattaataaattgattcgtgttcaacgtcaattattgcaagatttaggaagagatccagctcctgaagaaattggagaagaaatggatttaccaccagaaaaagtcagagagattttaaaaattgcacaagaacccgtttcattagagacgccaattggtgaagaagatgatagtcatttaggagatttcattgaggaccaagaagctcaaagtccatctgaccatgcagcatacgaattgttaaaagaacaattagaagatgttttagatacacttactgacagagaagaaaatgttttacgtttacgttttggtttagatgatggacgaacaagaacactagaagaagttggaaaagtattcggtgtaacacgtgaaagaattcgtcagattgaagcaaaagctttaagaaaactaagacatcctagtcgaagtaaacgtcttaaagatttcatggat

SEQ ID NO: 34572 - DNA, 1794 bp, Staphylococcus epidermidis
ttgcgtatagatcaatccgtcattgatgaaataaaaaataaaactgatatattagatttagttagtgaatatgtaaaacttgaaaaaagaggacgcaattatatcggtttgtgtccttttcatgatgaaaaaacaccctcatttacagtttcagaagataaacaaatttgtcattgttttggatgtaaaaaaggtggtaatgtttttcaatttacgcaagaaattaaagacgtatcatttgttgaagctgtaaaggacttgggtgaacgagttaatattcaagttgatatcgggcagaaccaaacaaattcctcgacaaaaattgcgtctgatgagttgaaaatgattgagatgcatgaactcattaaagattattatcattatgctttaatgaaaacagttgaaggtgaggaagccctaaattatttacatgaacgcggctttacggatgaccttattaaagaaagagaaattggatatgcacctgataactcacatttttgtcatgattttcttgaaaaaaaaggatatgatatagaactagcatttgaagcgggtttgttatctcgtaatgaagagaatttcacatattttgatagatttagaaatagaattatgtttccattaaagaatggacaaggacgaattgttgggtattcaggacggacatatactgatcaagaaccaaaatatttaaatagtccagaaacacctattttccagaagcgtagaattttatataatttaaataaagcacgtaaatttattcgaaagcaagatgaaattattttattagaaggtttcatggatgtaattaaatcagattatgctggtttaaaacaagttgtcgctagtatgggtacacagttatcacaagaacatattacttttttacaaaaactaacgcaaaatgtaacattaatgtttgatggtgattatgctggtaaagaagctactctaaaaactggacaagcactgttgaatcaaggcttaaatgtgtatgtggttcaactaccttcaggtatggatcctgatgactatattagaaaatatgataacgaacaattcttaaaatttgttcaacaagacaaacaatcatttgtgctatttaaagttaaaatgtatcaaaatgagattaatcataatgatcttgcatacgaaaaacattttaaagaaactgtgcgagacctttctttagtcaattcaggtatcattcgtaataaacttattcaaaacatagctgatatatttaaagttaatccagaaaccattcaatatgagttagatgcaacttatcaacatcagatgtcgtcgaacacttatcccacttttcaagatgagccaagcaaacaacaattaatactcggtcgtctgactaaaaatgagaaagcagaaagagctttaattaagcatttaacgaaagataaagatacttttttgaattattatcaaaaaattgtgccagaagactttacaaatagctatttaaagcgtatatttagttatttgtacgactattattcaaaaaatgattattatacaattagcgatatgatgcaatatattgaatctaatgaattgagagaagttcttattgaattagatcaatatcatctaaatgatgaaccttatgaaaacgaaatagaggactatattcaaattattaaaaataataataacgaagattccttagaaagtttgaattataaattaagggaagcatcgcgtattggagattcagaattacaaaaatattatttgcaacttatcgttaacaaaaataaaaatcgaatg

SEQ ID NO: 34573 - DNA, 2856 bp, Staphylococcus epidermidis
ttgagtaatttgatacaagatattaagcaatctttatataagggatttatagataaagatagttcccataaaggcaattttgttccaagattactagtaaataacaaagaagaaaatgtactttctactattatagatcagctgcataattgccaatcattttgtatttcggttgcatttataaccgagagtggtttagcaagtctaaaatcacatttttatgatttaagtaagaaaggcgtaaaaggaaggataataacatcaaattacttaggttttaatagtccgaaaatgtttgaggaattattgaaattagagaatgtagaggttaaattaacaaacattgaggggttccatgctaaggggtacatatttgaacatcataaccacacttcttttattatagggagttcgaatttaacttctaatgcattgaaattgaattatgaacataatttatttttatctactcataaaaatggagatcttgttaacaatattaaatataaatttgatgaactttgggattctagcttttctttaactaatgaatggataaatgaatataaacagtcttttgaatatcaaacattgcaaaaagtatttgataacactgttgttcaaaattcagatattaaaaagtttaatgaatcaaaacttataaaacccaatttaatgcaagaacacgcattaaagtcattagagtctttgagaaatgtgggagaagaaaaggggttaattatatctgcgacagggactggaaaaactattttatgcgcacttgatgtaagagcttattctccagataaatttctatttattgttcataatgaaggtatattaaatagagctatagaagaatttaagaaagtatttccatatgaggatgaaagtaattttggattattaacaggaaaacgaaaggatcatgatgctaaattcctttttgcaacaattcaaacactttctaaaaaggaaaattataaattgtttaactctaatcattttgactacatcgtttttgacgaggctcatcgaattgctgcatctagttatcagaaaatatttaattattttaaacctaactttttgctaggaatgactgcaacaccagaaagaactgatgaattaaatatttttgaattgtttaattataatattgcttatgaaattcgtttacaagaggctttagagagtaatattttatgtccttttcattattttggagttacagattatattcaaaatgaaatgagtcaagaagatgcatttaatctaaaatatttagcatctaatgaacgtgttgaacacatcataaaaaagactaattattatggttattcaggtgacgttttaaagggtttaatatttgttagtagtaggggtgaggcgtatcaattagcaaaccaattaagtaaacgtggtatatcatcggttggtttgacaggaaaagattctatagcttatagagctgaaacaattcaacaactaaaagaaggatctattaattatataattactgtagatttgtttaacgaaggaattgatattcctgaaataaatcaagttgtaatgttaagacctactaaatcaagtattatatttattcaacagcttggtagaggattaagaaaaagtactaataaagaatttgttactgttattgattttatcggtaattataaaactaactatatgatcccaatagccttatctggaaataaatctcaaaataaggataattacagaaaattcttaacagatactacggttttaaacggtgtttcaacaataaattttgaagaagtagctaaaaataaaatttataattcactagattctgttaaattaaatcaaccaaaattaattaaagaagcttttaacaatgtaaaagaccgtataggtaaattacctttacttatggactttataaataacgattcgattgatccaagtgtgattttctcacgttttaaaaattattatgagtttttaataaaaaataaaattattgagaatgaattaagtattaatgaatttaaaaatttaacatttttatcaagacaattaacacctggacttaaaaaagtagatattgatgtattgaaagaaattatacaaaatgacgtaacttatgaaaatttaacaaaaaaaatgttaaacattaataacgatatttcggaatatgatattaacacttcattaagcattttagattttacttttttcaaaaagactataggtaaaacttacggattacctttaatacaatataaggataatcttatttgtctagcaaatgaatttaaagaggctttaaataaaccactatttaacacatttattcatgatttaattgatcttgctaattataataatgacagatatcaaaataagaaaaacagtttaattctatataacaaatattctagggaagattttgttaagttattaaactgggataaagatgaatctggaacaatcaatggttatcgtatgaaacatcgtacacttcctttatttatcacttatgataaacatgagaatatcagtgataatactaagtacgacgatgaatttttgagccaagacgaattgaaatggtacacgcggtccaatcgtaaattaacttcaccagaagtacaaaatattttaaagcatgaagaaagtaatacagatatgtatatatttgtgaaaaaaagagatgatgaagggaaatatttctactatttaggtaaagccaaatatattaaaggaactgagaagcaagattatatgcctaatggaaatagcgtggtaactatgcatctatcaatgaatacgtccattcgagatgatatttatagatacatcact

SEQ ID NO: 34574 - DNA, 1638 bp, Staphylococcus epidermidis
atgaaaaataattggatagatgtattagacgaaagtttagtcaaagatttttataataatcaaacttccgaagagcaacaagaaggacttaatactacactgtcttttggtacggctggtattagagggaaattcggtttaggtgagggccgattaaataagttcacagtatctaaagtagcattaggctttgcccattatttaacatcaagtatcgcgcatcctgtcgtcgtcatacattatgacacaagacacttatcacctgaatttgctcaaattatcgctaatattctagcaagtcatgatattaaagtttatcttgctgatacatacagaacaacacctgatttgtcatttgcagtcagatacttacaagctgatgcgggtgttatgattactgctagccataatcctaaagattacaatggaatcaaagtatatggagaagatggtgctcaattatcaaccgacgcttctgcacaattaagcacatatatcgataaattaggtcatccacttcatattaatgtacctagtttaactactgaacaacaatcattaattcattcagtcccgagtgaagtcagagaagattatttcaaaaacgtacaagacttagttggaacgattccacagtccgatttaaaagttgtctttacaagcttgcatggtacgagtgttccaattgtacctgacattttatcttctcttaactttaatcaatttgagttagttgcatcacaatgtgaacctgattcagatttcagctctgtagccagtgcaaatccagaggatcataaagcgtttgatcaatcgatagaacttgctaatcttattgatgctgatttacttattggcacagatcccgatgcagaccgcttaggaatcgttgaacgtgatgctgaaggtaacatctactattacaacggaaatcagattggtgcacttttgttaaattatcgcatcaaacaaacagaaggattgcctaacagaatcatgttccaatcaattgtaagtggtggcttagctaaatctcttgctcaatatcataatgttaatttcaaagaagttttgacaggttttaaatatatcgcagctgaaataagacatctgtctcctgaacaaaactttatttttggctacgaggaaagctatggcttcttagctcgtcctttcgtaagagataaagatgcgattcaaatcgtgccattaatgattaagtatgcagctgaattaaaaaatgaaggacgcatgcttaaagatgaattagaagacattactcgaaatgtcggtaactttaatgacaagctcttctcacatacatttgaaggtactcaaggcaaggcaaaaatcgaaaatattatgactcaattcagaagtgaaacacctacggaaatgtgcggtcttaaagtcattgcaatcgaagattttgaaacaggtaaaaagactgacttacaaaatgatgaagtcagtgatataactttacctaaagcgaatgtaataaagatatactttaatgaaggatttattgctttgcgtccttctggtacagaacctaaaatcaaactttatgtatcactttcttgtgatcattttgacgtaattgcacaaaaaataaacgatgctatatttaactct

SEQ ID NO: 34575 - DNA, 864 bp, Staphylococcus epidermidis
ttgaaaaagataaaaaaagcaataattcctgccgctggtttaggtactcgttttttaccagcaactaaggcgatgccaaaagaaatgttaccaatattagataaaccaacaatccaatatattgtagaagaagcttctaaagcagggattgaagatattattatagtgactggcaagcataaacgtgcaattgaagatcactttgataatcaaaaagaattagaaatggttcttgaaaataaaggaaaagcagacctgcttgaaaaagtacaatattcaacagatttagctaatattttttacgtacgacaaaaagaacaaaaagggctaggacatgcaattcatactgcaaaacagtttatcggtaacgaaccatttgcagtgttattaggagatgacattgtagagtctgatactccagctattaaacaattaatggatgtttatgaagaaacaggccattcagtaataggggttcaagaagtgccagaatctgatacacatcgttatggtgtgattgatccttctgctaaagaggggagtcgatatgaagtacgtcaatttgtagaaaagccgaaacaaggtactgccccgtctaatttagcaatcatgggtcgttatgtattaacaccagaaatttttgattatcttgaaacacaacaagaaggtgctggaaatgaaattcaattaactgatgcgattgaacgaatgaatagcaaacaacaagtgtatgcatatgattttgagggtaatcgttatgatgttggagaaaaattaggatttgttaaaacaacgattgaatatgctttaaaagatccagaaatgagtcaagacttaaaagcattcattaagcaactagatatt

SEQ ID NO: 34576 - DNA, 1539 bp, Staphylococcus epidermidis
atgaaatatatgattggtgtagatatggggacaacgagtacgaaggctgtgctatatgatgaaaatggcaagtttataatgaaacataatattggctatgacttacatacaccaaatgtagatgtgtctgaagaaaatcctgatgaaatatttgatgctgtgcttatgacggttaaatatattgtaagagaatctggcatcgcaaaagaagatattaagtttatttccttgagtgcacaaatgcatagtttgattgttatgaacgagaataatcaacgtttaactgaaaatatcacttgggctgacaatcgtgcgaatgattatgctgatttaatagaaaaatcatatggcggttttgaattgtatcaacgaactggtataccgattcatcctatgtcaccattatctaaaatcttttggatgagacatgaggaaccgaaaatatttaaacaaacagctatgtttgcagatttaaaaacatacgtactgtttcaattatatgaaagattcgtcattgattattctttaggatcagctacaggtatgatgaacttagaacaattagattgggataataaggctttagaattgttaggtattgaaagaaatcagttaccacaacttgttccaactacacatgttttaactggaatgaaaaaacgctacgcaacgttgatggggattgatgagcaaacgcctgtgattgtcggagcgagcgatggcgtattatctaacttaggtgtaaatagttatcaaaaaggtgaagttgctgtaactattggcacatcgggcgcaattcgtacggtaattaatcagccaaaaacagacgagaaggggcgtactttctgttatattctcgataaagatcaatatgtgattggcggtcccgtcaataatggtggtgtcgtcttgagatggttacgagatgaaattttagcgagtgaagttgaaacggctaaaaggttgggggtcgatccttatgatgtgttaactcagattgccagcagagtaaaaccaggtgcagaaggattaatttttcatccctatttagctggagagcgcgcaccattgtggaacgctgacgctaggggttcattcttcggattaacattatctcacaagaaagagcatatgattcgtgcagcattggaaggtgtattgtataacttatatacagtttatcttgcattaattgaagtgatgaatgaaacaccgacaacaattaaagcaacgggtggttttgctaaaagtgaaatttggcgacaaataatggcagatatttttgatacagacttaatcgtacctgaaagctacgaaagttcatgtctaggtgcatgtgtacttggaatgaaagctctgggagaaatagatgatttttcagtcattaaagatatggttggtacaacacatgcccatgaacctaaccaagaaacagttgccatctaccaacaacttgttaccattttcattaacattagtcgttctatgactgagaactacagtgatattgcgaatttccaacgagaacatttaagtgat

SEQ ID NO: 34577 - DNA, 933 bp, Staphylococcus epidermidis
atgtctataacttatcctggcacagtatatctaatcggtgcaggaccaggcaatccaaacttattaactaaaaaagctgaacggttaattagatcagctgacgtgattttatttgatcgtctcgtaaatcctttcatcttacagtatgcttcttctcaaacaaaagtgatcaatgtgggaaagaaaccttattgtaaacacattcaacaagaggagattaatcaaaaaattgttgaagcagctaatcaatatcaatgtgtggtgagactaaagggaggagatcctgcgatttttggtagaattacagaagaagtacaaacattagaaaatcatcatattcattacgagattgtccctggtgtgacatcagcaagtgctgccgtagcaactatgaatatgggattaacgatgcgttctatcgcaccgagtgtgactttctcaactggtcattttaaagattcggttaatcacgatacggatattaggaacttgattaatggaggcactttagctatttatatgggtgtgaaaagattaggtcaaattattaaacaaattgaatcatatacgaatgaagactaccccattgcaatagtgtttaatgcttcctgctacaatgaaaagattgttataggtcatttaagtacgattgaagaacaattggtttctcaacaactagaaggtcatccaggcatatgcattttaggtaatatacttgatgacattaatcgtacgttattgaataataataagaatgacaagggaaatctatatttaatcaagggagataaagaacgtgcaattgcaaaggctgaaactttatatgatgaaggaatccaatgtctgattgattttgaccatagctaccacatttctcaacaaaacgtgtataacgaaatgattaaacacaagagtattaaaacaatatatgta

SEQ ID NO: 34578 - DNA, 312 bp, Staphylococcus epidermidis
atgaaagctaaagaaaagattaaagttacaacaatgaatgaaatgattcctcaaataggcaaaaaagtagttgtaaacgaaaaagaaataggtatttttctcacagataatggtgatttatatgccattggaaatatatgtccacataaagaaggaccgttgtctgaagggactgtaagtggtgattatgtttactgtccgttacacgatcaaaaaatagctttaaaaactggagaagtacaacaacctgatacaggatgtgtagagacatacgaagtagaagttattgatggagatatttacttatgtcta

SEQ ID NO: 34579 - DNA, 2403 bp, Staphylococcus epidermidis
atggcaaaacaaaaacttgtaatgattggtaatggtatggcaggtttaagaacgatagaagagattttagaacgttcacaatcacaatttgatattactattattgggaaagaaccttatccgaactataacagaattatgttatccaatattttacagaagaaaatgaccgtcgaagatacaattatgaatccttatgattggtatcaagagaataatattgaacttataaataatgatccagtggaaaaagttgataaagaaaacaaaatagttactacttctaaaggtattgaagtagagtatgacatttgtattttcgctactggatcaaaagcttttgtattacctataccaggttcaaatcttcctagtgtcattggatggcgaacaattgatgatacaaataaaatgattgaaattgcccaaacgaaaaaacgcgcagttgtcattggtggaggtcttctaggcttagagtgtgccagaggacttctagatcaaggaatggaagtgacagttcttcatttagctgattggctcatggaaatgcaattggatcgtaaagccggagaaatgcttaaagcggatttagaaaagcaaggtatgaagattgaacttcaagcaaattctaaagaaatcattggtgataaagatgttgaagctattaaattagctgacggtcgggtgattgaaacagatttagtagttatggctgttggtatcagaccttatactgaagttgctaaagatagtggattagatgtcaatagaggtattgttgtaaatgattatatgcaaacatctgattctcatatttatgcagtcggtgaatgtgccgaacatgatgggaaagtttatggattggtggcgccactttatgaacaaggcaaagtgctagcagattatttaactggtaaagaaacaaaaggttataaaggatctactactttcacttcacttaaagtatctggttgtgatttatatagtgcagggcaaattgttgaagatgaagatgtccatggtgtggaaatttttaatagtgtcgacaatatctacaaaaaagtgtatttaagtcagggtcaagtcgttggtgctgtcttgtatggtgatactgatgatggatcacgattttataatatgatgaaaaaacatgaaacgcttgaagattatacacttgtttctttattgcataaaggtgatgaagatgcggggacatctattgctgatatgtctgatgatgaaacgatttgtggatgtaatggtgttgataaaggaacaatcgtcaatgctattacaagtaaaggtttaacgtctgtagatgaagtgactaaagcaacaaaagcaggtaattcatgtggtaagtgtaaaggtcaaatcggtgagttattacaatatacattaggtgacgactttattgctgcaaaaccaacaggtatttgtccatgtactgatttaacaagagaccaaattgtaactcaaatcagggctaaaaatctcaaatcatcaaaagaagtacgacacgttcttgatttcaaagataaagatggttgtcctaaatgtcgacctgcaattaattattatttaaatatggtttatccttttgaacatcgagacgaaaaagattctcgcttcgctaatgaaagatatcatgcaaatatacaaaatgatggtactttctcagtgattcctcaaatgcgcggtggtgttacagatgctgaccaactcattcgattaggagaagttgctaaaaagtataacgtaccacttgttaaagtaacaggttcgcaacgtgtaggtttatatggattgaagaaagaagaattaccacaagtttggaaagatttaggaatgcgttctgcttctgcttatggtaaaaagacgcgttctgttaaaagttgcgttggtaaagagttttgtcgttttggtacacaatacacaactcgactaggaataagacttgaaaaaacatttgaatatattgatacacctcataaatttaaaatgggagtatcaggttgtccgagaagttgtgtagagtctggtgttaaagattttggcgtcatatctgttgaaaatggctaccaaatatttatcggaggtaatggtggtactgatgttactgtaggtaaattgttaacgacagttgaaaccgaagatgaagtgattcaattatgtggtgccctcatgcagtattacagagaaacaggtgtttacgctgaaagaacagcaccatggttagaacgtatgggctttgaaaatgtcaagaatgtcttattaaatcaagaaaagcaaaaagaactgtatttaagaattatggaagccaaaaaagctgttgagaatgaaccatgggaaactattgttgaaaataaagaagcacaaaaaatctttgaagttgagaaggtg

SEQ ID NO: 34580 - DNA, 1389 bp, Staphylococcus epidermidis
atggttaaaaatatggatacaattgtacaacttgcgaagcatagaggatttgtattccctggtagtgatatctatggtggattatcgaatacatgggattatggtccgttaggtgttgaattaaaaaataatattaaaaaagcttggtggcaaaaatttattacgcaatcaccttacaatgtgggtattgatgctgcgattcttatgaatccaaaaacatgggaagcatcaggacatttaggaaattttaatgatcctatgattgataataaggacagtaaaattcgttatcgtgcagataaattaatcgaagattatatgcaaaatgaaaaaggtgacgaaaactttatagcagatggcttaagttttgatgagatgaaaaaaattatagatgatgaaggaattgtttgtccggtcagtaagactgcaaactggaccgatatccgtcaatttaatcttatgttcaagactttccaaggtgttactgaagattctactaatgaattatttttacgacctgaaacagctcaaggtatttttgtgaactataaaaatgttcaacgttctatgcgtaaaaaattaccttttggtattggtcaaattggtaaatcattccgtaatgaaatcacaccaggaaactttattttcagaacaagagaattcgaacaaatggaacttgaattcttctgtaaacctggcgaagaaattgagtggcaaaattattggaaaacttttgcaagtgaatggttaacagatttaaacatctcagaagacaatatgcgccttagagatcatgatgaagatgaattatcacactattccaatgctactactgatattgaatataaattcccatttggttggggtgaattatggggtattgcgagtcgtacagactatgatttaagacaacatagtgaacattcaggtgaagattttaaatatcacgatcctgaaacaaacgaaaaatacattccttattgtattgaaccatctcttggtgcagatcgtgtgactttagcatttttatgtgacgcgtatgctgaagaaggtgttgaaggtagtaaagatgcacgtacagttatgcacttccaccctgctttagcaccatataaagcggcagtattaccattaagtaaaaaattatcaagtgaagctattaaaatttttgaacaactaagctctagctttgcaatagactttgatgaatcacaatctattggtaaacgttatcgtcgtcaagatgaaataggtacaccatattgtattacttttgattttgattcattagaggacaaccaagtaacagtgcgtgacagagatagtatggaacaagtacgtatgccaatatcagaacttgaaacatttttagctgagaaagttaaattt

SEQ ID NO: 34581 - DNA, 717 bp, Staphylococcus epidermidis
atgataggtaatattctagtcgctcacggcatgagaaaaggaaatcagaatgaagctttagaagaatttatcggaactttattaaaagatgagcaatattattatgagttagcatttttagaaagtgaaacacaaaatcttgaaatcataatggagaagatgattaagcaaggaattacaaaatttcgtattgtacctttactcatttttagtgcaatgcattatatcagtgatattccacaaatacttaaagagatgaaagctcgatatccacaaattgatagtaaaatgagtgcgcctcttggtacacatccatatatgaaaacattagtagaaaatagaattgctgatgaaaaagtcagtgaaggttcaaccaaagcaactatagtaattgcccatggaaatggaagtggacgttttacgaaagcacatgatgaattaaaagcatttgttaaaacgcttgatagtcatcatcctgtttatgcaagagctttatatgggacattagcatttaaaaatgatttagataaaatctcagagcaatatgacgagttagtcattgtcccattatttttatttgatggtagattggtgaataaagtaaaacgtcttttaggtgaaatgacattgcatagtcaattacacattacgccatcgattaactttgatccaattttaagattaattattagagaaagacttgaagcgttagatatt

SEQ ID NO: 34582 - DNA, 897 bp, Staphylococcus epidermidis
atgacagaacataaatcaggatttgtttcaattatcggtagacctaatgtaggtaaatctacctttgtaaacagagtaataggacataaaattgctattatgtcagataaagctcagacgactagaaataaaatacaaggtgtgatgacaagagatgatgctcaaatcatctttatcgatacacctggtatccataagcctaaacataaattgggagattacatgatgagagtagctaaaaacacactttctgaaattgatgctattatgtttatggttaatgtaaatgaagatataggtagaggagacgagtatataatggaaatgctaaaaaacgtcaaaacacctatatttttagttttaaataaaattgatttggttcatccagatacattgatgccaaaaattgaacaatatcagtcatatatggattttacagacataattccaatttctgctttagaagggttgaatgttgatcattttattgatgtattaaaatcttttttaccagaagggcctaaatattatcctgacaatcaaatttcagaccatcctgagcaatttgtggtgagtgaaatcattagagaaaaaattctacatttgactagtgaagaaattccacatgcaattggtgtcaatgtcgatcgtatgattaaagaggatgaagatagagtacgtattgagacgacaatttatgttgaaagagattcacaaaaaggtatagtaataggtaaaggtggtaaaaagcttaaagaagtgggtaaacgtgcacgtagagatatcgagatgttacttggctcgaaagtttatcttgaattatgggtgaaagtacaacgtgattggagaaataaggtcaattttataagacaaattggatatgttgaagatcaagat

SEQ ID NO: 34583 - DNA, 354 bp, Staphylococcus epidermidis
atgaaacgttttaaatatgcatatgagggtttttgcgcaattttaaaaaaagaccaaaatttcttattacacattttagcggccataattattatcatattaggatttgtgttaaatattgatcgtatagattggatattaatcatcgtagctataggacttgttttaagttttgaagctattaatacctcaattgaatttgttgttgacctaattacaactgactatcatgaatatgcaaaatacgctaaagatatagctgcgtttagtgttgtcatcgtttcaatcgtttcaatatgtattgggttaatcgtttttttaccatatatattagaaatatttaagggaggaatg

SEQ ID NO: 34584 - DNA, 681 bp, Staphylococcus epidermidis
atgaatattggcattatcattttcatcatatctgtgataattacaggtgttagcgcattacgagataaaagtcacgaggacagacaaaatcaaagacccaatcaaaaaacctcaaacgagcaacatcaagaaggtggtttctttgaaaaattagaaaaaacttttcaagaaattagtgacgaattaaatgatgaacctgaaaaaaaacagagtaaaccttttgaaacttcattaccaccactgaacgaagattggaatgaaaatgaaaagaaaaaaacatcacatcataaagaaaaacaaaatacttcacaatccaaacgtcaaacaacgtctactcatgaacatcaaaatatccctcagccagataaaacaacatcaagagatgataattatgaaaaacttaagcaagaacttgaacaagatgtaactaaaaatttaattgacgtacgtaaagaaattgataaagaaaaagaaaagcaacttgttatgattgagaggaaagctcaagacattatcaacgataaatatctttcagaaagaacaaaacgatatagaataaaacaactactaaattctaggaatgttgagaaaaacatgtcgcgctctgcttttcaatatgatagtgatgaagttattaatggtattatttggtcagaaattttaaataaaccaaaacagctt

SEQ ID NO: 34585 - DNA, 678 bp, Staphylococcus epidermidis
gtgacgtatggttatccgaaaaagtggaaggaaaacatgacttcaggacaagtaatagctgctgagttacgtttaggaatagtgagtggtgagattgaatcccatatacaactaagtgaaaatcaagttgcacaacaatttaatgttagtcgttcaccagtcagagatgcatttaagttacttcaaacagatcaactgattcaattagaacgtatgggcgctcaggtacttccttttggtgatcaagagaaaaaggaaatgtatgatttgcgtttgatgctcgaatcattcgccttttcaaaattaagtggaacagatacacaacatattattaaggaaatgaaaaagcaattagaaatgatgaaggttgcagtccaatttgaggatgctgaagcatttacacaacatgattttgagtttcatgaggtgatgattcaagcaacaaaccatcagtatcttaaagtgttttggaatcaccttaaacctgttatggaatcactcatactcatttcaatgagacaaagaatggcaaatgaccccaaagatttcgagagaattcataaaaatcatcaagtttttatagatgctgttgagaacgatgatgcctccatattgagaaaagcattccatttaaattttgatgatgtaggagaaaatattgaagcattctggttacgt

SEQ ID NO: 34586 - DNA, 411 bp, Staphylococcus epidermidis
atgccttggacgatggaagattatcctcaaagttggaaaaactttgaagaactcgaacggaaaaaagcgattgatattggtaatgcgatgctcaaagatggctataaagaatctgatgtgatacctattgctacaaatcaagctgaaaaatggtatgaacatgcttcaaaagaagaattagagacgttaaaaaacaaacatatcacgcaacatcaagaagatgaatcagctaatcctaaacttaacgaagaaaatgttcatgtatattatgaagatcagctatggaaagtaaaatctaaagaggctagacgagcttcagatacatttgacacaaaatctgaagcagttaaccgtgcacaacatatcgcagagaataaaggtaccaaagtgattgagcatcgaaaagatgag

SEQ ID NO: 34587 - DNA, 1914 bp, Staphylococcus epidermidis
atgcaacaaatcattaactctttgatacacttcgaccgttcaaaaattgatatagctaaaggaatacgacaaggatttttaatgatactaccagcattgataggttacttattaggattccctatgtttggtattctaatatcaacaggtacgctagcacatgtctacgtttttagtggatcaccacaatctatgttaaaaacagtcatcacctgttcactatcatttactatttgcatgattcttggcactttaacagtatctcagcctattttatttggattactattactgattgttgttacaatcccatattatacgtttaatgcactaaaaatcgctggtccatcatcgacattctttttagtaacgttttgcttatctataaacttaccgatagccccagaagaagcgcttttacgtggatctgcaattctcattggtggtatattggctaccataacagtaattttaacaatcatatttgctaaagagaaagcagaagacagagcaattcatgcggattttaaaacattacataacttgctacatcattttgatgagccagaggatttcaaagcatatgctcgaaacgctgttacagaatttagaaattctgaaaaacttttaattacctcaacatcaggtggtaatggaaaattaagtaaaaggtttcagaaattaattttattacacacatcagcacaagggatatattcagaattactagaactcaatgaaaatcatattcgtccattaccaagtgacttagttgaaatgatggatcatatcattaatagtgttcaacaacctaaacaacaatatcgaccgtggtcaaaagttgttgatgtggcaccagaatttcaaaatttaatggatcatattttgaaaatagatgaaatgattcacgcaaacgataatcaaattaaatatgaagcagatattcgcaagcctttatatagtaagcgaatatatcaaaatctaactttcgactcaattgtatttagaaatgctttgcaatatacagttattatggcagtagctatatttattgctctagcgtttaacattcaaaaagcgtattgggtgccattgtcagcgcataccatcatgttaggtaatgtgacaacgattcgtacgttagacaggtcacttgctagaggtattggaacgataatcgggactattgttttgtcgggaatcttggcatttcatatcgatcctattttcgctattatcattatgggattttctgccatgatgacggaagcgtttgtggcatctaactatgcatttgcagtcatttttattacgacacaagtcattatgctcaatggtctagcctctcaaaatttaaatattgagatagcgtacacccgaattattgacgttctgataggtatagctattgcagttattggtatattcatactcgcgcgtaaaactgcatcctcaatgttatctgatgctattgccgaattggtacgtaaagaaggtattttatttcattatttattttcaaaaaataaacaggaaacgaatgaacgtgatagggtagaaagtttaaatttaaacgtcaaaatcagtaatgtgacacagatttacaattcagcgaatggtgaattgtttagtaataaagaagcggtaaggtattactatccaagcatatttgctctagaggaaataagttttatgctagagcgtgccatgaataataaacatcgacaaacaataaatgatgatttaatgggtgaatatttagtcgtatttgaaaatatagctaagcatttccaatttcaagcagatttaaatctcagagacatgcaaccattacctcaatacaattacatccgtgcttcccttatgaatatacaacgtaattgtgttgaacaacgtcaggccatcacaaaagat

SEQ ID NO: 34588 - DNA, 1272 bp, Staphylococcus epidermidis
atgaaagaaaaacgtagtaatgttcgttggtattttgcaatagggttcttctttattggggttattgcttacatggatcgatctaacatatcttatattgcagtaccgatgatgaaagatttggggttaactaagacacaatttggtttattagcatcatttttctccctaggatatgcattaatgcaagtaccttcggggatgttagcagagaagtttggaccacgtaaaatgattactgtcgctttagtttggtggagtgcatttaccatcttaacagggatgattaaacatcatggtttactttactttattagattcttatttggtgttggtgaagcgccaatgtatccatccaatgcagtttttaactctttttggttcgctaaaaatgaaaaaggtcgtgcatctagtgcgttgttagcaggatcttattttggtccagttttagcacctatcatcacgatagccattgtcaatgcttttaactggcaagccgttttctatattttcggggttgtaggaattttaatggcagttctttgggcaattattgctaaagacttaccagaacaacataaaatggtaaacgatgccgagaaaagatttattactcaaaatcgtgatattgtcgcaactgagaaatctttaccaccgtggaaacgttttttaagtcatttcagtttctacgcaatcgcattgcaatactttgtagttcagtttgttatcgcgttgttcctaatatggttaccaacatatttaactgaacaatatcatgtgaatttcaaagaaatgactatcagtgcattaccttggttatttatgttcttcttaattttatttgctggagctatttcagacaagattttgaatacaggtcaatcacgttttgttgcacgtggcgtaattgcgattgcgggatttgtggtattctcaatttcaattttcttagcagtacatacagacaacttatatgtaaccattttctggttatcactttgtttaggtggcgtaggtatttctatgggaatgagttgggctgcagccactgacttaggtcgtaatttctctggaactgtgtcaggttggatgaacttatggggaaatgttggcgcacttattagtcctttacttgcaggaattgttgtagatcatttaggatggtcaatgacattacaactcttaatcgttccggctattatagcagcaattctatggttcttcgttaaaccagacaaacctcttattgttagtgaagaacacgttaataaa

SEQ ID NO: 34589 - DNA, 759 bp, Staphylococcus epidermidis
gtggataatttgcaaagatattttatgaatcaaagcgctgatgaaaatcagtgcttttttattgaaaacaaagaagactatcatcatatcgtgaatgttatgcgctataaagaaggacaaaatattattgtcactttttcagatgaaaatgtattcaaatgtaaaattatttcaataaacgatcaatcgattgaaattaaattagtagaaaagcaacaaattaacactgaactacctcagaacattacaatatgtagtggtttaatcaaagcagacaaatatgaatggatgatacaaaaagcaactgaaatgggggcaaatgagtttatagctgtagccatggaacgttctgtggtcaagctcaatgattctaaagtagaaaagaaattatcgagatggcaaaaaattataaaggaagctgcagaacaaagttatcgtttaacaataccaaatataaaatttaagtcgaatttaaaagaaatttatggtatgataagtcaatatgactatgttcttatagcatatgaagaacaagcaaagcacggtgaattaagtcaatttaagcaaacaattaaacaatttaagacacaggatcgtgttttaatcatatttggacctgaaggtgggctatcagatagtgaaatttcattattcggtgatgtaagtactatagttggattaggtccacgtatcttgcgtgctgaaactgcacctctttacgctttaagtgcagtaagttatgaaaaagaattattgggg

SEQ ID NO: 34590 - DNA, 1827 bp, Staphylococcus epidermidis
atgggtaaagtaattggaattgatttaggtacaactaactcttgtgtttctatcttagaaggagatgaaccaaaagtaattcaaaacccagaaggtgcacgtactacaccatcagtggttgcatttaaaaatggtgaaactcaagtgggtgaagtagcaaaacgacaagctatcacaaaccctaacactgtacaatctattaaacgtcatatgggtacagattataaagtagatattgaaggtaaatcatatacaccacaagaactttcagcaatgattttacaaaatttaaaaagcactgcagaaaactatttaggggatacagtagacaaagctgttatcactgtccctgcttatttcaatgatggtgaacgtcaagcaactaaagatgctggtaaaattgcaggcttagaagttgaacgtattatcaacgaacctacagctgctgcacttgcttatggtttagataaaactgaaacagatcaaaaggttctcgtatttgacttaggtgggggaacatttgacgtatctattctagagttaggcgacggcgtatttgaagtattatcaactgccggagataataaacttggtggcgatgacttcgaccaagtgattattgattatcttgtttcagaattcaagaaagagaatggtgtagatttatcacaagataaaatggcattacaaagattaaaagatgctgccgaaaaagctaaaaaagatttatcaggtgtttctcaaactcaaatttcattaccattcatttctgctggagaaaatggcccattacacttagaaattagtttaactcgttctaaatttgaggaattagctgattcattaatcaaaaaaactatggaaccgactcgtcaagcattaaaagatgctggtttatctacttcagaaatagatgaagttattttagttggtggttcaacacgtattccggccgttcaagaagctgttaaaaaagaaattgggaaagaaccacataaaggtgttaacccagatgaagttgtagcaatgggtgctgctattcaagctggtgtaatcacaggtgatgttaaagatgtagtattacttgatgttacgccattatctttaggtatcgaaattatgggtggacgtatgaacacattaattgaacgtaatactactattccaacttccaaatcacaagtttattctacagcagctgacaatcaaccagcagtagatattcatgtattacaaggtgaacgtccaatggcatctgacaacaaaactttaggaagattccaattaactgacattccacctgcaccacgtggtgtacctcaaatcgaagtaacatttgatatcgataaaaacggtattgttaacgttacagctaaagatttaggtactaataaagaacaaaacattacaatacaatcaagctcatctctatctgatgaagaaatcgatcgcatggtgaaagatgctgaagaaaatgctgaagcagataaaaaacgtcgtgaagaagtagacttgcgaaacgaagcagatagtctagtattccaagttgaaaaaacagttaaagacttaggcgaaaatattagcgatgaagataagaaaaatgctgaagagaaaaaagatgcacttaaaacagcattagaaggtgaagacatcgacgatattaaagctaaaaaagaagaacttgaaaaagtaattcaggaattatctgcaaaagtttatgaacaagctcaacaagcacaacaacaaggccaagaagaacaaggttctcaagatagcactgttgaagatgcagactttaaagaagttaaagatgacgaagataaaaaa

SEQ ID NO: 34591 - DNA, 795 bp, Staphylococcus epidermidis
atgacaaattttcattctatagatgctacacaagtaacaaacgtcactttaaatgttaaagatttaaataaattaactgatttctattctaatgtattaggtttttctattgaaaaacaaacgaatcaacaaaccgtattcaacatcggaaatcttggttatactttaactttaaatgaacttaacaacggtcgacaaccggaatttagagaagcagggttattccatgttgcttatcttttaccgactcgtagcgatttagcagacttcctttatcatgctaacaatctcaacatcgcaatgggtggtggagatcaccttgtcagtgaagcgctatatttcactgatcctgaaggcaatggtattgaagtctatcatgatcgcccttcagaagactgggtgtggcgagacggttttgtcaaaatggatacattggaagttgatgtcaatgatttaatgactcaacggtcaaatgaaggttggcaaggttggtcggaagaaggaaaaatcgggcatttacatctcaaaacacacaatttagaatctgcttatgcattttatgttgaaaagttagggttcgaacatatatctaatttcccacaagcactatttatgtccactcaaaagtatcatcatcatatagctacaaattcttggcagtcaaataagattagaactcaaaatgaacaaacttatggtttatgtcactttgacatatatcaacctaatgcaaatactactcatgttacttcacctgaaggctttgacattacaattcatggtaacgaaataaaa

SEQ ID NO: 34592 - DNA, 1491 bp, Staphylococcus epidermidis
atgacaaatattaacgtaagaaattatatagatgaaagttacggcttgtttattaacaatgaattccaagctagtgatagtggggaaacattaactgtttctaatccagctaatggtgaagatttagctaaagttgcacgcgctggtaaaaaagatgtagataaagctgttcaagcagctcatgatgcatttgatagttggagtaagatttctaaagaagaacgtgcagattatttattagaaattagtcgacgtattcatgagaaaactgaacatttagcgacggttgaatcactgcaaaatggtaaaccttatcgtgaaacatcaacaattgatgtaccacaagcagccaatcaatttaagtattttgctagtgttttaacaactgacgaaggttcagttaatgaaattgatcaaaatacaatgagtttagttgttaatgaacctgttggggttgttggtgcagtagtagcatggaatttcccaattttattagcttcatggaaattaggaccggctttagcagcaggtaacacagtagtaattcaaccatcatcatctacgcctttatcattaattgaacttgctaaaattttccaagaagttcttcctaaaggagtagttaatgtcttaactggtaaagggtctgaatcaggagacgctattttccatcatgaaggtgtagataagttatcatttactggttctactgacgtgggttacggtgtagcacaagcaggtgctgaacgtatcgttcctacaacattagaactaggtggtaaaagtgctaatattatctttgatgatgctaatttagagcaagtgattgaaggtgttcaacttggtatattatttaaccaaggtgaagtatgtagtgcaggttcaagattattagtacaatcatctatttacgatgaattgttgccaaaattgaaagaagcatttgaaaatattaaagttggcgatccatttgatgaagatactaaaatgagtgcgcaaactggaccagaacaattagataaaattgaaagttatataaaaattgctgaagaagatgacaaagcgaacatcttaactggtggtcatcgaatcacagataacggcttagacaaaggttacttctttgagcctacaattattgagattaacgataacaagcatcaacttgctcaagaagaaatcttcggtccagttgtagtagttgaaaaattcgatgatgagcaagaagctatcgaaattgcaaatgattctgagtatggtttagctggaggtatctttactacagatattcatcgtgcattaaatgtagctaaagctatgagaacaggtcgtatttggattaacacttataatcaaattcctgcaggtgcgccattcggaggatataaaaaatcaggtattgggcgcgaagtatataaagatgctatcaaaaactatcaacaagttaaaaatatctttattgatacaagcaaccaaactaaaggtttatat

SEQ ID NO: 34593 - DNA, 582 bp, Staphylococcus epidermidis
atggagataagtagagctaaagaactggtaaaagaaaaactgcctgataaacgttatcaacattcattacgagtggcggatacagcagttaagttagcagaaatatacgatggtgatatcaaaaaagctgagttggcaggtatattacatgattactgtaaatacgaagacttaagtacaatgtatcaaattgttagacaatacgaacttgaaagtgatttgcttagctatggtggagagattcttcatggaccagtatgtgcggcacttatgaagcatgaatttgatgtaaatgatgaagaagttttacttgctataaaatatcatacgactgggcgtcaacaaatgactaaaacagagaaacttgtttttattgcagactatatagagcctggtagaaaaacgcctggagttgaagaaattagagatatggcatacaatcaaggtagcttagataagacaatttatgagatttctaagcgtactgtattatttttaatagaaaaggatattactgtatatggcgccacaattgcgtgtttaaattattataattatagcgatgaaagaataaaggatgat

SEQ ID NO: 34594 - DNA, 807 bp, Staphylococcus epidermidis
gtgaaatttgcagtaattggaaaccccatttctcattcattatcgccattgatgcatcatgctaattttcaatctttaaatttggaaaacacgtatgaagcgataaatgtaccagttaatcaatttcaagacattaaaaaaataatttcagaaaagagcattgatggattcaatgttactattccacataaagaacgtattattccgtacctagatgatattaatgaacaagcgaaatctgttggggcggtaaatacagttttagttaaagatggtaagtggattggttataatactgatggaattggttatgttaatggtttaaaacaaatatatgaaggtatagaagacgcttatatattaattttaggtgcaggtggagcaagtaaaggtatagcaaatgaattatataaaatcgttcgtccgactttaacagttgcaaatagaacgatgtctcgttttaataattggtcgttaaatattaacaaaataaatttaagccatgcagaaagccatttagatgaatttgatattataataaacactacacctgctggtatgaacggcaatacagattctgtaatttctttaaatcgtttagcttcacatactttagtaagtgatattgtttataatccatataaaacaccaatactaatagaagctgaacaaagaggtaatccaatctataatggtcttgatatgttcgttcatcaaggtgctgaaagttttaaaatttggactaatctagaaccagatataaaagcaatgaaaaacatagtaattcaaaaattgaaaggagaatta

SEQ ID NO: 34595 - DNA, 1098 bp, Staphylococcus epidermidis
ttgaatgaaatactaaaatgtattggatgtggtgcacccctacagtcagaaaataaagacgcacccggctatgttccagaacataatatgtttcgagaagatgtcatctgtagaagatgttttagattgaaaaattataatgaagttcaagatgtgggtatggaaagtgaagattttttaaatctacttactggactatctgaaaaaaaaggaattattgtcaatgtagtagatgtgtttgattttgaagggtcattcatcaatgcaatacaacggattgttggtaataaaaaaattatattagtggcaaataaaatagatttattacctaaacaaattaatcatcgacgtgtaaaagaatggttgagaaaatctgctcgtaaatatggattagaagcagaagatgtcgttcttatttctgcaaataaaggttgggggattgatgaattattgcaatctataaaccatgtaagaaataaagatgacgtatacattgtaggtacaacgaatgttggaaaatctacattaattaataaattaattgaacagagtgtgggagaaaaagatgtagtaactacatcacgctttccaggaacaactttagatatgatagatattccattagacgaaaaatcatttatgtttgatacaccaggtatcattcaatcacatcaaatgacaaattatgtatctgaaaatgagttgaaaatcattatacctaaaaatgaaataaagcaacgtgtgtatcaacttaatgaaaaacagacattatttttcggaggattggcacgcattgattatgtatctggtggtaaaagaccacttgtttgtttcttttcaaatgatttaaatattcatagaactaaaaccgagaaagctaatgatttatggaaatcccaattaggcgcattgctttcaccgcctcaagatgcacaacaatttaatcttaatgatgtaaaagcagtaagactggaaactggtaaaactaaacgtgacatcatgatatctggtttaggattcataactattgatgctggtgcaaaagtgatagttcgtgttccaaaacatgtagatgttattttaagaaattcaattctt

SEQ ID NO: 34596 - DNA, 684 bp, Staphylococcus epidermidis
atgataggaattattggagcaatggaagaagaagtgacgattttaaagcgtaaattgaatgatatgaatgaaataaatattgcgcatgttaaattttatgttggcaagctaaaccacaaagaggtggttttaacacaaagtggtataggtaaagttaatgcttctatctcaacgactttgttaatagaaaaatttaatccagaagtcgtcattaatactggatcagcaggtgcactagatcaaacactatctattggagatatattagtgagtaatcatgtattatatcatgatgctaatgctacagcgtttggttatgaatatggacaaatacctcaaatgcctaaaacttatactactgatcctactttgttgaaaaaaacaatgcatgtattagaacaacaacaactgaatggtaaagtaggtatgattgttagtggtgatagttttataggtagctcagaacagcgacaaaaaattaagcaacaatttccagaagctatggctgtcgaaatggaggcaactgcaattgcgcaaacatgttatcaatttaaagtaccatttatcgtaactagagctgtttctgatttagcaaacggtaaagccgatatttcttttgaagaatttttagataaagcagctttatcatctagtgagacagtttcattattagtagaatcatta

SEQ ID NO: 34597 - DNA, 807 bp, Staphylococcus epidermidis
atgattaaagccattgcggtagatatggatggaacatttcttgacacaaataaacagtttgatcgaaatcgttttgaaactatttttaaagaattaatagataaaaatattaagtttatagctgcgagtgggaatcaatttgcaaagctaaaatcaatttttggagatagggaaatgttctttatatctgaaaatggagcagtcatctataaaggtaatcaactttacaattatcgaagttttgatcagtatatttttcaaaaagttgtaaattatttaaatttgaatcaaaagataaacaatttgattatttgtggtgtaaaaagtgcatatattttaaaagaaacaagcgaagcatttaagcaagatgcacgtacatattatcaccaactaatagaggttgactccttacaaacattacctgatgatgattatgtgaaaattgctttcaatataaatcgtcagactcatccagacttagatgagaaattagctcttaagtttaaagacgatattaaactagtatcaagtgggagagatagtatagatgttattatgccaaatatgactaagggtcaagctttgtctagattattaaaagaatggcaaatgcctgcttcacatttaatggcatttggagatgcaaataacgataaagatatgttggagcttgccgaacatagttatgttatggctaatagtgaagatcaatcattatttgatatagcgagtcatgtggcaccttccaatgatgaacaaggcgtactatcaacaatcgaaaatgttgttctcggttattccaataaa

SEQ ID NO: 34598 - DNA, 609 bp, Staphylococcus epidermidis
atgaagcagtggatgaatagattaatcaccttaataggcgtattgttaatcattttagctatttatttattctcaaagccatatatcgataattatctacatgaaaaagataacgatcataaaattgaaaattatgataaaaaggaaaaagaacagacaaagacatctaaatcgacgccaaagataccttccgataaatctaaaatggctggttatatagaagttccagatgcacaaataaaagaaccagtataccctggtccagcaacaccagaacaactcaatagaggtgttagttttgcagaaggtgacgaatctcttaatcaacagaatatttcaattgctggtcatacgtttacagatcgttcgcactatcaatttacaaatttaaaatcagccaaaatcggtagtaaagtgtattttaaaactggaaatcaaactagaaagtataaaataactaaaatacgtgatgttaagcctacagaggttaaggtattagacgaacatcctaataagaaaaatcaattaacattaattacttgcgatgactataacgaagaaacgggtgtttgggaaacaaggaaaatattcatagctacacaaattaac

SEQ ID NO: 34599 - DNA, 897 bp, Staphylococcus epidermidis
atgtttgattcaattagagagacaatagattattcagttgaaaataacatcagttttgctgatatgatgattaatgatgaaatggaaagagaaggtaaatctcgcgaagaagtgcgtgatttaatgagacaaaacttaaatgttatgcgtgaggcagttgaaaaaggtacgactggcgatggtgtggaaagtgtaacaggttatacaggtcatgatgctgctaaacttcgagattacaacgagaataatcatgcattatcaggtcatgaaatgattgatgcagtcaaaggtgcagttgcaacgaacgaagtcaatgcagcaatgggtattatttgtgctactccgacagctggttcctcgggaacgattcccggcgtaatatttaaattagaaaaaactcataatatcactgaagatcaaatgatagattttctattcacatcagctttattcgggcgagtagttgcaaacaacgcgagcgttgccggtgcaactggtggttgtcaagccgaagtgggttcggcatctgcaatggctgcagctgctgcagtatcaatttttaacgggtcaccagaacaatcaggacatgccatggcattggcaattagtaacttattaggcttagtttgcgatccagttgctggtttagttgaaattccatgtgtaatgcgtaatgctattggttcaggaaatgcattaatatctgcagaccttgcactagctggagttgaaagtcaaattccagttgatgaagtcataggtgctatggatagagtaggtcgtaatttacctgcatcattaagagaaacaggtttaggcggtttagcaggtacacctactggcgaagaaattaaacgtaaaatattcggcgaagcagacaacatggttaaaaataaa

SEQ ID NO: 34600 - DNA, 951 bp, Staphylococcus epidermidis
atgaaaaatatatcagatatagcaaaattagctggagtatcgaaaagtactgtttcacgctttttaaataatggatctgtgagtccagcaacgaaagaaaaaataactaaaataatagaagaaaataattatcagccaaatcaatttgcacaaagcttaagagctcgacgtaccaatttgattggagcaattattccgcgtatgaattcatacgctgttgacgaaacgattaagggtttggtacaccaatgtaatcaacatcgatatcagttattattaaattacacaggattaaaaatagatggtgaaatttcggcactaaaaacattatcacgtagtaaagttgatggaatcgtgctaatggcaacacatattactgaagcgcatattgaagtcattgagaaaattgatgttcctgtcattatagtaggacaagaacacgaccgattatatagtatatatcacgatgattatgaagctggatataaaattggagtactcattggtgaaaaaggttgtcgaaatgtacatttctttggcgttagtgaagaagatattgcagttggtattcaacgtaagctgggagttattcaagcgctgaaggactatcacataagtccgaaaatttatgaaacaacatttaagcatgaacaagcttttaaagatgtaagtcagcaacttgaaagagtacatgatgctgatgcgatagttggagcaactgataccattgcttttgcaatccataaatattgctctgatcatcaacaaaggttttacaattgttcaatatatggatttggtggagaccctatgactcaaatagtatcacctgtcattcaaacggttagctataattactttgaagcaggaaagcaagcattaaaagaaattaaccaactattaaaaggtgaacaaacaacattaaaaataaaaattcctatcaaattgaat

SEQ ID NO: 34601 - DNA, 1398 bp, Staphylococcus epidermidis
atgaatacatcacaaaagtttaggggagataatcgcttattattagggattattttaggggttattacattttggttatttgcacaatcacttgtaaatctagtcgtgccattacaatcatcatacaatagtgatattggtactattaatatagcagttagcttatcggcactattttctggtctgtttattgtaggtgcaggagatattgcagataaaattggtagagtaaaagtgacatacataggcttagcacttaatattgttgggtcggttttaatcattattacgccattaccaagtctattgattattggacgtgctattcaaggattgtcagcggcatgtataatgccagcgacactcgcaatcattaatgaatattatatcgggacagcacgacaacgtgcattaagctactggtccatcggttcatggggaggtagtggtgtttgtactttgtttggtggtttaatggcaactaaccttggatggcgctcaatctttattgtttcaattattctgacaatattatccatgtttctcattaaacatacacccgaaacaaaagcagagcctataggagatcaaccgacagagacaaagaaatttgatgttgttggtttaatcatcttagtggttagtatgttaagtattaatgtgataataactcaaacctctcaatttggtttgttctcaccatttattttgggacttattgcaatttttgttatatcgttaattatattcgtgatttacgaaaataaaatcaaacaaccacttgtcgattttgatatctttaaaaacaaaggttatacaggtgcaacgatttcaaactttatgttgaatggtgtagctggtggtacattgattgtagtaaatactttttatcagcaaaaattagattttaactctcaggaaacaggatatatttcacttacatacctaattgcagtattaattatgatacgtgtgggtgaaatgatattacaatcgttaggacctaaaagacctttgttactcggaagtgccttgaccgtcataggattaatattattatctttgacgtttttacctaatgcttggtatatagcgtcaagtgtcattggttatttattatttggtaccggtttaggtgtttatgcaacaccatccacggatacagctgttgcacaagcaccagatgataaagtaggcgtcgcatccggtgtatataagatggcatcatccttaggaaatgcatttggtgtggccatctcaagtacagtttacagcgtacttgcagcccaacttaatctgactttaggtggttttactggagtaatgtttaatgcgcttatagcattattagcattcctttctattttgttcttaataccgaaaaaacagtctaatgta

SEQ ID NO: 34602 - DNA, 750 bp, Staphylococcus epidermidis
ttgaaaattgatttaaattgtgatttaggagaagcttttggtaactatacattcggtggagatcagcacattttaccattaataacttctgctaatattgcttgtggttatcatgcaggtgatgaagatgttatgaatgaaactgttcaattagcgaaaaaaaataatataagtattggagcacatccgggtcttcctgatttgaaaggctttggtcgtcgtaaaatggatcttactccaaatgaaatttataacttagttatatatcaattaggtgcgttaagtggcttttgtaaaatcaatcatgtaaaaatgatgcatgttaaacctcatggtgccctttatcaaatgggggctagaaataaagaaattgcacatgcaattgctcaagcagtttttgatttcgactcaaatctaattttcgtcggcttagcgaatacattacttatttcggaagctgaattagtggggcttaaggtagcttcggaagtatttgctgaccgtcgttatgaagatgacggacaattggtaagtagaaaaaaaaccgatgccactatcactaatactgacgaagcaatccaacaagcattaaaaatggttttggaaaataaagttgtaagtaaaaatggaaaaatcatcgatttgaaagctgatacaatttgtgttcacggagatggaaaacacgcattagaatttgttacgcaaattagaaatgaattaatgaaagaaggcattgatattcaatcctta

SEQ ID NO: 34603 - DNA, 1773 bp, Staphylococcus epidermidis
atgcttaatttatttattttattacttgaacgcgtgggattaattattttactcgcatatatactcatgaatattaatcattttaaaacaatgatgagcgaacgtgacaaatggcgttcaaaattccaactaatcattatttttggtatattctctatgatttcaaattttacaggaattgaaatagaaaatggccatatcgtatctggtgatatttattaccacttaagcaaagacgcctcaatggccaatacccgtgtattaacaatcggtgtttctggtctaataggtggaccgtgggtagctataattgtaggcattatttcaggattatgtcgtttatatattggcggggctgacgcatatacctatcttatttcatccatagttatcgctatcatatctggttactttggtcatcaaacaataaaacaaaatacatatccgtccattaaaaaaggtgctattatcggtgcaataactgaaattattcaaatgggctgtatattattatttacaaataacctacatcacgcaattacattagtcagttttatagcactaccgatgattatcattaatagtttaggtacagccatatttttaaccatcattttgtcgaccatcaagcaagaagaacaaatgcgtgcagtccagacgcatgatgtattacaactcgctaacgaaacactaccttactttcgatctggacttaatgaaaaatcagcccaacaagctgctgaaattattttaaaattaatgcaagtgtcggcggtcgctattacaaataaaaaagatattttaacacatattggtgcaggcagtgaccatcacgtagcacgtaaagagataattactgatttatctaaagaagtgattcaatctggaaaattaaaagtcgctcatacgagagaaggaattggatgtcaccatcctaattgccctcttgaaggagccattgtcgtccctctttatatacataatgaagtcgcagggactttaaaattttatttcacagataacaatattatttcaacttcagaccaacagctcgcaaaaggtctcgccaatatattttcttcacaactagaactaggtcaagctgaaatgcagggacaattgttgaaagacgctgaaattaaatcattacaagcacaagtcaatccacatttcttttttaatgctattaacactatatcagcactagtaagaattgatagcgaaaaagcacgacgtttactgattcaactcagtcagttcttccgctctaatcttaatggtgcacgtaataatacgattactttacaaaaggaattacaacaagtagcagcatatttatccttagagcaagcgcgctatccaaatagatttaacatacactatcgaattgatgatcagtgtcaagatgcgctcatcccaccttttataattcaaatattagtggaaaattctattaaacatgcatttaaaaatcgtaaaaagaataatcatattgatgtggatgttagcatgaagcaagactacttaagtatatctgttcaagataatggtcaaggcataccagctgatcaattagatactattggatatacgacagtaacgtctaccactggtactggtaatgccttagtcaatcttaataaaagacttactggactatttggaacaacatcggcactgaacattcaatcttctcaatcaggcacgactgtaagttgtttaattccatataaatcttctaaggaggaacactttaatgaaagcgttaatcgt

SEQ ID NO: 34604 - DNA, 1359 bp, Staphylococcus epidermidis
atgatgtatcgatgtttgattgcaaatagaggcgaaatagcagtaagaattataagagcttgtagagagcttaacatagagacagttgccatttatgcaaaaggtgatgaaaatagcttacatgtaagtttagccgatcaagcaatatgcataggtgaagcaaatccattagacagttatttaaatattgatcgtattatatctgctgcaaaagttacagaatcaaacgtaattcaccctggctatggtttcttatcggaatctacgaattttgcgaaagccgttgaagacaatcatatacattttattggacctagtaagacaactatggaaatgatgggggataaaattactgccagacaaactgttaaacaagcaggagtacctgttataccaggttctaatgatgctgttcaaagtgtagatgaaattaaattattatccaaagaaataggatttccagttgtactaaaagcagctagtggtggtggtgggaaaggcatcagaattgttaaagaagcatctcatttggatcaggctttgaaagaagctaaaagtgaaggacaaaaatattttaatgatgatcgagtgtatgtagaggcgttcataccagtagcaaaacatgtagaagtgcagattatcggagacggtaaaaataactatgttcacttaggtgaacgcgattgttctgttcaacgaaagaatcaaaaattaatagaagaagcgccttgtgctgcattaactgaagaaagaagaacaagaatatgtggcgacgcagttaaagtagctcaagcttcaagatatcgtagtgctggaacaatagaatttttagttacagaagatgcacattattttattgaaatgaatgctcgtattcaagttgaacatacagttacagaaatgcgtgctgatagagacctattacaagctcagttatatttattaacacacggtgaattaccattcactcagaaagatattttatttaatggtcatgtaattgaggcgcgtataaatgctgaaaatcctgaaaaaaactttttacccactccaggaaaagttaataaattacacttaccacaaggatttaatatacgtgtagattctttactttacacaggttatcaggtttctccttattatgattcacttgtagctaaagtgattgtaaaggattctaatagacaaactgctattaataaattaaaagttgcgttagatgaaatggtcatcgaaggttttactactacagctgactttttatatgcggttttaaattatccaatatatgcaaaaggcgatgccagtaaagtagatataaaatttcttgaaaaacatcaaatcattaaagaggtgaaa

SEQ ID NO: 34605 - DNA, 756 bp, Staphylococcus epidermidis
atgaaagcgttaatcgttgatgatgaaccacttgcaagaaatgaattacaatatcttttaaatcttaatgatgctatagatgaaattgaagaagcagaaaacatagaagaaacattggagaagttactctacaacacatttgacttaatattcttagatataaatttaatggatgaaagtggtattgatttagctcaaaaaattaataaaatgaagcgatcaccacatattatctttgcaaccgctcacgagaaatttgcagtcaaagcctttgaattaaatgcaaccgattatatattaaaaccttttgaaaaagaacgtattaatcaagctgtaaataaagttgacatggctaaagataaaccaaaaaacaaagataaaactatcacacctaaatatattgattatagtgatgatgagcgcgctcaaacacatgtacttccaattgaagtggatgaacgtattcacatcttaaatttcacagacattatcgcattatctgttaataatgggattacaacgatagatacaacaaaacaaagttatgaaacgaccgaaacacttaatcattacgagaaaaaactaccttcctctctatttattaaaatacatcgcgctactatcgttaataaagaacatatccaaacaatagagcattggtttaattatacgtatcagctgacgttaacacatgaatttaaatatcaagttagtcgttcttatatgaagacttttaaacaacaactcggtcttcaa

SEQ ID NO: 34606 - DNA, 1020 bp, Staphylococcus epidermidis
atgacaagagaaattaaagcaagagcaacaaactgggacaaagataattcaatagcgttaacttattggaaacaaaatgtaaaacaaatgtggactgaagaggaattcaaaccttctaaagatttaagtgtttggaagacattatctgcggatgaacaagaaacttatgttaaagcactatcaggtttaacaggtttagatacaacacagggaactgaaggaatgcctttattggctttccactatcccgaagagatttggagaggagtatttgcatttatgtctatgatggagaatattcatcataagtcgtattcacatatctttacttcactacttgagagaaaagatactcattactacttaaaagagtgggtaccagcaaataaatatctaaacaaaaagacaaaattgattacaactaactattataaattacttaaaccaaaccctactgatcgtgaaatttatgtagcaatggcttcatcaattttcttagagtcattcttattcttctctggtttctactatccattgtatttagctggacaaggtaaaatggttcacagtggagaaatcattcgtaagattatcttagatgaaactattcatggtagtggtacaggatatgcagctcaagttatctttgataaattcagtaaagaagagcaagaggatattcgtaaagagttgatggaactatttgatcaactttacttcaatgaggttgaatatgcagcttcattatacgataagttaggtttaactgaagacgttattcgttacattcaatataacggtaatcgtgctttaatgaacttaggttgggagacagtatttaacccagagccatttaaccctattgtagaaaatggtttgagaacagatacaactaaccatgacttcttctcagttaaaggtgacggttatacattagcattaaatcaagtacctttacgtgataaagactttgatttcaacaatgttatttcatacgagttatctaacaaattcttacaa

SEQ ID NO: 34607 - DNA, 261 bp, Staphylococcus epidermidis
atgccttatttatcaccagaaacaatgtggttctattcaccaactgcatttgatattcctcaagaacatatcataaatgtggcggcagtagctcagaagtggatagatcaaggtgtttcaacaatcttatttgttaacagtgaaattgagacaaacaaactagcaagattatatgcatatgcacatgatagaggacttaaatcactttattacacaagaaacaaacttatcagtatcgctgaatgtacaagttgtgcagtc

SEQ ID NO: 34608 - DNA, 402 bp, Staphylococcus epidermidis
atgaagaaaacagcagtattaaatagtcacatttcaagcgcaatctccacactaggtcactatgatttattaacgattaatgatgcgggtatgcctatacctaatgatgacaaacgtatagatttagcagtgactaagtcattgccatgtttcattgatgtgttggagacagtgttaactgaaatggaaatacaaaaaatatatttagcagaagaaattaaaactgcgaatgcacagcaattaaaagcaattaagaaattaatcaatgatgatgtagaaattaaatttattgcgcattctgagatgaaagaaatgttaaaatctcctttaaataaaggaaatatacgtactggtgaaatcacccctttttctaacattatcctagaatctaatgtgactttt

SEQ ID NO: 34609 - DNA, 1266 bp, Staphylococcus epidermidis
atgaaaactttagaagaagttaaatccaaaacccaaaagataatgaaaaagcctgaactacttgcaccagctggtaacttagagaaacttaagattgctgttcattatggtgcagatgcagtgtttttaggtggccaagaatatggattacgttctaatgctgataattttactatggaagaaattgctgaaggtgtagactttgctaatcgttatggcgctaaaatttatgttacaacgaatattattgcacatgatgaaaatatggagggactagaagagtacttacaaaaccttgaatctacaggtgctactggtatcatagtagcggatcctcttatcatagaaacttgtaaaaaagttgcgcccagattagaaattcatttatcaacacaacaatcactttcaaattataaagctgttgaattttggaaacaagaaggattagaccgtgttgtacttgcacgtgaaactggtgcaatggaaatgagtgaaatgaaagaaaaagttgatattgaaatagaagcgtttatacatggcgcaatgtgtatcgcatattctggtcgttgtactttaagtaatcatatgacagctcgagattctaatcgaggtggttgttgtcagagttgtcgttgggactatgatttacttgaagttgatagtgatggagaattagatttatattacgacaatagtgatgttactccttttgcaatgagtcctaaagatttaaaattaatagaatctatacctcaaatgatggaattaggcatcgattcgttaaaaattgagggacgaatgaaatctatacattatattgccacagttgtttctgtatatcgtaaagtcattgatgcatatgccgaggaccccgaaaactttaaaataaaaacggaatggttaatggaattaaataaatgtgccaatcgtgacacagcaccagctttctttcaaggtacacctggttatgaagagcaaatgtttggtgaagaacagtctaaaaaatcatcttatgatttttgtggcctcgtgctagattatgaccatgaaacacaattagcaacaatacagcagagaaatcattttaaaccaggacaagaaattgagttctttggtccagaaattgatagttttaaacaagttgttgaagcgatttacgacgaagaaggtaattctttagatgcagcacgtcatccattacaaattgtacaaattaaagtagataagcctatttattctaacaacatgatgagaaaggaaattggc

SEQ ID NO: 34610 - DNA, 1602 bp, Staphylococcus epidermidis
atgaatatatataataaagtgacattatctgtcattttagttataacaattatcatttcgttcctcttttatttttatacaacagagaaaaaagtggacaaagataaattgtatgaaaacaaaattacaaatcataaacaagcaggtaaacctaaaaattatggtgtcgcatctaataataaaatagctacgaaagtcggaaataagattattgaagatggtggaaatgcggttgatgcggcaataggtgtttcttatgcactagcagtgacagaacctcattcatcaggactaggaggtggcggtgcgacacttacatataatggtaaagagaatgaaacgcctaaagcttatgaatataaaacaatgtcctcatatgaatataaagaaggcgacaaaattggagttcctggcttcgtgagaggattacatgatatgcacgcgaaagaaggaaaaatggatgagaaaaagattttagattacgttattccgcttgctaaagatggttttgaggtagattcagaactagaaagaagtttgaaattatatggtcgtgatattgatcacaactcaccattctataaaggaaataaaagtgttcgcgaaggagatattgtaaaacaagataaactcgctaatacattaactaaaatcaaagataaaggtcctgattacttctatgaagatattggtaaaagtgtttcaaaacaattagataataaattaactgaaagagatttcaaagaatttaaaacagaagaaaaagaagcggtaagtactgattataagaataatcaagtgtattcagcacctaatcctttaggaggcacattaatgcttcaaggattgaaaattgatgaaaaagaaaatgtagacaatatggatcgcaataattttatcacagcaatgattaaatcacgtgatgttatgtataagaatagagacattgttaatggtaatgagcctagtaatgaacaacatctgactgatgattatttacttggtgaacttaacaaagttaatattggtgaaaacacagataatggcagtgattttgatcaaattagaacggataatacaagtacaacccattttgtagttattgataagaatggtaagttagcaagtacgactaatacactatccagttacttcgggacaggagactatatgaaagagggattctatatgaataactctttaggcgactttagtaaggataaatcaagtcctaatcatggtgaacctcacaaggcgcctagatcatttatttctccgtcagtaattgttggccctaatttctatatgggtattggtacaccaggtgggaacaagattccaacaattcttaatgaagtgattgtcgattatttaaacagtgatggttcattacaagaatctattaataaaccaagattttataatgacggcggcacgatattttacgaaaatgctatgactgatgaagatataaatatctttaaaagtcttggttatggtgttgaagaaaagcataatgatccaaactttggcagtgtccaaggtgctgtttatgataaagataaaaatactgtagatgtcggtcatgatgtaggtaaccgt

SEQ ID NO: 34611 - DNA, 1050 bp, Staphylococcus epidermidis
atgaaagcttatgaatacttaaaacctggtcatgcacaacttacggataaagagaagccaactattacgagcagtactgacgctattattcgcatagttaagacgacaatatgtggtacagatcttcatatcataaaaggagatacacctgaagttaaatcacatacgacactaggtcacgaaggtattggaatcattgaagaaattggtgacaacgttaacaacttcaaagttggagataaagtgattatctcttgcatttcatcatgtggcaaatgctactattgcaaaaaaggtatctatgcacattgtgaaaacggaggaggatggatattaggacatttagtgaatggtactcaagcagaatatgttaaagttccttttgcagataattctttatatcacgccccttcaaatttaaaagaagacgcccttgtaatgttatcagatatacttccaacaggttatgaaattggtgttttaaaaggtaaagttaaacctggctgtacagtagccattgtaggtgctggtcctgtaggtttagcagcattacttacagcacaattctattcaccttcaaaaattattatgattgatttagatgataatagattagaaaccgctaaagaactaggtgctacgcatttaattaactctaaagagactgaaaccgcaattaaaaaggtaaaatcgttaaatccacgtggtgttgatgttgctattgaagctgtcggaattccacaaacctttgatttatgtcaaaatttaattggtgtcgatggtacgattgctaatgttggtgtgcatgggttacctgtacaacttgatatagataaattatggattaaaaatattaacgtaactactggtttagtttcaggaaatacaactgaagaattacttgaagcgttaaaaagcaaaataatacaaccagaacaactcgtgacacattatagtaaactgagtgaaatcgaaagtgcctatgatttatttagaaatgcaacagatcataaagcgattaaattaatcatagagaatgatatcacaatt

SEQ ID NO: 34612 - DNA, 411 bp, Staphylococcus epidermidis
gtggataaaagagaaagcatttcagtacctagtaaactatcacttgcttattattctcgcacaagacaaacggaacgatttatggagaaagttctggaacaaattcaaatagatgtgcatagaataaaagatgaaccgttagaaataaataattcatatgtgttaattacaccaacatatgattttggagaggttccagcaccagtagaaacttttctaaagaatgaaacaaaccaaaacaatttgattgcagttatgtcgtctggcaatcgtaattggggaactaattttgcaatagctggagatacgatttcgaaacgatttaacgtagagttgatcggaaagtatgaactagctggaaatatggtcgatgtaaataaattagtcgattatattaaaggaagggtgatg

SEQ ID NO: 34613 - DNA, 1254 bp, Staphylococcus epidermidis
atgttaagtattaaaaacttaaccaagatttattcagggaataaaaaagcggtagataatatttctttggatattcaatctggtgaatttatcgcttttattgggacgagtggtagtggtaaaacaactgcactacgcatgattaatcgtatgattgaggcgacagatggacagattatgatgaatggaaaagatgtccgtaatatgaatcctgttgaattgcggagaagtatcggttatgtcattcaacaaattggtttgatgccacatatgactattcgagaaaatattgttttagtacctaaacttttaaaatggtctaaagagaagaaagatgaaaaagctaaagaacttattaaactggtagatttacctgaagaatatttggatcgttatccagctgaattgtcaggagggcaacaacaacgaattggtgttgtgcgcgctttagcagctgaacaagatattatattaatggatgaacctttcggtgcattagatcctattacacgcgatacattacaagatttagtaaaggaattacaacaaaaattaggaaaaacatttatttttgtcactcatgatatggatgaggctattaaattagcagacaaaatatgtattatgtctaagggaaaagtcgttcaatacgatacacctgacaatattttacgatatcctgcaaatgactttgttagagattttattgggcaaaatcgcttgattcaggatcgtcctaatatgaaatctgtggaaagtgctatgatcaaacccgtcactgttaaagcagatgattcattgaatgatgcagtaaatattatgagaacacgtcgagtagacactatttttgtagtcaataatcaaaataaattattaggatttttagatattgaagatatcaatcaaggattacgtgcgcgtaaagaattaattgataccatgcaaagggatgtctacaaagtacatatcaattcaaagttacaagactcagtgcgtactattctaaaacgtaatgttagaaatgtacctgtggtcgataatgatgaacatctcattggtttaattacacgtgcaaacttagtcgatattgtgtatgactcaatttggggcgaagaagattctgatagttatgagatcccaaatgaaagcttagatgagaataatcacgatttaccacaaaatcaaactgatacacgaacaaatataaatgaagatgtgaatgattatcatgatgctcaacatagaggtgaggat

SEQ ID NO: 34614 - DNA, 1050 bp, Staphylococcus epidermidis
atgaaagcagcagtatggtatggacaaaaggatgtacgcgttgaagatcgcgaacccaaagcaataaaagacaatgaagtgcaagttaaagtctcttgggccggtatctgtggtactgatttacatgaatatttggaaggacctatctttatttcaactgatcaaccggacccactacttggtcaaactgcacctgtgactttaggtcatgaattttcaggtgtcgtagaaaatgttggtaaagacgtatcacgttttaaaaaaggggatcgtgtggtagttaatccaacagtgtctaaaagagaaaagccggaaaatgttgacttgtatgatggttattcatttataggactaggttctgatggtgcatttgccgagtttactaatgctcctgaaacaaatgtttatcatctaccagataatgtttcagcacgagaaggtgctcttgtagaaccaacagccgttgctgtccaagcagttaaagaaggcgaattattattcggtgatactgtagcagtatttggcgctgggccaattggtttgttaactattgttgcagcaaaagctgctggtgcaagtaaaatatttgtctttgacttatcagaagaacgtttagcgaaagctaaaagtgtcggtgcgactcacgtgtataactcaggtaacgtcgatccagtacaaacggtttatgaacatactgacaacggtgtagatgtgtcatttgaagttgctggtgtaggtattactttacaacaatctattgaagtaacacgtccacgtggtactgctgtcatcgtatcaatcttcggtcatcccgtagaattcaatccattattacaaatgaataaaggtgtcaagttaacaactacaattgcttatacaccaactacattccaacaaacaatagatttaatcgctaacggtagcttaaatgttaaagacgtcgtaacagatcaaattgaattagataatattgttgaaagtggcttcaatcaacttgtaaacgataaatctcaagctaaaattttagtccgtttaaatggtgaccaaaaa

SEQ ID NO: 34615 - DNA, 306 bp, Staphylococcus epidermidis
atgacagaacataatcacgatgctgagttaacaataaataatgaagaggaattacttacgttatatgatgaaaacggaaatgaagttttataccgtaaaatgttagaattttatcatccagaattcaaaaaagaatatgtcgttcttgcagaagaaggtgcacaatcagatgacgaagatatgattgaacttgtaccaatgataaatgaacctgatgagtctggtgatggtgggaaattagtccctattgaaacagatgaagaatgggatatgattgaagaagttgtaaatactgagattaacgaa

SEQ ID NO: 34616 - DNA, 426 bp, Staphylococcus epidermidis
atgctaaagcataaaattttaggactagatgttggaagtaaaactgttggcattgctataagtgaccttatgggttggactgctcaagggttagacacactccgtatcaacgaagaacaagatgatttaggaattgatcaactcgtgaagattattaaagataatcaagttggaactgttgttattggcttgcccaagaatatgaacaattcaataggttttcggggagaggcttcaataaaatataaagaaaagttacaagagtctatcccttctattgatattgttatgtgggacgaacgtttaagtacaatggctgctgaaagatctttacttgaagcagatgtttcaagacaaaaaagaaaaaaagtaatagataaaatggcagctgtatttattttacaaggctatttagattctattcaa

SEQ ID NO: 34617 - DNA, 1176 bp, Staphylococcus epidermidis
atgactgtcgcacgcacaacaacatttatattaagtgttttcatcgtaggtatggttgagatgatggttgcaggtattatgaatttaatgagtcaagatcttcatgtttctgaagcggtggttgggcaactggtaacgttgtacgcgcttacctttgcgatatgtggtccgttattagtgaagttgactcatcggttttcttcgcgatcagtattattatggacgttaattgtctttatcttcgggaatggtatgattgccattgcgccacattttggaataatagttgtaggacgtattttatcttctgccgcagcttcactcattattgtgaaagttttagcactcacagcgatgctcacatcagcaaaaaacagaggtaaaatgattggtattgtttatacaggttttagtggagcgaatgtctttggtgttcccatcggtacagtgattggcgactgggtaggatggcgatttacatttttattcattattattgtaagtgtatttgttggtgttttaatgttaatatatctaccaaaagaagatgaattgtcacatccaaatcaaacacctcgttcatctagtattgaatcacaaactggctcaagcgtcataagacctcgtgaggtttttaaatatctgatgattacatttttagtgctggttgctaattctgtaacattcgtgtttattaatccattaattttatccaatggacatgaaatgtcttttgtgtctttagcactacttgttaatggtgtagcaggtgtgattggtacttcattaggcggtgttttatctgataagtttactagtaagcgttggttaataatttcgatttcaatatttataataatgatgataattcttaacttattattaccaggaacaggattattattagttggcttatttatgtggaatttaatgcagtggagtacaaatccagctattcaaagcggtattattgaacacgtcgaaggagatacaagccaagtgatgagttggaatatgtcgagtctcaatgccggtattggcgttggcggaatcgtaggtggactcgttatgacacatttatcagtggaatatgttacttatactagtgcattgataggtttaattagtcttatcattgtattcactttaaaaaatagacattatgctaaaaattta

SEQ ID NO: 34618 - DNA, 258 bp, Staphylococcus epidermidis
atggaaaattttgataaaacaatgaaatttagttatgaagaaattccaaaggaagatgtcaaatcagttcttcagaatgtccatcgtacattagaagaacgtggatataatgcagttaatcaaatagtgggttacttattatctggagatcctgcatatattccacgtcaaaatgaagcaagaaaccaaatacgtcatatagaccgtgatgtaattatggaagaactcgtttcaaactatttaaaagagtctaagaat

SEQ ID NO: 34619 - DNA, 2628 bp, Staphylococcus epidermidis
atgaaaaaaatgaaagctagtgaaattaggcaaaaatatttggatttctttgtagaaaaaggacatatgattgaaccgtctgcaccacttgtacctatcgatgatgattcattattgtggatcaattctggtgtagctaccttgaaaaaatactttgacggacgcgaaactcctaaaaaaccaagaattgtcaattctcaaaaagctatacgaacaaacgatatagaaaacgtcggttttactgctcgccatcatactttttttgagatgctaggtaatttttcaatcggtgactactttaaacatgaagcgattgaatttgcttgggaatttctaacaagtgataaatggatgggcatggaacctgagaagctatatgtgactattcatcctgaagatactgaagcttttagaatttggcatgaagacattggtttagaggaaagtcgcatcattcgaatagaaggcaatttttgggatatcggggaaggaccatctggaccaaatacagaaattttctatgatcgtggatcggcttatggaaaagatgatcctgctgaagaaatgtatcctggtggtgaaaatgaaagatatttagaagtttggaatctagtgtttagtgagtttaatcacaataaagacaatacttacacaccactaccaaataaaaatattgatactggcatgggattagaacgtatgacgtctatctcacaaaatgtaagaacaaattatgaaacagacttatttatgcctataattaaggaagtagaacatgtttcaggaaaaaaatatttaattgatgatgcacaagatgttgcatttaaagttatcgcagaccacattagaacgatttctttcgcaattgctgatggcgcattaccagctaatgagggtagaggatatgtattaagaagattattacgcagagcagttcgctttagccaatcattaggaattaatgaaccatttatgtataaacttgttgatatagtcgctgatatcatggaaccatattatccaaatgtcaaagacaaatccaactttattaaacgtgtcattaaatcagaggaagaacgcttccatgaaacgcttgaggaaggtcttacgattttaaatgaactgataaaagaagcgaagaatagtgatcaggttattaaaggtcatgatgcttttaagttatatgatacttatggattcccaatagaattaactgaagaattagcaactcaagaaaatttgtctgttgatatgcctacttttgaacaggaaatgcaacaacagagagatcgagctagacaagctcgacagaattctcaatcaatgcaagttcaaagtgaagtactaaaaaatattcaagatgaaagtcaatttgttggctatgaaactacggactatcaatcattaataactcatatcatatacaatggtgaagaagttaaacatgttgaagcaggagaaacaatttactttattttaagagaaacgcctttctatgcagtaagtggtggacaggtcgcagataagggaacagttggtaatgagagctttgaaataaatgtaactgacgtaactaaagcgcctaatggccaaaacttacacaaaggtattgtgcaatttggtgaagcaacacagaacgcgaaagtagaagcacgtgttaacaaagaggatagacgacttattcaaaaaaatcatagtgctacacatttattacatgctgcattaaaagaagtattaggagatcatgttaatcaggctggttcgttagtagaacctgaaagactacgttttgatttctcacattttggtcctatgacacaagaagaaattaatttagtagaacgtagagtaaatgaagaaatttggagagctatcgacgtccgtattcaagaaatgagtattgaagaagccaaatcaataggcgctatggctttatttggtgaaaaatatggagatattgttcgcgttgtcaatatggcaccattttcaatagaattgtgcggtggaatacatgtgaataatactgcggaaattggtctctttaagattgtgagtgaatctggaacaggtgccggtgttagaagaattgaagctttaacaggtaaaggtgcattcttacatcttgaagaaattgaaacacagtttaataatattaaaaatcatttaaaagttaaatccgataaccaagtagttgaaaaagttaaacaacttcaagaagaagaaaaaggactgcttaaacaattagaacaacgcaacaaagaaataacatcactaaagatggggaacattgaagaacaggttgagttgattaataatttgaaagttttagcaacagaagtagaaattccaaatccaaaagcgatacgttcaactatggatgactttaaatctaaacttcaagatactattatagtgttagtcggacaagttgatggaaaggtttctgtaattgctacagtaccaaaatcacttacaaatcaagtaaaagctggagatcttatcaaaaacatgacaccaattattggtggaaaaggtggaggtcgtcctgatatggctcaaggtggcggaactcaacctgaaaaaataacagaagcattacgctttattaaagattacattaaaaatcta

SEQ ID NO: 34620 - DNA, 2430 bp, Staphylococcus epidermidis
atgtctgaccctacactttttgattattcaatgatcaaaggtacagttgatgctattttatttcaaaatacggataatttttatactgttctaaaagtagatactatagaatcaaatgaaaaatttgatagtatgccaactgtggtagggtttcttcccaatgtagttgaaggcgatgtttatacttttaaagggcaagtcgtacaacatccacgttatggtaagcaattaaaggctgaaacatttgaaaaagaattacctcaaactaaagaagccattattagttacttatcaagtgatttatttaaaggcatcggtaaaaaaacggctcaaaacattgtaaatacactaggtgaaaatgctataaatgatattttaactcgtccagaaatcttagaaagtgtacctagtttaccaaagaagaaacaaaagcaaattgctgatcagattaatgcaaaccaagaatctgagaaaattatgatacgtttacacgacctagggtttggtccgaaattatcaatggctatatatcagttctatatgggtgatactttaaatgtcttagataaaaatccttaccaattagtatatgacattaaaggtattggttttaataaggctgaccaacttgctcgaaatgtcggtattgagccacattcacctgaaagattaaaagcagcattattatttacgttagaagaagaatgtatcaaacaaggacatacatatctacctcgtacaattgttatagaaacaacacaaaatttactcaatgaagatattgagaaaccaattgaaacagagcaattactagaaatcattgacgttttatcagaagagaaaaaattaatatctgaagctgatcaggtatcaattccaagtttatactattcagaattgaaaagtgtgcaaaacttataccgaattaaaacaaacacatctaaattaaaagaaatagaacagtctgatttacaaatacatattggtgatattgagtcacaaaatgaggttaattactctgcctctcaaaaagaagcgcttgaaacagcaataaattctaaaattatgcttttaactggtggtccgggtaccggtaaaaccacagtcattaaaggtatagttgaattatatgcagaaatacatgggctctcgctcgattatgatgattacaatgaagatgattatccagtagtgttagctgcacccactggtcgtgcttctaagcgccttcacgaatcgacaggtttagaagcaatgacaattcatcgtttaatcggttggaaccaagatacacaaccacaggatattttagaaaatgagatcaatgcaagactcattatcatcgatgaaatgtcaatggtagatacttggttgttccatcaatttttaagcgctgtgcctttagaagcacaaattgtatttgtcggagatgaagatcagttaccatcagtaggtccaggacaggtatttaaagaccttattgattctgaaataataccgcgtgttaatcttaccgaagtatatcgtcagcaagatggttccagtattattgacttagctcaccgtatgaaattaaatgaacctatcgatattactaaacgttatcatgatcgtagttttattcgttgtggtacgaatcaaattccagacgttgttgataaagtagttaaaagcgctgtagctaaaggctatgatatgagtgatatacaagttttggctcctatgtataaaggtaacgctggtattaagagacttaaccaagttctacaatctattcttaatccgaagcaacaagatgatcgtgaaatagaatttggtgaagctgtgtttagaaaaggggataaagtacttcagttagttaatcgacctaatgataatatatttaatggggatataggtataatagtaggtatattttgggccaaagaaaatgctctaaataaggatgtgttagttgtagattttgaaggtaatgaaattacatttactaaacaagatttaatggaactaacacatgcatattgtacatctatccataaatcacaaggttcagaatttcctattgtaattatgcctattgttagacaatattataggatgttacaacgtcccattctttatacaggattaactagagctaaacaatcacttgttttgcttggtgaacaagaagcatttgatataggtttaaaaacaaatggacaaatacgattaacgcaattaaatgatttgttaaaatcgtattttggacaaaacaaaaataatttaactacaaataaacaaacgattaacgaacaaaaagaaaataacaatcatctggatttgaaaaatgaaaaagaaaatgatatccaattaaacgagtcgacaattttccaaatcgatccaatgattaatatgggggaaatgacgccatatgacttcgttgaacgt

SEQ ID NO: 34621 - DNA, 1116 bp, Staphylococcus epidermidis
gtgtctaacaaagatatacgcgtagttgtgggcatgtctggtggagtggatagctctgttactgcatacttgttaaaagaacaaggttatgatgtaataggtatatttatgaaaaattgggacgatactgatgaaaatggggtgtgtacagccactgaggattataatgacgtgattgcagtatgtaatcaaattggcatcccatactacgctgttaattttgaagaacagtattgggataaagtatttacttattttcttgatgaatataaaaaaggtcgtacacctaaccctgatgtgatgtgtaataaagaaattaaatttaaagcatttttagaacatgctttaaaattaggcgctgattatgtcgctacaggtcattatgctcgtatacgtcgtcatgatgatgggcatgttgaaatgctaagaggtgttgacaataataaagaccaaacctactttttaaatcaattatcccaagaacaactatccaaagtcatgttcccaattggagatattgaaaaaagtgaagtaagacgtattgcagaagagcaaaatttagctactgccaagaaaaaagactcaacaggtatttgttttattggtgaaagaaactttaaagaatttttatcacattacctaccagctcaatctggtgaaatgttgacattaaatggaaaaaaaatgggacagcatagtggattgatgtattatacaattggtcaacgtcacggcttaggcatcggtggagatggagatccatggtttgttgtaggtaaaaatttaaatgataacgtattatatgttgaacagggatttcaccatgatgcactttatagtgattatctcatagcttctgattattcatttgttaatccaagtgaaattgatttggaaaaaggttttgaatgtacagctaaattccgttatcgccaaaaagatactaaagtttatgttcaacgcgaaaacgagaattctattagagtaacttttgctgaaccagttagagcgattacacctggtcaagcagttgtcttctataatcaagaagtatgtttaggtggcgctacaattgatgatgtttataaaaacgaaggtcaattaagttacgttgta

SEQ ID NO: 34622 - DNA, 2031 bp, Staphylococcus epidermidis
ttgattatgtttaaaaagctatttggtcaaatgcaacgtatcggtaaagctttaatgttaccagttgcgattttaccggctgcagggttgctattagcaattgggactgcgtttcaaggcgaagcgttacaacattatcttccatttataaaaaatgatattgttcaacaaatcgctaatatgcttacaggtgctggtggtattatatttgataatctacctattatctttgctttaggtgtagcaattggtcttgcaggtggagatggtgtagctgctattgctgcatttgttggttttatcattttaaataaaacaatgggggctttcttgcatgtaactccagataaattatctgatccaactaatggatatgcaaatgtattagggattcctacacttcaaacaggtgtgttcggaggtattattattggtgcactagcagcctggtgttataacaaattctataatattaccttaccatcatatttaggattctttgcaggtaaacgttttgtaccaattatgatggcaacaacatctttcattttagcctttccgatggcaattatttggccaacgattcaaaacggtttaaatgcatttagtgaggggttattagattcaaatacaggtttagctgtatttttatttggatttattaagcgattattaataccatttggtttacatcacattttccatgcaccattctggtttgaatttggttcttggaaaaatgctgctggagagataattagaggcgaccaacgtatttttattgaacaaatccgtgaaggtgctcatttaacttctggtaaattcatgcaaggggaattcccagtcatgatgtttggattaccagctgcagcattggctatttatcaaacagcaaaacctgagaataagaaagtagttgcaggtttaatgatttctgctgcattaacatcatttttaactggtattactgaaccattagaattctcattcttatttgtagcaccattcttattcgtaattcatgcagtattagatggtttatcattcttgacactatacttgttaaatgtacatttaggatatactttctctggaggatttatagattatgttttattaggtattctacctaataaaacagcatggtggcttgtcatcccagtaggtattatttatgcagtgatttactactttgtatttagattccttattgttaaatttaactataaaacaccaggtcgtgaagataaaaaatcatctgtaacaactacatcggctagtcaactgccattcgatgttttgaaagcaatgggtggtaaagaaaatattaaacatctagatgcttgtattactagactaagagtagaagtaaatgaaaaatcaaaagttgatgttgccggccttaaatcattaggtgcttcaggagtacttgaagtcggtaacaatatgcaagctattttcggtcctaaatctgatcaaatcaaacatgatatggctaagataataagtggagaaattacaaaaccaagtgaaacaacaattgatgaagaagtgtcagatgatcctgtacatgtggaagatattgtagaaacagaaatttacgcacctggacatggtgagataataccgttatctgaagtacctgataaagttttctctgaaaagatgatgggtgatggtatcggatttgtaccagattcaggagaaattgtagcaccatttgatggtacagttaaaacaattttccctacaaaacatgcgataggattggagtctgatagtggtgttgaagtgttaattcacattggtatcgatacagttaaattaaatggtgaaggttttgaaagtttggtaaatactgatgaaccagtaacacaaggtcaaccattaatgaagattgatttagaatacttaaaggaacatgctccaagtattattacaccagtaatcataacaaaccaagaagacaaaacattaacaattgaagatgtaaaacaagtcgatcctggtaaagcgattatgacaattaaa

SEQ ID NO: 34623 - DNA, 1737 bp, Staphylococcus epidermidis
atggcacaaattaaagcaaatgaagcattagttaaggcattacaaacctggaatattgatcatttatatggtattcctggcgactcagtagatgctgttgttgatagcttacgtacggtcagagatcaatttaaattctatcacgtacgtcatgaagaggtagcgagtttagctgctgcaagttacacaaaaatgacagggaaaattggtgtagctttaagtatcggaggacctggtattgtacacttattaaatggtatgtacgatgctaaaatggataatgtacctcaacttattattgctggacaaacaaatagtacattattaggtacaaaattcttccaagagacaaacatttctaaaatggttgatgatgttgctgtatatcaccaccaaattcaaaaaggtgataacgtatttgaaattacaaatgaagcaattcgtacggcatacgagaaaaaaggtgtctctgttatcatttgtccaaatgacttattaactcaaaaaattaaagacactacaaatcgtgcagttgatacaactaaaccaaaaccagcttcaccaaaattcaaaagtattaaaaaagcagctaaattaattgataaagctaaaaaaccagtaatgcttattggtttaggtacacaacacgctaaagatgaattacgtgaatttattgaagctgcaaaaattccagttattcacacattacctgcaaaaacaatcttacctgacgatcatccttatagtattggtaacttaggtaaaattggtactaaaacatcttatcaaacaattcaagatgcagacttattaattatggctggtacgaactatccgtatgttaactatttacctaagaaaaacattaaagctattcaaatcgatacgaacgaagaaaatattggtgcacgctttaaaattaatgtaggtattttaggtgatagtaaagttgctttccatcaactaactgaaaacattaagcatgttgcaaaacgtccattcttagataagacattagaacgtaaagcagtttgggataaatggatgaaacaagatttgaataatgacaattcaccattacgtccagaacgtttaatgaaagcaatcaatgctaacttaaaagatgatgcaattatctcagcagatgttggtacttctacagtatggtctacgcgttacttaaacttatctgtaaataataaattcattatttctagttggttaggtactatgggctgtggtttaccaggtgcgatggcagctaaaattgcttatccaaaccgtcaagcagtagctatcacaggtgacggtgcgttccaaatggtaatgcaagactttgctacagctgttcaatataacttaccaatgacaatcttcgtattaaataacaaacaattgtcattcattaaatatgaacaacaagctgctggtgaattagagtatgccattgatttctctgatatggatcatgctaaatttgctgaagctgctggtggtaaaggctatgttgtgagagatgtaagtcgtcttgacgacatcgttgaagaggcaatggctcaagatgttccaacaatcgttgatgttcatgttgatcctaatgctgcaccattaccaggtaaaattgtaaacgaagaagcatttggttacagtaaatgggcttatagatcaattactgaagataaaaacttagactttgatcaaatcccaccaatctctgtagcagctaaacgtttctta

SEQ ID NO: 34624 - DNA, 1275 bp, Staphylococcus epidermidis
atgaaaagtttagataaaggatttagacatttaacacgaaaagataaattaaaaaaacttgttgaatacggttggctagatgatgaaaactatgaaatattacttaatcatccgttaattaatgaggaagtcgcaaacagtttaattgaaaatgtcattggtcaaggtgcactaccagtagggttattacctcgaattatagttgatgataaagaatatgtagtacctatgatggtagaggaaccttctgtcgtagcagcagcaagttatggcgcaaaactcgttaatcaaagtggtggatttaagacaatttcaagtgaacgtctaatgattggacaaattgtctttgatgatgttgaagacacaggcacattagctaactcaatatatcaaatagaatcacaaattcatcaaatcgctgatgaagcttacccttctattaaagcaagaggtggaggatatcaacgtattgaaatagatacattccctaatcatcgattattatctttgaaggtttttgttgatactaaagatgctatgggtgctaatatgttaaatacaatattagaagcaatcactgcacatctaaaagttaaattttcaaatcaaaatgttttaatgagtattttatctaatcatgcgacagcatcagtagtaaaagtacaaggggaaatagatattgaagatttacatagaggagagagaagtggcgaagaggtagcacaacgtatggaacgagcgtcagttcttgcacaagtagatatacatcgtgctgcaacacataacaaaggtgtgatgaatggtatacacgctgtagtattggctacaggcaatgatacaagaggagttgaagcaagtgctcatgcatatgcaagcaaagatggtcattatagagggatagctacttgggaatatgatcgctcacgtaataaattggttggaactattgaagttcctatgactttagcgacagtaggtggaggtacgaaagttttacctattgctaaagcctcattaaatttgcttaatgttgaaaatgcacaggaactagggcaagttgttgctgctgttggattagcacaaaatttctctgcatgtagagcgctagtgtctgaggggatacaacaaggacatatgagtttacaatataaatcattagcgattgttgtaggtgcaaaaggcgaagaaattgcgcaagtagctgaagcgctcaaatatgaatcacaagctaatactgccaaagctcaagaaatcttgatgaatataagaaagtca

SEQ ID NO: 34625 - DNA, 516 bp, Staphylococcus epidermidis
atgtatcaatcaatgtatgactcgcccgttggcttattgcaattaattacaaacgatggcatctcgttgtcacatgtcttataccctaatcaacatttgaaaggaattaaaacaaaggatacgttagatgtttttaaagatactaaagcgtggttaagagagtattttaaagggaattatcctgagataaaagtaccgttagcaccaaaaggcactgattttcaacagaaggtatggaatgaacttcagacaattcgttatagagaacttaaaacatatggagagattgctaaaacagtaggacgagcaatgaataagccagcaatgtctgctcaggctgtaggaggtgctgttgggagtaatcctatttctatacttataccatgtcatcgagtggttggtaaagatggaaatttaacaggatacggaggtactttagacaacaaaataaaattattaaaattggaagaaatagatatgacacatttatacagacctaaaaaaacaacgaaacct

SEQ ID NO: 34626 - DNA, 483 bp, Staphylococcus epidermidis
atgacattatcaataattgtcgctcacgataaacaaagagtcattgggtaccaaaatcaattaccttggcacttaccaaatgatttaaagcatattaaacaactgaccactgggaatacacttgtaatggcacggaaaacttttaattctatagggaagccattgccaaatagacgtaacgtcgtactcactaaccaagcttcatttcaccatgaaggggtagatgttataaactctcttgatgaaattaaagagttatctggtcatgtttttatatttggaggacaaacgttatacgaagcaatgattgaccaggtagatgatatgtatatcacagtaatagatggaaagtttcaaggagacacattctttccaccatacacattcgaaaactgggaagtcgaatcttcagtagaaggtcaactagatgaaaaaaatactataccgcatacattcttacatttagtgcgtagaaaagggaaa

SEQ ID NO: 34627 - DNA, 954 bp, Staphylococcus epidermidis
atgtataatccattcgacgaagcttatcatggcttatgcgaagagatattagaaatagggaatagacgcgatgatcgcacacataccgggacaatttccaaatttgggcatcaattgcgtttcgatttaaccaaagggtttcctttacttacaaccaaaaaggtttcttttaaattagtagcaactgaattattatggtttattaaaggagatacaaacattcaatacctacttaaatataataacaatatatggaatgaatgggcatttgaaaattatgttcagtctgatgattatcatggaccagacatgacagattttggacatcgttcccagcaagaccctgaatttaacgagcagtataaagaagaaatgaaaaaatttaaagaacgtattctaaacgatgatgcatttgctaaaaaatatggcaacttagggaatgtttatggtaaacaatggagagattgggaagataaaaatggaaatcattacgatcaattaaaatcagttatacaacaaattaaaaccaatccaaactctcgacgtcacattgtttcagcatggaatcctactgaaatcgattcaatggcattaccaccttgccacacaatgtttcaattttacgtacaagagggtaaattaaattgtcaattatatcaaagaagtgctgatatatttttaggtgttcctttcaatattgcaagttatgctttactgacacatcttgttgcaaaagaatgtggacttgaggtgggtgaattcattcatacatttggagatgcacatatttattccaatcatatggatgcaatacatacacaattatcaagagatagttatctaccacctcaattaaaaattaatacagataaatcaatttttgatattaattatgaagatttagaattgataaattatgaatcacaccctgctattaaagcacctattgcggta

SEQ ID NO: 34628 - DNA, 2382 bp, Staphylococcus epidermidis
atggcgaatacaacgttgactttggatattattggtatgacatgtgctgcgtgctcaaatcgtattgaaaagaaattgaatcgtatgaatcatgttcaagctaaagtgaatctgactactgaaaaagcaactatcgactatgagtctgacgattatcatctcgaagattttgtagagcaaattcaaagtctcggctatgatgttgcagttgagcaagtagaattaaatataaatggtatgacatgtgctgcatgttctaatcgtatagaaaaggttctaaatcaaacgcaaggtgtacaacaggcaacagtaaacttaactaccgaacaagcactcatcaaatattaccctagtgctacgaacacggaagcattaattaagcgtattcaaaatattggatacgatgctgaaactaaaacttcatcaaaagcgcaatcaaatcgtaaaaaacaagagttaaaacataaacgcaataaattaatcatttcagctattttatcgttgccactattattagtaatggtggtgcatatctcacctatttccattccatccattttggtcaatccttgggtacaattaattctttcaacacctgtccaatttattattgggtggcaattttacgttggcgcgtataaaaatttgcgaaatggttcagctaacatggatgtattggttgctgttggtaccagtgccgcatatttttatagcatttatgaaatgatgatgtggctcacacatcaaacacatcacccgcatttatattttgaaacaagtgctattttaattacgttaattcttcttggtaaatatttagaagcacgtgccaaatcacagactaccaatgcattaagcgaattgttaaatttacaagcgaaagaagcacgagtaattaaagaaaataaagaaattatgcttccacttgataaagttaaagtcggagatactttactaataaaacccggcgaaaagatacctgtagatggcaaagtcactaaaggtgatacttctattgacgaatccatgctaactggtgagtctatacctgttgaaaaaagtagtggcgattcagtgattggttctaccatgaataaaaatggttcaatcatgattgaagcaactcaagtaggtggtgatactgcattatcacatataattaaagtggttgaggatgctcaaagttctaaagcaccgattcaacgcttagctgatattatttctggatattttgttccgattgtagttagcattgcggttattacttttatcatatggattatattcgttcaccccgggcaatttgaacctgcacttgtttcagcaatatctgttttagttattgcttgtccctgtgcacttggtttagcaacgcctacatctattatggtaggtacaggacgtgctgcagaaaatggcatattattcaaaggaggccaatttgtagaacgtgcacattatgttgatacaatcgtgctagataaaacaggcacaattactaatggtcaacctgtagtaactgattatgttggtgacaatgatacattacaacttttagcaagtgctgaaaatgcttcagaacatcctcttgctgatgctattgttacttatgctaaagataaaggtcttaatttacttgataatgacacttttaaatcaattccgggacatggtattaaagctacgattcatcaacaacaaatccttgtgggcaatcgaaaattaatgaacgattacaatatatctattagtaataaattaaatgaccaattaaatcactatgaacatttaggtcaaacggcaatgatgattgccgtggataatcaaattaatggaatcattgctgttgctgatacagtaaaaaatgatgctaaacaagcgataaaagaactaagaaatatgaatatcgacgtggttatgctgactggtgataacaatcgaacagctcaaaccatcgccaaacaagttggcattgaacatgtaattgcagaagtgttgcccgaagaaaaggcacatcaaatctctttattacaagacaaaggtaaacaggttgccatggtcggtgatggaattaatgatgcgcctgcacttgtaaaagccgatattggaatggctataggcactggagctgaggtagcgattgaagctgcagatattacgattcttggtggtgacttgctattagttccaaaagctatcaaagcaagtaaagctacgattaaaaatattcgacaaaatttattttgggcatttggatataacgtagctggcatcccaatagctgcttgtggtttattagcaccttggattgccggtgctgctatggcattaagttctgttagcgtagttatgaatgcattaagactgaaaaaaatgaaacta

SEQ ID NO: 34629 - DNA, 213 bp, Staphylococcus epidermidis
gtgataattatgacacaaaaaatcataaaagttgaaggaatgagttgcgaacattgtagaaacgccgtagaatcggcactagctaaactaaatggcgtatcaagtgctgaagtaaatttagatgaaaatcatgtacgcgttgagtataatgattcaaaagttacatttgaaaatatgaaagaagcaattgaagaacaaggttatgatgttaaa

SEQ ID NO: 34630 - DNA, 1158 bp, Staphylococcus epidermidis
atggaaatgtcagaaaggctagcttcaattcctgatagctactttggcaaaataatgggccgtatagttgaacatggtcctttaccacttataaatatggcagttggaattccagatggagaaacgccaaagggtattatcaatcatttttcagaggcgctatgtattccagaaaatcaaaagtatggtccatttcacggcaaagatgcctttaaacaagctattgttaacttctaccaaagacattacgatgttgaattagacaaagaagatgaagtttgtattttatatgggactaaaaatggtcttgttgcattacctacttgtgttgttaatcctggtgaaattgtacttttacctgatccgggatatacagattatttagcgggggtcatgttagctgatgctaagccactccctttaaaattgtcgccaccaaattatttgccgaattggaatactataagtgctaaagttcttgagaagactaagctaatttatttaacatatcccaataatcctaccggttcgacagcgacacaagatgattttgatgaagcgattcatcgttttaaaggtactcaaacaaagatagttcatgactttgcatatagtgcttttggatttgacgccaaaaatccaagcatattagcttctaaaaatgcaaaagatgttgctatcgagatattctctttatctaaaggttataatatgtcaggctttcgtgttgggtttgctgttggtaataaaaaaatgattcaagcgttaaagaagtatcaaactcatacaaatgcaggtatgtttggagcacttcaagatgctgctacgtatgcactcaatcattatgatgagtttttagaaaagcaaaatgaaatatttagacgtagacgtgataattttgaatcacaactaaaacatgcacatttaccgtttgttcactctaagggaggtctttacatttggttacatacacccccgggttatgatagtgaagcattcgaacagttgttattaaaagaaaagtcaattttagttgcacctggtaaaccatttggtgaaaatggtaatcaatatgtgagggtttcattggcgctcgatgataaacaattagaagaagcggcgaatcgcttaacacaattacggtatttgtatgaaaga

SEQ ID NO: 34631 - DNA, 1806 bp, Staphylococcus epidermidis
atgaacgagaacaattatagacgtctcaacaaaacttataaaccgcactatttgcctggtttagatggtttgagagctatagcagtcattgggataatcatttatcatttaaatacgaaatggttatctggtggattccttggagtagatactttttttgtcatttctggttatctcataactagtttattattaagtgagtattatagaaataattctattaatttagttaatttttggcttagaagatttaaacgattaataccagcaatgatgtttgttgtcacggttgttttaatatatacattactatttaaacccgaattaattattagtataaaacatgatgctatagcagcacttttctatgtttctaactggtggtatatcatacaagacgtagactattttaatcaatttgctgtagcgccattaaagcatttgtggtcattagctattgaagaacaattctatctattctttccatttatacttttaggcttattaaagtttttcaaaaagagaactacaatgattattctattaatcatctctttattatcattaactgcaatgataacgatacatatgtatacaggtaacaattctagagtttatttcgggactgacacacgtttacaaacgttattattaggatgcttactagcatttatttggccaccgttctctttcagaaaggatatatctaaaggtgctaaagcaagtataagtgcaataggcatagtcggaatggcagtgctcatttatttgtttgtagtggttagtgatcaagataaatggatatatagtggaggattttatgccatctcgttcttaacactgtttgtcattgcaagcgttgtgcatccatcaagtgttttaaagaaaatactaagtttcaagttatttatttatataggtaagagatcgtatagtttatatttatggcactatcctatcattatttttatgaatagttatttcgtacaaggtcagattccttggtttgtatatatttgtgaagtgatacttatgtttgtcatggctgaagtatcttataaatttatcgaaacacctattagaaaaaatggatttaaagcattcacggtgataccgaaaaatttaacaagattttcaagaacgattattgtgttaatcttgcttgttccttctgcattcatagtatttggtgcctatgatagtttgggtaaagagcatgataaacaacaagctgcgaaacaaaaatcttttaaaacgaaccagaaagcaaaacctaaaaagccagatgaaaataatcaagataagtcttcacaacaacattttaatcctaaagaagcgtctccattattgctgggagattcagtaatggtagatatcggtcaagtctttagtgaaaaagtaccaaatgctaatattgatggaaaagttggccgacagttaattgagggtaaagatttaatcaatcaaaagtaccaagattatactaaaaaaggtcagagtgttgtgatagaacttggtacaaacggtgagtttacgaaagatcaaatgaatgaattaattgattctttaggtgaagcagatatttacttaattaaggtaagagtaccgagagactacgagtctactaataataaaattatggaacaagtagctaagaaacataaaaatgttcatattgttgattggtataaaacatctgaaggtcattctgagtattttgcatatgatggtattcacttggaatacagtggtgttaaggcattatctaatgaaatcattaagaaaatgaaagaagttaatgaaaaa

SEQ ID NO: 34632 - DNA, 741 bp, Staphylococcus epidermidis
atgctaactgtatatggacatagaggattacctagtaaagctccggaaaatacaattgcatcatttaaagctgcttcagaagtagaaggtataaactggttggagttagatgttgcaattacaaaagatgaacaactgattatcattcatgatgattatttagaacggactacaaatatgtccggggaaataactgaattgaattatgatgaaattaaagatgcttctgcaggatcttggtttggtgaaaaattcaaagatgaacatttgccaactttcgatgatgtagtaaaaatagcaaatgaatataatatgaatttaaatgtagaattaaaaggtattactggaccgaatggactagcactttctaaaagtatggttaagcaagtggaagaacaattaacaaacttaaatcagaatcaagaagtgctcatttcaagctttaatgttgtgcttgttaaacttgcagaagaaatcatgccacaatataacagagcagttatattccatacaacttcgtttcgtgaagactggagaacacttttagattactgtaatgctaaaatagtaaacactgaagatgccaaacttactaaagcaaaagtaaaaatggtaaaagaagcgggttatgaattgaacgtatggactgtaaacaaaccagcacgtgcaaaccaacttgctaattggggagttgatggtatctttacagacaatgcagataaaatggtgcatttgtctcaa

SEQ ID NO: 34633 - DNA, 1422 bp, Staphylococcus epidermidis
atgtcagggaaactagaagaattacaattaaaagtagctcgattaagtcgacgtactcatgaattaggtattccaattatggtattatttgaggggattcctgcttcggggaagacacgtttatcaaatgaattactattgcacctagatgccaaatattcgcgatttatagctactaaatcgccagagtcaaacgatttacgttaccaatttttacaaaaatattggaatactttaccacaaaagggcaatataaatatttattttagaagttggtattcacactttttagattataaagaaaataaaattaagcatgatcaatataaaaattatgatgttttagtcaatcaaatttatcattttgaatcgatgttaaagaatgataactatgaaattataaaatttttcatagaaataaatgaagaaaaacgcaatgaacatattcaacagacaaaagataatccattaactagatggaaagttcaagaatatgaaaatgttatacctcaagaaagttatctaaatcaaatgcatcaattcatcaacaaagataaagattggaaagtgatcgattacacagagcgcgagcatgcttttgaaaaaatgtacttacatttaatagatagacttgagcaagctataaaaaaagttgaacaacaaacaactaaagtcaacggtaagttcacatcaagctttacgacttctttatttaataataatcttgagaaagtagacaaaaaaacgtataaaaatctcattgttgaattgcaacagagaatgagagaaatccaatttgctttatatgaaagaaagattccccttgttttggttttcgaaggtatggatgctgctggtaaaggtggcaatattaaacgtattagagaaaaattagatccaacaggatatgaagtgaatggtattagtgcacctacggatgtcgaacttaagcatcattatttgtggagatttgctaaaaagatgccaaaatcaggtcatatagaaatatttgatcggagttggtatggtcgtgtactagttgaacgtgtagaaggttttgcaagccagaatgaatggcaacgagcatctgatgaaatcaatcaatttgaaaagatgtggacagatgaaggtacaatcatattaaaattcttcttatgtttagataaagatgagcagcttaagcgttttaaagaccgtgaaaataatcctgataaacaatggaagattactgaagaagattggcgtaatagagaaaaatgggataaatatttagaagcaagtcatgatatgattgaatctacaaacacttcatatgccccttggtatattgttctggcagatcataaaaaaacgagtcggattgaagtacttaaaacaattattagaaaatgtgaagaagtactatggggagttaagacgtat

SEQ ID NO: 34634 - DNA, 477 bp, Staphylococcus epidermidis
atgaaaattactattttatcagttggaaaactaaaagaaaaatattggaagcaagccattgcagaatatgaaaaaagattaggaccttacacgaaaatcgaattaatagaagtaccagatgaaaaagcacctgaaaacatgagcgacaaagaaatcgaacaagtcaaagaaaaagaaggccaacgcctactcaataagattaaaccccaatctacagtaatcacgttggaaatcaaagggaaaatgttgtcttcagaaggactagctaaagaactacaaacacgcatgacacaaggtcaaagcgactttacatttgtcataggtggctccaatggtctacaccaagacgtcttacaacgcagcaactatgctttatcattcagcaatatgaccttcccacaccaaatgatgcgcgtcatattgattgaacaaatttatcgcgcatttaagatcatgagaggcgaagcatatcataaa

SEQ ID NO: 34635 - DNA, 294 bp, Staphylococcus epidermidis
atgctattattcattggaggtcctatcatggataaaataaacaaagaagataccgatactaaaaaagatagtaataacaactataaacatcaaaatgaccatatagatagacaaggtttaaatggttatcaaaaaactgatttagatcttgagatagaacgagaactacaggaaatgatggaaaatggagaatctaataaagaaacaaaaagtaagcatttcaaaatcttatctttcgtttcaatgattgtcattgtagtgatagccatcatacgattcatccaaaaaacgata

SEQ ID NO: 34636 - DNA, 1830 bp, Staphylococcus epidermidis
atgaagtggcttaaacaactacaatcccttcacacgaaactcgttattgtttatgtactactcattattattggtatgcaaatcatcggtttgtattttacgaatagtttagaaaaggaattactcgataacttcaagaagaacataacacaatatgcgaagcaattagacgtcaatattgaaaaggtttataaggataaagataaaggttcagtcaacgctcaaaaggatatccaagaccttttgaatgaatatgcgaatcgtcaagaaataggagaaatacgctttattgataaagaccaaatcatcatggcaacaaccaagcagtctaaccgtggtcttatcaatcaaaaggttaacgacgggtcagttcaaaaggcgctctccttagggcaaacgaatgatcatatggttcttaaggattacggaagtggtaaagagcgtgtttgggtatataatataccggttaaagtcgataaacagacaatcggtgatatatacatagaatcgaaaattaatgatgtatacaatcagctgaacaacattaatcagatattcatcgtagggacagcgatatcactattcattacagtgatactaggattcttcattgcacgaacgattactaagccgataaccgatatgcgtaaccaaaccgtcgagatgtctaaaggtaactacacgcaacgagtgaagatatacggtaacgatgaaatcggtgaactcgcacttgccttcaataacttatcgaaacgtgtccaagaagcacaagcgaatacagaaagtgagaaacgtcgtctagattccgttatcacacatatgagcgatggtattcttgcgacagatcgccgtggacgtgtacgtattgcaaacgacatggcgctgaaaatgctcggtctcgcgaaagaagatgtcatcggctactacatgcttggtgtccttaacttagaaaatgaattctcattagaagaaattcaagaaaatagtgattccttcttgttagacattaacgaagaagaaggcattattgcacgtgtaaactttagtacgattgtacaagaaacaggtttcgtgacaggttacattgccgtactacatgatgtcacagaacaacaacaagtcgaacgtgaacgtcgcgaattcgttgcgaatgtttcacacgaattacgtacaccgctgacatctatgaatagttatatcgaagcacttgaagaaggtgcttggcaagataaagaattggcaccatcattcctatctgtcacacgcgaagagactgaacgtatgattcgtttagtgaatgatttacttcaattatctaaaatggataatgaatcagatcaaattacgaaagaaattatcgacttcaatatgtttatcaacaaaattattaaccgtcatgaaatggcagcgaaagatacgacattcgtgcgcgaaattccgcaacaaaccatctttgctgaaatcgatccagacaagatgacacaagtatttgataatgtcattaccaatgcaatgaaatattcacgtggcgagaaacgtgttgagtttcatgtgaaacaaaatgcactttacaatagaatgacgattcgtattaaagataatggtattggaataccgattaacaaggtagataaaatatttgatagattctatcgtgtagataaagcacgtacacgtaagatgggtggtacaggacttggtctagctatttccaaagagattgtcgaagcacataacggtcgaatttgggctaacagtgtagaaggacaaggtacgtcaatctttattacgcttccttgcgaaatcattgaagacggtgattgggatgaa

SEQ ID NO: 34637 - DNA, 721 bp, Staphylococcus epidermidis
gaaaagaggtttataatatatggctagaaaagttgttgtagttgacgatgaaaaaccaattgctgatattttagaatttaatttaaaaaaagaaggttacgacgtatattgcgcttatgacggtaatgacgcagtagatttaatctatgaagaagaaccagatatcgtcttacttgatatcatgttacctggtagagatggtatggaagtatgtcgtgaagtgcgtaaaaagtatgaaatgccgattatcatgctgacagcgaaagattctgaaattgataaagtattaggccttgaattaggtgcagatgattacgtaactaaaccatttagtactcgtgaactcatcgcacgtgtgaaagcgaacttacgccgtcattattcacaaccagctcaagaagtaagtggtgcgacaaatgaaattacaattaaagatattgtgatttatccagatgcatattcaattaaaaaacgtggagaagacattgaattaacgcatcgtgaattcgagctattccattatctttctaaacatatgggtcaagtcatgacacgtgaacacttactacaaacagtgtggggttacgattattttggtgatgttcgtactgtggacgtaacaattcgccgtttaagagaaaaaattgaagatgatccatctcatccagaatacattgtgacacgtagaggcgttggatacttcctccaacaacatgattag

SEQ ID NO: 34638 - DNA, 1281 bp, Staphylococcus epidermidis
atgtcatcaatcgtagtagttgggacacaatggggagacgaaggtaaaggtaaaataacagactttttagcagagcaagcagacgtaattgctagattttctggtggtaacaatgcgggacatacgattcaattcggtggagaaacttacaaattacacttagtgccatcaggcatcttttataaagataaattagcagtaatcggtaacggtgtagttgtagatccagtcgcattattaaaagaactagatgggttaaatgaacgtggtatttcaactgacaatctacgcatctcaaatcgcgcacaagtcattttaccttatcacctagctcaagacgaatatgaagaacgtcgtcgtggcgataataaaattggtacaacgaaaaaaggtatcggcccagcatacgtagataaagcacaacgaatcggtattcgcatggcagacttattagaaaaggaaacattcgaacgccgacttaaagaaaatattgaatataaaaacgcatactttaaaggcatgtttaacgaaacttgtccaacattcgatgaaatctttgacgaatattatgctgcaggtcaacgtttaaaagactatgtgacagacacagctaaaattttagacgatgcaaatgtggctgatgaaaaggtattattcgaaggtgcacaaggtgtcatgttagatatcgaccatggtacatatccattcgttacatctagtaatccagttgcaggtaacgttacagtaggtacaggtgttggccctacatcagtgtctaaagtgattggtgtatgtaaatcatatacatctcgtgtaggtgacggtccattcccaactgaactttttgatgaagatggccaccatattagagaagtgggtcgtgaatatggtacaactactggacgtccacgtcgtgtaggttggttcgactcagttgtattacgtcattcacgtcgtgtaagtggtatcacagatctttcaattaactcaatcgacgttttaacaggattagacacagttaaaatttgtactgcttacgaattagatggtgaaaaaattactgaatacccagcaaacttagatcaattaagacgttgtaaacctatcttcgaagagcttccaggttggactgaagacattacaggttgtcgtagtttagatgaacttcctgagaatgcacgtaattacttagagcgtatttcagaattatgcggtgtccatatttcaatcttctcagtaggtccagaccgcgaacaaacgaatttattagagcaactttgg

SEQ ID NO: 34639 - DNA, 1398 bp, Staphylococcus epidermidis
atggatggaatgtatgagcaaaatcaaatgccacatagcaatgaagctgaacaatctgtcttaggtgccattattatagatccagaactcattaatactactcaggaagtcttgcttcctgagtcgttttatagaggcgcccatcaacatatttttcgagcaatgatgcacctaaatgaggataataaggaaattgatgttgtcacattgatggatcaattatcaagtgaaggtagcttaaacgaagcgggtggccctcaatatcttgccgaactatcgacgagtgtaccgacaacgcgaaacgttcagtactatacggatatcgtttttaaacatgcgttgaaacggaaacttattcaaaccgctgatagtatagcgaatgatggctataatgatgaattagaattagatacgattttaagtgacgccgaacgacgtattttagaactatcttctacaagagaaagtgatggttttaaagatattagagatgtcttaggacaggtatatgaaaccgcagaagaactcgaccaaaatagtggtcaaacaccaggtattccaactggttatcgtgacttagatcaaatgactgctggttttaaccgtaatgatttaatcattctagcggcacgtccttcagtaggtaagactgcctttgccttaaatattgcgcaaaaggttgccacacatgaagatatgtatactgtcggtatcttctcacttgagatgggtgccgaccaattggcaacacgtatgatctgtagttctggtaacgttgattccaatcgtttaagaactgggacgatgactgaagaagattggagtcgctttacgattgcggtaggtaagctatcacgaactaaaatcttcatagacgatacgccaggtatccgtatcaatgatttacgttctaaatgtcgtcgactcaaacaagagcacggtcttgatatgattgtgattgattatctacaattgattcaaggaagcggatcacgtttctcagataaccgtcaacaagaagtttcagagatttcacgtacacttaaggcgattgcacgtgaattagaatgtccagttattgcactgagtcagttatcacgtggcgttgaacagcgacaagacaaacgtcctatgatgagtgatattcgtgaatctgggtctatagaacaagatgccgacatcgtcgctttcttatatcgtgatgattattataatcgtggtgaaggtgatgaagatgatgacgatgctggttttgaaccacagacaaatgatgataacggtgaaattgaaatcatcatcgccaagcaacgtaacggtccaacaggtactgtgaaacttcactttatgaaacaatataataaatttacagacattgattatgctcatgcagatatgtca

SEQ ID NO: 34640 - DNA, 444 bp, Staphylococcus epidermidis
atgaaagtaattttcacacaagatgttaaaggtaaaggtaaaaaaggcgaagttaaagatgtaccagtaggttacgcaaataacttcttacttaaaaataaatatgctgtagaagcaactcctggtaacttaaaacaattagaacaacaaaataaacgtgctgaagcagatagacaacaagaaatcgatgatgcaaaagcacttaaagaacagttaaaagatatcgaagttgaagtatcagctaaaacaggtgaaggcggcaaactatttggttcaatcagtacgaaacaaattgccgaagcgctaaaaaaacaacatgatattaaaatcgacaaacgtaaaatggacttaccgcatggtattcatgcactaggatatactaatgttccagtgaaattagacaaagaagtcgaaggtacaatccgtgtgcacactgtagaacaa

SEQ ID NO: 34641 - DNA, 816 bp, Staphylococcus epidermidis
ttgaaaactttaaatcatttaaacaaaatgaaggcatcacagcaaaagatttctatggttacagcttatgattatcctagtgctaagcaagcacaacaagctgaaattgacatgattttggtaggagattctttaggaatgacagtgttaggatatgatagtactgttcaagttacattgaacgatatgattcatcatggtaaggctgttaaaagaggtgcttcagatacatttatagttgttgatatgcctatagggactgttggtttaagtgatgaagaagatctaaaaaatgcacttaagctttatcaaaacacgaatgctaacgctgtcaaagtagaaggggctcatcttacatcatttattcaaaaagcaactaaaatgggtatacctgttgtttctcacttaggtcttacacctcaaagtgtaggtgtaatggggtataaacttcaaggggatacaaagacagccgctatgcaacttatcaaagatgctaaagctatggaaactgctggtgcagtagtactggttttagaagccatacctagtgatttagctcgagaaattagtcagcaactcactattccagttataggtataggggcaggaaaagatactgatgggcaagtgttagtgtatcatgatatgttaaattatggtgttgatcgacacgctaagtttgttaagcaatttgcagacttttcaagtggtattgatggattaaggcaatataatgaagaagttaaagcagggacgtttccttctgaaaatcatacttacaaaaaacgtattatggatgaggtagagcaacatgac

SEQ ID NO: 34642 - DNA, 1965 bp, Staphylococcus epidermidis
atgaaccgtcaatccactaaaaaagctttgctcataccgtttattttaatggtactcactgccatagcacttgtcgtcgtgtggtttatttttaaccaattagtggcaggtattgctacagctatactcattgtgatgattattattagtggcgtgttattgagaaaagcatttctaaaaatggataattatgtggatgatttaagtggtcacatctcggcaagtagtaataaggcgattaagcacttgcctatagggatgattgtgttagatgaagataatcacattgagtggatgaaccaatttatgacagatcacattgaaacgaatgtgatttctgaaaatgtcaatgaagtcttccctaacatattaaaacaactggaaaaagttcaagaagtagaaatagaaaacaacaattattactatcatgtacgatattcagaaaacgagcattgtttatacttctttgatatgactgaaactgaacgtacaaatgaactatatgaagattccaagccgattattgcaacaatatttttagataattacgatgaaatcactcaaaatatgaacgatacacaacgttctgaaattaactctatggtgacacgtgtgattagtcgttgggcacaagattacaatatttacttcaaacgttacaattcagatcaatttgtagcttactttaaccaaaaaatattggctgaactagaagattctaattttgaaatcttaagccaattaagagagaagagtgtgggttaccgcgcacaactaacattaagtattggtgtaggtgaaggcacggagaaccttattgatttaggtgaattatcacaatctggtttagacctcgcgttaggtcgtggtggtgaccaagttgcaattaagaatatgaacggcaatgtaagattctatggtggtaagactgaccctatggaaaaacgtacgcgtgtacgtgcgcgtgtgatttcacatgccctcaaagatattcttactgaaggcgataaagttatcgtcatgggacataagcgaccagatttagatgctataggtgcagctatcggagtttcgcgctttgcatcaatgaataatttagaggcatttatcgttcttaatgattctgatattgatccgacattacgtcgtgttatggatgagattgataagaaaccggaactaaaagaacgctttgtaacatcggatgaggcttgggatatgatgacttctaagacgactgtcgttgttgtagatacacataaacctgaaatggtcttagatgaaaatgtcttaaataaagcaaaccgcaaagtggtcattgatcatcatagacgtggcgaaagctttatttcaaatccattacttgtgtatatggaaccttacgctagctcaactgctgagctcgtaacggaattactagaatatcaaccaactgaacagagattgactcgtttagaatcaactgttatgtatgcaggtattatagtagatacaagaaactttacgttaagaacaggttccagaacatttgatgctgcaagttatttacgtgcacatggcgctgatacaatcttaacgcaacatttcttaaaagatgatgtcgatacgtatatcaatcgttcagaattgataagaacagttaagatacaagatcaaggtgtagccattgcacatggttcagatgataaaatttatcatcctgtaacggttgcacaagctgccgatgagttgttaagtttagaaggcattgaagcatcttatgtagtagctaaacgtgaagacaacctgattggtatctcagcacgttctttaggttccataaatgttcaattaacaatggaagcgttaggtggcggtggccatctgacaaatgctgcgacacaaataaaaggtgcgacaatagatgaagcaatagaacaattacaacaagcaattacagaacaaatgagtaggagtgaagacgca

SEQ ID NO: 34643 - DNA, 702 bp, Staphylococcus epidermidis
atgactaatgtattatatcaacacggaacattaggaactttaatggcaggtttattagaaggaactgcttcaattaatgacttattagaacatggtgatttaggtattgctacgcttacaggttctgatggagaagtaatttttgttgatggtaaagcttatcatgcaaatgaacataaagaatttatagaattgacaggcgacgaaatgacaccatatgcaactgttacaaaattcaaagcagactcaagttttaaaacatctaataaaaatcaagaagaagtattcgatgaagttaaaaaacaaatgaaaagtgaaaatatgttctcggcagttaaaatttcaggaacgtttaaaaaaatgcatgtacgtatgatgcctggtcaagaacctccatacacacgtttaattgattcagctcgtagacaacctgaagaaacacgtgaaaatatcaaaggttcaatcgtaggtttcttcactccagaattattccatggtattggttctgcaggtttccatattcactttgcaaatgatgatcgtgattttggtggtcatattttagactttgaagtggatgatgtgactgttgaaatacaaaactttgaaacatttgaacaacacttcccagtagatgctaaatcatttactgatgctgacattgactataaagatatagccgatgaaatcagagaagctgaa

SEQ ID NO: 34644 - DNA, 1662 bp, Staphylococcus epidermidis
atggcggaaaaacaatattctgcagcacaaatggtaattgatactttaaaaaataatggagttgagtatgtatttggtattccaggtgcgaaaatcgactacttatttaatgcactagaggatgacgatattgaattagtcgttacgcgtcatgaacaaaacgcagcgatgattgcacaaggtattggtcgtttaacaggaaaaccaggtgtggctattactacaagtggcccaggggtaagtaacttaactactggtttattaactgcaacttctgaaggtgaccctgtattagctatcggtggtcaagttaaaagaaatgacttattacgtttaacacatcaaagtattgataacgcatcattacttagatcctcaactaaatatagtgcagaagtacaagatccagaatcactatcagaggttattacgaatgcaatgcgtacagccacttcaggtaaaaatggagcgagctttatcagtattccacaagatgttatttcatcacctgtcaaagctgatgcaatttcattatgtcaaaaaccacatcttggtgtaccttcagaacaagaaattaatgaagtgattgaggctattaaaaattctaaattcccagtattattagctggaatgagaagttcaagccaagctgaaacagaagctattcgccgtttagttcaaaaaacaaatttacctgttgttgaaacattccaaggtgccggcgtaattagtcgcgaattagaaaatcacttcttcggtcgtgttggtttatttagaaaccaagtgggtgacgaattacttagaaaaagtgatttagttatcacaatcggttatgaccctattgaatatgaagcaagtaactggaataaagaattagatactaaaatcatcaatgtcgatgaagaacatgctgaaatcactaattacatgcaaccagttaaagagttaatcggaaacattgcaggtacaatagatatgatttctgaacatgtaaatgaaccatttattaatcaagatcatttagatgaacttgaaaaattaagaggcgaaatcacagaagcaactggaattaaagcaactcacaaagaaggtgtgatgcacccagttgaaatcattgaaacaatgcaaaaagttttaactgatgatactactgtaactgtagatgtgggaagccattacatttggatggctcgtaaatacagaagttacaatcctagacatttactatttagtaacggtatgcaaactctaggtgttgcacttccatgggctatttcagctgcacttgtacgtccaaatacacaagttgtttctgtagctggagacggtggtttcctattctcaggacaagaattagaaactgcagtacgtaaaaacttaaatatcattcaattaatttggaatgatggtcgttataacatggttgaattccaagaagaaatgaaatataaacgctcttcaggtgtagaatttggaccagttgattatgtaaaatatgcagaatcatttggcgctaaaggattacgtgtgactaatcaagaagaattagaggcagcacttaaagagggttacgaaactgatggaccagtattaattgatatcccagttaactatgcagataatgttaaattatctacaaatatgttaccaaatgctttaaat

SEQ ID NO: 34645 - DNA, 1449 bp, Staphylococcus epidermidis
atgggaagtttttttaatcggatgactcgaaaagagaatcctactatttatcaaaataaagatgggcatcttaagcgcacgttacgtgtacgtgactttcttgcactaggtgttggtacaattgtctctacatctatcttcactttaccaggtgttgtcgcggctgagcatgccggacctgctgtggcattatcattcttattagctgccattgttgcaggtcttgtagcctttacttatgcagaaatggcatctacaatgccttttgctggatcagcttattcatggattaatgtactttttggtgaattattcggatgggttgccggttgggcgcttttagcagaatactttattgctgttgctttcgttgcttcaggcttttctgctaacttaagaggtcttattgcaccattaggcatttctttacctaaatcattatctaatccatttggaagtaacggtggtgtcattgatatcattgctgctgtagtgattattttaactgcattactattatcacgcggaatgaacgaagccgctcgtatggaaaatgtattggttatattaaaggtgttagccatcattttatttgtgattgttgggctaactgcgattaatttcagtaactatataccatttattccagaacataaggttactgaaactggcgactttggaggttggcaaggtatttatgctggagtttcaatgattttcttagcttatattggttttgactctattgctgctaattcagctgaagcgattaatccacagaagacaatgcctagaggaattttagggtcactcatagtagcaattgtattgtttgtggccgtagcacttgttcttgttggcatgttccactactctcaatacgctgataatgcagagccagtaggttgggcattacgagaaagtggtcatggtattattgctgcaattgttcaagcaatttctgtcatcggtatgttcactgcattaatcggtatgatgcttgcaggttcacgtctattatattcatttggacgagatggtttactcccttcttggttaagtcaattgaatcacaaacatttacctaatcgagcacttgtcatacttacaatcattggcgtagttatcggatcaatgttcccgtttgctttcttagcacaattgatttccgcaggtacccttgttgcattcatgtttgtgtcactagcaatgtatcgattaagaaaacgtgaagggaaagatttacctaagccagagtttaaattacctttatatcctattttgcctgcaattacatttatattagtattgctagtattttggggattaagttttgaagctaagttgtatacactgatatggtttattgtaggtataattatttatttaatttatggaattagacattccaaaaagaatgatgaagaagcgtatcaagtacctagagaa

SEQ ID NO: 34646 - DNA, 1284 bp, Staphylococcus epidermidis
atgttagacattcgtttatttagaaatgaacctgagaaagtgaagagcaaaattgaattaagaggcgacgatcctaaagttgtcgaccaagttttagaattagatgaacaacgccgtgaattaatcagtaaaactgaagagatgaaggcgaaaagaaataaagtgagcgaagaaatagctcaaaagaaacgtaataaagaagacgctgatgacgtcattgctgagatgcgtcatttaggtgatgaaattaaagatatcgataatcaacttaatgaagtagataataaaattagagatatcttaattcgtattcctaacttaattaatgaagatgtacctcaaggtgcttctgatgaagaaaacgttgaagttaaaaaatggggtacgccacgtgattttgaatttgaacctaaagcgcattgggatttagttgaagaattaaaaatggctgactttgaacgtgctgctaaagtatctggtgctcgtttcgtatacttaactaaagatggcgcattacttgaacgtgctttaatgaactacatgttgacaaaacatacaacgcaacatggttatactgaaatgatgacacctcaattagtgaatgctgatacgatgtttggaacaggtcaattacctaaatttgaagaagatttatttaaagttgaaaaagaaggcttatatacgattccaactgcagaagtacctttaacaaacttctatagagatgaaattattcaaccaggtgtactacctgaattatttacagctcaaactgcatgtttccgtagtgaagcaggatcagctggtagagatactagagggttaattcgtttacatcaatttgataaagttgaaatggttcgtattgtacaacctgaagattcttgggatgctttagaagaaatgacacaaaatgctgaagctattcttgaagaattaggtttaccataccgtcgtgttatcttatgtactggcgatattggtttcagtgctagtaaaacatatgatttagaagtttggttaccaagttacaatgattataaagaaatcagttcttgctctaactgtactgatttccaagcacgtcgcgcaaatatcagattcaaacgtgatgctgcttctaaaccagaattagtacacacattaaatggtagtggtttagctgtaggtcgtacatttgcagccatcgttgaaaactatcaaaacgaagatggtacattaacaattcctgaagcattagtaccatttatgggtggcaaaactaaaattgaaaaaccaatcaaa

SEQ ID NO: 34647 - DNA, 2679 bp, Staphylococcus epidermidis
atggctgaattacctcaatcaagaattaatgaacgaaatataaccagtgaaatgcgtgaatcattcttagactatgctatgagtgttatcgtttctcgtgcattacctgatgttagagacggattaaagccagtacatcgtcgtattctttatggtttaaatgaacaaggtatgacgcccgataaaccttataagaaatctgcacgtatagtcggggatgtcatgggtaaatatcaccctcatggtgattcttcaatttatgaagcaatggtaagaatggcccaagactttagttatcgttatccacttgtagatggtcaaggtaactttggctctatggatggtgacggggcagccgcaatgcgttataccgaagcacgtatgactaaaataacattagaacttttacgtgatatcaacaaagacacaattgattttattgacaactatgatggtaatgaaagagagccgtcagtcttacctgcacgtttccctaacttactagtaaatggtgcggcaggaattgccgtaggtatggctacaaatattcctccccacaatttaactgaagttattgatggtgtgctcagtttaagtaagaatccagacatcacaattaatgagctgatggaagacatccaaggtcctgattttcctacagccggtttagtactagggaaaagtggtattcgtcgagcttatgaaacaggtcgtgggtcaattcaaatgcgttctcgtgctgaaatagaagaacgtggtggtggccgtcaacgtattgtcgtaacggaaatacctttccaagtcaataaagcgcgtatgattgaaaaaatcgcagagttagttagagataagaaaatcgacggtattacagatttacgtgatgaaacaagtttgcgtacaggtgtaagagtagttattgatgtacgtaaagatgcaaatgcgagtgttattttaaataatttatataaacaaactccattacaaacatcatttggtgtgaatatgattgctttagtgaatagtagacctaaactaatcaatttaaaagaagcacttatccattacttagaacaccaaaaaacagtggttagacgacgtactgaatataatcttaaaaaagcaagagaccgtgcccatattctagaaggtttacgaatagcactagatcatattgatgaaattatcacaacaattcgtgaatcggacactgataaaattgcgatggcaagtttacaagagcgttttaaactaactgaacgtcaagctcaagcaattttagatatgcgtttaagacgtttaactggattagaaagagataaaatagaatctgagtataatgaacttctagaatatattaaagagttagaagagattttagctgatgaagaagtactattacaattagttcgtgatgaattgactgaaattaaagaacgtttcggcgatgaacgtcgcactgaaattcaattaggtggtctagaagatcttgaagatgaagacttaatccctgaagaacaaattgttattacattaagtcataataactatattaaacgtttaccagtatctacatatcgttctcaaaatcgtggtggtcgtggcatacaaggtatgaacacgttggatgaggacttcgttagtcaattggtaacaatgagtacacatgatcatgttctgttctttacgaataaaggtcgtgtatataaactcaaaggttatgaagttcctgagttgtcacgtcaatccaaaggcatacctattattaatgcgattgaactcgaaaatgacgaaacaataagtacgatgattgcagttaaagaccttgaaagtgaagaagattatctcgtattcgcgacaaaacaaggtatcgttaaacgttcatcattaagtaacttctcccgtattaacaaaaacggtaaaattgcaattaactttaaagaagatgatgaattaattgcagtacgtctaacaacaggtaatgaagatattcttattggaactgcacatgcatcattaattagattttctgaatctacattacgcccattaggccgtacagcagcaggtgtgaaaggtatttctctacgtgaaggggatactgtcgttggtcttgatgttgcagattcagaaagtgaagatgaagtattagtagttactgaaaatggttacggtaaacgtacacctgttagcgaatatcgtttatcaaatcgtggtggtaaaggaatcaaaactgcgacaattaccgagcgtaatggtaacatcgtttgtatcacaactgtaaccggtgaagaggatttaatggttgtaactaacgctggtgttattattcgtcttgacgttcatgatatttctcaaaatggacgtgcagcacaaggtgtacgccttatgaaactcggagatggtcaatttgtttctactgttgctaaagtaaacgaagaagacgataatgaggaaaatgcagatgaagcgcaacaatctactactactgaaacagcagatgtagaagaggtagtggatgatcagacaccaggcaatgcgattcatacagaaggtgatgcagaaatggaatctgtagaatctcctgaaaatgatgatcgtattgatatcagacaagattttatggatagagtgaatgaagatatcgagagtgcttcagataatgaagaagatagtgatgaa

SEQ ID NO: 34648 - DNA, 1926 bp, Staphylococcus epidermidis
gtgaatacattgtcagatgtaaacaacacagataattatggtgctggacagatacaagttttagaaggtctcgaagcggttcgtaaaagaccgggtatgtatattggttcaacttcagaaagagggttgcaccatttagtatgggaaattgttgataatagtattgacgaggcattagcaggttatgctagtcatattgaagttgtaattgagaaagacaattggattaaagttactgacaatggccgtggtattcctgttgatattcaagaaaagatgggacgccctgctgtcgaagttatcttaactgtacttcacgctggaggtaaattcggaggtggcggatacaaagtatctggcggtcttcacggtgttggatcttcagttgttaatgcactctcacaagatcttgaagtttatgtacatcgtaatggcacgatttatcatcaagcctataaacaaggtgtgccacaatttgatcttaaagaaattggcgatacagataaaacaggtacagctattcgattcaaagccgataaagaaatctttacagagacaacagtttataactatgaaacacttcaaaagcgtatacgtgagcttgctttcttaaataaaggtattcaaattactttaaaagatgaaagagaagaggaagttagagaagactcatatcattatgaaggcgggattaaatcctatgtagatttattaaatgagaataaagaacctcttcacgatgaacctatatatatccatcagtctaaagacgatattgaagtggaaattgcacttcaatataacagtggatatgcaaccaacttattaacgtatgcgaataatattcatacatacgagggtggtacgcatgaagatggctttaaacgtgctttaacacgcgttttaaatagctatggtacgcaaagtaagattattaaagaggataaagatagactttcaggtgaagatacacgagaaggtttaacagcagtcgtatcaattaaacatggcgatcctcagtttgaaggacaaacaaaaacaaaattaggaaactctgaagtacgtcaagttgttgatagattattttctgaacactttgaacgtttcttatatgagaatccatctgtaggacgcattattgttgaaaagggtattatggcttcacgcgcacgtgtggctgccaaaaaagcacgtgaagttacgcgtcgtaaatcagcattagacgtttcaagcttaccaggtaaattggcagattgttctagtaagaaccctgaagaaagtgaaattttcttggtagaaggtgactctgccggggggtctactaaatctggtcgtgattcaagaacacaagccattttacctttaagaggtaaaattttgaatgtggaaaaagcacgtttagatcgtatcttaaacaataacgaaattcgtcaaatgattactgcatttggtacgggtattggaggagaattcgatatatcaaaagcacgttatcataaaatcgtaatcatgactgatgccgatgttgatggtgcacatatacgtacgttattacttacattcttctatcgtttcatgagacctttaattgaagcgggctacgtttatattgctcagccgcctttatataaactaacacaaggaaaacaaaaatattatgtatttaacgatagagaactagacaagttgaaacaagaattaaacccgtcaccaaaatggtcaattgcacgttacaaaggtcttggtgaaatgaacgcagaccaattatgggaaacgactatgaatcctgaacatcgctctatgttgcaagtgagacttgaagatgcaattgatgcagaccaaacatttgaaatgttaatgggcgatgtagtagaaaatcgcagacaatttatcgaagacaatgcagtttatgccaacctagatttc

SEQ ID NO: 34649 - DNA, 1131 bp, Staphylococcus epidermidis
atgatggaattcacaattaaaagagattattttattaatcaacttaacgacacattaaaggctatctcacctagaacaactttaccgattttaacaggtatcaaaattgatgctaaagaaaatgaagtcattttaactgggtcagattcagaaatatcaatagaaatcactattccaaaacaagttgatggtgaagaaattgttgaaattacagaaacaggatcagttgtacttcctggtcgtttcttcgttgatattattaaaaaacttcctggaaaagaagttaaattatcaactaatgaacaattccaaacgttaatcacatcaggtcattcagaatttaacttaagtggcttagatcctgatcaatacccattattacctgaggtatcacgagatgacgctattcaattgtcagttaaggtactaaaaaatatcattgcacaaactaattttgcagtgtccacctcagaaacacgaccagtacttactggtgtaaactggcttatacaagataatgaattaatatgcacagcaacagattcacaccgcttagctgtaagaaagttacagttagaagatgaatcagaaaataaaaatgtcatcattcctggtaaagctttatctgaattaaacaaaattatgagtgacagcgacgaagatattgatattttctttgcttctaaccaagtgttattcagagtggggaatattaatttcatctcacgtttacttgaaggtcattatccagatacgacacgtttattcccagaaaattatgagattaaattaggaattaacaatggagacttctatcatgcaattgatcgtgcatctttattagcacgtgaaggtggaaataatgttattaaattaagtacaggtaatgaattagttgaactttcatctacttctcctgaaattggtactgttaaagaagaagttaacgctaatgatgtagaaggcggaaacttgaaaatttctttcaactcaaaatacatgatggatgctttaaaagccattgataatgatgaagtagaagtagaattctttggtacaatgaaaccatttatcttaaaaccaaaagatgatgattctgtaacgcaattaattctgcctattagaacatat

SEQ ID NO: 34650 - DNA, 1353 bp, Staphylococcus epidermidis
atgtcagagaaagaaatttgggataaagttttagaaattgcccaggaaagaatttcaaacactagttatcaaacgttcataaaagatacgcaactctactcacttaaaaatgacgaagccattatattagtaagtctgcctttcaatgcgagttggcttaatcagcgatattcagaaattatgcaggctattatttatgatgtcatcggttatgaagtgaaaccacattttatttctgaagatgaacttgcatcctacaacaatgtaaatacacaagaagttcaagaaccccaagtacaacattcttctatagatgataagacttggggaaaagaacaatttaatatgcacaatacattcgatacatttgtcattggacctggtaaccgtttcccacatgctgcaagtttagctgttgcagaagcaccggcagaagcttataatccattatttatatatggaggcgtaggtctaggtaaaacacatttaatgcatgcaattgggcaccatgttcttagcaacaaacctaatgctaaagtcatttacacttctagtgagaaattcacaaacgaatttattaaatcaatacgtgataatgaaactgaagcatttcgtgaaaagtatcgtaaaattgatgttttattaattgatgatattcaattcattcaaaataaagaacaaacgcaagaagagttcttccatacttttaatgaattacatcaaaataataaacaaatcgttatttcaagtgatcgtccaccaaaagaaattgctaagctggaagaccgtctacgttctcgttttgagtggggactaatagttgatatcacaccacctgattacgaaacaagaatggcaatattacaaaagaaaattgaagaagaaaatcttgatattccgccagaagctttgaattacatcgccaaccaaatccaatcaaatattcgtgaacttgaaggcgcattaactcgacttttagcgtactccaaattacaaggaaaacctattacaaccgaactcactgcagaagcgttaaaagatatcattcagtcacctaagtctaaaaagattacaattcaagatatccaaaagatagttggtcaatattatagtgtaagaattgaagattttagtgccaaaaaacgtacaaagtcaattgcttacccacgacaaatagctatgtatctatctagagaattaactgatttttcattacctaagataggtgaagaatttggaggtcgcgatcatacaacagttatccatgcccatgaaaagattgcaaatgatatcaagtctgatcctacatttaagcaagaagtagaaaacttagaaaaagaaattagaaatcag

SEQ ID NO: 34651 - DNA, 1932 bp, Staphylococcus epidermidis
atgatacttttacaacttaatgacatctccaaatcgttcgatggtgaagatatcttcacagatgttaattttgaggtgaaaactggcgaaagaatcggcgtagtaggccgtaatggagctggtaaatcgacattaatgaaaatcatagcaggtgtggaaaattacgatagtggtcgaatatcaaaaatcaaaaatttgacaatgagttatttaactcagcaaatgacactcaattcagaagctactgtctttgaagaaatgtctaagccttttgaacatataaagaaaattgaaaatttaattaaggatgaaaccgattggcttgcacgaaatggacaagattatgaatccgatgaatatcaatcacatattgaaaaatatgaaactttaacgaatcgttatgagcaattagatggttatcaatatgagagtaaaattaaaacagtcctgcacgggcttaactttacagaaagcgatttcaacaagcctattaatgattttagtggtggtcaaaaaacacgtctttctcttgctcaaatgttacttaaagaacccgatttactccttcttgatgaaccaactaaccatctagacatggaaacaaccaagtggttagaggattacttaaagtactttaaaggggcaattgtaattatcagtcatgatagatattttttagataaaattgtaactcaagtttatgatgttgctctaggaaatgtaaaacactatgtaggaaactatgagcaatttataaagcaacgtaatcagtattacgaaaaacgcatgcaagaatttgaaaagcaacaagaagaaatcaagcgtttagaaacctttgtagaaaaaaatattactcgtgcatctacaagcggcatggctaagagtagacgtaaaacattggaaaaaatggaacgtattgataaacctatgatagatgctagaagtgcaaatatacaatttggcttcgaccgtaatactggtaatgatgtgatgcacattcatgatttaaaaattggttacgactcacctattacactacctataaacctcgaaatctttaaaggggatcatatagctatcattggtccaaatggtgttggtaaaacaacattgataaaaacaattgctgaaaaaaaacataaactaggtggtcaaattatctttggtgctaatttacaaattggttactatgatcaaaaacaagctgaatttaaatcaaataaaaccattctcgattatgtttgggatcaatatccacacatgaatgaaaaagatgtacgggcagtattagggcgtttcttgttcgttcaagaagacgtaaaaaaaattatcaatgacttatccggcggcgaaaaggcacgattacaattagcacttttaatgttacaacgtgataatgttcttatcctagatgaaccgactaaccatttagatattgattctaaagaaatgcttgaacaagcattgaaagattttgaaggcacaattatttttgtatcacatgatcgttattttattaaccaacttgcaaataaagtttttgatttaaacattaatggtggccaaatgtatttgggagattatcagtattatattgagaaaactgaagaagctgcagctatcaaagcacatgaaacaataactcaaaataattttgaaaataaagagataaatcaagacgcaaatacttcaacctatatcagtcaaaagcaacaaaaaagacaacaacgtaaattagaaagacaaattgaacattgtgaaagacaaatcgaagaattagaagcacaaatatcacatatcgacgaacagttaacacaacctgaagtatttaacgaccctctaaaagctagtaaatttgccaatcaaaaatccgataccgaacaaaaattagaacaaataatgttggaatgggaaaaattacaagaaaagctc

SEQ ID NO: 34652 - DNA, 1035 bp, Staphylococcus epidermidis
gtgggtgaatttgaaatgacaaataataaattaatcttagcaattgaaacaagttgtgatgaaacgagtgtaagtgtaataaagaatggcactgaacttttatctaatactgttttaagtcaaatagatagtcacaaacgttttggtggtgttgtacctgaagttgctagtagacatcatgttgaaggaataacagcaactatagatgaatcgttagtgagtgcaaaagtgaaaatggaagacattgacgctattgcagtaacacaaggcccaggattaataggagctttattgattggtattaatgcggctaaagctttggcatttgcttatgataagcctattattccagtacatcatattgctggtcatatttatgccaatcacttagaacaaccattaacgtttccactaatgtcattgattgtatctggtggtcatactgaactagtatatatgaaaaatcatttagatttcgaagtgattggtgaaacgagagatgatgcagtaggagaagcttatgataaagttgctcgaacaatcaatcttccttatcctggtggaccgcatattgatcgattagcagctaaaggtaaagatgtatatgattttccaagagtttggctcgaaaaagatagttatgattttagttttagtggtcttaaaagtgctgtaataaataaactgcataatttaagacagaaaaatattgaaattgtagctgaagatgttgcaacgagtttccaaaatagtgttgtagaagttttaacctataaagctattcatgcttgtaaaacttataatgttaatcgcttaattgttgcaggtggtgttgctagtaataaaggattaagaaatgcactaagtgaagcatgtaaaaaagagggtatacaccttactattccaagtcctgttctttgcactgataatgcagcgatgattggtgctgctggatattatttatatcaagctggtttgcgtggcgatttagctttaaatggacaaaataatattgatattgaaactttttctgtt

SEQ ID NO: 34653 - DNA, 135 bp, Staphylococcus epidermidis
atggtaaaacgtacttatcaaccaaataaacgtaaacatagtaaagttcatggtttcagaaaacgcatgagcactaaaaatggccgcaaagttttagcgcgtcgtcgtcgtaaaggccgtaaagttttatctgca

SEQ ID NO: 34654 - DNA, 1686 bp, Staphylococcus epidermidis
atgcgaagtgatatgatcaaaaaaggagatcaccaagctcctgcaagaagtcttttacatgcgactggcgctcttaaacaacctacagatatgaataaacctttcgtagcaatttgtaactcttatattgatattgttcctgggcacgttcatttaagagaattagcagacatcgcaaaggaagctattagagaagcaggtgctatcccattcgaatttaatactattggtgttgacgatggaatagctatgggacatattggcatgagatattccttaccttcaagagaaattatcgcagatgcagctgaaacagttattaacgctcattggtttgatggtgttttttacattcctaattgcgataaaattacgccaggaatgttactcgcagctgttagaacaaatgtaccagctatcttttgctcaggaggcccaatgaaagctggtctttccgctcaaggtaaggcattgacattatcttcaatgtttgaagcggttggagcttttaaagaaggaacaatctcaaaagaagcatttttagacatggagcaaaacgcttgtcctacatgtggttcgtgcgccggtatgtttaccgcaaactcaatgaactgtttaatggaagttttaggtttagccctaccatataatggtacagctctagctgtgagtgaccaacgtcgtgaaatgattagacaagctgcattcaggttggttgaaaatattaaaaatgatattaaacctcgcgatattatcacacaagatgcaattgatgatgcttttgctcttgatatggccatgggaggttctactaatactgttcttcatactcttgcaattgcaaatgaagcaggtattgactacgatttagaacgtattaatgaaattgctaaaaaaacaccttacctttctaaaattgcacctagttcttcttattctatgcacgatgttcatgaagcaggtggcgtcccagctattataaatgaattgatgaaaaaggatggtactttacatccggatagattaacagttacgggtaaaaccttgagagaaaataatgaaggtaaaaacatcaaaaattttgatgttattcatcctcttgaaaacccttatgataaacaaggtggattatctgttttattcggaaacctcgcacctaaaggagcggtaatcaaggtcggtggagttgatccttcaattaaagtatttacaggaaaggcaatttgttttaactctcatgatgaagctgttgaagccattgataatcatacagtaagagaaggacatgttgttgttattagatatgagggacctaagggaggtcctggaatgccagaaatgctagcccctacgtcttccatagtgggcagaggattaggtaaagatgttgcattaattacggacggtagattttcgggagcaactagaggtattgcagttggacatatttcacctgaagccgcttcaggtggacccattggcttaataagagatggtgataaaattacgattgatttaatcaatagaactctaaacgtcaatcaatctgaagaagaactgtatcgccgtaaaaatcagcttgaaccattcagagcaaaggttaaaacaggctacttagctagatatactagtttagtcacaagcgctaatactggaggtattatgcaagttccggaaaaccttatt

SEQ ID NO: 34655 - DNA, 345 bp, Staphylococcus epidermidis
atggaaaaagcatatcgtattaagagaaattcagactttcaagcgatatacaagaatgggaagtctgttgcaaatagacaatttgttgtctatacctataaaaatagagatttaaaacattttcgcttaggaataagtgtctcaaaaaaactgggcaacgctgttacaagaaatagaattaaaagagcgataagagagaattttaaagtgcataagcaaaatattatcgctaaagatattatagttattgcgaggcaaccagcaaaagatatgaatacactggagattcaaagcagtttagagcatgtgcttaaaattgcaaaagtgtttaataaaaagattaag

SEQ ID NO: 34656 - DNA, 1749 bp, Staphylococcus epidermidis
atgattaaaatgtcaaatcaaaaatcaatggcttcgcctcacccttctgtgcatcaaacaaaggaatcacaacccttaataacacgcagtggttctcaattattagttgaagcacttcagcaggaagatgtagattttatcttcggttatcccggtggagctgtcttacctttatacgatacattttatgacgggaaaatcaaacatattcttgctcgtcatgaacaaggtgctacacatgctgctgaaggatatgcgcgtgtctctggtaaaacaggagtcgttgttgtgacaagtggacccggtgcaacaaatgccattacaggtattactgatgcatatagcgactctttaccactagtcgtttttactggtcaagttgctacacctggtattggtaaagatgctttccaagaagctgatttactctcgatgactacacctattacaaaacacaattatcaagttaaaaagattgaagacattccaagaattgttcatgaagcctttcatttagcgaacactggaagaaaaggtcctgtagtgattgatttccctaaagatatgggtgtgcttaaaactgatgttgaacttacaaaagatattaatattcctggttatgaagttaatagtaacccaaataaagaggatattaataagttaatatatatgattaaagaagctaagaaacctcttattcttgcaggtgctggtattaatcactctaaatctaatcatttattaacagaatttgtgacaagacatcaaatccctacagttacaactctcctaggacttggagcagtaccttatcatcaccctttattcttaggtatgggaggtatgcatggatcttatgcaagtaatatggctttaacaaattgtgatttacttatcaatttaggtagtagattcgatgatcgtcttgcaagtaagcctgatgcattcgcaccaaatgcaaaggttgtacatgtagatatcgacccttctgaaataaataaagttattaatacagatttaggtatagtcgctgattgcaagcttgtgcttgagaacttatgccatgagcaagttttaacatcctcccacgaagaatggaacgattattgtattaataacaaaagtaactatccatttaaatatgatgaaaatgataaaaacttttgcaaaccacaaaaagcgattgaatatattggcaaagttaccaatggaaatgcaattgttacaactgacgtaggccaacaccaaatgtggacagcacaattctatccatttaaaaattatggacaatgggtaacaagtggtggtttaggtactatgggatttggaattccatcagcaataggagcacaattagctgaacctgagaaaacagttgtatgttttgtaggagatggcggttttcaaatgacgaaccaagaaatggctttacttccagaatatggacttaatgtcaaaatagtacttattaataacggaactttaggtatggtaaaacaatggcaagataaattctttaataaacgattttctcattctgtatttaacgatcaacctgattttatgaaaatggcggaagcatatggtattaagggattcttgatagattctccagataaattagaatcttcaattgatgaagcatttgcatatcatggaccggcactcattgaagttagaatctcacctatagaaccagttaatccaatggtacctagtggcaaatcaaatcatgaaatggagggttac

SEQ ID NO: 34657 - DNA, 1377 bp, Staphylococcus epidermidis
atggattttgatacgattacaagtatttcaacaccgatgggtgaaggtgctattggaattgtgagattatctgggccacaagctattgaaatcggagatatcttatataaaggaaagaaaaagttatctgaagttgagacgcatacaataaattacggtcatattattgatccagaaacaaatgaaacagttgaagaagtcatggtgtctgtattacgtgcccctaaaactttcacacgagaagatattattgagataaattgccatggtggtattttaacaattaatcgtatattagagttaactatgacttatggtgcacgtatggcagaaccaggtgaatatacaaaacgtgcatttttaaatggtcgtatagatttatctcaagcagaagcggttatggattttatacgttccaaaactgatcgagcttctaaggttgcgatgaatcaaatagaaggacgtttaagtgacttaatcaagaaacaacgtcaatccatattagagatactcgcccaagttgaagttaacattgattatccagagtatgatgatgtagaagacgcaacgacggacttcttactagaacagtctaagcgtattaaagaagaaatcaatcagttacttgaaacaggagcacaaggtaaaataatgagagaagggttatctacagttattgtaggacgtcctaatgttgggaagtcttcgatgctaaataaccttattcaagataataaagcaattgtgactgaggtcgctggtacaacaagagacgtgttagaagaatatgtcaatgttagaggtgtcccgttacgacttgtagatactgcgggtattagggatactgaagatatcgtagagaagattggtgtagaacgttctaggaaagctctaagtgaagcagatttaattttatttgtgcttaataacaatgaacctctgacggaagatgatcaaactttattcgaagtcattaaaaatgaggatgttattgtaatcattaataaaacagatttagaacagcgattagatgttagcgaactaagagagatgattggtgatatgccacttatacaaacatcgatgcttaaacaagaaggtattgatgaattagaaatacaaattaaagatttattctttggtggcgaagtacaaaatcaagatatgacttatgtatctaattcacgtcacatttcattgttgaaacaagcgagacaatcaattcaagatgcgattgatgctgctgagtctggtatcccaatggatatggtacagattgatttaacacgtacttgggaaattctaggagaaattattggagaatcagcgagtgatgaattaatagatcaactatttagtcaattttgtttaggaaaa

SEQ ID NO: 34658 - DNA, 1875 bp, Staphylococcus epidermidis
gtggttcaagaatatgatgtagtagtcattggtgctggtcacgccggtattgaagcaggtttagcttcagctcgtcggggtgctaaaacgctgatgttaacaattaatttagataatattgctttcatgccatgtaatccatctgtaggtggtcctgcgaaaggaatcgttgtacgtgaaatagacgctttaggtggacaaatggcaaaaactattgataaaactcacattcaaatgcgtatgcttaatacaggtaaaggtccagctgttagagctttacgtgctcaagcagataaagtattatatcaacaagaaatgaagcgtgtacttgagaatgaggataatttagacatcatgcaaggtatggttgatgaactcattatagaagataatgaagttaaaggtgttcgtactaatattggtacagaatatcgttctaaagctgtcattattacaacaggtacattcttacgtggagaaattatactaggaaacttaaaatattctagtggccctaaccatcaattaccatctgtaactctagcagataatttaagaaaattaggatttgatatcgttagatttaaaacgggtacaccaccacgtgtaaatgcgagaaccatcgattattctaaaactgaaatccaaccaggtgatgatataggtcgagcgtttagttttgaaacaaccgaatttattttagatcaattaccttgttggttaacttatacaaatggagatacacatcaagtcattgatgataacttacatttatctgctatgtattccggtatgattaaaggtacaggtcctagatattgtccatcaattgaggataaatttgtccgctttaacgataaaccaagacatcaacttttcttagaacctgaaggacgtaatacgaatgaggtatacgtgcaaggattatctactagtttacctgaacatgttcaacgtcaaatgttagaaaccattccaggtcttgaaaaagcagatatgatgcgtgcgggttatgctattgaatatgatgcaatcgtgcctactcaattatggccaacgttagaaacaaaagcgatcaaaaacttgtatactgcaggtcagattaatggaacatcaggatatgaagaagcagcgggacaaggaatcatggcaggtattaacgctgctggtaatgttttaggtacaggtgaaaaaatactcagccgttcagacgcatatattggtgtacttatagatgatttagtcactaagggtacaaatgaaccgtatcgattattaacttcacgtgcggaatatcgattattactacgtcatgataatgctgatttacgtcttactgatatggggtatgaattaggtttaatatcagaagaacgctatgcaagatttaatgaaaaacgtcaacaaatcaaagatgaaatacaacgacttaccgatgtacgtattaaaccaaatgaacatacgcaagcaattattgaagctaagggtggttcaagattaaaagatggcatattagcgattgatttattacgtcgtccggaaatgaactacgaaacaattttagaaatcttagaagaatcacatcaacttcctgaagcggttgaggaacaagttgaaattcaaacaaaatatgaaggttatatcaataaatctttacaacaagtagaaaaagttaaaagaatggaagcgaaaaaaattcctgaggatttagattatagcaaggtagatagtttagcatctgaagcacgcgaaaagttagctgaagttaaaccattaaatattgcacaggcttcacgaatttcaggtgtgaatccagcagatatctcaattctacttgtttatttagaacaaggtaaacttcaaagggtgaaacaa

SEQ ID NO: 34659 - DNA, 717 bp, Staphylococcus epidermidis
atgagtattgaatggttatcagagaaattaagcgagcaaggcatagaactatctaatacgcaaaaagagcaatttcaaaaatattataaattacttgttgaatggaacaaaaaaatgaatttgacaagtattactgatgaacatgatgtttatttaaaacatttctatgattcaatagcgcctagtttctattatgattttaacggtcaattaagtctttgtgatatcggtgctggtgcaggttttccaagtatacctttaaagatagtataccctgaattgaaagtaacgattgtagattctctaaataaaagaatacaatttctaaatcatttagctgcagaactaggtcttgaagatgttagttttgtgcatgatcgagcagaaatatatggcaagggtgtctacagggagtcttatgatattgttacagctcgtgcagtagcgagattgactgtcttaagtgagttgtgcttacctttagtaaaaaaaggtggacagttccttgcacttaaatcatcaaaaggtgaagaagaattgcaagaagcgacgtttgctattaacattttaggtggtaatgtgaaagagactcatacttttgaattacctgaaaatgccggtgagcgacaaatgattattattgataaacgtagacagacatcaaaaaaatacccaagaaaaccaggtacgccaaacaaatctccactagttgaaagt

SEQ ID NO: 34660 - DNA, 1002 bp, Staphylococcus epidermidis
atgacaaaagtatattacgacgaaacagtaactcaggatgcattacaaggtaaaaaaattgctgtcattggttatggctcacaaggacatgcacatgcacaaaatttaaaggacaatggttatgatgtagtcattggcctgcgtccaggacgatcatttaataaagctaaagaagatggatttgatgtttatacggtaagtgaagcaacacaacaagcagatgtagtgatggtactattgcctgatgaaattcaaggtgaagtatataacaaggaaattaaaccatatttagaaaaaggaaatgctttagcattcgcacacggttttaatatccatttcagtgttatcgaaccacctagtgatgtcgatgtctttttagtagcacctaaaggacctggtcatttagttagacgtacatttgttgaaggaagtgccgtaccagcattatttggtgttcaacaagatgctacaggccaagctagaaacattgctttaagctacgcaaaaggcattggtgctactcgtgccggggtcattgaaacgacatttaaagaagaaactgaaacagatttattcggtgaacaagctgtactttgtggaggagtttccaaattaattcagagtggattcgaaacacttgtggaagcaggttaccaacctgaattagcttattttgaagtcttacacgaaatgaaattaattgttgatttaatgtatgaaggcggaatggaaaatgtccgttattctatctctaacactgctgaatttggcgactatgtttctggaccaagagtaattacacctaatgttaaagaaaatatgaaaaaagtacttgaagatattcaaaatggtaactttagccgtagatttgttgaagataacaaaaatggctttaaagaattctatcaattacgtgaagatcaacatggtcatcaaattgaacaagttggacgtgaattaagagaaatgatgccattcattaaatctaaaagtattgaaaaa

SEQ ID NO: 34661 - DNA, 1368 bp, Staphylococcus epidermidis
atgggtcaaacactgtttgataaagtatggaaaaaacatgtgcttcatggaaaagaaggtgaaccacaattattatacattgatttacatctcattcatgaagtcacttctcctcaagcgtttgaaggacttagaatacaaaatcgtaaactcagaagacctgatctaacctttgcaactttagatcataacgttcccacaattgatatttttaatataaaagatgaaattgctaataaacaaattacaactttacaacaaaatgctaaggactttggtgtacatatttttgatatgggttctgacgaacaaggtattgtgcatatggttggaccagaaaccggattaactcaaccaggaaaaactattgtatgtggagattcacatactgctacacatggcgcatttggtgctatcgcatttgggataggaacaagcgaggttgaacatgtatttgccacacaaacattatggcaaacaaaacctaaaaatttgaaaattaatataaatggttctttaccagctggagtttatgctaaagacattattttatatttaatcaatcaatatggtgtagatttcggtactggttatgctcttgaatttacaggagaaactataaaaaatttatccatggaagcacgtatgacgatttgtaatatggctattgaagcaggagcaaagtatggtttaatgcaacctgatgaaacaacctttaattacgtaaaaggtcgtccttatgctactgattttgatagttctatggcgtggtggaaagaactttattctgatgatgatgcctattttgataaagttattgaacttgatgtaacaaatttagaacctcaagtaacttggggaactaacccagaaatgggagttagttttagtaatccattcccagaaattaaaaatgcaaatgaccaacgtgcttatgactatatgggacttcacccaggtcaaaaagccgaagatataaaattaggttatgtttttttaggttcatgcacgaatgcaagattatctgatcttattgaagcaagtcatattattaaaggacaacaagttcatccaaatattactgctattgtggttccgggttcaagaactgttaagaaggaagctgaagctctgggactagataaattatttaaagatgctggatttgagtggcgtgaaccaggatgttctatgtgcttaggtatgaatccagatcaagttcctgaaggagtacattgtgcatccacgagtaatcgcaattttgaaggaagacaaggcaaaggcgctcgtacacatttggtatcccctgctatggctgctgctgctgcgattaatggtaaattcattgatgttagaaaggtggtagta

SEQ ID NO: 34662 - DNA, 366 bp, Staphylococcus epidermidis; identical to SEQ ID NO: 34425

SEQ ID NO: 34663 - DNA, 632 bp, Staphylococcus epidermidis
gggtctttccgtcctgtcgcgggtaacctgcatcttcacaggtactatgatttcaccgagtctctcgttgagacagtgcccaaatcgttacgcctttcgtgcgggtcggaacttacccgacaaggaatttcgctaccttaggaccgttatagttacggccgccgtttactggggcttcgattcgtagcttcgcagaagctaaccactcctcttaaccttccagcaccgggcaggcgtcagcccctatacatcaccttacggtttagcagagacctgtgtttttgataaacagtcgcttgggcctattcactgcggctcttctgggcgtgaaccctaaagagcaccccttctcccgaagttacggggtcattttgccgagttccttaacgagagttcgctcgctcaccttagaattctcatcttgactacctgtgtcggtttgcggtacgggcacctgttatctatctagaggcttttctcggcagtgtgaaatcagcgactcgaggaaacaatttcctctccccatcacagctcagccttatgagtgccggatttgcctaacactcagccttactgcttggacgtgcactccaacagcacgcttcgcctatcctactgcgtccccccatcga

SEQ ID NO: 34664 - DNA, 393 bp, Staphylococcus epidermidis; identical to SEQ ID NO: 34428

SEQ ID NO: 34665 - DNA, 1116 bp, Staphylococcus epidermidis
atgaataagaaactattgtggagcatcattggtattgtaattattgtcgtattaatcattgctgcttttatattaaaacaagttaatggttcaggtagtaaagatagtaatgcttacgatacatatacagtaagaaaagaaacacctattagtttagaaggcaaagcgtctccagaatctgtgaaaacttataacaataatcaatctgtgggtaacttcttaagtgtttcagtacaagatggtcaaacagttaaacaaggtgaacgtatcatcaattatgatacaaatgggaataaacgccaacaactattgaacaaagtgaatcaagcacaatctcaagttaatgatgattatcaaaaagtaaatcaaagtcctaacaatcatcaattacaagttaaattgactcaagatcaaagtgctttaaatgaagctcagcagtcattgtcacaatatgacagacaactcaatgacagcatgaatgcatcatttgatggtaaaattaacattaaaaatgattcagatgtaggcgaagggcaacctattttgcaattaatttcttcaaatcctcaaattaacgcaactattacagagtttgatattaataaaattaaagaaggcgatgaagtaaatgtcactgtaaatagcacaggtaaaaaaggaaaaggaaaaattcttaaaatagatgaacttcctacaagctatgatacaagtgacgatagtacagcatcatcggcacaagcaggggcacaaggtgatagtgaagaaggaactgaaatgacgacatctaatcctacaattaatcagccaacaggtggtaaaagtggcgaaacatcaaaatataaagttatcattggtgatttagatatacccgtgagatcaggcttctctatggatgctaaaatccctcttaaaactaaaaagctaccaaataacgtgttaacaaaagataataacgtatttgtcgttgataaaaataataaagttcacaaacgtgaaattaaaattgaacgtaataatggtgaaatcattgtgaaaaaaggattgaaatctggcgataaagtccttaaaagtccaaaaggtaatttaaatgatggagaaaaagtagaggtgtcatca

SEQ ID NO: 34666 - DNA, 171 bp, Staphylococcus epidermidis
atgacgtcaaatcatcatgccccttatgatttgggctacacacgtgctacaatggacaatacaaagggcagcgaaaccgcgaggtcaagcaaatcccataaagttgttctcagttcggattgtagtctgcaactcgactatatgaagctggaatcgctagtaatcgtagat

SEQ ID NO: 34667 - DNA, 2013 bp, Staphylococcus epidermidis
aaaagatttagcattagaaaatacgcagtgggagtagtatcaattattacaggtgcaacaattttcatcggagggcaacaagctcaagcagctgaaacttcagtgcaacatgcggatgcacacccagaagactcgcaaacaacacaacaattaaaaaatgataaggtagaagaaacgttaaaagcttcaaaacaaggtaatgctgatagtcaacaagtacaaacaattgatcaatctaaaacaaatcaaaacaaccaacattctgtagctgaaagtgcacaactgaaaagtgatgagacagctaatcagccaaaaaaagaagaaggtagctcagtaaaacaagacgtccaaccgtctaaaaatgtaaatcaacaagacgtagctactcaatcaaatgagagagaaaataatgacataaaagatgaaggtcaaacttcaaagacgagcaatcaacatatccagagttctaacagtcataatcaatcaacaggaacaaaagacagctactcagaagaaatcgaccaaccattagtgaaattacaaaagccgtctaatgattctacatatcaaacacaatcaaaaacaaaacaagatagttctaaacaactccctcaagaaaaaacaacaaaacgtcaaattcaaacaactgaaaatgaacagacaactaaagttgattctaaaaaagctaatgacactcaaaatgttgaaaaacatactcaagagcctaaaaatgatacatcaacatcacaaaaaaatcatcaacaagtagctacaaaagaacaatctaatagaagtacaacaagggagacgcaaaagcaatcagcaaatgctaatcaaaatcatcagtctacacatcaagcacagttcaaaaaccaatatccagtagtatttgtccatggtttcctaggctttgcaggtgataatcaatttagtttagctccaaaatattggggtggtacaaaatacaatattgacagaaatttaactaatgagggatacaatgtacatgaggcaaatattggtgcttttagtagtaactatgatcgcgcagtagaattgtattactatgtcaaaggaggacgtgttgattacggtgcagcgcatgcagctaaatatggtcatcatcgctatggtcgaacatacaagggcatcatgcgtgattgggaacctggcaaaaaaattcattttataggtcacagtatgggtggtcaaaccattcgtcaaatggaagaattcttaagaaatggtaaccaagaagaaatagaatatcaacgtcaacatgggggtactatatccgatttatttacaggtggtaaagataatatggttgcttcaattactacacttggcacaccacataatggtacacctgctgcagataaaattggcacacgtaaacttgtaaaagaaacgattaatcgtattggtagattaagtggtggtaaagatgtagatatagatttaggtttttctcaatggggattaaaacaacaaccaaatgaaagctacattgattacgcggaacgtgtatccaaaagtaagatttggaatactgaagatcaagctgttaatgatctgacaacgcaaggtgctgaaaaaattaatcaacaaacaagtctaaatcctaatattgtctacactacttatacagggtcagcgactcacacaggacctcttggtaatgaattacctaattctagtgaaattcttttgttgaacttaaccagccgtattattggtaaagatgcaaacaaagaaattagaccgaatgatggtgtagttccagttatatcatcacaacatccttctaatcaagcctttaaaaaagttgatgatcatacaccagctactgataaaggtgtttggcaagtgagacccgttcaacatgattgggaccatttagatttagtaggtatggatgcatttgatttaacacatacaggtagagaattaggtcaattctatctaggtattatggataatatcatgagaatcgaagaagcagacggtatt

SEQ ID NO: 34668 - DNA, 756 bp, Staphylococcus epidermidis
atggctattttaacagcaaatcaattatcaaaagtatatggtcacaaacaaaaatatcgagctttaaataatataagtttttcagttgaaaaaggggaatttgtagctgtcatgggtccttctggatcaggtaaaacgactttactcaatgtgttaagttcaatagatactatttcaggaggaactgtagaagttgaaggtaaagaaattaataaactgagccacaaagaagtggcaaattttcgaaaacaacatctcggttttatttttcaagattatagcgttttacccacattaacagtaaaagaaaatattatgctaccactctcagtacaaaaattccataaatatgaaatggaacaaaattataaagaagtggctgaggcattaggtatttataacctgggaaataaatatccaagtgaaatttctggcggtcagcaacaacgtacggcggcagcccgggcattcgtccataaaccaacaattattttcgcagatgaacctactggcgcattagattctaaaagtgctcaagatttgttacaccgtctagaagatatgaataaacaatttaattcaaccattatgatggtgacacatgatccttcagccgctagttacgctgagagagtcattatgttgaaagacggtgatatacactcagaaatctaccagggtaacgattcaaaacaaacattttaccaagaaattatgaaacttcaaaccgcattaggtggtgtcagtcatgacatt

SEQ ID NO: 34669 - DNA, 2148 bp, Staphylococcus epidermidis
atggataacagtttaattgaaacaattgtaagtaaatatcaattttcggaaaaacaaattaaagcagttttaaaattgctgaaagaaaacaatacggttccatttatagcaagatatcgtaaagaagctacaggtggacttgatgaagtagaaattaaacaaatcaatgatgaatataactatatgttaaatcttcaaaaacgtaaagaagaagtaatacataatattgatcaacagggtctattaacttctgatttaaagcaagacatattaacacagacgaagctacaaagagttgaagatttatatcgtccatataaacaaaaaaagaaaacacgtgcaactgaggctaaaagaaaaggattagaagatttagcagattggttttcacaatcaaaattggatacaaaaattgaagataaagctcaattattcttaaatgatgaagtgactacaattgaagatgcgatagaaggggctaaagatattatagctgaacgtatttcggataatcctcaatatcgctctaaaatacttaaagatgtttttaatcagggactaattgtttcctcgaaaaagaaaaaagccgaagatgagaaacaaacattttctatgtactatgattacaaggaaccaattaaacgtattgctaatcatcgtgttttagcgatgaatcgaggagaaaaagaaaaagtattatcaataaaaattgattttgacacgacacgtattcaaagagaaatagcaaatgttgagataaaaactcaaaatgaagcaactccgtttattaaagaggctattcaggatagccttaagcgattaattcttccttcaatagaaagagaaattagaggagatttaacacaaaatgcagaatctcatgcaatagatgtattcagtgaaaatcttagaaatttattactacaaccaccaatgaaaggtaaacaaattcttggagtagatccagcatttagaacagggtgcaaacttgctgtcgtcaatccatttggtacctttattgctaaaggtgttatttatcctcatcctccaatatcaaaagttgaggcagccgaaaaagagctggtaaagatgataagtgactataatattgagcttttagcgattggtaacggtactgcgagtagagaaactgaacaatttgttgctcaagtaataaaaaaatatcaacttcaagctcaatttatcatagtcaatgaagctggcgcatcagtttattcagcatcagaaattgctagacaagaatttccagattttcaagtagaagaacgaagtgcagtttcaattggtagaagagttcaggatcctttaagcgaacttgttaaaatagatcctaaatctataggagtaggacagtaccaacatgatgtcaaccaaaaagatttaagtagtgccttaacgtttgtagtagagactgccgtcaatcaagttggtgtggatgtgaatactgcttctaaatccttgttacaatatgtatcaggtcttacatcaactatcgctcaaaatattattgattataaggaagaaaacggacctataaaacatcataaagaaataagtagaattaaacgattaggtgcaaaaacatttgagcaaagtattggttttttaagaattgttgatggtgaagaacctttagataatactgcaatacaccctgaaagttacgatgttgcatatcgcatgcttcatcaattagatttaactgcacaagatataggttccgttaaactcaaaaacacgttatcaaatgttaatatttcaacacttgtatctcaattaaatattggtgaacctacattaaaagatataatacaatcattgattgcacctaatagagatccaagagatgaatttgaaacacctattttgaagtccgatgtattatcgattgaagatttatctaaaggcatgaagttgaatggtacagtaagaaatgttgttgactttggagcatttgtagatatcggtgttaaacaagacggactagtacacatatcaaaattatctaagaaattcgttaaaaatccaatggatatgataagtgtaggagatattgtagaagtttggattttagatatagatgaaaataaaggcaaagtttcattgactatggttgccccaaatgaa

SEQ ID NO: 34670 - DNA, 360 bp, Staphylococcus epidermidis
atgattagaagaggagatgtttatttagcggatttatcaccagttcaagggtctgaacaagggggagtaagacctgtagttatcattcaaaatgatactggtaataaatatagtccaactgtaattgtagctgcgattactggtaggattaataaagcgaaaataccaacccacgtagaaattgaaaagaaaaagtataaattagacaaagattcagttattcttcttgaacaaattagaacactagataaaaagcgtttaaaagaaaaattaacatttttatcagagagtaaaatgatagaggttgataatgccttagatattagtttgggattaaataactttgatcatcataaatct

SEQ ID NO: 34671 - DNA, 1182 bp, Staphylococcus epidermidis
atgtcacgcatagtattagctgaagcatatcgaacacctataggcgtgtttggtggtgtatttaaggatatacctgcctatgaactaggtgcaacagttattcgtcaaattttagaacatagtcaaatagatcctaatgaaatcaatgaagttattctaggaaacgtattacaggcaggtcaaggacaaaatcctgctcgtattgctgcgattcatggtggtgtgccagaagcggtaccttcttttactgtaaataaagtttgcggttctggattaaaagcgattcaacttgcctatcaatctattgtagcgggagataatgagattgttatcgctggaggcatggaaagtatgtctcaatctccaatgcttcttaaaaatagtcgtttcggttttaaaatgggaaatcaaactttagaagatagtatgatagctgatggtttaactgataagtttaatgattaccatatgggtatcacagccgaaaatctagttgaacagtatcagattagtcgtaaagaacaagatcaatttgcattcgattctcaacaaaaagcatcacgtgcacaacaagctggtgtatttgatgctgaaattgtacctgtagaggtaccacaacgtaaaggcgaccccctaattatttctcaagatgaaggcattagacctcaaacgacaattgataagttagcacaactccgtccagcatttaaaaaagatggatcagtaactgctggtaatgcatccggtatcaatgacggtgctgctgctatgctcgttatgacggaggacaaagcgaaagcattgggcttacaacctatagctgtattagatagttttggtgcgagtggtgtggcgccttcaattatgggtattggtccagttgaagcgatacataaagctttaaaacgttctaataaagtgataaatgatgttgatatttttgaattaaacgaagcttttgcagcgcaatcaattgctgtaaaccgtgagttgcaattaccgcaagataaagtcaatgttaatggtggtgcgattgcactaggacatccgataggggcttcgggtgcgcgtactttagtttcattattacatcaattaagtgatgctaagccaacaggtgtggcatctttatgtatcggtggcggtcaaggtatcgctacggttgtatctaaatatgaagtt

SEQ ID NO: 34672 - DNA, 1146 bp, Staphylococcus epidermidis
atgtcagagaagttttatagagcaacatatttaaatgtgaatttagatgcaattttagcaaattatcaaaatttcaatcaattacacgctaataagactgtcatttcagttattaaagcaaatggatatggattaggaagtgtgaaaatagcacaacatttaatgcgtcatggtgcaacattttttgcggtggctacacttgatgaagcaatagagttaagaatgcatggagttgatgctaaattattagttttaggcgttgttccaacagaagacattgagaaggctatacagcatcgtgttgcattaacagtaccttctaaagcatggttgaaggaaactatcaagcaaattcctgatgataaccaaaaaaatttatggctacatgtaaaattagatactggtatgggccgaattggaatgaaagatatagatgaatataaagaagtggttgatttaattaataaaagagatcatttagtttttgaaggggttttcacacattttgcgagtgctgatgaacctggaagttctatgaatgaacaatatactttgttcaaagagatggttaatcaagttgagaaaccaatttatattcattgtcaaaattctgctggatcactactcatggatggtcaattttgtaatgcaataagattaggaatctctctttatggatactatccttcagaatatgttaaagataatgtgaaagttcatttaagaccgagtgcgcagttagtatcagaaaccgttcaagtcaaaacgcttaaagttggggaaactgttagttatggacgtacatttattgctgatgaagaaatgacaattgcaattttacctattgggtatgccgacggatatttaagatcgatgcaaggtgcattcgtcaatgttaacgggagtcaatgtgaagtcattggacgcatttgtatggaccaaatgatagttaaggttccttctcatgtaaaaacgggtgaaaaagtaatacttatggataatcacgttgattcaccacaatcagctgaagccgtagcaaataaacaaggtacaattaactacgaagtattatgtaatttatcaagacgtcttccaagaatatattattatgataataatgaagaggttactaacgaattgttaaaa

SEQ ID NO: 34673 - DNA, 351 bp, Staphylococcus epidermidis
gtgatttatggaataggtatagatttaatagaaattgaacgaattaaaaatcttcagaatcaaacaaaatttattgaaagaatacttactatagaggaaagggacaaattaaatcaatatacacacgagcaacgtagattagaatttttagctggacgctttacagtgaaagaagcatttagtaaggccttaggtacagggttagggaaatcagtatcgtttcaggacattaactgttacaacgacgctctaggtaaaccatgtattgactatcctggtttttatacacatgtgagtattacacatacggagaattatgctatgagtcaagttattcttgaaaaaaacgaa

SEQ ID NO: 34674 - DNA, 1836 bp, Staphylococcus epidermidis
atgagtcatttactgaaccaattaaagagcaacgttttagtagctgatggcgctattggaacaatattctactcggaaggtcttgatacttgtccggaatcctacaatcttactcatccagataaggtcgagcggattcatcgttcttatatcgaagctggtgcagacgtcattcaaacgaatacgtatggtgctaactttgaaaaattaaagtcctttggtcttgaacataaagttaaagaaattcaccaagctgcagttcaaattgctaaacatgcagcaaatgaggacacaattatacttggaacggtaggtggattcagaggcgtccggcaagaggatatcagtctttcaacaattcaatatcatacagaacttcaaatcgatacattaattgatgaaggtgtagatgcccttctatttgaaacttattacgatttagatgaattaactcgcatcgtcactgctacacgacaaaaatacgatattccaatcatcgctcaactcaccgcttcaaatacgaattacttagttgatggcactgaaattaatgcggcattgaaatacgtagttgaatgtggcgccaatgtagttggattaaattgtcaccatggcccacaccatatgcaacgatcattttcacatatagaacttcctaaacatgcgtatttatcgtgttatccaaacgctagtttattagatatcgagaatagtgaattcaaatatagtgataatgctcaatatttcggagatatagctcaagaattaattaatgagggagtcagattgataggtggttgttgtggtacaacacctgaacatattcgctatattaaatcagcagttaaacatttaaaacccgttaaagataaaaaggtaatccctattaataaagcttcatctcaaaagcaaacgcgagttcttaaacaaaaccttacttctaaagttaaaaatggcccaacagtcatcgtagaacttgatacacctaaacatttggatactgatacatttttcgataatgtaggaaaattagatgaagctggcatagatgctgttacattggcggataattcattagctaccgtaagagtgagtaacatcgcagcggcaagtttaattaaacaacgctacgatattgagcctcttgtacatgtaacatgtcgtgaccgtaatttaataggattacagtctcatctcctaggtttatcactcattggtgtcaatgaaatactagctattaccggagatccttctaaagtaggccatttgcctggagctacaaatgtctatgacgtgaactcaaaaggccttacagaacttgcactaagatttaacaaaggtattaacactgacggcgatgcgctgaaaaaacatactaactttaacatcgctggtgcgtttgatcctaacgtacgaaaattagatggagccattaaacgacttgaaaagaaagtagcaagtggcatgagttatttcataactcaacccgtttatagtaaagaaaaaattattcaagtatatgaagaaacaaaacatttaaatacacctttcttcataggtatcatgccaatcgcaagttataacaacgcacttttcttacataatgaagtgcctggcatcaaaatgtcagacgatgtacttaaccaattcaaagctgttaaagatgataaagaaaagactaaagaattaagtttaagactttccaaagaactcattgatacagtacatgaatacttcaacggtctgtacattattacacctttccaaaaggtagattattcattggaactcgcagcatactctaaatcaatcactgccaacaaggaggcaatatta

SEQ ID NO: 34675 - DNA, 1101 bp, Staphylococcus epidermidis
atgaaggatacagatttagctcaaattgctttaacacaagatcacactggcgcaattgccaatccaatatatttatctactgcatatcagcatcctcacctaggtgaatcaacaggctatgattatacacgaactaaaaatccaacaagaacagcctttgaagaagcttttgcacaacttgaaaaaggcattgcttcatttgctacttccagtggtatggcggcgattcagttaatatgtaatatattcaaaccaggtgatgaaattctcgttgcatttgacctatatggtggaacatttcggttattcgatttttacgaaaaacaatatggtttgaagtttaaatatgtagactttttaaattatgaagaagtggaaaaaaacatcactccacaaactagagcattatttattgaaccaatctcaaatccacaaatgattgaaattgatgtagaaacatattatatccttagcaaaaaacatcaactattaacaattatcgacaacacttttttaacaccttatctttcgacaccactcgaagaaggtgcagatatcgttctgcattcagcaacaaaatatattggcggacataacgatgtgttagctggagttgtaactgttaaggatgctcaattagctgaacaattgaatcaattccataatatgattggagcaactctatcacctcttgatagttatcttttacaaagaggtctaaagacattacatcttcgcatagagcgttcccaagaaaatgctcaaaaacttgcacaacgatgtcgccagtcagattcaattgatgaagttttatatagtggacgaacaggcatgcttagtttaagactgaaccaagcatatagcgtcgctaaatttttagaaaatttagaaatttgtatatttgcagaaagcttaggtggtacagaaacatttatcaccttcccttatacacaaacacacgttgatatgccagatgaggaaaaagacaaacgtggaattgatgaatatctcatcagattgtccgtaggtatagaagactataacgatatagaagctgacataattcaagcattagagaattctaaagtaggagtgatttca

SEQ ID NO: 34676 - DNA, 873 bp, Staphylococcus epidermidis
atgaatcaacttaaacatattttatcttcattgttcgaacctttaacaaaggttgaaacatatgaaaatttaattactaaagtaataatgattttaatttatatccttgtagcgattgttgttatagcaattttgaataagattattgagcaagcatttaaaattcaaaataaaagcaaaaaaggaaataaaaaacgttcaaaaacactgatttctcttgtacaaaacatagtaaaatatatcgtatggtttgttgttatcacaacaattttaagtaagtttggtattagcgtcgaaggtatcatcgctagtgctggagttgtaggtattgcagttggtttcggtgcgcaaacgatagtaaaagatattattacaggtttctttattatctttgaaaatcaatttgatgtgggtgactatgttaaaatcaatagttcaggaactacggtagcagaaggtactgtgaaatctattggtttaagatcaacgcgaattaatacaatttcgggagaactgactattttacctaatggtagcatgggggaaattacgaacttttcaattacaaatgggactgctattgtagaactaccagtatcagttgatgaaaatatagatcaagttgaaaagaaactcaatcgtttatttgtttctttacgtagtaaatattacttatttgtcagcgatccagttgttgatggtattgatgcgatagaatctaataaggttactatacgaatttcagcagaaacaattcctggtgaaggattttcaggcgctcgtattattcgtaaggaagctcaaaaaatgtttagacaagaaggtattcgcatgccacaaccagtcatttcaaattataatgaaggaaaaagc

SEQ ID NO: 34677 - DNA, 201 bp, Staphylococcus epidermidis
atgacgtcaaagtatggaataaatgatatagtagaaatgaaaaaaccacatgcatgtggaacgaatcgttttaagatcattagaatgggcgctgatattcgtattaaatgtgaacattgtcagcgcagtgtcatgattccacggcaagtgtttaataagaaaatgaaaaaagttcttgaatctcatcaagacaaagaaagt

SEQ ID NO: 34678 - DNA, 1095 bp, Staphylococcus epidermidis
atggctttaacagcaggtatcgtaggtttgcctaacgtaggtaagtctaccctatttaatgcaattactaaagctggcgcattagcagcaaactatcccttcgcaacgattgatcccaatgttggtatcgttgaagtgccagattcacgtttaataaaattagaagaaatggttcaacctaaaaaaacaattcctacaacttttgagtttactgatattgcaggtattgttaaaggtgcatctaagggcgaaggtttaggaaataaattcctttcacatattcgtgaagtagatgctatatgtcaggtggttcgtgcgtttgacgatgagaatgtaacacatgtatcagggcgtgttaatccgcttgatgacatagaagtcattaatatggaacttgttttagcagatttagaatctgttgaaaaacgtttaccgaaaatagagaagatggctcgtcaaaaagataaaacagctgagatggaattacgtatattaacacaaattaaagaagcgttagaagacggtaaaccagtacgcagtattgatttcaatgaggatgatcaaaagtgggttaatcaagctcagttattaacatctaagaaaatgttatacattgctaatgttggtgaagatgaaattggagataaagataatgataaagtgaaagcaattcgtgaatatgcagcaaacgaagattcagaagttatcgttattagtgcaaaaatcgaggaagaaatcgctacattagatgatgaagataaagaaatgttcttagaagatttaggcatcgaagaaccaggtttagacagactcattagaacaacatatgatttgttaggtttatctacttactttactgccggtgtgcaagaagtgcgcgcttggacatttaaacaaggaatgaccgcaccacaatgtgctggaattattcacactgattttgaacgtggttttattcgtgcagaggtaacaagctatgaagattatgtacaacatggtggcgaaaatggtgctaaagaagcgggaagacaacgtttagaaggtaaagattacatcatgcaagatggggatattgttcatttccgttttaatgtt

SEQ ID NO: 34679 - DNA, 1527 bp, Staphylococcus epidermidis
ttgcaaaattttaaagaactagggatttcggataaaacggttcaaacactagaagcaatgggatttaaagaaccgacacctatccaaaaagatagcatcccttatgcgttagaaggagatgacatccttggacaagcccaaactggtactgggaaaacaggggcgtttggtatacctttaattgagaaagttgtaggccaacagggtgttcaatcattaattcttgcgccaacgagagagcttgctatgcaagtagctgagcaattaagagagttcagtaaaggtcaaaaagtacaagttgttacagtctttggtggtatgcctattgaaagacagattaaagcattaaaaagaggccctcaaattgtagtaggtacgccgggaagagttattgatcatcttaatcgtcgtacacttaaaactcaaggaattcacacgcttattttagatgaagcagacgaaatgatgaatatgggattcatcgatgatatgagatttattatggataaaattccagctgaacaacgtcaaactatgctattttcagctacgatgccaaaagcaatccaagaattggtacagcagtttatgaaagctcctaaaataattaagacaatgaataatgaaatgtcagatcctcaaattgatgaatattatacaatagttaaagaattagagaaatttgatacatttacaaactttttagatgttcatcagcctgaattggcgattgtctttggtcgtactaagcgtcgcgtagatgaattaacaagcgcgctattatctaaaggatacaaagcagaaggtttacatggtgatattacccaagcaaaacgtttagaagtattgaagaaatttaagaacgatcaaatagatattttagttgctacagatgtggctgcacgtggtcttgatatttctggtgtgagtcatgtttataattttgatatccctcaagatacagaaagttatactcaccgtattggacgtactggtcgagcaggaaaagaaggtattgcagttacttttgtaaatccaattgagatggattatattcgacaaattgaagatgtcaataatcgtcgaatgaaagcattaagacctccacatcgtaaagaggtgcttaaagcgcgtgaagatgatattaaagatagagttcaaaactggatgtcaagagaaaatgagccgcgtttacaaagaatatcaagtgaattacttaaagaatatgatagtacagaattagtagcctctttacttcaagaacttgtagaagctaatgatgaagtggaagtacaattaacttttgaaaaaccattagcacgtaaaaatcgcagtagtaaaggcggttctagaagaagtaatcataaacgtggtaatggtaagtttgataataaaaatagacgatcaaaagggtctaaaggtcaatcaagcaaaaagaaaaaccaaaagaaatttgaccgtagagataagcaacaaaaaagtggtaatcaatcactaaaaggtcgcacatttgcagatcatcaaaaa

SEQ ID NO: 34680 - DNA, 1353 bp, Staphylococcus epidermidis
atgataaacgtaacattagagcaaattaaaaactggatagattgtgaaattgatgaaaaacatttaaaaaaaacaataaatggcgtttcaattgattcacgaaaaatcaatgaaggggcgttatttataccttttaaaggtgagaatgttgatggccatcgttttatcacacaagctttgaacgatggtgctggagctgtttttagtgaaaaagagaataaacattctgaagggaaccaaggtcctattatttgggtagaagatactttaatagccttacagcaattggcaaaagcatatctaaatcatgtaaatcctaaggtgatagcggttactggttctaatggaaaaacaacaacaaaagacatgattgaaagtgtattatcaactgaatttaaagttaagaaaacacaaggaaattataataatgaaattggaatgccgttgactttactagaacttgatgaagacacagaaatttctattctagaaatggggatgtcaggttttcatcaaatagagttgttatctcatatcgcacaacctgatatagcggtcatcacaaacattggcgaatcacatatgcaagatttaggatcgcgagaaggcattgcaaaagctaaatttgaaataacaactggtctcaaaacaaatggtatatttatttatgacggagatgaacctttattaaaacctcatgttaatcaagttaaaaatgcgaaattaataagcattgggttaaattcagacagtacatatacttgtcatatgaacgatgtaaaaaacgaaggtattcattttactatcaatcaaaaagaacattatcatttaccaattttgggcacgcataatatgaaaaatgctgctattgcaattgctattggacatgaattaggcctaaatgaaacaataattcaaaataatattcacaacgtgcaattaaccgctatgagaatggaaagacatgaatcatcaaacaatgtaacagtaattaatgacgcatataatgcaagtccaacgagtatgaaagctgccattgatacattaagtgttatgaaaggtcgaaaaattttaatattagcagatgtacttgaattaggacctaatagtcaattgatgcacaaacaagttggtgaatatttgaaagataaaaatattgatgttttatatacatttggtaaagaagctagttatatctatgatagtggtaaagtttttgttaaagaagcaaaatactttgataataaagaccagttaattcagacgttaatatctcaagttaaacctgaggacaaagtcttagttaaaggttcacgaggtatgaagcttgaggaagttgttgacgcattgttg

SEQ ID NO: 34681 - DNA, 1071 bp, Staphylococcus epidermidis
atgacaaaagaaaatatttgtatcgtttttggaggtaaaagtgcagaacacgatgtttcaattttaactgcacaaaatgttttaaacgcaattgataaagaacgatatcaagttgatatcatttatataacaaacgatggtgaatggaagaaaaaagataatattacacaagaaataaaaaatactgatgaactcgtcattaacgatgtagagactggagaaatctcacagttactcagtaaaggtagtttaggaaaatcatatgatgcagtattcccattattgcatggtccaaatggagaagatggaactatccaaggtctttttgaagtacttgatataccatatgtaggtaatggtgtgttagctgcttcaagctcaatggataaactcgtgatgaaacaattatttgagcatagaggtttacctcaattaccttatattagctttttaagaagtgagtatgaaaaatatgaaaataatatcattaaattagttaatgataagttaacatatccggtatttgtaaaacctgctaatctcggttcaagtgttggtataagtaaatgtaacaatgaagaagaattaaaatctgggatagctgaagcattccaatttgatcgtaaacttgtcattgaacaagggattaatgctagagagatcgaagtagctgtcttaggtaacgattatcctgaaacgacatggcctggtgaggttgttaaggatgtagcgttttatgattataaatcaaagtataaagacggtaagattagattagatattccagcagatttagatcaagatgttcaaatgacattaagaaacatggcattagaggcctttaaagctactgattgttcgggattagttcgtgcagatttctttgttactgatgataatcaaatttatattaatgaaacaaatgccatgccaggatttactgcatatagtatgtatccaaacttatggaaaaatatgggcttatcttaccctgatttaattgctaaattgattgatttagctaaagaacgttatgaagataaaaagaaaaataaatataaaattgattat

SEQ ID NO: 34682 - DNA, 291 bp, Staphylococcus epidermidis
atggcagacatggagagtgcacatcactcagagcaaataaaaacaaatttaaaatcaagattaaatagaatagaaggtcaagtaagagcaataaatcgtatgattgatgatgacgtttactgtgatgatgtactaactcaaattagagcaacacgttcagcattgaatagtgtagctactaaattactagaccatcacatgaaaggttgtattatggaaaaaataaacgacggtgcgcaagaagaagcaatggatgaattgctcgtgacattccaaaaattaataaaagat

SEQ ID NO: 34683 - DNA, 807 bp, Staphylococcus epidermidis
atgttaaagaaattttcttactcaatcatttcactttcaattttcgctactagccttaattttatagatactcaagcacaagcgtcttcatcttctgtaagcgaaaaaggtacaatggggtatggctatcaacaatacttaaaagaccatcctaaaaagcaaactcataaaacacaaaatcgttctactttctctgctgaatctaatattactgaaacaaataatggtgaaagagtcttagatatttctgaatggcaaggacttttaactaatgaacaaataaaacaactaaagaaaaattatgattttattattttaagagcacagtacggttcagaatacgttgataagacttttgaaaaaaatgcagaattattagaacaaaataaaatgaaatacggcgtgtactcttatagcatgtacgaaagtccaaaagatgcacgttatgaagctaaaactttatctcaacgtgctcccaaagccgccttttacattaatgattatgaagaacaaaccgttaaatccggagatgatgaaacagcgacacaagcatgggcaaacgaaatgagaaagcttgctggaaacaagaagatccttttttattcatatgaaaatttcatgttaaatcatgcatcaaatgctgtcagttcatatgatggctactggttagcagcatatcaagctgaggaaccaaaacgagagaaagtgctatggcaatatacagatagttactactctcctgaattaaatcaaaatgtcgatgcaaattatattgacgaaaatgtgaattcgtcttggttcacttca

SEQ ID NO: 34684 - DNA, 294 bp, Staphylococcus epidermidis
atgagaacatatgaaattatgtatatcgtacgtcctaacattgaagaggatgctaaaaaagcgttagttgaacgtttcaatggtatcttagcttcagaaggatcagaagttttagaagaaaaagactggggtaaacgtcgcctagcttatgaaatcaatgatttcaaagaaggtttctataacatcgtacgtattaaaactgataacaataaatcaactgacgaattccaacgtttagctaagattaatgatgatatcattcgttacatcgttattcgtgaagaccaagataag

SEQ ID NO: 34685 - DNA, 507 bp, Staphylococcus epidermidis
atgttaaatcgagttgtattagtaggtcgtctaacgaaagatccagaatacagaaccacaccctcaggcgtaagtgtagcgacatttactctagcagttaatcgtactttcacgaatgctcaaggggaacgagaagctgactttattaactgtgtagtcttccgtagacaagcagaaaatgtaaataactacttgtctaaaggtagtttagctggcgttgatggtcgcatacaatcacgtagttatgaaaatcaagaaggtcgtcgtatttttgttactgaagtcgtatgtgatagtgttcagttccttgaacctaaaaatgcacaacatggtggccaacgttcacagaacaataatttccaagactacggtcaaggatttggtggtcagcaatcaggacaaaatacatcttacaacaacaataattcatcaaactcaaatcagtcggataatccgtttgcaaatgctaatggaccgattgatatcagtgatgatgatttaccattc

SEQ ID NO: 34686 - DNA, 240 bp, Staphylococcus epidermidis
atggcaggtggaccaagaagaggcggacgtcgtcgtaaaaaagtatgctatttcacagcaaatggtattacacacatcgactataaagacactgaattattaaaacgttttatctcagaacgtggtaaaattttaccacgtcgtgtaacaggcacttcagcgaaatatcaacgtatgttgactacagctatcaaacgtgctcgtcatatggctttattaccatatgttaaagaagaacaa

SEQ ID NO: 34687 - DNA, 252 bp, Staphylococcus epidermidis
atgtttggattaataggtatgattattgtcggcggtatcattggatggatcgcaggtttaattttaggtaaagacgtaccaggaggtattctaggaaatattattgctggtattgtaggatcatgggttggtactatgattttaggtgaatggggaccacaattaggtaaaattcacatctttccagcattattaggttcaattattttaatctttattatttcattaattttaaaagcactaagaaaaaaa

SEQ ID NO: 34688 - DNA, 567 bp, Staphylococcus epidermidis
atgtctttaattaacaaagaaattttacctttcacagcacaagcttatgatccaaaaaaagatgagtttaaagaagttactcaagaagattttaaaggttcttggaacgttgtatgtttctatcctgctgacttctcattcgtatgccctactgaattagaagatttacaaaatcaatacgctaaattacaagaattaggtgttaacgtgtactcagtatcaacagatacacacttcgtacacaaagcttggcatgaccattctgatgcaatcagcaaactagaatacagcatgattggtgatccttctcaaacaatcactcgcaatttcgatgtgttggatgaagaaactggtctagcacaacgtggtactttcattatcgaccctgatggtgtggtacaagcagcagaaatcaatgctgacggaatcggacgtgacgcaagtacattagttaacaaaattaaagccgctcaatatgtacgtcaacatccaggtgaagtttgcccagctaaatgggaagaaggttcagaatcattacaacctggtttagacttagtaggtaaaatc

SEQ ID NO: 34689 - DNA, 900 bp, Staphylococcus epidermidis
atgttaactaaagaatttgctcaacgtgtagaactaagtgaaaagcaggtccgaaaaattgtacaacatttagaggaacgaggctatcaccttagtaaaacagaatatcgtggtcgtgaagccacagactttaaagaagatgacatcgaattatttacagatatcgctaacaaagttaaacaaacaaatagttatgatttagcatttgaagagcttgaaaaggaaaaagactttttacaagtcattgttaaagacgaggatagccaattaccaactgatcaaaatgtagcacaactcgttgaagatttacgttctgaaattcaaaaaatgcgagaagaacgtcaaatgttagggcaaatgattaaccaagttcatcagcaacaacaggaactcaaagaattacaaactgatatcacaacaaaattagattcgaatgctcaatctttaaaatcaatccaaaattctcaagaggctattcagtcagcacaagaacaacaatctaaagacatcgctaaagctaacgaattaaaagatagtgaattacgtagtcattttgattcaatgtcaaatagcgcttcaatatctcagagcaacgtcgcaagtcaaagtactacagcaagtttgagccaatctgaatcagcaaatgattcaatgagttcatctctgtccgagtctaactcaataacatccgaaagtaatacaaatagcaaatcggaaattgaatcaaaaagtacgtctacaagcgagttcttgtcagaatcaggaagtgtatctaactcagaaaaatctgagtcaatttctcattctcaatcaacatcagctacaccttcttctcaatcgacttaccaacaacaacctaaagaagagaagaaaggtttctttgcacgtctatttaactta

SEQ ID NO: 34690 - DNA, 1077 bp, Staphylococcus epidermidis
atgtatacactattacttatagcttttactatgatagtcagtttaataattacacccattattattgtaatatcaaaaaaattagatttagtagatcgtcctaatttcagaaaagtacatacgaaacctatctcagtgatgggaggaacggtcattttattttctttcttaatagggatttggctcggacaccctattgaacgtgaggttaaaccgcttatattaggtgcaattacaatgtatatggttggattgattgatgatatttacgatctaagaccttatttaaagttagcaggtcaaattgttgcagctttaattgttacgttttatggaattacaatagactttatttcattgccaattggtccaacgattcattttggcatattcagcattcctattacagtaatatggattgtagcaattaccaatgctattaatcttatcgacggacttgatggacttgcctcaggcgtctcagcattggcattaatgactattggattcatcgctattttacaagcgaacatatttattatcatgatttgctgtgtacttttagggtctttacttggtttcttattctataactttcacccagcgaaaattttcctaggtgatagtggtgcattaatgataggatttattatcggtttcttatccttactcggctttaagaatatcacatttattgcattattctttcctatagttatattagcggtgccatttattgatacattatttgcaatgattcgtcgaatgaaaaaagggcaacatataatgcaagcggacaagtcacatttacatcataaattacttgctttaggatatacgcatagacaaaccgttttacttatttattcaatagcgattatgtttagtttatctagtgttatcctctatttatcccaaccgttgggtgcacttatgatgttcattctcattgtctttacgattgagttgatcgttgaatttactggattaatagatgataattatcgaccaatattaaatttaattacaaaaaaaggaaatggtaagcaacatcattatgatgagcatcaccgttca

SEQ ID NO: 34691 - DNA, 1545 bp, Staphylococcus epidermidis
atgactatggaaatggcgaaagagcaagagctgattcttgttttagactttggtagccaatataaccagttaattacgcgtcgtatccgtgagatgggcgtttatagtgaattacatgatcacgaaatttctattgaagaaattaaacgaatgaatcctaaaggtatcattctttcaggtggtccaaattcagtgtatgaagaggggtcatttaccatcgaccctgaaatttacaatttaggtattccagttttaggtatatgttatggtatgcaattaacgactaagcttttaggtggtaaagttgagcgtgccaatgagcgtgaatatggcaaagctacaattaacgctaaatcagatgaacttttctttggcttaccttctgaacaaacagtatggatgagtcattctgataaagtaattgaaattcctgaaggatttgaagtgattgcagatagtccaagtactaattatgcagctattgaagataaaaaacgtcgcatttacggtgtacaattccatccagaagtacgtcacactgaatatgggaacgacttactaagaaacttcgtccgccgtgtttgtaattgtacaggtgaatggacgatggagaatttcattgaaattgaaattgagaaaatccgtcaacaagtaggtaatcgtaaagtattatgtgcaatgagtggtggagtagattcatccgtagttgctgtacttttacataaggcaatcggcgaccaattaacatgtatttttgtggaccatggtctattacgtaaaggtgaaggtgacatggtcatggagcaattcggtgaaggttttgatatgaatattattcgtgttaatgctcaagaacgcttcatgagtaaactaaaaggtgtgtctgatccagaacgtaaacgtaaaatcattggtaatgagtttgtatatgtctttgatgacgaagctgcgaaattaacagatgtagatttcttagctcaaggtacgttatatacggatgtgattgaatcaggtactaagacagctcaaacaattaaatctcaccataatgtaggtggattacctgaagacatggaatttgaacttattgaaccaatcaatacattattcaaagatgaagtgcgcgcattaggaatagaattaggtatacctgaacacttagtttggagacagccgttcccaggacctggattaggtatccgtgtacttggagaaattactgaagataagcttgaaattgttcgtgaatcagatgcgattttacgtgaagtgattcgtgaggaaggtcttgaaagagatatctggcaatactttacagtacttccaggtattcaatcggtcggtgtcatgggagactaccgtacgtatgatcatactgtaggtattcgtgcggtaacatccatcgatggcatgactagtgactttgctagaattgattgggaagtcttacaaaagatttcaagtcgaattgtcaatgaggtggaccacgttaatcgcgttgtctatgacattacctctaagccaccaagtacaattgagtgggaa

SEQ ID NO: 34692 - DNA, 2532 bp, Staphylococcus epidermidis
atgggatttttatcgaaaattgttgacggcaataaaaaagaaattaaaagattaggtaagttagcagataaagtacttgctttagaggaagatactgcgatattaaccgatgaagaaatacgtgaaaaaacaaaatcttttcaaaaagagttagcagaaattgaagatgtaaaaaaacaaaatgattatttagataaaattttacctgaagcttatgcacttgtacgtgaggggtcaaagagagtatttaatatgattccttataaagtacaagtaatgggtggtattgctatacataaaggtgatattgcagaaatgagaacaggtgaagggaaaacattgactgcaaccatgccgacgtatttgaatgctttagctggtagaggtgtacatgttattacagtcaatgaatatctatcaagttcacaaagtgaagaaatggctgaactatataactatcttggcttaactgtaggtttgaacttaaatagtaagtcaactgaagaaaaacgtgaggcttacgcacaagatatcacttatagtacgaataatgaacttgggtttgattatcttagagataatatggtgaactatgctgaagagagagtaatgcgtcctctacattttgcaattattgatgaggtcgattccatattgatcgacgaagcaagaacacctttaattatttctggtgaagcggaaaaatctacttctttatatactcaagcaaatgtttttgcaaaaatgcttaaagcggaagatgattataattatgatgaaaaaaccaaagctgtacatcttacagaacaaggtgcagataaagctgaacgtatgttcaaagtagataatctttatgatgttcaaaatgtggaagtgattagtcatattaatacagctttaagagctcatgttactttgcaacgcgatgttgattacatggtcgttgacggtgaagtattaattgttgaccaatttactggacgtacaatgcctggacgtcgtttttctgaaggtttacaccaagcaattgaggctaaagaaggtgtagcaattcaaaatgagtctaaaacgatggcatccattactttccaaaactatttcagaatgtataataagttagcggggatgactggtacagcgaaaaccgaagaggaagaatttcgtaatatctataatatgacagttacccaaattccaacaaacaaacctgttcaacgtaaagataattcagacttaatttatattagtcaaaaaggaaagtttgatgcggtagttgaagatgttgtagaaaaacataaaaaaggacaacccgtcttactaggtactgttgctgttgagacttctgaatatatttcaaatttactaaaaaaacgtggtgtcagacatgacgtattaaacgctaaaaatcatgaacgcgaagctgaaatcgtttcaaacgcggggcaaaaaggtgcagttacaattgccacaaatatggctggacgtggaacagatattaaacttggtgatggtgttgaagagttaggtggacttgctgttattggtactgagcgtcatgaatcaagacgtattgatgatcaattacgtggacgttcaggacgccaaggtgatagaggagatagtcgtttttacctatctttacaagatgaattaatggtacgttttggttcagaacgcttacagaaaatgatgaaccgtttaggaatggatgattcaacgccaatcgagtcgaaaatggtatctcgagctgtagaatcagctcaaaaacgagtagaaggtaataactttgacgcgcgtaaacgtattctagaatacgatgaagttttacgtaagcaacgtgaaattatttataatgagcgtaatgaaatcattgatagtgaagaaagttctcaagtcgttaacgcgatgttacgttctacattgcaacgtgcgattaatcattttattaatgaagaagacgataatcctgactacacgccatttatcaattacgttaatgatgtgttcttgcaagaaggagatcttcaagatacagaaattaaaggtaaagattcagaagatatttttgaaattgtatggtctaaaattgaaaaagcatatgcacagcaacaagaaacattaggagaccaaatgagtgaatttgagcggatgattttattacgttcaattgatacacattggactgatcatattgatacgatggatcaattgcgtcaaggtattcatttacgttcatatgcacaacaaaatccacttcgtgattatcaaaatgaaggtcatgaattatttgatatcatgatgcaaaatatcgaggaagatacatgtaagtatatcttgaaatcagtggttcagtttgaagatgatgtagaacgtgaaaaatctaaaagctttggtgaagcaaaacatgtaactgctgaagatggcaaagaaaaagcaaagccccaaccgattgtaaaaggtgatcaggtaggtagaaatgatccatgcccatgtggtagtggtaaaaaatataaaaattgtcatgggaaagcg

SEQ ID NO: 34693 - DNA, 999 bp, Staphylococcus epidermidis
atgatgactgatcctgatttttggaatgatcaaactaaagcacaagatatcattgataagaacaatgcactaaaatctatagtaaatgggtattatcaactgacaaatgctgtcgatgatatgagtgcgacgagagagttattacaagaagaatatgatgaggatatgaagatagaattagaagaggaagttcagcaatttgaagaacaaattgatcaatatgagttacaattactcctcgacggaccacatgatgcaaataatgctatattagagcttcatcccggtgctggcggtacagaatcacaagattgggtaagtatgcttcttaggatgtatcaacgttactgtgaacaaaatggctttaaagttgaaacggttgattatcttccaggagatgaagcaggcgttaaaagtgtcacattacttattaaaggacataatgcttatggttatttaaaggcagaaaaaggtgttcatcgtttagttagaatttcacctttcgattcatctggtagacgccatacttcttttgcatcatgtgatgttattcctgattttaataatgatgaaattgaaatcgagattaacccagatgatatcacagtggatacttttagagcttcaggcgctggtggacaacatattaacaaaactgagtctgcaattagaattacacatcaccctacaggtattgtagtcaacaaccaaaatgaacgatctcaaataaaaaatagagaagctgcaatgaaaatgttgaagtccaaactttatcaattaaagttagaagagcaagagcaagaaatggctgaaattcgaggcgaacaaaaagacattggatggggaagtcagattcgttcttacgtctttcatccatattcaatgattaaagatcatcgtacgaatgaagaaactggtaaagtagacgctgttatggatggagaaataggcccattcatagaagcttatttaagaaaagaaatggatagtcgagacgta

SEQ ID NO: 34694 - DNA, 463 bp, Staphylococcus epidermidis
gatggaaagtttataaatttataccaaagtaacattgaaaaggttaatgataatcgtcatagcaatgaaactagcattcataatgatgattataaaaaaattttaaataaagttttaaaatcagatattataattttctcaacgcctctctattggtattccatgagtgcgtctttaaaactctttattgatagatggactgaatcattgcgagatacgcaaatagataacttcaaagaaattatgtcacaaaaaaaacttaattttaatcataggcggtgacagtccacgtatcaaagcacaacctttagtccaccaatttaaattaatatttgaatttatgaatattactcattttagatttttaataggcgaaggtaataaaccattcgatgttttaaatgactcacaatttatggaagaactcgcaaatacaaatcttgctttgaaaaaaggtgatatt

SEQ ID NO: 34695 - DNA, 1494 bp, Staphylococcus epidermidis
atgttaagttcagagttaattttgtttatgttttttattacacttgtcattgctatactgagtggattaatatttttgaatcatcgagttcccattcaatatattaaatttcatatatatttacttgttttacctatcattacgggattaagtggattaatatttttcggtgaaagggcgaatgttggaccttttgtagttgatcatcttacttggttaatgatgacatttattttgactttaggctttatcattcaaaagttttctatgcgttatttaattggcgacatgcattaccgtaaatattttccgttttttacattaattactgcatttgcttcattggcatggttaagtggagacttaaggttaatgaccatgttttggggtgcaacattatttgtgttaacacggctcattaaagttaacaaattatggaaggtgcctagggaagcagcaagaatttcagcttggtcatttatattggcatggttgtcgttattgattgctgtcattttattgtatatcgctacaggagattggtatatttattcgaatatgtcagatgataatgcaatcaattatggaatgcgtctctgtatcaatttacttattgttttagctgtgattattccggcggcacaatttccatttcaaggctggcttattgaatctgtagctgcgcctacgccagtttcagctattatgcacgctggtattgttaatgctggtggcgttattcttacacgcttttctccggtatttaatgacgaaatagccatttcactgttattaattattgcaagtatttcagtattgttgggttctggaatcagtcttgtgcatgttgattacaagagacaacttgtaggttctacgataagtcaaatgggttttatgttagtacaatgtgcgcttggggcatattctgcggcgatagtacatttaatattgcatggtgtgtttaaagcgacattatttctacaatcgggttctgttgttaaaagatttaacattcctacgcctccatctgttaaaaaatcatatggctggcttgtatttggtcgtctactagctattcttatagcgataatattttggttgaatagtgatagacatgcatatgatgtattaagcgctcttatattagcttggtcgttaatggtgtcatggaatcaattagttgcttttagtcatggactcatcggaagagtcatcggagtatgtatgattattgttgtagtaattgtttatattattacgcatcattatttcttcacgacattaagtaacgttgatattcatattgtttcaccaccactcataagtattattctatcgattgctattatagttttcggcagtatgttaagcatatgggtatcacggcgaagagaatcaaaggcatttgcgaagttatacttgtggcttattaaagtaggagaggctaaaacccaatctatagaaagtcatccatcatatttaaaacgattt

SEQ ID NO: 34696 - DNA, 2832 bp, Staphylococcus epidermidis
atgaaaggaccgtcaattgtagtaaaaggtgcacgagcacataatttaaaaggagtagatattgaattacctaaaaacaagttgattgtcatgactggactttcaggctcaggtaaatcttcgttagcgttcgatactatttatgctgaaggtcaacgacgttatgtggaatcgttaagtgcatatgcgcgacaatttttaggacaaatggacaaacctgatgtagataccattgaaggtttgtcaccagcaatatctattgatcagaagacgacaagtaaaaacccacgttctaccgttgccactgtgactgaaatctatgattatattcgattattatatgcgcgtgtcggtaaaccgtactgtccttatcacggtatagaaattgaatcacaaactgttcaacaaatggttgatcgtattttagaattggaagaacgtacaaaaattcaattacttgctccagttatatcacatagaaaaggaagtcatgaaaaattaattgaagatataggtaagaaaggatatgtgcgtttacgtgttgatgatgaaatcgtcgatgtaaatgaagtgcctcaattggataaaaataaaaatcacacaattgaagttgttgttgatagacttgtagttaaagatggcattgagacgcgtttagcggactctattgagacagcacttgaacttgctgaaggtaatttaacagttgacgttattaatggagaagaacttaaattctctgagaaccacgcatgtcctatatgtggtttctctattggtgaattagaacctagaatgtttagtttcaacagtccgtttggtgcgtgtccaacttgtgatggtttaggtcaaaaactaaaagtagacctagatttagtcattcctgataaaaataaaactttaaatgaaggtgcaattgaaccatgggaaccaacaagttcggatttttatccaactttattaaaacgtgtatgtgaagtctacaaaattaatatggataagccatataaaaaattgactgatagacaaaaaaatatacttatgaatggttctggagaaaaagaaattgaatttactttcacgcaacgaaatggtggtactcgtaaacgtaaaatggtttttgaaggtgtggtacctaacattgaccgtcgttaccatgaatctccctctgaatatacacgcgaaatgatgagtaaatatatgacagagttaccgtgtgaaacttgtcatggcaaacgcttaagcaaagaagcgttatctgtatacgtaggcgactataatataggtgaagtcgttgaatattcaattaaaaacgcgctttattatttcgaaaatttaaaattaagcgaccaagataaatcgattgcagatcaaattttaaaagagattatttcaagattatcatttttaaataatgttggtttggaatatttgactttagatcgctcatcagggactttatctggaggggaagcacaacgtattcgtttagcaacacaaattggttcacgattaaccggagtactatatgttttagatgaaccttctattggattacatcaaagagataatgatagattaattaatactttaaaagaaatgcgtgatttaggtaatacacttattgtcgttgaacatgacgatgatactatgagagcagctgattatttagttgatgtgggtccgggagctggtaaccacggtggagaggttgtctcaagtggtacccctaataaagtaatgaaagataaaaaatccttaactggtcaatatttaagtggaaaaaaacgaattgaagtccctgaatacagacgagaaatcaccgatagaaagattcaaattaaaggtgctaaaagtaataatttgaaaaatgtaaatgtagacttcccactatctgtcttaactgttgttacaggtgtgtcaggttctggtaaaagttcactcgtcaatgaaattttatataaagcattagctcaaaaaattaataaatctaaagtgaaacctgggaattttgatgaaattaaaggaattgatcaattagataaaatcattgatattgatcaatcgccaataggtagaacaccacgttctaacccagccacatacactggtgtctttgatgacataagagatgtctttgcacaaacgaatgaagctaaaatacgaggttatcaaaaaggtagatttagttttaatgtcaaaggtggacgatgtgaagcttgtaaaggtgatggaattataaaaattgaaatgcattttttaccagatgtctatgtaccttgtgaagtatgtgatggtaaacgctataatcgtgagactttagaggtaacatacaaaggtaaaaatattgcggatgtattagaaatgactgttgaagaagctacgcatttctttgaaaatattcctaagattaaacgtaaattacaaacacttgtagatgttgggttggggtacattactttaggtcaacaagctactacattatctggtggcgaagcgcaacgtgtaaaactcgcatcagaattgcacaaacgttcaacggggcgttctatttatattcttgatgaaccaactacaggattacatgtcgacgatataagtcgtttattaaaggtattgaatcgtatagtggaaaatggtgatacggtcgttattatcgaacacaatcttgatgttattaaaacggctgatcatattattgatttaggtccagaaggcggtgaaggtggaggaacaatcatcgcaactggtacacctgaagagattgctcaaaataaagggtcttacactggtcaatacttaaaaccagtattagagagagacagcgttgaa

SEQ ID NO: 34697 - DNA, 930 bp, Staphylococcus epidermidis
atgttaacaacagatagattagttaatacgttaaatttagaattacttactggtgaagaaggtttagatagaccaattaaaaacacagatatttcacgtccaggtttagaaatggctggatatttttcacattatgcttcagaccgtattcaattattagggacaacggagttatcattttataatttacttccagatgaagagaagaaaggaagaatgagaaaattatgccgacctgaaactccagcgattattgttacacgtgggttagaaccacccgaagaacttatacaagcatctcaagaaacgcatacaccaattattgttgcgaaagatgccacaacgagtttaatgagtaggttaacgacatttctcgaacatgaactcgcgaaaactacttctttgcacggtgtacttgttgatgtttacggtgtaggtgtactaattacaggagattctggcattgggaaaagtgaaactgcattagaattagtcaaacgaggccatagattagtggctgatgataatgtagaaatcaaagaaattactaaggatgaacttgtagggaaaccgcctaaacttatcgaacatttgctagagattcgtggtctcggaatcattaatgttatgactttgtttggagcaggatcaatattaactgaaaaacaaattcgattaaatattaatttagaaaattggaataagaataaattatacgatcgtgtaggtcttaatgaagaaacattgaaaattcttgatacggaaatcactaaaaaaacgataccagttagaccagggcgtaatgtagcagtaattattgaagtagctgctatgaattatcgtcttaatatcatgggtattaatacagcagttgaatttaatgagagacttaatgaagaaatcgttcgaaatagtcataaaagtgaggag

SEQ ID NO: 34698 - DNA, 2009 bp, Staphylococcus epidermidis
gaagatgtgatagcgcaaagtgctagtgttttcacaaaggaaggtacacgacttattgatattttaaatgctcatatgattaagtggtctaaattatatgttgatgactttcaatcaagttggactatgccaaaaagagaaaaaggattctatcatgcctggcaacgtttagttaaacatgatccattattcacaaaaaaacaacgacttactttagcacatttgccaaatcaagcaaccgaagcaatagagtacgcctttcaagaattaggagtaaaagaagaacatcgacaatcatatattgagagtcatttattatctttaccaggttgggcaggaatcatgtatcatcggtcacagacacaaagtaatgatgcgtacttattaacagactatgttgcgattcgtctatcaattgagatggtacttttaaatgaccaccatacaacattattaaaaaaatctatatatcttcaaaaaaagttagagcaaatacgttatttgctatttaacatacaaatgaatgttgagcagtggttaaatctatcatctaaaaagcaacaagcatacattgaattggggacacgattcagcccgttttattttaaaaagttatggttagatgcatgggaagaaacgcatgaacgtcgattggttgatgaaatttatcgtgttccaaccgaagatactgatcaagcaaaagcaaaagtacaacttgcgttttgtattgatgtacgatccgaaccgtttagaagacatttagaaagtgaagggccttttgaaacaatagggattgctgggttctttggtctgccaattcaaaaagaagtacttgatgaacaatttgcacatccatctttaccagtgatggtagaacctgcatatcgtattaaagaatatgctgatcaacatgaaatgaaaatttataatcaacaacaacatacacttacatctatgttttacaactttaaattaatgaaaaacaacgtgttgccaagtttgcttttaccagaattaagtggtccttttttaagtattgcgactatagctaacacaattttccctaaaaaagcaaaacgtattgttcatcgattctcacaaaaatggctacgtaaaccaacaggtaaattaactattcagcgtgagcaagatgcgtattcaaaactaccaatcggctttactttagaagaacagattcaattttccaaaaaagcattacaattaatggacttaacagatgattttgcaccacttattgttctatgcggacacggtagtgaatcacataataatccctatcatgcttcattagagtgtggggcttgcggcggtgcctcgagtgggttcaatgcgaaattattagcagtaatgtgtaatcaagaaaatgttagacgtggattattgatggaaggaatcgacattccaagacatacagtgtttatagctgctgaacatcaaacgtcagttgatgagttagagtatatttatgttccacctttaactacagaagctcaaaatgcctttgacgaacttaagcatgtgatgccaaaagtatgttataaagccaatttagaacgtttggcatcgttgccaaatataaataacactgaccataatcctaatgctgaagcgcatcgtcacgctagcgattggagtgaagttcgtccagaatggggtctagcacgaaatgctgaattcattattgggaaacgtcaaatcacccaaaatagtaatctagagggacgggcatttcttcataattatgattggacaaaggatgaagacggtgagattttaaatacaattatttctgggccagcactagtagcacaatggattaatttacaatactacgcctcaaccgtggcacctcactattatggaagcggtagtaaaacaacgcaaactgtaacaagtggtgtaggtgtcatgcaaggaaatgctagtgatttaatgtatggcttaccatggcagtcagtaatgatgaatgacaaagaggcgtatcacgc

SEQ ID NO: 34699 - DNA, 699 bp, Staphylococcus epidermidis
gtgaaccatattaaagaaataggtgttgatatgaattttaaatatatgaatatagcaaaagggataattccaattttaataagcatgattattcttttaagctttatctctactcatgtgctagcgcaaaatcagtggttgagaatggttgatcttagcgtacaagagtggtttagtaatcaatttggggatcccaatagagtgtttggacatggtttcatcaacaatataatgacgttttgcgctacctttggtgatgttaagatcattttaattgtggctaccattattgcagtgctactcacgttttacaagaaggttccacaagcaatatggctaatcataacgatgactagtggcgcattgattaattatttaattaagcaaacgattgaaaggtcaaggcccgagaatcatttaattgttgatacaggatggtcttttcctagtgggcattctaatattaatacattattctttttaatgattatgatcattattatcccgttaatccgacagcgtgcttttaaatttataatcacaattttaagtattgcattttggattagcgttttaataagtagactgtattttcatgcacactacttttctgacgttgtaggaggcgtaagtttagcgattatttgggtgtcgttatttatattagtgtcacctttattaaaatttgggggagaaaag

SEQ ID NO: 34700 - DNA, 906 bp, Staphylococcus epidermidis
atgacaagcaacgaaaaagaaatgggtaaaagtgaattgttagttgttacaggtatgtctggagcgggtaaatcattggtgattcaaagtctcgaagatatgggatttttctgtgtagataatttaccacctgtactattacctaaatttgtagaattgatggctcaaggaaatccttcattgcaaaaagtagcaattgcaatagatttaagaggtaaggaattatttaaatctctagttaaagaaattgatattattaaaagtcgtaatgacgtgattttagatgttatgtttttagaagctaaaactgaaaaaattatttcacgttataaagaatcaagaagagcgcacccactaaatgaacaaggacaaagatcattaatagatgcaataaatgaggaacgtgaacatctatcagaaatccgaagtatcgctaattacgtgattgatacaacaaaattaaaacctaaagaattaaagcaacgcatttcaaagttttatttagatgaaaactttgaaacatttacaatcaacgtgacaagtttcggtttcaagcatggtatacaaatggatgctgatttagtttttgatgtcagatttctacctaatccctactatgtagaggaattgcgtccatttattggtttagatgagccagtgtacaattacgttatgaagtggaaagaaacccaaatattttttgataaattaacagatttattaaaatttatgattcctggctacaaaaaagaaggtaaatcgcaattggttattgctataggttgtacgggtggacaacatcgatcagtcgcattagctaaacgtttagctgaatatcttaacgagatttttgaatataatgtttatgtgcatcatagagatgcgcatattgaaagtggagagaga

SEQ ID NO: 34701 - DNA, 537 bp, Staphylococcus epidermidis
atgacgaaacaagatttatctttatctgtatttaccaatgaaaattataagaatcttcgttacacatcatctagttttagaaattctatgtatgatgaattagaggttaataaaagtcgttttaaaaactgtaattttaatgaaggtatttttaagaatatagaagcaatttgtaattgtaaatttacaacgtgcgggtttaataattgtattttcgaagatgttcatttttacaaaaaccaatttaaagattcaacatttgtgaatacaccatttgatcaatccgtatttaatagtactttattccaaaatgcaatgttcgatagcaatctcattcgtagcgtaaaatggactgatatcatttttaaaaacgtttctttcaaaaatgtagaaattgaaggaacaacatttaaagatgtaaaattcaaaaattgtgagttcaaaaatgtaattattactaattcaactatgtcgcaaaagttaatgaatgaattacaaaaacaagatgttactttagaaaatatagacacttctatt

SEQ ID NO: 34702 - DNA, 993 bp, Staphylococcus epidermidis
atgaaacaaatgaatgtagtacttattggtggtggcactggactttctgtccttgctagaggccttagagaatttccaatagacattactgccattgttactgtagcggacaatggtgggagcacggggaaaattagagatgtcatggatattccagcgcctggtgatattcgtaatgtcattgctgctttaagtgactcagaatcgatattaactcaattgttccagtaccgttttggtgaaaatcaagtagatgggcattcattaggtaatttagttattgctggaatgactaacattactaatgattttggacacgctattaaagagttaagcaaagttttaaatattaaaggccaagtcatcccttcaacaaacgcaagtgtgcaactcaacgcggtgatggaagacggtgaaattgtacatggagaaactaatatacctaaaacacataaaaaaatagatcgtgtgtttttagaaccaagtgatgttgaaccaatgaatgaagcgatagaagctttagaacaagcagatttaattgtcttaggaccaggttcattatatacaagtgttatatcaaatttatgtgtcaaaggtatttcagaagcattattacgtacatctgctccaaaactttatgtatctaatgttatgacacaaccaggcgagactgataattatgatgtcaaagagcatattgatgcacttactcgacaagttggtgaaccatttattgattttgtcatatgtagctcagaatcctatagtaaagatgttttacaacgatatgaagaaaagaattcgaaaccagtagcagtacataaagaacaattaaaagatagtggaattagagttttaacggcatctaatttagttgaaatatctaatgaacactatgtcagacataacacaaaagtattatcaaaaatgatttatgaacttgccttagaattaacaagtacaattcgctttactcctagtgataaaaagaaa

SEQ ID NO: 34703 - DNA, 942 bp, Staphylococcus epidermidis
atgagctttgcatcagatatgaaaaatgaactaacacgcatagaagttgacgaatcgaatgctaaagcagagctcagtgcattaattcgcatgaatggcgcacttagtctatcaaatcaacagtttgtaattaatgtacagacagaaaatgcgacaacagctcgtcgaatttactctcttatcaaacgtatatttaatgttgaagttgaaattttagttagaaaaaagatgaaattgaaaaaaaacaatatttatatatgtcgaacaaagatgttagcgaaagaaatactaaatgatttaggaattttaaaaaagggagtttttactcacgatattgatccggatatgattaaagatgatgaaatgaaaagaagttatttaagaggggctttcttagcaggtggttctgtaaataatcctgaaacatcttcatatcatcttgaaattttttcacaatatgaagatcattccgaaggtcttactaaattgatgaatagttatgaactcaatgcgaaacatttggaacgtaaaaaagggagtattgcgtatcttaaagaagctgaaaaaatttccgactttcttagtttgataggtggctatcaagcattgttaaagtttgaagatgtaagaattgtccgtgatatgcgtaattcggttaatcgtcttgttaattgtgaaacagcaaatcttaataaaactgttagcgcagcaatgaaacaggttgaaagtatacaattaattgatgaagaaattgggcttgaaaatttacctgatcgtttaagagaagtagcgaagctcagagtagaacatcaagaaatatcgttaaaagaattgggtgagatggtttctacagggcctatatctaaatcaggtatgaatcaccgtttaagaaagttgaatgaattagcggataaaataagaaatggtgaacaaattgaatta

SEQ ID NO: 34704 - DNA, 897 bp, Staphylococcus epidermidis
atgaaacgctatttaattactggtggaactggcatggtcggttcccacttggtcaacgaaattaaacaaaccgatgcacatattacaattttaaccagacaggataaaacttctaatcatcccaaaatcacgtatatcaactggtcaaaagagggttggcaacatcaagtaccagatatagatattgttattaatctagctggtgcaacgttgaataaacgttggacatcttcccacaaacaagcgatgatgcttagtcgtattcaatcaacgcaaacactatttgaactttttgaaacacgtgaacacaaaccagaagttttatttaacgcaagtgcaatgggctactaccctccagatttatttacaagttatacggaattatatcgaacacttccatttgatttcttatcagaaattgtatatcaatgggaacggtttgcgaataaatttaagcaattcggtacacgtgtcgttttaggtcgattcggtcttattctatcagacgatggtggtgctcttgaaatgatggaacttccgtatcgtttatatgttgggggaaaactcggctctggaagacaatggtactcttggattcatatcgatgacttaattagaggtattttatttactatcaatcatgataacgctgaaggtccatttaatttaactgcacctattcctgaaagacaaaacttatttggttatactttagcacgtgcgatgcataaaccacatgaaacgtgggcacctaaattgatactacgtgcagtgctaggtcagatgtctactgtcatattagatacacaaaaagtacttccaaataaattacatgcactaggttttgagtttaagtataataatttaagaaatgctttagatgatttaattaaagct

SEQ ID NO: 34705 - DNA, 1011 bp, Staphylococcus epidermidis
gtgaaagacttaattaaagttcaacaaaagcttatacctgatcttatagataagatgtatagacgcttttatattttatctactatctctcaaaatcaacctgtaggaagaagaagtctaagtgaacatatggatatgactgagagagttttacggtcggaaacagatatgttaaagaagcaagaattaattcgtgtcaaacctacgggaatggaaattactaatgaaggtactgaagtattagcacaactaggtgaatactttaatgtttatagcgatgaccataaattggccagtgctatcaaagataaatttcatattaaagatgtacatgtcattccaggagattccgattctaatcgaactgtaaaacgtgaaatgggtcaacaagctgggcaacttttagaaggtatactttatgaagatgctattgtctctgtaactggtggttcaacaatggcgtgcgtgagtgagtcgatacatttattaccgtttaacgtattctttgttccagctagaggtggacttggagaaaatgttgtttatcaagcgaatacaatcgcttcgagtatggcccaacaagctggtggctattatacaacactctatgttccagacaacgtgagtgagtccacatacgatacgttaatgttggaaccttctgtcatgcatacactagataaaatcaagcaagctaatataacaatacacggcattggtgatgcgctgaagatggcgcatcgacgtcaatcatctcaaaatgtgattgataaccttcaacatcatcaagccgttggagaagcttttggatattattttgatgctcagggtcaaatagttcataaggtcaaaacgattggccttcagctagaggatcttgagaacaaagactttatctttgcggttgctggtggacaatcaaaaggagaagctattaaagcttatctttcaattgcaccggaaaacactgtattgattacagatgaagccgcagcaaaagtcattttacaa

SEQ ID NO: 34706 - DNA, 1008 bp, Staphylococcus epidermidis
atggcaattaaagtagcaattaatggttttggtagaattggtcgtttagcattcagaagaattcaagatgtagaaggtcttgaagtagttgcagttaacgacttaacagatgacgatatgttagctcatttattaaaatacgatactatgcaaggtcgtttcactggagaagttgaagttatcgaaggtggattccgtgtgaacggtaaagaaattaaatcattcgatgaaccagatgctggtaaattaccatggggcgatttagatatcgacgtagtattagaatgtactggtttctatactgataaagaaaaagcacaagctcacatcgatgcaggtgctaaaaaagtattaatctcagctccagctaaaggtgatgtaaaaacaatcgtattcaacactaaccatgatacattagatggttcagaaacagttgtttcaggtgcttcttgtactactaactcattagcaccagttgcaaaagttttaagtgacgaattcggtttagttgaaggtttcatgactacaattcacgcttacactggtgaccaaaatacacaagacgcacctcacagaaaaggtgacaaacgtcgtgcacgtgcagcagctgaaaatattatccctaactcaacaggtgctgctaaagctatcggtaaagttattccagaaatcgatggtaaattagacggtggagcacaacgtgttccagttgctactggttctttaactgaattaactgtagtattagacaaacaagatgtaactgttgaccaagttaacagtgctatgaaacaagcttctgacgaatcattcggttacactgaagacgaaatcgtatcttctgatattgttggtatgacttacggttcattatttgatgcgactcaaactcgtgttatgactgttggagatcgtcaattagttaaagttgcagcttggtacgacaatgaaatgtcttacactgctcaattagtacgtacattagctcacttagctgaactttctaaa

SEQ ID NO: 34707 - DNA, 1188 bp, Staphylococcus epidermidis
atggctaaaaaaatcgtttcagacttagatttaaaaggtaaagttgttcttgagcgcgctgattttaacgttccaattaaagatggtgaaatcactaatgacaacagaattgttcaagcattaccaacaatcgaatatattattgaacaaggtggtaaattagttttattctctcacttaggtaaagttaaagaagagagtgataaagaaggactttcacttaagcctgttgctgaaaacttatctaagaaattaggtaaagaagttatattcgttcctgaaacacgtggcgaaaaactcgaaacagcaattgaaaacttaaatgaaggcgatgttttattagttgaaaatacacgtttcgaagatttagatggtaaaaaagaatctaaaaatgatcctgaattaggtaaatattgggcgtcattaggtgatgtatttgttaatgatgcatttggtacagcgcaccgtgaacatgcgtcaaacgtaggtatttctactcatctagaaacagcagctggttacttaatggaaaaagaaattaaatttattggtggcgtagtgaatgatccacaaaaaccagtagttgctattttaggtggcgctaaagtttcagataaaattaatgttatcaaaaatttagttaatatcgcagataaaatcttaatcggtggcggtatggcttatacatttattaaagcgcaaggtaaggaaataggtctttcattattggaagaagacaaaattgattttgctaaagacttgttagagaataatggcgatcaaatagtattacctgtagattgtaaaatcgctaaagaattttctaatgatgcaaaaatcactgaagtatctatcaatgaaatcccttcagatcaagaagcaatggatattggacctaaaacagtagaattatttaataaagaattacaaggtgcacatactgtagtatggaatggacctatgggtgtattcgaatttagtaattttgctaaaggtacaatcggtgtatgtgagtctattgctaaattggaagacgctactactattattggtggtggtgactctgccgcagcagcaatttcattaggtttcgaagatgactttacacacatctctactggtggaggagcatcattagaatacttagaaggtaaagaattacctggtataaaagctattaatgataaa

SEQ ID NO: 34708 - DNA, 1302 bp, Staphylococcus epidermidis
atgccaattattacagatgtttacgctcgcgaagtcttagactcacgtggtaacccaacagttgaagttgaagtattaactgaaagtggtgctttcggacgtgcattagtaccttctggtgcttctactggtgaacatgaagcagttgaattacgtgatggagataaatcacgttatttaggtaaaggtgtgactaaagcggtagaaaatgttaacgaaatgatcgcaccagaaatcgttgaaggtgaattttcagttttagatcaagtatctattgataaaatgatgattcaattagacggtacacacaacaaaggtaaattaggtgcaaatgccattttaggtgtttctattgccgtagctcgtgcagctgctgacttattaggtcaaccattatataaatatttaggtggatttaatggtaaacaattgccagtacctatgatgaatattgttaatggtggttctcactcagatgcaccaattgctttccaagagttcatgattttacctgtaggtgctgagtcattcaaagaatcattacgttggggtgcagaaatcttccataaccttaaatcaatcttaagtgaacgcggtttagaaactgcagtaggtgatgaaggtggtttcgcacctagatttgaaggcactgaagacgctgtagaaactattattaaagctatcgaaaaagcaggatacaaaccaggtgaagatgtattcttaggatttgactgtgcttcttctgaattctatgaaaatggtgtttatgattacactaaattcgaaggtgaacacggtgctaaacgtagtgcagcagagcaagttgactacttagaagaattaattggtaaatatccaatcatcactattgaagatggtatggatgaaaacgattgggaaggttggaaacaattaactgatcgtatcggtgataaagttcaattagttggtgatgatttattcgtaactaacactgaaattttatctaaaggtatcgaacaaggtattggtaactcaatcttaatcaaagtaaaccaaatcggtacattaactgaaacattcgatgctattgaaatggctcaaaaagctggatatactgcggttgtatctcaccgttctggtgaaactgaagatactacaattgctgatatcgcagttgctacaaatgcaggccaaattaaaacaggttcattatctagaactgaccgtattgctaaatacaatcaattattacgtattgaagatgaattatacgaaacagctaaatttgaaggaattaaatctttctacaatttagataaa

SEQ ID NO: 34709 - DNA, 468 bp, Staphylococcus epidermidis
gtggctaagaaaaaatcaaaatcaccaggtacgttagctgaaaatcgtaaagcaagacatgactacaatattgaagatacaattgaagcgggtattgctttaagaggtactgaaattaaatctatacgtcgtggtagtgccaatttaaaagatagctttgcgcaagtgagacgaggcgaaatgtacctgaataatatgcatattgcaccatatgaagaagggaaccgttttaatcatgaccctttacgtacacgtaaattactcttgcacaaaaaagaaattcaaaaattaggtgagcgtacacgagaaataggttattctattattccgttgaagttatatttaaaacatggtcaatgtaaagttttattaggcgttgctagaggtaaaaagaaatacgacaaacgtcaagcacttaaagaaaaagcggtaaaacgagatattgatcgcgcagttaaagcccgttat

SEQ ID NO: 34710 - DNA, 540 bp, Staphylococcus epidermidis
atgaaattgaaactattaggaacattagcactctcgtcaataatattaacagcatgtggacaagaaaatgtaaaaaaaacagaaagcaatccaaaagaagaacaaaataaaacggataatatgcaaactaatgggagcgtaacaaattctaatagtaatcaaaaacaaaaaacagctcaaaaacaaatttccgctcaagaagcagaacaaattgtctcgaactattacattaataaagggattaataagcaacaagttcttgaatttaaaacaaatatagatagaagcaatgctaatgaatattatgttgaacaccttgtaagagatgcagccggaactcctataaaattttgtgctgtagtaaacaaaagtacaggtgaagtgatcaatcgatttaatgacatgaatgaggaagaaatgaaggaatttgaggaatttaaaaaaagaagtcctaagtaccataattctggtgaagaaaaaaataaaatgcaagaaaattcttcatcttccgaacaacaagaagtccacaattctgttata

SEQ ID NO: 34711 - DNA, 585 bp, Staphylococcus epidermidis
ttggttaaaacattatatttaatgagacatggtcaaacagtatttaacttaaaaggtaaaatacaaggggctagtgattctcctttgactgcattaggtgtacaacaagcgaatgcagcacaacaatattttaaaacgaaaaatattcattttgactatctttattcatcaccacaacaaagagcatgtgacacgttagagaacgctgtaccaaaccaacaatattggtgtgtaaaagatcttaaagagtgggggtttggattatttgaaggggaaagtatcgagttattaagagctattaaacaacctagatatttgtatggtgacgctgttgtaccatttggtggagaatcaagatctgaagttgaacacagggtttatcgagcactctatgaaatgatggatacaacagatggagagacaattctagcagtgagtcatggtagcactattggtttgtttgtaagaaatatattagggtatgacaagggaagtaaatttgaaataggaaattgtaacattgtaaaatttgaatacgatggagaagaatttatctttaaagatttaattaatcccattaaaaaa

SEQ ID NO: 34712 - DNA, 714 bp, Staphylococcus epidermidis
atgacccatgtagatattgcagcgacaattgcaccagaagacaagctttctaaaactttactcaaagatataaaagtaaacgaagaatcaatagatatcattgaattgcgcattgaccaatggccatcatttaataaggcattattaaatgaagtgattaagcaattaaaaatattccatttgaaaatattagtaacatatagaacttcagttcaaggaggaaaaggagctgtaaatgagcaagagtatttaaatatactaggtgaattaattgagtgtccacaatttgatatgattgatattgagtggagcagtgccgtcaaaattgaaaaatatacgcatcttgttcaacgtgcacaacaaaaagggctcgaagttgttctttcgcatcataattttcaagaaacacctgctttagatgaacttaaatttatttactttaaaatgcaaaaactcaatcctgagtatttaaagcttgcggttatgcccaaatgtcaagaggacgtgttacatttattagaagccatgtcactcacagcgaagcacacaacatgccgaattgtcggtatatcgatgtctagtttgggtaaagtcagccgaattgctcaaggcgtatttggtggaacgctgtcttatggttgcatagaagaaccacaagcacccggacagatacatgtctctaagttaaaatccatggtttctttttatgaggat

SEQ ID NO: 34713 - DNA, 540 bp, Staphylococcus epidermidis
ttggaattacaagaagctatatctaatcgtagaagcgtcaaaaaatttaaacacgatatggtggttgatgatcaaacggtttacgatgcaatatataaagctactgacgctccaaatcatggtatgagagaaccatggagattggttcatatttcaaaagataaactcggtgattttagtagggatatcacaagatttgcttttccagatagtccggataagcgagaggatcactttcatgcagtaacaaatttaggtggcatgttgttgttgattttaaaagatgatccaagacaacgtcaaagtcgtgaaaattattttgcatttggagcttttgctcaaaatttaatgttacttttatacgaagcgggtattggtacttgttggaagtcgccacaatatatctttgatcctaaaatacgaaaagctttgggtgtaaaggataatgaaatattagcaggatttttgtatcttactgatttagaagaagtaccaacgaaggctaaacgtaaaaataaaaatcttattaccgaatttgaa

SEQ ID NO: 34714 - DNA, 693 bp, Staphylococcus epidermidis
atgggtaaatcttacggtgaaatatttcacgaaatggcgacaatgccaaatgttcagtggccagaggtttggcaggcaattttagaaactctatatatgactattgtttcgacgctttttgcatttgtccttggacttatattaggggtattactctttttatctgcgaaaagtaactcattggctgctaagattttctacacgattgtgtcattcattgttaatttatttagagcaattccatttatcatattaattttactgttaattccatttacaagtatacttctcggaacaatcagtgggccaactggtgcattaccagcacttattattggtgcagcaccattctacgctagattggtcgagattgcttttaaagaaattgataaaggtgttatagaggctgcttggtcaatgggagcgaacacttcgatagttgtgagaaaagtgctacttcctgaagcaatgcctgctttagtttcaggtattaccgttactgcaattgctttggtaggttctacagctattgcaggtgttattggcgcaggcggtttaggtaatttagcatatttaacaggatttactcgaaatcaaaatgatgtcattttagtttcaacagtatttattttaattattgtatttataatccagttcctaggggattggcttacaaataaaatcgataaacgc

SEQ ID NO: 34715 - DNA, 810 bp, Staphylococcus epidermidis
atgaaaaaattattcggaattattttagtattggctttaacgattgccttagctgcatgtggtggaggtaaagataaggaaaaaactatcacagtaggtgcatctccagcaccacacgctgaaattttagaaaaagcaaaaccattattgaagaaaaaaggttatgatttaaaaatcaaaccaattaacgattatacaacgcctaataaattattagacaaaggtgaaatcgatgcgaacttcttccaacatacaccatacttaaatactgaaagtaaagaaaaagggtataaaattgaatcggctgggaatgttgaattagaacctatggctgtatactcaaaaaaatataaaagcttaaaagatcttcctaaaggtgcaacagtatatgtatcaaataacccagctgaacaaggacgattcttaaaattctttgtagatgaaggtcttattaaacttaaaaaaggcgttaaaattgaaaatgctaaatttgatgacataactgaaaacaaaaaagatattaaatttaacaacaaacaatcagcagaatatttaccaaaaatctatcaaaatcaagacgctgacgcagtaatcattaattctaactatgcgattgaccaaaaattaagtcctaaaaaagattcgattgctttagaatctcctaaagataacccatatgcaaatttaattgcagttaaaaaaggtcataaagatgataaaaatatcaaagtattaatggaagtgctacaatctaaagaaattcaagattatattaaagataagtatgatggagctgtcgtacctgctaag

SEQ ID NO: 34716 - DNA, 759 bp, Staphylococcus epidermidis
atgtcatcaacattagagattaaggacctacatgtgtctatcgaggataaagaaattttaaaaggtgttaacttaacaattaacactggtgaaatacacgcaattatgggacctaatggtactggtaaatcaacattatcgtcagcaattatgggacatccaagttatgaagttacacaaggtgaagtattattagatggcgttaatattttagagttagacgttgatgagagagctaaagcaggcttatttttagctatgcaatatccatcagaaattacaggggtaacaaacgcagattttatgcgctcagcaattaatgcgaaacgtgaagagggacaagaaattaatttaatgcagttcatcaagaaattggataaacaaatggactttttagatatcgataaagatatggctcaacgttatttaaatgaaggtttctctggtggagagaaaaaacgaaatgagattttacaattaatgatgttagaaccgaaattcgctattttagatgaaattgactctggtttggatattgatgctttgaaagtggtttctaaaggtattaatcaaatgcgtggtgaagagtttggagcattaatgattacgcactatcaacgacttttaaattatattacaccagataaagtacatgtgatgtacggtggtaaagttgtgaaatctggaggtccagaattggctaaacgccttgaagaagaaggctatgaatgggttaaagaagaatttggtgctgctgaa

SEQ ID NO: 34717 - DNA, 462 bp, Staphylococcus epidermidis
atgaattttaataatttggatcaattatatagatctgtaattatggatcattacaaaaaccctagaaacaaaggtgtcttagacaatggctcaatgactgttgatatgaataaccctacatgtggtgatcgcatacgtttgacatttgatattgaagacggaatcattaatgatgctaagtttgaaggagaaggatgttcaatttcaatgtctagtgcatctatgatgactgaagcagttaaaggtcattcacttggtgaagcaatgcaaatgagccaagagtttactaaaatgatgctcggtgaagactacgagattacagaagaaatgggagatattgaggcgcttcaaggtgtctcacaattcccagctagaattaaatgtgcaacgcttgcatggaaagcattagaaaaagggacagtcgaaaaagaaggtaagtcagaaggtacaacggaagaagat

SEQ ID NO: 34718 - DNA, 1275 bp, Staphylococcus epidermidis
atgaaattaattaaaaacggaaaaatcttaaaaaacggtatcctaaaagacacagaaatattaatcgatggtaaacgtattaaacaaattagtagtaagataaatgcttcatcttcaaatattgaagttattgatgcaaaaggaaatttaattgctccaggttttgtagatgttcatgtgcacctacgtgaaccaggtggtgaacataaagaaacaattgaaagtggtacaaaagccgctgcaagaggtggttttactacagtatgtcctatgcctaatacaagacctgtaccagatacagttgaacatgttagagaattaagacaacgaatttctgaaacagcacaagttagggtgttgccttatgctgctattactaagagacaagcaggtactgaacttgttgattttgaaaaattagcactagaaggtgtgtttgcatttacagatgatggtgtgggtgttcaaacagcaagtatgatgtatgctgctatgaagcaagctgcaaaagttaaaaaaccgattgtcgcacactgcgaagataatagcttaatctatggtggtgcaatgcataaaggtaaacgtagtgaagaattaggcatacctggtattccaaatattgctgaatctgtacaaattgctagagatgtactattagctgaagcaactggttgtcactatcatgtgtgccatgtttcaactaaggaaagtgttcgagtaatcagagacgctaaaaaagctggtatccatgtaacagcagaagttacaccacatcatttattattaactgaaaatgatgttcctggtgatgattcaaactacaaaatgaatccaccattaagaagtaatgaagatagagaagcacttttagaaggcttattagatggaacaattgattgtattgcaacggatcatgcacctcacgctaaagaagaaaaagaacaacctatgacaaaagcacctttcggtatcgtaggtagtgaaacagcattcccattactttatacacactttgtaagacgaggtaattggtcactgcaacaattagttgattatttcactattaaaccagctactattttcaacttaaattatggaaaattacacaaagatagttacgctgatttaacaattattgatctaaatactgaaaaagaaatcaaaagtgaagatttcttatctaaagctgataacactccatttattggtgaaaaagtttatggaaatccaacactaacaatgcttaaaggtgaagtagtattcgaggaggaaaag

SEQ ID NO: 34719 - DNA, 3364 bp, Staphylococcus epidermidis
tatcttgtactggaagatggctcttattacgaaggatatcgcttagggtcagatgacttatctataggcgaaattgtattcaacactgctatgacggggtaccaagaaacaatctctgacccgtcttacacaggtcaaatcataacttttacgtacccactaattggaaactatggtatcaatcgcgatgattttgaatcattaacacctaaattaaatggggtagtagtaaaggaagcaagtacacaccctagtaactttagacaccaaaaaacattacacgaaacacttgctcaatatcatattcctggtatatcgggtgtagatactagaagtattactcgtaaaattagaaatcatggtgttttgagagctggatttacagataataaagataacattcaggaacttgttgaacagttgaaaactgctgagttacctagagatgaagttcaaacggtttctacaaaaacaccatatgtatcaacaggttccgatttaagtgtcgttttactcgactttggtaaaaagcaaaatatcgttcgtgaattaaatttacgtggttgcaacgtcacagttgtaccatatgatacgtcagctgaagagattttaagcatgtctccagatggtgtcatgctatcaaacggccctggtgatccagacgaagttgacgttgctttagatatgatcagaggcatattaggaaagataccattctttggtatctgccttggtcatcaactttttgcattatcgcaaggcgcaacttcattcaaaatgaaatttggacatcgtggtgcgaaccatcccgttaaagatttaagaacaggtaaaatagatatcacgagccaaaatcacggctattctattgaccgtgactcgcttaaaaatactgaccttgaagttacacatattgctttaaacgatggtactgttgaaggactaagacataaagaacttccagcgttttcagtccaatatcatcctgaagcaagaccaggtccaagtgattctaattacttatttgatgagttcataacaatgatgaaggatttcaaagaaaaggagcgtcaaatcaatgcctaaaagagatgatattcagacaattttagtagtcggttcaggcccaattattattggacaagctgcagaatttgactatgcaggaacacaagcttgtctagcattaaaagaagaaggctacagagttattttagttaattctaatcctgcaacaataatgacagataaagaaattgccgataaggtgtacatagaaccattaacgcacgattttattgctcgtattattagaaaagaacaaccagatgcattattacctactttaggtggtcaaactgggttgaacatggcgattcaacttcatgatagtggcgtgttagaagctaataatgtaaagttgttggggacagagctagagtctattcaacaagcagaagatcgtgaaatgtttagaacattaatgaatgatttaaatgtacctgtaccagaaagcgatatcgttaatacagtagaacaagcatttgaatttaaagaacaagttggatatccgttaattgtacgtcctgcatttacgatggggggtactggcggtggtatttgccataatgatgctgaattaaaagaagttgttagtaatggtttgcattatagccctgctacacaatgtttaatagaaaaatcaattgcaggttataaagaaattgaatatgaagttatgcgtgataaaaatgataacgccatcgtagtatgtaatatggagaacatagatcctgtaggcattcatactggagattcaatcgttgttgcaccgagtcaaacactatcagatgtagaatatcaaatgctacgagacgtatccttaaaggtaattcgtgctttaggtattgaaggtggatgtaatgtgcaactcgcacttgacccgcattcattgaattattacatcattgaggtcaacccacgtgtgtctcgttcatcagcgttagcttccaaagcaacgggttatcctattgcaaaattagccgctaagattgccgtaggtttaacactagatgaaatgcttaaccctattacaggaacttcatatgctgcatttgaacccactttagactatgttatttctaaaattccacgtttcccattcgataaattcgaaaaaggtgaacgtgaacttggaactcaaatgaaagcgacaggcgaagtcatggcaatcggtcgtacatatgaagaatctttactgaaagccattcgctcacttgaatatggtgttcatcatttaggtttaccaaatggagaaagttatgaattagattacattaaagagcgtatcggacatcaagatgatgaaagattgttctttatcggagaagcaattcgtagaggaacatctcttgaagaacttcataatatgacaaaaattgactatttcttcctaaataagttccaaaacattattgacattgagcatgaacttaaaaatcatcaaggcgatttagagtatttaaaatacgctaaagattatggctttagtgacaaagtgattgctcatcgatgggatatggaagaaaaagatatatatgaactacgtatgagtcaaaatattaaaccagtttataaaatggttgatacatgtgcagctgaatttgaatccacaacgccgtactattatggtacgtatgaagatgaaaatgaatctatagtaactgataaagagaaaattctagtactaggttcaggaccaattagaattggccaaggtgttgaattcgattatgcaactgtacatgcagtatgggcgattcaaaatgctggttacgaagctattattgtgaataataatccggagactgtatctactgacttttcaatttctgacaaattatattttgaaccacttacagaagaagatgtcatgaatatcattaacttagaacaacctaaaggtgttgtagtacaatttggtggtcaaacagcaataaacttagccgataaattagcacagcatggtgttaaaattcttggaacatcattagaagatttaaatcgagctgaggatagaaaagaatttgaagcgctattacgtgaaatatctgtacctcagccacaagggaaaactgctacatcacctaaagaagctcttaaaaatgcaagagaaataggttatccggttgtagttcgtccttcatacgtgcttggtggccgtgcaatggagattgttgataatgatcaagagcttgaaaattatatgactcaagctgttaaagcaagtccagaacatcctgtattggtagaccgctatttaacaggaaaagagatagaagtggatgctatttcagatggggag

SEQ ID NO: 34720 - DNA, 408 bp, Staphylococcus epidermidis
atgaataaagcaattaatataacatcattgataggaatcattttacaaagtttttctagtctattgtttttagttttcttggtattttcaattactggagcgatggatgctaattttactacaacagttaatggtgaaacaacagttcatagtgcagaagccgcacagcatgtttttagtgttggatttttggttatattcatcgttgcaattttttcaatcatttttggaattataggtatgatgaagaaaaaaactaatactatagcaagtggtgtattttatattataggtgcaatattaagtttaaatatgattacttttatatcttggctagtgtgtggaatattattaattaaaaaaagacaaaataaaagcataaaagacaataaaacacatttggtggat

SEQ ID NO: 34721 - DNA, 1317 bp, Staphylococcus epidermidis
atggaattaacaatatatcacacgaatgatattcatagtcatttaaatgaatatgctcgtattcaagcttatatggcaaaacatagaccgcaacttgaacatccctcactctatatagatataggtgaccatgttgatttatcagcacctgtgacagaagctacggtaggacataaaaatatagaacttttaaatgaagcacattgtgatattgcaaccattggaaataatgaaggaatgacaatttctcatgatgctttacaaaatctatataacgacgcggattttaaagtgatttgcacgaatgtcatagatgaagagggacatcttccacatcatattacctcttcgtatatcaaagaaataaaaggaacacgtattttatttgttgcagcaacggcaccgttcacacctttttatcgagcactggattggattgttactgacccattagcggcaatcaaagatgaaatcaatgcacatcaaggtgaatatgatcttttaatggttatgagccatgtcggtatcttttttgatgaaaagttatgccaagagattccggaaatagatgttatctttggtagtcatacgcatcatcattttgaacatggagaaataaacaatggtgttttgatggcagctgccggaaaatatggctattatttaggtgaagttaatattacgattgaaaatggaaaaatcgttgataaaatcgccaaaattcatcctattgaaacacttcccttagtcgagacacattttgaagaagaaggaagagcacttctaagtaaaccagtagttaatcatcatgtgaacttagtcaaaagaacagatgttgttacaagaacatcgtatttactggctgaaagtgtatatgagttttcaagggctgattgtgcaatcgtaaatgctggacttatagttaatggcattgaagctgataaagtgacggaatatgatatacatcgcatgttaccccatccaatcaatattgtaagagttcgattaaccggtaaacaattaaagcaagtgattcaaaaaagccaaaagcaagaatatatgcacgaacatgcacaaggtcttggttttagaggggatatatttggaggatatattttatataatctaggctttattgagtcagaagaccgttattttataggcgatgaagagattcaaaatgataaacaatatacgttaggtactgttgatatgtatacatttggaagatatttcccattgctaaaggggttatctacagattatattatgcctgaatttttacgtgatatttttaaagagaaattactaaaatta

SEQ ID NO: 34722 - DNA, 609 bp, Staphylococcus epidermidis
atggctaaaaatattgctaaagcattattagacatagaggcagtttcattatctccaaatgatttatttacttggagctcaggaattaaatcgcctatttattgtgataatcgaataactttagggtaccctgaagtgcgtaatgcgattagagatgggttaattcaattaattaaagaacatttttctaacgttgaaattatctcgggtacggccactgctggtatccctcatgcagcttacatttcagaaaaaatggaattacctatgaattacgttagatcaaaaagtaaaagccatggtaaacaaaaccaaatagaaggtgcaaaaagcgagaataaaaatgtcgttgtagtcgaggatttaatttctactggaggttcttcgattacagctgtcgaagcattggaagaagcgggagctaatgtgcttggagtcgttgctatattcacatatggtcttgcaaaagcagacgagacatttaataaggctcatattccgttttatactttaagtgattataatgagcttatagaagttgcgaaagatgatgggaaaatctctttaaatgacatccaaacattagttgattggcgagataacttatcg

SEQ ID NO: 34723 - DNA, 912 bp, Staphylococcus epidermidis
atggcgactagaaatgaagaaattttacgtaaaccggattggttaaagattaagcttaacacaaacgataattatactggtcttaagaaaatgatgcgtgagaagaatttacacacagtgtgtgaagaagctaaatgtccaaatattcacgaatgttggggtgcgcgtcgtacagctacatttatgattttaggggcagtatgtacaagagcatgtcgattttgcgcggtaaaaactggtttacctaatgaattagatttaaatgaaccagaacgagttgcagaatcagtagaattaatgaatttaaaacatgttgtaattactgctgttgcacgtgatgatttaagagatcaaggctcaaacgtgtatgcagaaacagtacgtaaagtaagagaaagaaatccatttacaacaatagaaattttaccatctgacatgggtggcgattatgaagcccttgaaacattaatggcttctagaccagacattcttaatcacaacattgaaacggttcgtcgcttaacaccaagagttcgagctcgagcaacttacgatagaactttacaatttttacgtcgttctaaagaattacaacctgatattccaacaaaatcaagtttgatggttgggttaggtgaaacgatggaagaaatttatgaaacgatggatgatttacgcgctaatgatgttgatatcttaactataggtcaatatttacaaccgtctcgaaaacatttgaaagttgagaaatattatacgccattagaatttggtaaaatgagaaagattgcaatggaaaaaggatttaaacattgtcaagcaggacctttagtaagaagctcatatcatgctgatgagcaagtgaatgaagcagctaaagagaaacaacgccaaggtgaagaacaactcaat

SEQ ID NO: 34724 - DNA, 405 bp, Staphylococcus epidermidis
atggacataccaaaaattacgacgtttttaatgtttaatgatgaagctgaagaagcaattcaattatacacaagtttatttgaagatagtgaaattattacaatggtgaagtatggcgaagaaggaccgggcacgcctggctcagtgcaacactccatctttacgttaaatggccaagtatttatggcgatagatgcaaatagtggggaagagttgcctatgaatccggcaatgtcactatatgtcactgttaaggatactatggagatggaacgtttatttaatggtttgaaaagtgagggtgccattttaatgcctaaaacagaaatgccaccatttagagagtttgcatgggttcaagataaatttggcgtgagttttcaacttgctttaccagaaaacaaa

SEQ ID NO: 34725 - DNA, 387 bp, Staphylococcus epidermidis
atgattaaagtcgaccaacaatattttgaattgatagaagaatatagagaatgttttgatgaggaaatattttcagctaggtattcggatatattagacaaatatgattatgtcgtaggtgactatggttacgatcaattacgcttaaaaggattttataaagatagtaataaaaaggcagaaataagtaaacgattttcaagtatacaagattatatactagaatattgtaattttggttgtccttattttgtagtcagacgattgtcaccaaatgaatttattgaagaaatagatgataaagaagatatcattgataaattacatgatgttaagattcaacctactattcaagacacagaaaaacatacccaagctatagatcaa

SEQ ID NO: 34726 - DNA, 1695 bp, Staphylococcus epidermidis
atggcatatgatggcttatttactaaaaaaatgattgaatcattacagggtttagtctcaggccgaattcataaaataaatcaaccagaaaatgacacaataattattgtaattagacaaaatcgtaaaaatcatcaactacttctatcgattcatcctagtttctctcgtttacaattaactactaagaaatacgacaatccatttacaccaccaatgtttgcaagagttttccgtaaacaccttgagggaggcttcataaaagcaattcgacaggttggtaacgatagacgtatagagattgatatcgaaagtaaagatgaaattggtgatacaatatatagaactattatattggaaataatgggtaaacatagtaaccttatccttgtcgatgatcaacgtaaaatcatcgaagggtttaaacatctaactcctaacacaaatcagtacagaaccgttatgcctggcttcaaatatgaagcaccaccaaatcaaaataaaatcaatccttatgaattaacagggcaagaggtattaaaatatattgactttaatgctggaaagattgccaagcaattacttaatatatgtgagggctttagtccactaatcgctaatgaaattgtgaatcgtcgtcaatttatgactcaaaaaacattacctgatgcttttgatgaagtcatggccgaaaccaaatcggcatctactcctgtctttcataaaaatcatgaaacaggtaaagaggatttctatttcatgaaacttaatcaattctatgatgatatagttgagtatcattcacttcatgaactattggatcgcttttatgatgcacgtggtgagagagaaagagtaaaacaacgtgcaaatgatttagtcagatttgtacaacagcaactgcaaaaacaacaaaataaattgagtaaacttatcgatgagtatgaaagtgctaaaaacaaagaaactcagcaattatatggagagttgatcacagctaatatatatcgtattcaacaaggtgacgattctgttatagcgttgaattactatactggtgaagaagtaaagattccacttaaccctacaaaatcgccatcaactaacgctcaatactattataaacaatataaccgtatgaaaacacgagagcacgaattgactcatcagattaaactgactaaagagaatattgattactttgataatattgagcaacagttaaagcacattaccgttgatgatatcgatgatattcgcgacgaacttgctgaacagggattcatgaagcaaagaaaacagagtaaaaagaaaaagcagtctaaaattcaacttcaaacgtatcattctactgatggagatacgatattagtaggtaaaaataataaacaaaatgattatcttaccaataaaaaggcacataaaaatcatttatggttccatacaaaagatattccaggatctcatgttgtcatactcaatgagagtccaagcgaaacaacgattaaagaagcggcaatgctagctgggtatttctctaaagctggtagttcagctcaaattcctgtagattatacggaaattagacacgttcataaaccttctggggcaaaacctggattcgtgacatatgacaaccaaaagaccctatttgcaacacctgattatgatcatattcaacaaatgaaagaatca

SEQ ID NO: 34727 - DNA, 1455 bp, Staphylococcus epidermidis
atggcagacttaattaatattctaaaccactttgttcaggaacaacctgaagcagttgcggttagacatacaaatgatgagctaacatataagcaacttgatgaagaatcaagtaagttagcacatctattacaagatagtaaaaagccaatgattttatatggtcacatgtcaccttacatgattgttggtatgattggagcgattaaatccggttgcggttatgttcctatcgatacttctgttccaaaagaacgtgtcaatatgattattgataaagtacaaccggaaatcattttcaatacttcagatgagactttggaacagacaaatgcacaagtgcttaaggttagcgatattcaggattcacaatatccaattgtctttgatagtcaaatgaagcaaaacgatgtagtatatacaatttttacttcagggtctacgggagaacctaaaggtgtacaaattgaatatgcaagtttaaatgaattcgcagaatggatggtatctttaaataaaactggtactggtaaagaatggttaaatcaagcgccattttcgtttgatttatcagtaatggcaatctatccttgtttaacatcaggtggtactttaaatcttgttgataaagatatgatcaaaaaacctaaactattgaacgaaatgttagttcaaacaccgatgaatgtttgggtttctacgccttcttttatagaaatgtgtttattattacctaatttaaatgaacaacaatataatagcttaaagcaattctttttctgtggggaaattttatcgcataaaacagctaaagtcttagttgaaagatttccgaattcaatgatttataacacatatggaccaactgaagctactgttgcagtcacaagtatacaaatcacagaagaaattttaaatcaatataatcctttaccagttggtgtggctagacctggtacaagattatttgctactgaagaaggagaacttgtcattgaggggcaaagcgtcagtttaggttatttaaagaatgaagaaaagacagccgcagtatttaattttgaagacggtgttagaacatatcatactggggataaagctaaaattgaagatggattgtggtttattcaaggacgtattgatttccaaattaaactaaatggttatcgtatggaactagaggaaattgaaacacaattacgccagtcaaaacatgtaagagaggctgttgttgtgccggtttataaaaatggaaaggtcgtacatttaataggagcagtagtacctactgaatctgtagaagataatttagcaatgacaactcaaattaaacacgaacttaaatcacgcttaccagaatatatgattcctagaaagttcgaatggatggaacgactaccactcacattaaatggtaaattagatcgtaagaaaattgccgaggttgtaaacgga

SEQ ID NO: 34728 - DNA, 1305 bp, Staphylococcus epidermidis
atgatgaaatcagtgcgaacatatgcattagaaacaatcaatgacgtcttaaataaaggtgcttatagtaatttaaaaattaatgaggttctatctacaaataacattaatacagtagataaaaatttgttcacagaattagtatatggaacactaaaaagaaaatacacattagattatctacttaagccttttatcaaaactaaaatcaaatcatgggtacgacaattactgtggatgagtttatatcaatatttatatttagataaaatacctaaccatgctattattcatgaagcggtagatatagcaaagaaacgcggtggctatcacacagggaatatagtcaatggtatattacgaacagtaatgcgcactgaattaccaagctttgaagatatagatgatactaaaaaaagaattgcaattcaatacagtcttcccaaatggattgttgatcattgggtgacgcattttggaatagaaaaaactgaaaacattgcacaatcttttttagagcctgtagctacaaccgtgcgtgccaatatatctcgtggttctattgattcaattatctctaagttagaacaggaaggttaccatgttaaaaaagacgatatgttaccattttgtcttcatatatcaggcttgcctgtggttaattcaaacgcttttaaagaaggttatatctctattcaagataaaagttcaatgatggtagcttatgtaatgaacctagggcgtgatgataaagttttagatgcgtgtagcgcacctggtggtaaagcttgtcatatggcagaaattctgtcaccagaaggtcacgtcgatgcaacagatattcatgaacataaaataaatcttattaaacaaaatattaaaaaattgaaattgaataatatcaaggcttttcaacatgatgccacagaagtatacgataaaatgtatgataagattcttgttgatgcaccgtgtagtggtttaggtgttcttagacacaaacctgaaattaaatatagtcaatcacaaaatagtattaagtctttagtagaattacaattacaaattttagaaaatgttaaagataatattaaacctggtggtacaatagtgtattcaacatgtacaatagaacaaatggaaaacgaaaatgtcatctatacttttttaaagagacataaagattttgaatttgaaccaatccaaaatccagtaactggtgaacaagttaaaacgttacagatacttccacaagattttaattctgatggattctttattagcaagataaaaagaaaggaaagt

SEQ ID NO: 34729 - DNA, 1998 bp, Staphylococcus epidermidis
atgataggtaaagtcataaatgaacgctatactataaccgataaactcggtggtggtgggatgagtattgtctacttagctgaagattcaatacttaacagaaaagttgctattaaagcgatttcgattcctccaagtgaaaaagaagagacatttaaacgttttgaaagagaagtacataattcttctcaactttctcatgagaatatagtcagtatgattgatgtagatgaggaagatgattgtttttatattgttatggaatacatagaaggtcctactttagcggaatatatacacagtcatggtccacttagtgtagaaactgctattcagtttacagaacaaattttgagtggaatcaaacatgcgcatgacatgagaattgttcatcgagatattaaaccacagaatatattaattgataagaataaaaaattacaaatttttgattttggtattgctaaagcattgagtgaaacgtcgctgactcaaacgaatcatgttctaggaaccgttcaatatttatcacctgaacaggctaaaggcgaagctactgatgaaagtactgacatatattcaattggtattgtattatatgagatgttagttggagagccaccattcaatggagagactgcagtgagtattgctataaagcatattcaagatagcatcccaaatattacaacggataaaagaaatgatgtacctcaatcattgagtaatgtcgttttacgtgcaacagagaaagataaatatcatcgctatcatactgttcaagaaatgtgtgacgatttaacaagtgcgttacatgagaatcgtttgaatgaagaaaaatacgaactagataaaactaaaactgtaccactcactaaagatgatttgaatcataaaatctatgatgaacaaaatcaaaatgaccttaataaaaccatgcaaatacctattgttaatgattcaataaaacaacaagaatttcaatcgtctgaaccacgttattatcaaaaaagcgacaaaaaacgttctaaaatgaaaattgcaattttatcaatcatttttgtaatattattaattggtttattttcttttgtagctatggctgtttttggaaataaatatgaagaaatgcctgatcttaaagggaaaactgaaaaacaagctgaaaaggtattagatagtcatcatctaaaagtaggtgacatatcaagaaattatagtgataaatatcctgaaaaccaaattattaaaacaaatccagatagtggagaacgcgtcgaacaaggggatagaattgatatcgttctatccaaaggaccagagaaggttaagatgccaaatgttttaggtatgtcgaaaaatgatgcgctaaaaaaattaaaggctatcggatttaaagatattcacgttgagcaagcttatagtcaaacatatgaaaaaggattaatttctgaacaaagtgttgtagctaatagtgaagtttccgttaataatcatcatattacaatttatgaatcattaggtgttcgacaagtatatgtcaacaattatgaaaataagtcatacgagtcagcaaaaaaagaacttgaagataaaggatttaaagttcaagtgacaaaagaaaacaacgatgatgtcgaaaaaggtaatgtcatttctcaatctccaaaggataaaactgttgatgaaggttctactatactattagtagtttctaaaggagaaaagtctgatgaagatgatgatgaggacaaggatacaacgactaaaaatgagactgttaaagtaccgtataccggtaaaaaaaataaaagtcaaaaagtagaagtatttattcgtgatattgataacaaaggtgattcagcagttcaaacgtttaatattaaaagtgataagacaattaatattcctttaaaaattaaaaaaggaagtgacgctggctacaccataagagttgataataaaattgtagctgataaagatgtgagctatgatggc

SEQ ID NO: 34730 - DNA, 186 bp, Staphylococcus epidermidis
atgggtaaacaatgtttcgtaacaggtcgtaaagcttcgactggtaatcatcgttcacacgctttaaatgcgaataaacgcagatggaacgctaaccttcaaaaagttagaatccttgtagacggcaaacctaagaaagtttgggtttctgcacgtgctttaaaatctggtaaagttactagagtt

SEQ ID NO: 34731 - DNA, 1284 bp, Staphylococcus epidermidis
ttggcttgtcatatgtttatagcctttatctacattgttggttggttaaaatattatgaaagcttaggtgaattagagatggctcaagatcgtaagaaagtgctcgtattaggtgcaggttatgctggtttacaaactgtaactaaattgcaaaaggaactttctgctgatgcagcggaaattactttaattaataagaatgaatatcattatgaatcaacttggttgcatgaagcttctgccggtacgattaattatgaagatttattgtatcctgttgagaaaactgtcaacaaagataaagtgaattttgttgttgctgaggtaacaaaaattgatcgtaatgctaaacgcgtagaaactgataagggtgtttatgactttgatatcttagttgttgcactaggttttgttagcgaaacatttggcattgatggtatgaaagaacatgctttccaaattgagaacgttttaacttctcgtaagttgtctcgtcacattgaagataagttcgcaaattatgctgcttctaaagaaaaagatgataaagatttatctattttagttgggggagctggatttacaggtattgaatttctaggtgaattaactgatagaattcctgaattatgcagtaaatatggtgttgatcaaagtaaagtgaagttaacatgtgttgaagcagcacctaaaatgttaccgatgttctcagacgacttagttagttatgcagtaaaatatttagaagaccgtggagtagaattcaaaattgcaacacctattgtcgcttgtaatgaaaaaggtttcgttgttgaagtcaatggagaaaaacaacagttagaagctggaacttctgtatggactgctggagtgcgtggaagtcatttaatggaagaatcatttgaaggtgttaaacgtggacgcgttatcaataaacaagatttaacaattgaaggtcataatgacatcttcgttataggagattgttcagcgtttattccagctggtgaagagcgtccattaccaacaacagctcaaattgctatgcaacaaggtgagcatactgctagcaacattaaacgtttattaaatggtgaatcaacacaagatttccaatatgttaaccgtggaactgtatgttcattaggtgctaatgatggtgttggaattgtatatggtagagatatcgctggtaaaaaagcagcattcttgaagaaagttattgatactcgtgcgatttacaaacttggtggcataggattagcctttaaaaaagggaaattt

SEQ ID NO: 34732 - DNA, 1479 bp, Staphylococcus epidermidis
atgcaattttttattaatcaagatacgccaacatcaattgaaacgattgtggtgggtgtgccagatcacctcaaccaattaggtgagataaaatatcataagacgttaattaaagagcgattagaaacattaaaacaatatcatgtcatcaatagctcaatcggcaaaatatcatcaacgcttatttatattgatgaaaagcccaaaagattattaactgtaggactaggaaacttaaaaattttatcatatcaacgtttattaaaagtttggggtcagttgtttcaatatttaaaagacgttcatgtaacggattgtgaattattgttagatactttcaaatctaaatatggtaacattattgaaatttgtcaaactttaggtttacaaagtgcacaatctatctttgaatttgaccattataaatcggataaaaagcctccatatcaaggtagagtctatatacaaacgacagagcataatatagaaacgaagattaacgaaggccaacaattgggtgaatctataaactatgctcgtgaactaagtcaaatgcctccgaatattttaacaccccaatattttgccgaagaaataaaaaagcatttcgaagggagttccgttagtgtagatatcaaagatcaccgaaaaattatagatgaaggatttggattaatacatgcagtaggtaaaggttctaatcatggtccgagattaattacggtatcatactatggtgcagaagctgatgaaccacctatttcattagtgggtaagggcattacatatgattccggtggatatagtattaagtctaagataggtatgcaaactatgaaatatgatatgtgcggtgcggccaatgttattggtatggttgatgcgatctctaagcaaaagctacctgtaaatattgtaggagtgatcgcttcagctgaaaatatgattggtgaatcttcgatgaaaccagatgatgtatttactgcgcttaatggtgaaacggtagaaatgttgaatagtgatgctgaaggtagaatggttttaggtgacgcagtattctatgcaacacaatttaaaccacaactaattcttgattttgctacattaacgggtgcagcgattgtagctttaggtgatgacaaggcggctgctttccaatctcatgctgaaaatgaacttaaaaacttattaacagttgcacgtcatgtagacgaaaaagtattcgaattacctattacagagactgaaagacatttaattaaacaatcagatgtagcagatttagtcaatcatacgaacggtcaaggaaaagcattgtttgcagcagcatttatttcgcattttagtggtgacatcccacacattcactttgatatcgcgggccctgcaacaattaaaagtgctacatataaaggtccaaagggtccgacaggttacatgatacctacagttgtagagtggttacaacaaaaatataaa

SEQ ID NO: 34733 - DNA, 936 bp, Staphylococcus epidermidis
gtgagtaaaatgggtaaaatagcagttgtattccctggtcaaggtgcacaaaaagtagggatggctagtgatttatataacgaagaagaacgctcgactcgagtattaaatttagctcaagagacagtagactttgatttgttagaaacgatgtttaatgataatgatgggaaattaggagaaacagaaaatacacaacctgcactattaacacatagtattgcgttactagaatctttaaatcatttaaaagtagattatactatgggacatagcttaggagaatattcaagtttagttgctagtggtgtattagcttttgaagatgcagttagaattgtacgtaaacgtggccaacttatggctcaagcgtttcctaacggtgttggaggtatggcagcagtattaggtttggactatgatgatgttgataagatatgtcaaacgttatctacaaatgaacagttaattgaacctgctaatattaactcaccaggtcaaatcgtggtgtctggacataaacctttaattgatgaattagtagaaaagggcaaagaacttggagctaaacgcgttcttccgttagctgtttccggtccttttcactcttcaatgatgaaagttattgaagaggattttgctaatttcattaatcaatttgagtggcataatgctaattatccaattgttcagaatgttaatgcaaagggagaaaccgatgccgaagtaattaaacgcaatatggttaaacaattatatttacctgttcaatttattcaatcaacggagtggttgattaatcaaggtgtcgatcactttattgaaattggacctggaaaagtattatctgggctcatcaaaaaaattaatcgagatgtaaaaatcacttcaattcaaacacttgaagatgtgaaaggatggaataataatcatgaa

SEQ ID NO: 34734 - DNA, 732 bp, Staphylococcus epidermidis
atgaataaaagtgctttagttacaggtgcttctcgtggtataggtagaagcattgcattgcaattagcagaagaaggatataatgtagctgtcaattatgctggaagtaaagataaagcagaagcagttgttgaagaaattaaagctaaaggtgtagaaagttttgcaatacaagccaatgttgcaaaaggcgatgaagttaaagaaatgattaaagaagtggtaagtcaatttggttctgtagacgtattagttaacaatgcaggaataactaaagacaacttacttatgcgcatgaaagaacaagagtgggatgacgtgattgatacgaacttaaaaggcgtgtttaactgtattcaaaaagtaacgccacaaatgttacgtcaacgtagtggtgcaatcattaatttaactagtattgttggtgcaatgggtaatcctggacaagcaaactatgttgcaacaaaagcaggtgttattggattaactaaaactgcagcacgagaactagcatcacgaggtattacagtgaacgctgtagcacctggctttatcgtttcagatatgacaaatgctttaagtgatgatttgaaggatcaaatgttagagcaaattcctttaaaacgttttggagaagatacagatatagctaatactgttgccttcctagcttctgataaagctaaatatattacaggccaaacaattcatgttaacggcggaatgtatatg

SEQ ID NO: 34735 - DNA, 231 bp, Staphylococcus epidermidis
gtggaaaacttcgataaagtaaaagacatcatcgttgatcgtttaggcgtagatgctgacaaggtaactgaagacgcatcattcaaagatgatttaggcgctgactcacttgatatcgctgaattagtaatggaattagaagacgaatttggtactgaaattcctgatgaagaagcagaaaaaatcaacactgttggtgatgctgttaaatacatcaacagccttgaaaaa

SEQ ID NO: 34736 - DNA, 3567 bp, Staphylococcus epidermidis
atggtttatttaaaatcaattgatgccataggatttaaatcttttgccgaccataccaatgttcaatttgataaaggtgtgacagctattgttggtcctaatggaagtggtaaaagtaatattactgatgcaattaaatgggtactaggtgaacaatctgccaaatcactacgtggtgctaaaatggaagatatcattttttcaggtgctgaacatagaaaagctcaaaattttgctgaagtaaaacttaaattagataatcattcacaaaaattacaaattgattctgaggaattagttgtcacacgccgtctctatcgaagtggtgagagtgaatattatttaaataatgatcgtgcacggttaaaggatattatagatttatttctcgattcaggacttggaaaggaagcatttagtattatttctcaaggacgagtagatgaaatattgaatgcaaaaccaatcaatcgtcgacaaattattgaagaatctgctggagtacttaaatataaaaagcgtaaagctgaatcgattcaaaaacttgaccatactgaagataatcttaatcgggtcgaagatatcttatatgatttagagggacgagtggaaccgttaaaagaagaggcggccattgctaaagaatataagcaattatctaaagaaatggagcaaagtgatgtcatcgttacagtatctgacattgatcattataccgaagataatcaacgattagatgagcgtttaaatcacctaaagagtcaacaggctgagaaagaaggtcaacaagctcaaatcaatcagttactacaacgatataaaggtaaacgccaacaaaacgattatgacattgaaaagttaaattatgaattagttaaagcaactgagaattatgagcaattatcaggtaagctaaatgtattagaagaacgaaagaaaaaccaatcagaaacaaatgcaagatatgaggaagaattagataatttagaatcacaaattgattctattaaaaatgaaaaagctcaaaatgaaaaattattagccgatttgaaaaataagcaaaagcaattaaacaaggaagttcaagaattagagtcacttctttatgtatctgatgaacaacacgacgaaaaactggaagaaattaaaaatagttattatacattgatgtcagaacaatcagatgttaataatgatataagatttttagaacatacaatcaatgaaaatgaagcaaaaaaatcacgattagattcgcgtttagtagaggctttcaatcaacttaaggacattcaacaaaatattactcaaacaaacaaggcatatcaaagttctaagaaatctatgcaaaaagtagaacaaaatattcaacaattagaacgacagttgacagattctaaaagacttctttctgaatatgaaaataaactatatcaagcctatcgttataatgaaaagttaaaatcaagaattgatagtttagctactcaagaggaagattacacgtatttctttaatggtgtaaagcacattttgaaagcaaaagataaagaactaagagggattcatggtgcggttgcagaagtaattaacgttccttcagaaatgacgcaagcaattgaaacagccttaggtgcatcgttacagcacgttattgttgataatgaaaaagacggtcgtcaagcaatccagtacttgaagcaaagaggtctaggtcgtgctacttttttaccattaaacgtgattcaaccaagacatgtagctgctgagattaaagatgtagctcgtagttcacaaggatttattaatattgcatctgatgctataaatgtatctgctaaatatcaaaacatcattgaaaatttattaggtaataccatcattgtagaaaatttaaaacatgcaaatgaacttgcacgtgccattcgatatcggacaagaatagtaactttagaaggtgatgttgtaaatcctggtggttccatgacaggaggaggagcacgtaaaacaaaaagtatattgtcacaaaaagatgaattatcaacaatgcgaaatcaacttgaagattatcaacgacaaacagcagaatttgaacgtcagtttaaagaacaaaaaacacaagctgaacaattaagtgaacaatattttagtgcaagtcagcagtacaacaatttaaaagaacaagtacatcatcacgaattagaactagatagactaaaaacacaagaagcacatcttaaaaatgaacatgaagagttcgaatttgaaaaaaatgatggatatcaaagtgataaaagtaaagaaactttaaaagaaaagcaaaatcatttaactgagatacaacaacaattgaagcaactagaaaatgatattgaaagatatacacaattatcaaaagagggaaaagcttcgacacatcaaacacaacagcaactacatcaaaaacaatctgatttagctgttgttaaagagagaattaaatcgcaaaagcaagtacacgaacatttagataaacaacttagcgattcagaacgtcaaaaacttgaagtaaatgaaaaaatcaaattgtttaattcagatgaaatgatgggtgaagatgcttttgaaaagttgaaagagcaaattcagcaacaagaaaatgtaagacaaaatttaaatcaacaacttagtgagattaaacagcaacgtaaagattttaatgagaaaatcgaaatgaatgaaggtcagcttcaaaaatgtcatcaagatatactttctatagaaaatcattatcaagatattaaagcaaaacaatcaaagctagatgtattaattaatcatgcaatagatcatttaaatgacacgtatcaactcacagtagaacgtgcaagaatggaatatgattctgatgaaactattgacaatttgcgtaaaaaagtaaaattaacgaagatgtcgatcgatgaattaggtcctgtaaatttaaatgcaatagaacaatttgaagagttgaatgagcgatacacatttttaaatgagcaacgaacagatttaagagaagcaaaagaaaccttagaacaaatcattcatgaaatggataaagaagtagaaggacgttttaaaacaacatttcatgcagttcaagatcattttacgacagtgtttaagcaattatttggtggtggacaagcagaacttcgtttaactgaagatgactatttgtctgctggcgttgatatcatcgtgcaaccgccaggaaagaaattacaacatctttcattattaagcggtggtgaacgtgctttaagtgctatagcgctattgttcgccattctcaaagttcgatcagcaccttttgttatactagatgaagtagaagcggcattagatgaagctaatgtgatacgatatgctcaatatttaaatgaattatctacggaaacacaattcattgtaattacacaccggaagggaacgatggagttttctgatcgtttatatggtgtaacaatgcaagagtctggtgtttctaagttagttagcgtcaacctaaatacaatagatgaggttatgaaggaggaacaagca

SEQ ID NO: 34737 - DNA, 1224 bp, Staphylococcus epidermidis
atgagtttttttaaacgtctgaaagataaattttctagtaaaaatgaagatgatattcaaaaagacctggatgaatctgtagattcaaatgttaacagtgattcagattcaatggatccgaatgattctgatgaacaagttaaacccaaaaagaaacctaaaaaattaagtgaagctgattttgacgaagatggcttgatatcgattgaagattttgaagaaatagaagctcaaaaaattggagcaaaattcaaggccggtttggaaaaatcacgtcaaaacttccaagaacagttaaataatttaattgctcgatatagaaaagttgacgaagatttcttcgaagctctggaagaaatgcttattactgcggacgttggttttaatactgttatgaaattaactgatgagctacgtacagaagcacaaagacgtaatatacaagaaacagaagacttaagagaggttatagttgagaagattgtagaaatctatcatcaagaggacgatcattctgaagcaatgaatattgaagatggacgtttaaatgtcatactgatggttggtgtgaatggtgtcggcaaaacaacaacaattggtaaattagcttatcgttatcaacaagaaggtaaaaaagtaatgttagctgctggtgatacttttagagctggagcaattcaacaattaaacgtctggggagaacgtgttggcgttgaagttgtgagtcaaaacgaaggttctgaccctgcagcagtagtatatgatgcgattaatgcagcaaaaaataaagacgtagatattttaatttgtgacactgcaggacgcttgcaaaataaatctaatttaatgcaagagttagataaaatgaaacgtgtgattaatcgagcaatacctgatgccccccatgaagctttattatgcttagatgcaacaactggtcaaaatgcactttcacaagcacgttcatttaaggaagttacaaatgtctcaggtatagttttaactaaattagacggtactgctaaagggggtattgtattagcaattcgaaatgagttacacattccagttaaatatgttggtttaggtgaaaaaatggatgacttacaaccgtttagtcctgaaagctatgtatatggattatttgctgatatgatagaacaaaatgaagatattcctgaagaaatctctagaaattcatccgttgaatctgaagaaggtaac

SEQ ID NO: 34738 - DNA, 330 bp, Staphylococcus epidermidis
atgggacaaaatgatttagttaaaacattgcgtatgaattatctatttgatttttatcaaagtttgcttacaaataaacagaaaaattatctcgaattattttatttacaagattattctttaagtgaaattgctgatacatttgaagtgagtagacaagcagtttatgataatataagaagaactggcgatttagtagaagattatgaatcgaaattacgactataccaaagattcgagaaacgtcgtgaattatataacttaatgaaacaatcacttaatcaacctgagttgcttaaacaatatatcactcaattagaagaattagag

SEQ ID NO: 34739 - DNA, 1365 bp, Staphylococcus epidermidis
atggcatttgaaggattatccgatcgcttacaagccacgatgcaaaaaatgcgtggtaaagggaaagtaacagaagcagacattaaaacgatgatgcgtgaagtgagattagcgttattggaagccgatgttaacttcaaagttgttaaggaatttgttaagactgtttcagaacgtgcgctaggttctgatgtcatgcaatctttaacacctggccaacaggttattaaaatcgtacaagaagaacttactagcttaatgggtggagaaaatacatccattaagatggcaaacaaaccaccaactgttgttatgatggtaggcttacaaggtgcaggtaaaacgacgacagcaggtaagttggcattattaatgcgtaaaaaatataacaagaaacctttacttgtggcaggagatatttatcgtccagctgctattgatcaattacaaacagtaggtaaacaaattgatatccctgtgtatagtgaaggtgatcaagtatcaccacaacaaattgttgaaaatgctttaaaacatgctaaagaagaacatctagatttcgttatcattgatacagctggtcgtttgcatattgatgaaacacttatgaatgagcttcaagaagttaaagaaatttctaaaccagatgaaattatgcttgttgttgatgcaatgacaggtcaagatgctgtgaatgtggcacaatcatttgatgaacaattagatgtttcaggtgtaacattgactaaattagatggtgatacacgtggtggtgcagcactttcaatccgttccgttacccaaaaacctattaaatttgtaggtatgagtgagaaattggatggtttagaattattccaccctgaacgaatggcttcgcgtattttaggtatgggtgatgttttaagtctcattgaaaaagcgcaacaagatgtagatcaagaaaaggctaaagatctagagaagaagatgcgagagtcatcatttacattagatgatttcttagaacagttagatcaagttaagaatttaggtcctttagatgatataatgaaaatgattcctggtatgaataaaatgaaaggtttagataagcttaatatgagtgataaacaaattgatcatattaaagcgattatacaatctatgacacctaaagagcgttcaaaccctgaaacattaaatgtatcgcgtaaaaaacgtattgcaaaaggatcaggccgatctttacaagaagttaatcgactaatgaaacaatttaatgatatgaagaaaatgatgaaacaatttactggtggcggtaaaggtaaaaaagctaaacgaaaccaaatgcaaaatatgttaaagggtatgaacttaccgttt

SEQ ID NO: 34740 - DNA, 273 bp, Staphylococcus epidermidis
atggcagttaaaattcgtttaactcgtttaggttctaaaagaaacccattctatcgtatcgtagttgcagatgcacgttcaccacgtgatggtcgtatcattgagcaattaggtacttacaacccagcacacgttaatgcaccagaagttaaaatcgacgaagaattagctttaaaatggttacacgacggtgctaaaccaactgatacagttcacaatatcttatctagagaaggtattttgaaaaaatttgatgaacaaaagaatgctaaa

SEQ ID NO: 34741 - DNA, 501 bp, Staphylococcus epidermidis
atggaagtagaggttggacaaatagtcaatacccatggtattaaaggggaagtaaaggtgaaatccaactctgattttactgaaacacgatttcaacctggtgaacaattacttgtaaaacataataatactgaaattgtttatacggtcgattcttatcgtatacataaagggtttcacatgttaaggtttgaaggaatcaacaacataaatgatattgaacatttgaaaggtgattatatttatcaagaacgtgatcaccaagatatagaattaggagagcatgaatattattattcggatataattggttgtacagtttttaaagatgatgatacgccaattggccgggtgattaatatttttgaaacaggtgctaatgacgtttggattgtgaaaggtgaaaaagagtatctcattccttatattgaagatgttgtgaaggatattgatatagaaaataaaacgattaaaattacaccgatggaaggattgttagat

SEQ ID NO: 34742 - DNA, 735 bp, Staphylococcus epidermidis
atgaagatagattatttaacgctatttcctgaaatgtttgaaggtgttttaaaccactcaatactaaaacgtgcgcaagataagggaatcatcaatgttaatactatcaatttccgagattattctattaataagcataatcaagttgatgattacccatttggtggtggccaaggtatggtattaaagcctgaacctgtttttaatgctatggaagacataaatcgtaatgaacatactcgagtgatacttatgtgtccacaaggtcgtccctttactcaagagattgcacaagaattaagtgaagcaaaacatattgtctttatttgcggacactatgaaggatatgatgagcgcatacgtaagcatcttgtaactgacgaaatatcaatgggtgattatgtcctaactggtggagagttaccagcaatgacgatgacggatgcaatagtgaggcttattccaggcgtcttaggtaatcaagcatcacatcaagatgattcattttcagatggattgttagaatttcctcaatatacacgtcctcgtgaatataaaaatatgagcgtacctgaagtattattatctggcaatcatgcgcacattgatcagtggagacatgagcaaaagctcattcgtacttatgaaaagcgaccagatttattagaacaatatccattaactgaaaaagatagagaaattttagaaacctataaaaagaaattgaaaaatgat

SEQ ID NO: 34743 - DNA, 348 bp, Staphylococcus epidermidis
atgagtaatcataagttaatcgaagcagtaactaaatcacaattacgtactgatttacccactttccgttcaggagacactttacgtgtacacgtaagaatcgttgaaggttctcgcgaacgtatccaagttttcgaaggtgttgtaattaaacgccgtggtggaggaatttcagaaactttcacagttcgtaaaatttcttctggtgtaggtgtggaaagaactttcccattacacacgcctaaaatcgaaaaaattgaagttaaacgtcgtggtaaagtacgtcgtgctaaattatattacctacgtagtttacgtggtaaagctgctagaattcaagaaattcgc

SEQ ID NO: 34744 - DNA, 861 bp, Staphylococcus epidermidis
atggcgatacaatggtatccaggtcatatggctaaagccaaaagacaagttagtgaacaactgaaaaaggtagatgtagtttttgaactcgtcgatgcacgtattccatacagttcgagaaaccctatgattgatgatgtcattaaacaaaaacctcgagtagtaattttaaataaaaaagatatgacgaatttaaaagaattagaaaaatgggaaacttattttaaagatgaaggtttctatccggtagctgtagatgcaaaacatggcaagaatcttaaaaatgttgaagttgaagctataaaagcaactcaagaaaaatttgatcgtgaaaaagctaaaggtttaaaacctagagcgataagagctatgattgtaggcattcctaatgtaggaaaatcaacacttatcaataagttagcaaaacgtagtatcgccgaaactggaaataaaccaggagtaacaaaacagcaacaatggattaaagttggaaagtctcttcaattactagatacaccaggtattttatggcctaaattcgaagatgaagaagtcggtaaaaaattaagtttaactggtgcaattaaggatagtatcgttcatttagatgaggtagctatttatggtttgaattttatgattaaacatgatgtttcagctttaaagagacattataatattgatacacatgaagacgctgagatactcgattggtttgatgcaattggaagaagaaggggattgttacaaaaaggaaatgaagtagattatgaatctgtcattgagttgatcatcaatgatatgagaaatgcaaaaattggaacttattgttttgatattttaaaagaaatgaagagtgaa

SEQ ID NO: 34745 - DNA, 780 bp, Staphylococcus epidermidis
gtgaatgatagtatgtctctaacaattaaagaaatcaaagaaaaactatctcgaattgaaacgttggaagagttacataaacatgaagcaaataatgattcacgtaaaggtgttataaatgcgattaagtctagggaaaaaaatattcttaagcaacaagcattagaagagcactatttatccatgaatcaatacgaaaacaacattatgtcctctaacagggatgcattaatttgtggaattgatgaggtagggcgtgggcccttggctggaccagttgtggcttgtgcagttattttagagaagaatcatcattatattggtttagatgactctaaaaaagtgtctcccaaaaatagagcacgacttaatcaaaatttaaaagaaaatgtctatcaatatgcatatggcatagcgtcctcagttgaaatagatgaattgaacatttatcgggcaactcaattagctatgctacgtgctataaatcaattagatgttacacctacacatttattaatagacgcaatgacactagatattgatattccacaaacctcaattattaaaggtgatgctaaaagtgtgtctatcgcagcagcaagtatcatggctaaagaataccgtgatcaatatatgagacaactatctaaacagtttccagaatatggttttgataaaaatgcaggttatggaactaagcaacatttaaaggctattgatcaagtgggcataatcaatgaacatcgtcaatcatttgaaccaattaaatcaatgatgaaa

SEQ ID NO: 34746 - DNA, 906 bp, Staphylococcus epidermidis
atgagtgtatttattgataaaaatacgaaagtaatggtacaaggtatcacagggtctactgcccttttccatacaaaacaaatgcttgattatgggacacaaattgttgcaggggtaacacctggtaaaggtggacaagttgtagaaggtgttccagtatataacactgttgaagaagctaaaaatgaaacaggagctaatgtatctgttgtatacgtaccagcaccattcgctgctgattcaattattgaagcagctgatgccgatttagacatggttatttgtattactgaacatatacctgttgttgatatggttaaagtaaaaagatatttacaaggtcgtaaaacacgtttagtaggaccaaactgtcctggtgtgataactgccgacgagtgtaaaatcggtattatgccgggatatatccataaaaaaggccatgtcggtgtcgtgtctcgttctggtacattaacgtatgaggcagtgcatcaattaactgaagaaggtatcggtcaaacaactgctgtaggtatcggcggtgatccagtaaatgggactaactttattgatgttttaaaggcgttcaatgaagattctgaaactaaagccgttgtaatgattggagaaattggtggtaccgcagaagaagaagcggcacaatggattaaagaaaatatgaacaaacctgtagtaggttttatcggcggtcagacagcacctccaggtaaacgtatgggtcatgctggagctattatttcaggaggtaagggtacagcatctgaaaagattaaaacattaaacgattgtggtgttgaaactgcagatacaccttctgaaataggaacaacccttattgatgcagctaaaaaagcaggcatttatgaagagttattaactattaaaaaa

SEQ ID NO: 34747 - DNA, 2067 bp, Staphylococcus epidermidis
ttggcagataatttagtcattgttgaatcgcctgcaaaagctaaaaccattgaaaaatatttaggcaaaagatataaagttattgcttcaatgggacatgttcgtgacttaccaagaagtcaaatgggtgtcgacactgaagataactatgaaccaaaatatattacaattcgtggcaaaggtcctgtagttaaagatttaaaaaaacatgcgaaaaaagcaaaaaaaatatttttagctagtgaccctgaccgtgaaggtgaagcgattgcttggcatttatcaaaaattttagaattagaagatagcaaagaaaatagagtagtatttaatgaaattacaaaagatgctgttaaagatagttttaagcatcctcgtggtattgaaatggatttagttgacgcgcaacaagcacgtcgtattttagatagactcgttggttataatatttctccagtattatggaagaaagttaaaaaagggctgtctgctgggagagttcagtcagttgctttacgtttagtcattgatcgtgaaaatgaaattcgtaattttaaacctgaagagtattggtccattgaaggtgaatttagatacaagaaatctaaatttacagctaaatttctacactataaaaataaaccttataagctaaacaacaaagacgatgttcaaaggattactgaagcattaaatggtgatcaatttgaaatcacaaatgtgaatcgtaaagaaaaaacacgttatcctgctcatccatttactacatcaaccttacaacaagaagctgcacgtaaactaaattttaaagcacgcaagacaatgatgttagcacaacaattatacgaaggtattgacttaaagcgtcaaggtacagtaggtttaattacgtatatgcgtaccgattctactcgtatatcaacttctgcaaaatcagaagcgcagcaatatataaatgataaatatggtgaacagtacgtgtctcagcgtaaatcatcgggtaaacagggcgatcaagatgctcacgaagctattagacctactagtacaatgcgaactcctgatgacatgaaagcttttcttactagagatcaacaccgtctatacaaattaatttgggaaagatttgtagcaagtcagatggctccagctattttggatacagtagctttagatgtaactcaaaacgacattaaatttagagctaatggtcaaactattaaatttaaaggttttatgacactatatgtagaagcaaaagatgataaagagaatgataaagaaaataagcttcctcaactagataaaggagataaggtaactgcgacaaagattgaaccggcacaacactttacacaacctcctcctcgttatactgaggcgcgtttagttaaaacgcttgaggaacttaaaattggaagaccttcaacatatgctccaaccattgatacgattcaaaagcggaactacgtcaagttagaaagtaaacgcttcatcccaactgaattaggagaaattgtttatgagcaagttaaagaatacttcccagaaattattgatgtagaattcactgtaaacatggaaacattacttgataaaattgccgaaggtgacatgaattggcgtaaagtaataggagacttctacaacagttttaaacaagatgttgaacgcgcagaatctgaaatggaaaagattgagattaaagacgagccagctggtgaagattgtgaagtctgtggttctccaatggttattaaaatgggaagatatggtaagtttatggcatgttcgaactttccggactgtcgtaacaccaaagcaattgtcaaaacgattggtgtcacatgtccgaagtgtaatgaaggagatgtcgtagaacgtaaatcaaagaaaaatagaattttctatggttgttctagatatccagaatgtgattttatttcttgggataaacctgttggaagagattgtcctaagtgtcatcattaccttgtgaacaagaaaaaaggtaaaagtagtcaagttgtgtgctccaactgtgattatgaagaagaagttcaaaaa

SEQ ID NO: 34748 - DNA, 1329 bp, Staphylococcus epidermidis
atgagtgattttaggaggggcaaaatgacgcaaaaagtaaacgttgtaggagctggtttagctggctctgaagctgcatatcaattagctcaacgtggaattaaagtgaatttaattgagatgcgtccagttaaacagacaccggcgcaccatacagataaatttgctgaattggtatgttcaaattcattgagaggtaatgcacttacaaatgctgttggtgttcttaaagaggaaatgagacatttagactcgttaattatcacatcagcagataaagcacgtgtgccagcgggtggtgctttagcagtggatagacatgattttgctggctatattacagataccttaagaaaccaccctaacatcactgtattaaatgaagaagttaatcatataccagaaggttatacgattattgcaactggccctctaactactgagcatttagctcaagaaattgttgatattactggtaaagatcaattgtatttttacgatgctgccgcaccaataatagaaaaagattcaattaatatggataaagtatatttgaaatcacgttatgataaaggtgaagcagcgtatcttaattgtcctatgactgaagaagagtttaaccggttttatgatgcagtattagaagctgaagttgcaccagtcaatgagtttgaaaaagaaaaatattttgaagggtgtatgccttttgaagtcatggctgaaagagggcgaaaaactttgttatttggtccgatgaaacctgttggacttgaagatcctaagactgggaaacgcccttatgcagttgttcaattaagacaagatgatgcagctggaacattatataatattgttggctttcaaacacatttaaaatggggtgcgcaaaaagaagtcattcgtttaattccaggattagaaaatgttgatattgtaagatatggtgtgatgcaccgaaatacctttattaattcacctgatgttttaaacgaaaaatatgaattaaaaggacatgataatttatattttgctggacaaatgactggcgttgaaggttatgttgaaagtgctgccagtggattagttgcaggtattaatcttgcgcataaaattttagacaaaggggaagttattttccctagagagacaatgataggtagtatggcttactacatatcacatgccaaaaatgagaagaattttcaacctatgaatgccaattttggtcttttaccatctctcgaaaaacgtattaaagataaaaaagaaagatatgaaacacaagccaaaagagcgttagagtatttagataattacaaacaaacgctg

SEQ ID NO: 34749 - DNA, 888 bp, Staphylococcus epidermidis
ttggataaaatccaagaaacatttttatatatgttaaaggttgaaagaaacttttcagagtatacgttaaaatcttatcatgatgatttagttcaatttaacaactttttagaaagagaacatttacaacttgagacttttgaatataaagatgctagaaactatttggcttttttatattctaatcaattaaaaagaactacggtgtcaagaaagatatcaactttacgtaccttctatgaattttggatgactcaagataattcaattattaatccctttgttcaactagtgcatcctaaaaaagagaagtatttacctcaattcttttatgaagaagaaatggaagcactttttcaaactgtagagcatgataataaaaaaggcatacgagacaaagttattattgaattgttatatgcaacaggaatacgtgtgtctgaattaataaatattaaactaaaagatatagatatgaacttaccaggtgtaaaagttttaggtaaaggaaataaggaaaggtttatcccttttggagagttctgtagacagagtatagaaagatacttagaagaattccaacctaaacaattagccaatcatgattatttaattgtaaatatgaaaggtgatcctatcaccgaaagaggagtaagatatgtacttaatgatgtcgttaaaagaaccgctggcgtcaatgacatacatcctcataaattaagacatacttttgctacacatttattaaatcaaggtgctgatttaaggactgtacaatctttacttggtcacgtcaatttatcgactactggacgttatacacatgtttcgaatcaacaactgagaaaggtgtatttaaacgcacatcctcgagcaaaaaaaggagag

SEQ ID NO: 34750 - DNA, 540 bp, Staphylococcus epidermidis
atggataattctttacacgctacaacaatttatgctgtacgccataatggtgaagcagctatggctggtgatggtcaagtcacattaggtcaacaagttattatgaaacaaactgctagaaaagtaagacgtttatacgaaggaaaagtattggctggttttgcaggtagtgttgctgacgccttcacacttttcgaaaaatttgagacaaagcttcagcaatttagtggtaatttagagcgcgcagctgttgaactagcacaagaatggcgtggagataaacaattacgacaattagaggcgatgcttatcgtaatgaataaagatgccatacttattgttagtggtacaggtgaggttattgcacctgatgatgatttaattgccattgggtcaggtggtaactatgcacttagcgcaggtcgagcactaaaaagacatgcagcacaactttctgctagtgaaatggcatacgaaagtttaaaagttgcagctgatatttgtgtgtttacaaatgacaatataattgtagaaacgcta

SEQ ID NO: 34751 - DNA, 786 bp, Staphylococcus epidermidis
atggcagtaatttctatgaaacaattacttgaagccggtgttcacttcggtcaccaaacacgccgttggaacccaaaaatgaaaaaatatatcttcactgaaagaaatggtatttatatcattgatttacaaaaaacagtgaaaaaagttgaagaagcatacaactttgtaaaacaaatctctgaagaaggcggaaaagtcttattcgtaggtacaaaaaaacaagcgcaagaatcagttaaagctgaggcagagcgtgctggtcaattctacgttaaccaaagatggttaggtgggattttaactaactacaaaacaatctcaaaacgaattaaacgtatttctgaaattgaaaaaatggaagaagacggattatttgaagtattacctaaaaaagaagttgttgaacttaaaaaagaatacgaccgtttaattaagttcttaggcggtattcgcgatatgaaatcaatgcctcaagcattattcgttgttgatcctcgtaaagagcgcaacgctattgctgaagctcgcaaactaaatattcctatcgtaggtattgttgacactaactgtgatcctgatgaaattgattacgttatcccagcaaacgatgatgctattcgtgccgttaaattattaactggtaaaatggcagacgctatcttagaaggtcaacaaggtgtatctaatgaagaagtagctgcagaacaaaacatcaatttagatgacaaagaagaatctgaacaagcagaaacaactgaagaaaacacttctgttgaatcaaac

SEQ ID NO: 34752 - DNA, 876 bp, Staphylococcus epidermidis
atggcaatttcagcaaaacttgttaaagaattacgtgaaaaaactggcgcaggaatgatggattgtaaaaaagcgctaactgaaactgatggtgacatcgataaagcgattgactacttacgtgaaaaaggtattgcaaaagcagctaaaaaagctgaccgtatcgcagcagaaggacttgtacacgttgaagtaaaagataatgaagctgcaatcgttgagattaattcagaaacagacttcgtagcacgtaacgaaggtttccaagaattagttaaagaaattgctaaccatattttagatagcaaggtagaaacagtagacgctttgatggaatctaaattatctagcggtaaaactgttgatgaaagaatgaaagaagctatctcaacaattggtgaaaaattaagtatccgtcgtttctctatcagaacaaaaactgataatgatgcatttggtgcatatttacacatgggtggacgtattggtgtgttaactgtagtggaaggtactactgatgaagaagctgctaaagacgtagcaatgcacattgcggcaatcaaccctaagtatgtttcttctgaacaagtaagcgaagaagaaatcaatcatgaaagagaagtattaaaacaacaagcattaaacgaaggtaaaccagagaaaatcgttgaaaaaatggttgaaggtcgtttacgtaaatatttacaagaaatttgtgctgtagatcaaaacttcgttaaaaatccagacgaaactgttgaagctttcttaaaagctaaaggtggtaaacttactgatttcgttcgttatgaagttggagaaggtatggaaaaacgtgaagaaaactttgctgaagaagttaaaggacaaatgaaa

SEQ ID NO: 34753 - DNA, 720 bp, Staphylococcus epidermidis
atggcacaaacttctaaatataaacgtgtagtattaaaattgagtggcgaagctttagcaggtgataaaggattcggcataaatcctatcattatcaaaagcgttgcacagcaagttgctgaagttgccaaaatggattgtgaaattgctgtcattgtcggcggtggaaatatttggagaggcaaaactggtagcgacctaggtatggatcgtggtacggccgattacatggggatgcttgctactgttatgaatgctttggcattacaagacagtttagaacaattagattgtgatacacgtgttttaacttctattgaaatgaaacaagttgctgaaccatatattcgtcgacgtgcaattagacatttggagaaaaaacgtgttgttatatttgccgctggaattggtaatccttacttctcaactgacacaactgctgctttacgtgcggctgaagtagaagcagatgtaattttaatgggtaaaaataatgtagatggtgtttattcagctgatccaaaagttgatgcaaatgcaattaaatatgaacatttgacacatattcaaatgcttcaagaaggtttacaagtgatggattcaacagcttcatcgttctgcatggataataatattccgttaaatgttttctctattatggaagaaggtaatattaagcgtgctgtaatgggtgaaaaaatcggaacattaattacaaaa

SEQ ID NO: 34754 - DNA, 552 bp, Staphylococcus epidermidis
atgagtgacataatcaaagatacaaagtctagaatgcaaaaatcaattgataacttatctcgtgaacttgctaacattagtgctggtagagcaaactctaatttacttaatggtgttacagttgactactatggtgcacctacaccagtgcaacaattagcaagtatcaatgtgcctgaagcacgtctattagttatttcaccatatgataagtcatcagttgctgatattgaaaaagcaattatcgcggctaatcttggggttaatccaacgagtgatggtgaggttattcgtatctctgtaccagctttaactgaagaaagacgtaaagaattagttaaagaagttaaaaaaattggtgaagatgctaaagtctcaattagaaatattcgtcgtgatattaacgatcagcttaaaaaagacgaaaaaaatggtgacattactgaagacgacttaagaagtcaaactgatgatgtacaaaaagctacagataattcgattaaagaaatagatcaattggttgccgacaaagaaaaagatattatgtcagta

SEQ ID NO: 34755 - DNA, 768 bp, Staphylococcus epidermidis
atgtttaaaaagctgaaaaataaaaataaaactgagacaaaccataataatgacttagacatacataatatacctgaacatgtggctattatcatggatggaaatgggcgttgggcaaaaaaacgtaaaatgcctagaattaaaggccattatgaaggtatgcaaacaatcaaaaaaattactcgcgaagcgagtgatataggtattaagtatttaacattatacgcattttcaacagagaattggtctagacctgaaagtgaagttaattacattatgaatcttccagtgaatttccttaaaacatttctaccagaattaattgaaaagaatgttaaaattgaaacaatagggttttatgaaggtttaccacaatctacaattgatgctattgattttgctaaagctaagactcagcacaatactgggttaactcttgtgtttgctataaattatggtggacgagctgagattattcagagtatgaaagcaatatataacgaattacaattaaacggacaaggatctgaagtgattgatgaggcgttaataaagcgtcatttaatgactcatagttatccagatccagacttattaatacgcacttcaggagaacaaagaataagcaatttcttaatatggcaagcttcatatagtgaatttatttttaatgaaaagctatggccagattttgatgaaaaagagttaagagagtgtttgaaaatatatcaatcacgccaaagacgttttggaggattaagtgaggag

SEQ ID NO: 34756 - DNA, 780 bp, Staphylococcus epidermidis
atgaaagtaagaacattaaccgcgattatagccttattaatattcttgcccatcttgctcaaaggtggcttaatattaatgcttttcgcattcttattagctttgatagccttaaaagaactacttaatatgaatatgatcaaatttttatctatacctggtctgattagtgctttagccctaattattatcatgttacctcaagatgcaggtgaatgggttcaagttatccaacttaaaggtttaattgctatgagtttcatagttttaagttatacagtgctatctaaaaacagatttagttttatggatgctgcattttgtttgatgtctgtagcatacgtaggaattggcttcatgtatttttatgagacacgttctgagggcttgagatatattttatttgcatttttaatagtttggctaacagatacgggtgcttatatttttggtcgccttatgggtaaacataagttatggccagtcattagccctaataaaacaattgaaggtttctttggtggtattttatgtagcattttagtaccattagtgatgcaaatgtttgtagatttacatatgaatatttggcttttactattagtcacaattgttttaagtatgtttggtcaattaggtgatttagtagaatctgggtttaaacgtcattttggtgttaaagattcaggacgtatactaccaggacatggtggtatattagatagatttgatagcttcatgtttgtattaccgctattaaatattttactgatacaaact

SEQ ID NO: 34757 - DNA, 1701 bp, Staphylococcus epidermidis
atgaaacaatctaaagtatttataccaacgatgagagaagtccctgcagaggcggaagcattaagccatcgtttattattaaaagcagggttaattaaacagagtacaagtggtatatatagttacttaccacttgctacacgtgtactaaataatatatctaaaatcatacgtgaagaaatggaaagtatagatgctgtagaaattcttatgccagctttacaacaagcagaattatgggaagagtcaggacgttggagtgcatatggtccagaactaatgcgtttaaaagacagaaacggacgtgaatttgcattaggacctactcatgaggaagtagtcacttctttagtaagagatgaattaaaatcatataaacagttaccccttactttatttcaaattcaatccaaatatagagatgagaaaagaccacgctttggattattaagaggacgcgaatttcttatgaaagatgcatattccttccattcagatgaagcttcattagatgcaacttatcaagatatgtatcaagcatatagtcgcatattcaaacgtgtaggcatcaatgcaagaccggttgtggcagattcaggtgcaatagggggaagtcatacacacgagtttatggcattgagtgaaattggggaagatacaatagtttatagtaatgagagtgactatgcagcgaatattgaaaaggctgaagttgtttatcatccttctcataagcattctgcacttgcggaattgactaaagttgagacgcccaatgttaaaacagctcaagaagttgcagaatatttaaagagaccattagatgaaattgtaaaaactatgatctttaaaatagatggcgaatttattatgtttctagttcgtggacatcatgaattaaatgaagtgaaattaaaatcatatttcggcacggaacatgttgaaatggctactccagatgaaattgttaatcttgtagatgccaatccggggtctcttggtcctatttttgataaagatattaaaatttatgccgataattacttacaagatttaaataactttgttgtaggagctaatgaagatcattatcactatataaatgtcaatattggtagagactttgatgtaacagaatacggtgactttagattcattacacaaggtgagatgttaagtgatggctcgggagtagcacaatttgctgaaggcattgaagtaggacaagttttcaaattagggacaaaatattctgaatcaatgaatgcaacttttctagataatcagggaaaagctcaaccactcattatgggctgttatggtattggagtatcaagaacattaagtgcaattgttgaacaaaacaatgacgagaatggaattatttggccaaaatcagtaacgcctttcgatatccatctaattactatcaatcctaaaaaggatgatcaacgtactttaggtgatcaactttatcaaaaattaatggattcatacgatgttttatatgatgaccgaaaagaacgtgctggtgttaaatttaatgattcagacctaattgggttaccggtacgagttgttgttggtaaaagagctgaagaaggtattgttgaggtaaaacaacgcattaacggtttaagtgaagaagtgcaaattgatgaattagagtattacttacaagaattatttaagaatattaag

SEQ ID NO: 34758 - DNA, 4314 bp, Staphylococcus epidermidis
ttggcaatgacaaatcgagaaaagtttaaagtgcttgccgatcaaataaaaatatcaaatcaactagaacaagatattcttgaacaaggtgaactcactcgtatagatgtttcaaataaaaacagaacatggactttccaaatatcactcccacattttttatctcatgaagattatcttctttttacacatgcaattgaagaagaatttaaagaaatagctacagtagcaattgatttttcaattaaagataccaacaatcaagatgagtttgctttaaaatatttcggacattgtattgatcaaacacgattgtcgccaaaagtgaaaggtcaattgaaacaaaaaaaactcattatgagtggaaatgttttaaaagtcttagtttcaaatgacattgagagaaatcattttgataaggcatgtaatggtagtttggttaaagcatttagacagtgtggctttgaaattgataaagtcgtttttgaaacagattcaacaaatcacgatgatgaccttgcatcgttagaagcacatattcaacaagaagatgaacaaagtgcaagagaagcaactgaaaaattagaaaaaatgaaagcagaaaaagcgaaacaacaagataataatgaaagtacagtggaaaaatgtcagattggaaaaccaattcagattgaaaatataaaaccaattgaatcaattattgaagaagaattcaaagtagctattgaaggtgttatatttgatattaacctaaaagaacttaaaagtggacgtcatatagttgagcttaaagttactgattacacagattcacttgtattaaaaatgtttacaagaaaaaataaagatgacttggaccactttaaggcacttagtgttggtaaatgggttagagctcaaggtcgtattgaagaagatacttttgttagggatcttgtcatgatgatgtcagatattgaagaaattaaaaagacacctaaacaagataaagcagaagataagcgtgtagagtttcatttacatacgtctatgagtcaaatggatggtattcctaatattagtgcatatgttgaacaagctgctaaatgggggcaccaagctttagcagtaacagatcacaacgtagtacaagcttttcctgatgcacataatgctgccgaaaaacatggtattaagatgatttatggtatggaaggtatgctagtagacgatggtgttcctatagcttataaaccaacagaccgtaatttaaaagatgcaacatatgtggtgtttgacgtagagacaacaggtctttctaatcaatatgataaaattattgaattagctgcagtaaaagtgcataacggtgaaattatagataagtttgaacgttttagtaatccacacgaaagattatctgaaaccattatcaaccttacacatatcactgatgatatgttaactgatgctcccgaaattgaagaagtgttaactgaatttaaagagtgggttggagatgctatatttgtagctcataatgcttcatttgatatgggatttattgacacaggatatgaaaggttaggctttggaccttctacaaacggtgtaattgatacacttgagctttcacgtacaattaataccgaatatgggaaacatggtttgaatttccttgccaaaaaatatggtgtcgaattaacgcaacatcatagagcgatttatgatacagaagcaacagcttatatttttataaaaatggttcaacaaatgaaagaactaggtgtgaacaaccatctagaaattaataaaaaattaactaatgaagatgcatataaaagagctcgtccatctcacgttacactcattgttcaaaatcaagaaggtcttaaaaatttatttaaaatagttagtgcttcattagttaagtattattaccgtacgccaagaattccacgttctcttttaaatgaatatcgagaagggatcttgattggtacagcttgtgatgagggtgaattattcacagcagtaatgcagaaggatcagtcggaagtagaaaaaatagcaaagttctatgattttatagaagttcaaccgcctgcgctttatcaagatttaatggatagagaattaatacgagataatgaaacgttaacacaaatttacaagcgattaatagatgctggtaaaagcgctaatatcccagtgattgctactggtaacgcgcattatctatatgaacatgatgctatagccagaaaaattttaattgcatcccaaccagggaatccattaaatcgttcaacattaccagaagctcactttagaaccactgatgaaatgttagatgattttcacttcttaggtgaagaaaaagcatatgaaatcgttgtaacaaatacaaatgagctcgctaataaaattgaaaaagtggttcctataaaagataaactatttacgccaagaatggatggggctaatgaagaaattcgtgagttgagttattctaatgcgaaaaaactatatggtgaagatttaccacaaattgttatagatcgccttgaaaaggaattagatagtattattggtaatggcttttctgttatttacctcatatctcaacgtttggtgaagaaatcgctagatgatggttatttagttggatcgcgtggttcagttggttctagtttcgtagcaacaatgactgaaattacagaagttaatccgcttccaccacactacatttgttcacattgtaagacaagtgagttctttgatgatggttcggttggatctggattcgatttaccagataaaaaatgtcctacttgtggtaatgaattaattaaagaaggacaagatatcccttttgagacattccttggatttaaaggagataaagttccagatattgatttgaactttagtggtgaatatcaacctaacgctcataattacacaaaagtattgtttggtgaagataaagtatttcgtgctggaacaataggtactgttgctgaaaaaacagcttttggtttcgtaaaaggttacttaaatgatcaaggtattcacaaacgtggtgctgaaattgatcggttggttaaaggttgtacaggggtcaaacgtacaactggtcaacatcctggaggaatcattgttgtaccggattacatggatatttatgattttacaccgattcaattcccagcagacgaccaaagtgcagcgtggatgacaacccatttcgacttccattcaatacacgataatgtcttaaaattagatatattaggacatgatgacccaacgatgattcgtatgttacaagacttatcaggaattgaccccaaaactataccagtagatgataaagaaacaatgcaaatatttagtggtcctgagagtttaggtgttacagaagacgaaatattatgtaagacaggtacatttggtgtaccagaatttggtactggatttgtacgtcaaatgcttgaagatactaagccaacgacattctcagaattagttcaaatttcaggtttatctcatggtacggacgtttggttaggtaatgcacaagagttaattcgtcaagggatatgtgacttatctagtgtgataggctgtcgtgatgatatcatggtatatctgatgtatgctggacttgaaccgtcaatggcttttaaaacgatggaatttgtacgtaaaggtcgtggcttaacagatgaaatggttgaagcgatgaaggaaaataacgtgccagattggtatttagattcttgtcgtaaaattaaatatatgttccctaaagctcatgccgctgcttatgtactgatggctgtaagaattgcatactttaaagtacatcatccactatattattatgcagcatactttaccataagagcttccgattttgaccttataacaatgattaaagataaaacgagtattcgtaatacagttaaagatatgtattcacgatatatggatttagggaaaaaagagaaagatgtattaactgtattagaaataatgaatgaaatggcgcatcgaggttttcgattgcaaccgattagtttagaaaaaagccaagcttttgacttcatcattgaaggggatacattgattcctccattcatttcagtgccaggacttggagaaaacgttgcacaaagaattgttgaagcgagagaagagggaccatttttatccaaagaagatttaaataaaaaagccggcttatctcaaaaggttattgactatttagatgaattaggctcattgccagatttacctgacaaggcacaattgtcgatatttgatatg

SEQ ID NO: 34759 - DNA, 1221 bp, Staphylococcus epidermidis
gtgtcaagtaatgaattattattagctactgaatatttagaaaaggaaaagaaaattcctagagaagttttaattgatgcaattgaagcagctttaattactgcgtacaagaaaaactatgatagtgccagaaatgtaagagtagaattaaatatggacgaaggttcatttagagtgattgcacgtaaagaagtcgtagaagaagtgtttgatgacagagatgaagttgatttaagtactgctttagtcaaaaatcctgcctatgaagtaggagatatttatgaacaagatgtaacaccgaaagacttcggacgtgtaggagctcaagcagctaagcaagctgtgatgcaacgacttagagacgcagaaagagaaattttatatgatgaatttatcgataaagaagaagatattctaacaggtgtgattgaccgtgtagaccatcgctatgtatatgtgaatttcggaagaattgaagctgtgctgtcagaagctgaaagaagtcctaatgagaaatatattcctaatgaacgtatcaaggtgtacgtaaataaagttgaacagactacaaaaggtccacaaatttacgtatcaagaagtcatcctggattactaaaacgcttattcgaacaagaagttccagaaatttatgatggtactgttattgttaaatcagtagcgcgtgaagctggagatcgttctaaaattagcgtgtattctgataatcctgatatagatgctgttggcgcatgtgtaggttctaaaggagcacgagtagaagcggttgttgaagaacttggtggcgaaaaaatcgatatcgtccaatgggatgaagatccgaaagtatttgttcgtaatgctttaagtccatcacaagttttagaagtaattgttgatgaagagaatcaatcaactgtagttgtagttcctgattaccaattatccttagctataggtaaaagagggcaaaacgcacgtttagctgctaaattaacaagttggaagatagatattaaatcagaatctgatgcccgagaagctggaatttatcctgttattgaatcagaagaagttgcagatgaaattgttaattccggtgacgaagatgttgagtttgataatgttaacttggaagagacaaacttaactagtacagaattagctgctgaaactgatgaagataaaaaagataaaacagaagaagataatgacacagaatca

SEQ ID NO: 34760 - DNA, 2184 bp, Staphylococcus epidermidis
atgaatatggtaaggagtgattatatgagtaaaaaaagaatttacgaatatgcgaaagaattaaatctaaagagtaaagagattatagatgagttaaaaagtatgaatgttgaagtgtcaaatcatatgcaagctttagaagaagaacaaatcaaagcattagataaaaaatttaaagcctctcaagcgaaagacactaataaacaaaatactcaaaataatcaccaaaaatctaataataaacaaaattctaacgataaagaaaaacaacaaagtaagaataatagtaaaccaacgaagaaaaaagaacaaaacaacaaaggaaaacagcaaaataaaaacaataaaactaataagaatcaaaaaaacaataaaaataaaaagaataataaaaataataaacctcaaaatgaggtagaagaaacaaaagaaatgccctctaaaatcacttatcaagaaggcataactgtcggtgagttagctgaaaagctaaatgtagaatcagctggtattattaaaaaattgttcttactaggtattatggctaatatcaatcaatcattggatgaagaaacattagaattaattgcagatgactatggcgttgaaatagagaaagaagtagtcgttgatgaagaagatttatcaatttattttgatgatgagactgatgattctgatgcaattgaacgtccagcagttgttacaatcatgggccacgtagaccatggtaaaacgactttattagattctattcgtaacactaaagttacagaaggagaggctggcggaatcactcaacatattggtgcttatcaaattgaaaattcaggtaaaaaaattacgttcttagatactcctggacatgctgcatttacgactatgcgtgcacgtggtgctcaagttactgatattacaattttagtcgtggccgctgatgatggtgtgatgcctcaaacaattgaagctataaatcacgctaaagaagcagaagtacctacgattgttgcagtaaacaaaattgataaaccaactgctaaccctgatcgtgttatgcaagaactcactgagtatggattaattccagaagactggggcggtgacacaatctttgtaccactatctgcattgagtggagacggtattgatgatttattagaaatgatcggtttagtagcggaggtacaagaacttaaagctaatcctaataaacaagctgtaggtactgtgattgaggctgaattagataaatcacgaggtccagctgcatctttacttgttcaaaatggtactttaaacgttggagatgcaattgttgtaggtaatacttatggacgtatacgtgcaatggttaatgatttaggaaaaagaattaaatctgccggtccttcaacacctgtagaaattactggtattaacgatgttccacttgcaggtgatcgttttgttgtatttggtgatgaaaaacaagcacgtcgaattggtgaagcacgtcatgaggcaagtgtcatacagcaacgtcaagaaagtaaaaatgtttcattagacaatttatttgagcaaatgaaacaaggtgaaatgaaagatttaaatgtcatcattaaaggtgatgtacaaggttcagttgaagcattggccgcatctctaatgaaaatagatgttgaaggtgtgaatgtacgaattattcatacagctgttggtgctatcaatgaatcagatgttacattagcaaatgcatcaaatggtattattattggttttaatgtacgcccagatgcaggtgcgaaacgtgcggctgaagctgaaaatgtagatatgcgattacacagagttatctataatgttattgaagagatagaatcagctatgaaaggtttacttgacccagaatttgaagagcaagtcattggacaagctgaagtgcgtcaaacatttaaagtttctaaagttggtacaattgctggtagttatgtgactgaaggtaaaatcactcgtaacgctggtgtacgcgtaattagagatggtatcgtgttatttgaaggtgaacttgacacattaaaacgtttcaaagatgatgctaaagaagtagctcaaggctatgaatgtggtattacaattgaaaaatataatgatctcaaagaaggagacattattgaagcgtttgaaatggtagaaattcaaaga

SEQ ID NO: 34761 - DNA, 915 bp, Staphylococcus epidermidis
atgtataatggcatactaccggtatttaaggaacgaggtttaacaagtcacgacgtcgtttttaaattacgtaaaattttaaaaatgaaaaaaattggtcatacaggaacattagatcctgaagttaatggtgtgttaccaatttgtttaggcgatgcgacaaaagtcagtgattatatcatggaaatgggaaaaacttatcacgctatgataacgctaggaaagagtacgactactgaagaccaaactggagatattttagaaactagggctgttgataagaatgatattaatgaagatacgattgaccaagtgttgcagcaatttgaggggcatattcaacaaattccgcctatgtattcttctgttaaagtaaatggaagaaaattatatgaatatgcgagaaataatgaaactgtcgaacgccctaaacgacaagtttttattaaagatatacatagaatatctgaagttactttccaggagcagacatgtcattttgaagttgaagtaacatgtggtaaaggaacttatattagaactttagctacagatattggacttaaacttggttttccagctcatatgtcacgtctaactagaattgcttctggcggttttcaattagaaagtagtttaacgattgatcaaattaaagaattacatgagcatgattcattacataatgaattgtttcctatagaatatggcttaaaaggtctgaaatcattccaagtgaaagattcaaattttaaaaagaaaatctgtaacggtcaaaaatttcataaaaaagtgttaagtcaaaatgttaaagaaccttttatatttgtcgatagtagcactcaaaaagttttagcaatatatatagttcatccagataaaccttatgaaataaaacctaaaaaagtttttaat

SEQ ID NO: 34762 - DNA, 969 bp, Staphylococcus epidermidis
atgaaagtgatagaagttacacatcccatacaaagtaatcaattcataactgaaaatgttgctatggcttttggtttcttcgatggtatgcatagaggtcacgacaaggtgtttcaagtgcttgatgaaaaagcaaaagagcatcaacttaaaaaggctgttatgacgtttgatccacacccctcagtcgtattaaaccctgagcgtaaacgtacaacctatcttacaccactttcagataagttagaaatgatagcagaacacggtatagactattgtatcgttatcaatttttcatcaagatttgctaatgtgacatctgacgatttcataaaaaattatattattaataatcatgttaaagaagtgattgcagggtttgatttcacctttggtaaatttggaaaaggaaatatgacggtacttcaggaatcaaaagcttttaatacgactattgtaggaaaacaagagatggattctgaaaaaatttctacaactgcaatacgccaagcgcttacagatggtcatttacagaaagcaaatgacgaattagggtatatatataggattaaaggaactgtagtacaaggtgaaaaacgtggaagaacaattggttttccaacagctaatgtgcaacccagtgatgattatgtactaccaaaaaaaggtgtttacgcagtgagtatggaaattggtccagagagtaaattacatcgtggtgtagctaacgttggagttaaaccaacattccacgatccaactagggctgagttagttattgaagtgaatatatttgattttaatgaaaatatttacggtgaacgtgtgactgtgtattggcatcactttttaagaccagaagttaaatttgatggtatcgatccattagttaaacaaatgaatgaagataaagcgcaggctaaacatttattatctattgatttcgatgatgatatatcatataatata

SEQ ID NO: 34763 - DNA, 267 bp, Staphylococcus epidermidis
atggcaatttcacaacaacgtaaagatgaattaattaaagaatatcgtgtgcacgaaactgatactggttcaccagaagtccaaatcgctgtattaactgcagaaattactgcattaaatgagcatttacgtgaacacaagaaagaccaccattcacgtcgtggtttattgaaaatggtaggtcgtcgtcgtcacttattaaactacttacgtagtaaagatattcaacgttaccgtgaattaattaaatcattaggtattcgtcgt

SEQ ID NO: 34764 - DNA, 2103 bp, Staphylococcus epidermidis
atgtctcaagagaagaaagtttttaaaactgaatgggctgggcgttctttaactattgagacaggacaattagcaaagcaagctaatggtgctgttttagtgcgttatggagatacagttgtcctatcaactgcaactgcttctaaagaacctagagatggcgattttttcccattaactgtaaattacgaagaaaaaatgtatgctgctggtaaaataccaggaggattcaaaaaaagagaaggtcgccctggtgatgaagcaacgttaacagctcgtctcattgatagacctattcgtccactgtttccaaaaggatatagacatgacgtacaaatcatgaatattgtcttaagtgctgatccagattgctcaccagaaatggcagcaatgattggttcttcgatggcgttaagtgtttcagatattccattccaaggtcccatcgcaggtgtaaatgtaggttatatcgatggcaaatatgtcattaatccttccgtcgctgataaagaaatttctagattagatttagaagttgctggtcataaagatgcggtaaacatggttgaagcaggcgcaagtgaaattactgagagtgagatgcttgaggctattttcttcggacacgaggaaatcaaacgacttgttgcattccaacaagaaatcatcgatcacattcaaccgataaaacaagaatttgtaccggtggaaagagacgaagatttagttgaaaaagtaaaaagtttaactgaagataaaggacttaaggacacggttttaactttcgataagcaacaacgagatgaaaacttagatgctctgaaagaagaagttgttggtcattttctagatgaagaagatcctgaaaatgaaacgcttgttaaagaagtttatgcaattctaaatgacttaattaaagaagaagtaagacgtctaattgcagatgaaaaaatacgacctgatggacgtaaagtagatgaaataagacctcttgaatcagaagttggtttgttaccaagagctcatgggtcaggtttatttactcgtggtcagacacaagcactttcagttttaactttaggcgcacttggagattatcaattaattgatggtttaggacctgaggtagaaaaacgttttatgcatcattataactttcctaatttctctgtaggagaaactggccctgtacgtgcacctggtagacgtgagattgggcatggtgcgcttggtgaaagagcattacgttacattatacctgatactcaagatttcccttatacaattcgtattgtaagtgaagtattagagtctaacggttcatcatctcaagcatcgatttgtggttcaacattagcattaatggatgccggtgtaccaattaaagcgccagtcgcagggattgcaatgggactagtaacgcgtgacgatagctatacaattttaactgatattcaaggaatggaagatgcattaggtgatatggacttcaaagtagcaggtactaaagacggtattactgcgattcaaatggatattaaaattgatggtttaactcgagaagttattgaagaagcactagaacaagcgcgtcaaggacgattagctattatggatcatatgcttcacacgattgaacaaccacgcgaagaattaagtgcttacgcaccaaaagtggtaactatgagtattaatccagataaaattcgagacgtgattggaccaggtggtaagaaaatcaatgaaattatcgacgaaactggagttaaattagatattgaacaagatggtacaatctttataggtgctgtagatcaagcgatgattaaccgtgcaaaagaaattatcgaagatattacacgcgaagcggaagttggacaagtatatcatgctaaagtaaaacgtattgaaaagtatggtgctttcgttgaattgttccctggtaaagacgcgttattacacatttctcaaatttcacaagaaagaattaataaagtagaagatgttcttaaaattggagatacaattgaagtgaaaattactgaaatcgataaacaaggtcgcgttaatgcgtcacataaagtattagagcaatctaaaaat

SEQ ID NO: 34765 - DNA, 1716 bp, Staphylococcus epidermidis
gtgagtttatatatggacgggtcactatttataggaggtaacattttgagtttaataaagaaaaaaaataaagatattcgtattattccactcggtggagtaggcgaaatcgctaaaaatatgtacatcgttgaagtagacgatgaaatgtttatgttggatgcaggattaatgttcccagaagatgaaatgcttggggtagatatcgttattcctgacattcaatatgtcattgaaaacaaagaaagattaaaaggaatatttcttacacacggtcatgaacatgctataggcgcagtaagttatgtgttagaacaaatcgatgcaccagtttatggttctaaattgacaatcgcacttgttaaagaagcaatgaaggcccgaaatattaaaaagaaagtacgttactatactgtaaaccatgattcaattatgagatttaaaaatgttaacgtgagtttctttaatacgacacatagcattcctgatagcttaggcgtatgtattcatacttcgtatggttctatagtttatactggagagtttaagtttgatcaaagtttgcatggacattatgctccagacttgaaacgtatggcagaaattggtgatgagggtgtgttcgcattaatcagtgattcaacagaagctgaaaagcctggatataacacgcctgaaaatattattgaacatcacatgtatgatgcttttgccaaggttaaaggtagacttattgtatcatgctatgcttcaaacttcgttcgtattcaacaagtgcttaacattgcaagtcaacttaatcgtaaagtgtcatttttaggtcgttcacttgaaagttcgtttaacatagcacgtaaaatgggatactttgatataccaaaagatttattaatacctattaacgaagtggaaaattatcctaaaaatgaagtgattattattgctacaggtatgcaaggtgaaccagtagaagcattaagtcaaatggctcgcaaaaagcataaaattatgaacatagaagaaggagattcaatattcctagcaattactgcttcagctaatatggaggttattattgcagatacattaaatgagttagtgcgtgctggagcacatataattccaaacaacaagaaaattcatgcgtcaagtcatggttgtatggaagaattgaaaatgatgttaaatattatgaaacctgaatattttgtacctgttcaaggtgaatttaaaatgcagattgcacatgccaaattagcagcagaaaccggtgtagcacctgagaaaattttcttagttgaaaaaggcgacgtgattagttataacggtaaagatatgattttaaatgaaaaagttcaatcaggtaatatacttattgatgggattggcgttggtgacgtaggtaatatcgtattaagagacagacatctattagccgaagacggtatttttattgcggttgtgacattagatcctaaaaatcgacgtattgctgcaggacctgaaattcaatcaagaggcttcgtctatgttagagaaagtgaagaacttttgaaagaggctgaagaaaaagtacgtaaaattgtagaggaaggtcttcaagaaaaacgaatagaatggtcagaaatcaagcaaaatatgagagatcaaatcagtaagttactatttgagagtacaaaacgccgtccaatgattattccagtcatatcggagatc

SEQ ID NO: 34766 - DNA, 2391 bp, Staphylococcus epidermidis
ttgccacaagcaaaaaaaagaacatcgacgaagagaaagggtaataaaaaaacgaataaaaaaaagcaaaatgaaacgcctttaagatatatattctcaataattgtagtaattcttattatactaggcgcttttcaattaggaatcattggtagaatgattgatagcttttttaattatctttttggtatgagtcgatatttaacttatattttagtacttattgcaacaatttttataacatactctaagcaaatacctagaactcgacgtagtatcggtgcaatagttttacaattagctttgttatttatagcgcaattgtattttcatttttcacataatatcacttctcaaagagagcctgtactgtcctttgtttataaagcttatgaacaaacacattttccaaattttgggggaggcttaataggtttttatttacttaaactatttatacctctcatatctattgtaggtgtaataataattactatcctattactagcttcgagtttcattttattacttaatttaagacatagagatgttacaaaaagtttattcgacaacctcaagtcatcaagtaatcatgcatctgagtcaataaaacaaaaaagagaacaaaataagattaaaaaagaagaaaaagcccaattaaaagaggcaaaaattgaacgaaaaaaacaaaaaaaatcacgtcagaataataatgtcattaaagatgttagtgattttccagagatttctcagtcagacgatattccaatatatggtcataatgagcaagaagataaaagaccaaatactgctaaccaacgtcaaaaacgtgttttggataatgaacaatttcaacaatcattaccaagtaccaaaaatcaatcaataaataataatcagccatctacaaccgctgaaaacaatcaacaacaaagtcaggctgaaggctcaatatctgaagctggtgaagaagccaatattgagtatacggtgccacctttatccttattaaaacagcctactaaacaaaaaactacttcaaaagctgaagtccaacgtaaaggtcaggttttagaatctacactaaaaaactttggagttaatgctaaagtaacacaaattaaaatcggtcctgcagttacgcaatatgaaattcaaccagcgcaaggtgttaaagtaagtaaaatagtcaatctccataatgacattgcattagctttggctgcgaaagatgtacgaatagaagcacctattccaggtcgctctgcggtaggaattgaggttcccaatgataaaatctcacttgtcactctaaaagaagttttagaagataagttcccatctaagtataaattagaagtcggcattggtagagatatttctggtgatccaatatcaattcaattaaatgaaatgcctcacttactcgttgctggttcaacaggaagcggtaaatcagtttgtattaatggtattataacgagtatattactcaacacaaaaccgcacgaagttaaacttatgttaatcgatcctaaaatggtagagttaaatgtttacaatggtattcctcatttacttataccggttgtaacaaacccacataaagcgtctcaagctttagaaaaaattgtttcagaaatggaacgtcgttatgatttgtttcaacattcatcgacacgaaatattgaaggatataaccaatatatacgcaaacagaatgaagaacttgatgaaaaacaacctgagttaccgtatatcgtcgtaatagtggatgaattggctgatttaatgatggttgcaggtaaagaagtagaaaatgctatccaacgtattactcaaatggctagagcagcgggtatacacttaattgtagctactcaaagaccttccgttgatgttattactggtattattaaaaataacattccatcaagaattgcgttcgctgtaagttctcaaactgactctagaacaataattggtgctggtggagctgaaaagctacttggtaaaggtgatatgctatatgttggtaacggagaatctactacaacccgaattcaaggtgcttttttaagtgatcaagaagtgcaagatgttgttaattatgttgtagagcaacagaaagcaaattatgttaaagaaatggaaccagatgcacctgtagataaatcagaaatgaagagtgaggatgctttatatgatgaagcttatttatttgtaatagaaaagcaaaaagctagtacttctttattacaacgacaatttagaatcggttataatcgagcttcaaggctcatggatgatttggaacgtaaccaagttattggtccacaaaaaggaagtaaacctagacaaatattagttgatttagaaaatgacgaggtg

SEQ ID NO: 34767 - DNA, 420 bp, Staphylococcus epidermidis
atgaaaatatcaacaaaagggagatacggattaacattgatgatatctcttgctaaaagagagggtcaaggttgtgtatcactaaaaacaattgctgaagaaaataaactaagtgatttatatcttgaacaattagtaggccctttaagaaatgctggattaattcgaagcgttcgaggtgctaaaggtggttatcaacttagagttccatcagaagaaattactgcaggagatattatccgattactagaaggaccgattacgtttgtagaaagtattgattcagaaccgcctgcacaaaagcaactatggattagaatgagagatgctgtaagagatgttttagatcatactacattaaaatatcttgcagattacaaagatacgaatgaagacttagagggttatatgttctatatt

SEQ ID NO: 34768 - DNA, 1269 bp, Staphylococcus epidermidis
gtgagtacagaaccattagcctctcgaatgagaccgaaaaatatagatgaaattatatctcaacaacacctggttggtccgaaaggtataataagaaggatggtagatactaaacgtctttcttctatgattttttatggtccacctggaattggtaaaacaagtattgcaaaagcaatttcaggcagtacacaatttaaattcagacaattaaatgccgtaacaaatacaaagaaagatatgcagctaattgtcgaagaagctaagatgtcaggacaagttatcttactattagatgaaattcatcgtttagacaaagctaaacaagattttttattaccacatcttgaaaatggcaaaattgtattaataggtgcaacaacttcaaatccttatcatgcgataaatccagcgatacgatctagagcacaaatatttgagctttacccattagatcaagatgatataagattggcattagatagagctataaatgataaggaaagaggtttaagtacttatcatcctattgtagatgaagatgctatcgaatatttttcaacgcaaagccaaggcgacgttaggagtgcattaaacgctttggaattagctgtactaagtgctcatattggtgaagaaaacgaaagacatattacattagatgacgcaaaagattgcttacaaaaaggtgcttttgtaagtgataaagatggagacatgcattatgacgtcatgagcgcttttcaaaaatcaattagaggtagtgatgtcaatgcagcactccactacttagcacgtctaattgaagctggtgacttacctacaatcgtacgtcgattacttgtaattagttatgaagatgttgggttagcatcacctaatgctggtcagaggactttagcagcaatacaatcagctgaacgtctaggttttccagaagcacgaattccccttagtcaagctgtaatagaattatgcttatcacctaaatcaaattctggtatcacagcaatagataaagctcttggcgatataagaaatggacatataggtcaaataccggattatctgaaagacggtcattattcaggtgctaaaaagttaggacgggctataggttacaaatatcctcataactatgaaaatggtcatgttgtacaacagtacttaccagaaaaattaaaaaacagagtgtattatgaaccaaaaaccacatcaaaaagtgaacaacaatttaaaacaatttacgataacttacgaaataaaaca

SEQ ID NO: 34769 - DNA, 1764 bp, Staphylococcus epidermidis
atgaataaaagaacaacgtattgtggtttagtcacagaagaatttttaaacgaaaaagtaacattaaaaggttgggttcataacagacgagatttaggtggattaatttttgttgatttaagagatcgtgaaggtattgtccaaatagtttttaatcctgacttttccgaagaagcattgcaagttgctgaaacagtacgctcagaatatgtagtcgaagttgaaggtgtagtaacaaaacgtgatgctgaaactattaacccaaaaatcaaaacaggtcaagttgaggttcaagtttcaaatattgagattattaacaaatcagaaacacctccattttcaattaatgaagaaaatgtaaacgttgatgaaaatattcgattaaaatatagatatttagatttacgtagacaagaattagcgcaaacttttaaaatgagacatcaaactacgcgttctatccgtcaatacttagataataatggcttcttcgatattgaaacaccagtattaacaaaatcaacacctgagggtgcgcgagattatctagtaccttcccgtgtacacgagggtgaattttacgcgttgccacaatcaccacaattatttaaacaactattaatgataagtggttttgataaatattatcaaattgttaaatgtttccgtgatgaagacttacgtgcagatcgtcaaccagaattcactcaagttgatattgaaatgagttttgtcgatcaagaagatatcatagccatgggtgaagatatgttacgtaaggttgtaaaagatgtaaaaggaatagacgttagtggcccattcccacgtatgacatatgcagaggctatggaccgttttggttcagataaacctgacactcgtttcggtatggaacttatcaatgtgtcacagcttggtaaagaaatgaattttaaagtttttaaagatacggtagataacaacggcgaaattaaagcaattgtcgcaaaagacgctgcaaataaatatacacgtaaagacatggatgcattaacagagtttgtaaatatatatggtgcaaaaggattagcttgggttaaagttgttgatgatggtttaagtggcccaattgctagatttttcgaagatgttaatgttgaaacacttaaacagttaacagaagctaaacctggagatttagtaatgtttgtagctgataaacctaatgttgttgctcaaagtttaggggctttaagaattaaattagcaaaagaattaggtttaattgatgaatcaaaattaaatttcttatgggtaactgattggccgttattagagtatgatgaagatgcaaaacgttatgtagcagcacatcatccatttacttcacctaaaagagaagatatcgaaaagctagacactgaacctgaaaatgtacaagccaacgcttatgatattgttctaaatggttatgaacttggtggtggttctataagaatacacgatggtgaattgcaacaaaaaatgtttgaagtattaggatttactaatgaacaagctcaagaacaatttggtttcttattagatgcttttaaatacggtgctccacctcatggtggcatcgcgttaggtttagatagacttgtgatgttattaacaaatagaacaaacttgagagatacaattgcattccctaaaacagcatcagctacatgtcttttaactgacgctccaggagaagtatctgataaacaactccaagaactctcactaagaatcagacac

SEQ ID NO: 34770 - DNA, 1272 bp, Staphylococcus epidermidis
atgattaagatgccaagaggtacccaagatatcttgccgcaagattctgctaaatggcgttacattgaaaatcgattacacacattaatggaattgtataattataaagaaataagaacgccaatttttgaaagtactgaactttttgcaagaggcgtgggggattctactgacgttgttcaaaaggaaatgtatacatttaaagataaaggggatcgtagtttaacattacgtcctgaaggaactgcagccgttgtacgttcatatattgaacacaaaatgcaaggtgaacccaatcaacctatcaaactttactacaatggtcctatgtttagatacgaacgtaaacaaaaaggaagatatcgccaatttaaccaatttggtgtcgaagcaataggagcggaaaatcctagtattgatgctgaaatactcgctatggttatgcatatatatgagtctttcggattaaagcatttaaagttagttatcaatagtattggtgatagtgaatcacgtaaagaatataacgaagcattagtaaaacattttgaacctgtgattgatacattttgttcagattgtcaatcaagattacacactaatcctatgagaattttagattgtaaaatcgatagagataaagaagcagtaaaaaatgcaccccgtatcacagattatctcaataatgattctaaatcttattatgaacaagttaaattacatcttgataatttgaacatatcttatgttgaagatcctaacttagttcgtgggttagattattatactcatactgcctttgaattaatgattgataatccagagtatgatggagctatcactacattatgtggtggtggtcgatataatgggttgttacaattattagatggtccagatgaaacaggtattgggtttgcactaagtattgaaagattattgatggcacttgatgaagaaggtatttcattagatgtaagtgaagattttgatttatttgttgtgacaatgggagaagatgccgatcgttatgctgttaagttaatcaatgatttaagaagaaatggaataaaagtagataaggattatctaaacagaaaaattaaaggacaaatgaaacaagctgaccgtcttaatgctaaatatacagtagtaattggagatcaagagcttgaaaataatgaaattggtgtgaaaaacatgatttcaggcgaatcagaaaatgtacaattagacgaattggttaattattttaaaagtagaaaggaagtc

SEQ ID NO: 34771 - DNA, 1287 bp, Staphylococcus epidermidis
atgaaaacacatcaatatgaacttatagatgagaaagttttcgaacatgagtttgataatggattgaaattatttatcattcctaagcctggttttcaaaaaacgtatgtgacctacacaacacagtttggttcattggacaatcattttaagcccataggtagtcagcaatttgtaaaagttcctgacggtgtggcacattttttagaacataaattgtttgaaaaagaagatgaagatttatttactgcatttgccgaagagaatgcgcaagctaatgcttttacaagctttgatcgtacgagttatttatttagcgcaacaagtaatattgaaagtaacattaaacgtctcctcaatatggtagaaacaccttattttactgaagaaacagttaataaagaaaaagggattatagctgaggaaattaaaatgtaccaggaacaaccaggatataaattaatgtttaatactttaagggctatgtattccaagcacccgatacgggtggatatcgctggtagtgttgaaagcatttatgaaataacaaaagatgatttatatctatgctatgagacattttatcatccctctaatatggtgttgtttgtggtaggcgatgttagtcctcaatcgataattaaacttgtagaaaagcatgaaaatcaaagaaataaaacttatcaaccacgtattgaacgtgcgcaaattgatgagcctagagagataaatcaacggtttgtttctgagaaaatgaagttacagtcaccacgattgatgctaggttttaaaaatgaaccattagatgaaagtgcaactaaatttgttcaaagagatttggaaatgacatttttctacgaattggtttttggagaggaaacggagttttatcaacaacttttaaataaagatttaatagatgaaacattcggttatcaatttgtattggaaccgagctacagtttttcaattattactagtgcaacacaacagcctgatctatttaaacaattaataatggatgaattaagaaaatataaaggaaaccttaaagatcaagaagcatttgatttgttgaaaaagcaatttattggagaattcatatcaagtttaaattctccagaatatattgctaatcaatatgcaaaactctatttcgagggagtgagtgtatttgatatgcttgatatcgtagaaaatattacgttagagagtgtaaatgaaacttccgaattattcttgaactttgaccaacttgttgatagtcgtttggagatggaaaataga

SEQ ID NO: 34772 - DNA, 873 bp, Staphylococcus epidermidis
atgaagaaaatagattcatggctaactaaacatggtctaaaaaatcgacttacgctcgtagtaattgtaatttttattatatttttaattttactttttatgtttgttaatttaagtgatgaagatacaggtcaaattactataactgagaatgctgagttaagaacaggacctaatgccgcctatcctgttatttataaaatagaaaaaggcgaaagttttaagaaaatagatcgaaaagggaaatggattgaagttcaaaatcacgctggcactgagaaaggctgggttgctggttggcacacaaatttgaacattccagctgatcaatcactttcgtcaaaccctctaaaaggaaaaacaattgtacttgaccctggtcatggtggaagtgatcagggcgcctcaagtagtacaccatctaaaagtctcgaaaaaaattacacacttaaaactgctaaagaattaaaaaagttattaaataaggaaggtgctcatgtaaaaatgactcgttccaatgataaatatgtgtccctagatgatagaaatataaagggtgacgcatttattagtatacataatgatgcgcttgattcttcaaatgccaatggagtgactgtttattggtttaaagacaagcaagaaacacttgcacaaactttaaattctgcaattcaaaagaaggcattattgacaaatcgaggttctagacaacaaaattatcaagtgttgagacagacagatataccagcagtactgttagagttaggctatataagtaatcctactgatgaatcaatgattaatgatcaattacatagacaagtggttgaacaagctattgttgatggtttaaaacaatatttctcgtcc

SEQ ID NO: 34773 - DNA, 702 bp, Staphylococcus epidermidis
atgaaagcgctagtcataggtggttctggaacaataggtcgtgccattgtaaaacgactgctatttgaaggttatgaagttttcttacattatcattcagctcaatattctgatttaagtaatcaatttaaaaatagcaaagttacatttattcaatgtgatttaaccaaagatatagagctcgaagattactttggacacattgacgagctagattgtctaatttataccagtgggacagcattatatggcatgttacaagatatgagtgattgtgacatcgataatagttatgcattaaatgtaagacaatttatacgtttgactcgctactttattgatattttaaggcagagtaacaatggacgtatcattgttatttcatcaatttggggagaaactggagctagtttagagacaatctattcagcgatgaaaagtgctcaaattggttttgttaaagcattaagtcaagaattagctttaacttcagtaactgtaaatgctattacaccaggtatggtaaaagggaaaatgagcgatgtatggtcgaaagatgagttatcgaatatagtatcagagttacctcagcaaagaatgattgatccttctgaagtggcacatgcttgtgcatacttgtgtagtactatgtcaaaaagtattacgggtacagtacataaagtgaatggcggatggtatatt

SEQ ID NO: 34774 - DNA, 825 bp, Staphylococcus epidermidis
atgacttttgcaaaaaggaaagagtggtacttagaatatgagataactgtaaatcgtgctggcttactcggtgatatttcaagtttgcttggaatgctcggcattagtattgttacaattaatggtgttgatcagggaaaaaggggattgttaattaaaacagatcaactagaaaaggtcgaaaggttcgaacaaattgtaaaagaaattaatgaaatagaaattacaaagttaagagttcctgaattacgagatagactcgctgtacgacacggtagatatattgaacaagatgctgatgataaaaagacttttaaatttgaacgagaagatttaggattacttgttgattttttagctgagttatttaaagtagaaggacataaattaatcggaatacgtggaatgcctagagttggtaaaactgaatctattgtagctggaagtgtttgtgcacataaaagatggttattcataagctcaactttaattaaacaaacagtaaggcgttcactatttaaaggtgaatatgattctaatcacgtatatatcattgatggtgcggtaacagcacgtgaattgaaccctgagcaccaagaattggtgagagaggttatgacgttaccctcaataaaagtagttgaacatccagatttatttgtagagtcgtgcaattataatatggaagattttgactatattattgaattgagagaaaatgaagatcaagagattcgatatgaagaaatgaagaaacatacggttcaaagcaagaataatttagattttggagatccatttggtggagggtttggtttctttgaa

SEQ ID NO: 34775 - DNA, 2187 bp, Staphylococcus epidermidis
gtgaataacgagtatccatatagcgcggatgaggtgctttataaagctaaatcatatttatcaacaagtgaatatgaatatgttctcaaaagttatcatatagcttatgaggcacataagggtcaatttagaaaaaatggcttaccttatattatgcatcctattcaagttgcagggattttaacagagatgcgtttagacggacccactattgtcgctggatttctacatgatgtgattgaagatacttcttatacatttgaagatgttaaagatatgtttaatgaagaaattgcacgaatagtagacggagtaactaaacttaaaaaggttaagtatcgctctaaggaagaacaacaagcagaaaatcatcgtaaactatttattgctattgctaaagatgtacgcgtaattttagtgaagttagcagatcggcttcataatatgagaactttaaaggcaatgccaagagagaagcaggtaagaatctctaaggaaaccttagaaatctatgctcctttagcacatcgtctcggaatcaacacgataaagtgggaacttgaagatacagcgctgagatatattgacagtgtgcaatatttccgcatcgttaatcttatgaagaaaaaacgtagtgaacgcgaagcttacattacaaatgcaatcaataaaattaaaaacgaaatgactaaaatgaatctttcgggcgaaattaacggtagaccaaaacatatttacagtatataccgcaaaatgataaaacaaaaaaagcaattcgatcaaatatttgatttgcttgctatacgtattatagttaattcgataaatgattgttatgcgacacttggtttagttcatacattatggaaaccgatgcctggacgttttaaagattatatagctatgcctaagcaaaatatgtatcaatcactacataccactgtagttggacccaatggcgatcctttagaaatacaaattagaacgcacgaaatgcatgaaatcgctgaacatggtgttgctgcacattgggcttataaagaaggtaagacagttaatcaaaaaacacaggattttcaaaataagcttaattggttaaaagaacttgctgaaaccgaccatacttctgcagatgcgcaagaatttatggaatccttaaaatatgatttacagagcgataaggtatatgcatttactccagctagtgatgttatagagttaccttatggtgcagtaccaattgattttgcttatgcaatacacagtgaagtaggaaataaaatgattggtgctaaggttaatggtaaaatcgtacctatagattatgttctacaaactggtgatattatagagattcgtacaagtaaacattcttacggtccaagtagagactggttgaaaattgtaaaatcttctagtgccaaaagtaaaatcaaaagtttctttaaaaaacaagatcgttcttctaatattgaaaaaggtaaatttatggtagaagcggagattaaagaacaaggattccgtgttgaagatattctaactgagaaaaatttagaagtcgttaatgaaaaatatcattttgctaatgatgaagatttgtacgcagctgttggattcggtggtgttacatcaatacaaatcgtcaataaattaactgaacgacaaagaatattagataaacaaaaggcattaaatgaggcgcaggaagttacaaaatctgtacctataaaaaaagatattaccacagacagtggtgtatatgttgagggattagaaaacgtcttaatcaagttatcaaaatgttgtaatcctataccaggtgatgatattgttggttatatcactaaaggacacggtattaaagttcatcgtacagattgtccaaatataaaaaatgagacagatcgattgatttcggtagagtgggtaaaatctaaagattcaacacaacaatatcaagttgatttagaagttactgcatatgatagaaatggcttgcttaatgaagtattacaagctgtaaattctactgctggaagcttgattaaagtatctgggcgttcagacattgataaaaatgcagtaattaatattagtgtgatggtaaaaaatgtcaatgatgtgtaccgtgtcgttgaaaaaattaaacaactaggtgacgtttatacagtatctagagtttggaac

SEQ ID NO: 34776 - DNA, 390 bp, Staphylococcus epidermidis
gtgaaaacgattggtgaagtgttgaaaagtagacgtgaaagattgggtatgacactaagtgaattagaacaaagaactcagttaaagcgtcaaacgttaatacatatagaaaataatgattttaatgaactagccaagagtgattatactgaaggttttattagaaaatacgctaaagttgtaaatatcgaaccaaatcaacttattgaagcacatcaagatgagattcctgaaacacaatatcaaattgatgatgtgatacaaacattttctaatgggtatgaacccccttaccgacgtcaatctaaggaagcgtttcaattgttgatgtggatgggtttcattattttaatatctttaatcgtttggatactcgcagtattaattata

SEQ ID NO: 34777 - DNA, 579 bp, Staphylococcus epidermidis
atgaatataccgaatcaaataacggtatttagagttattttaataccattttttattttatttgctttagttgattttggttttggacaaatttcaattttaggtggaaatcatatcagaattgaaatattaattagtgctatcatatttgtggttgcatcattaagtgattttgctgatggttatcttgcccgtaaatggcaattagttactaatatggggaaattcttagatccacttgcagacaaattattggtcgcgagtgcattaattgttatggtacaacttggttttactaattctgtcgttgctatcataattattgctcgagaatttgccgtcacaggattacgattactacaaattgaacaggggtttgtaagtgctgcaggacaactagggaaaataaaaacagcagtgacaatggttgcaattatatggattttattgggcgatcctttcgtacactatctacgtttcccaattggagtgtggttattatacattggagtattctttactattctttcaggtattgaatatttttataaaggaagagatgtatttaaacattctaaa

SEQ ID NO: 34778 - DNA, 1047 bp, Staphylococcus epidermidis
ttggataatgaacgtcaaaaagctttagatacagtcattaaaaacatggaaaaatcttttggtaaaggtgccgttatgaagttaggcgataataaaggtcgcagagtatcaagtacttcaagtggttctgttacagttgataatgcattaggggttggaggttatcctaaaggaagaattatcgaaatatatggacctgaaagttcaggtaagacgacagtagctttacatgctatcgccgaagtacaaaaaaacggtggtgtagcagcatttatcgatgccgaacatgctctcgatccagtatatgcacaagcattaggtgtagatattgataatttatacttatctcaacctgatcatggtgaacaaggtcttgaaatcgccgaagcttttgttcgtagtggtgctgtggacattgttgttgtcgattcagtagcagcattaacacctaaagctgaaattgaaggtgaaatgggagatactcatgttggtttacaagcaagattaatgtctcaagcattaagaaagttatcaggggctatttctaaatctaatactacagctatatttattaaccaaattcgtgaaaaggtcggtgtgatgttcgggaatcctgaaacaacgcccggtggtagagccctaaaattctatagttctgtacgtttagaggtaagaagagcagagcagttaaaacaaggtcaagatattgtaggtaacagaaccaaaataaaagttgtaaaaaataaagttgcacctccatttagagttgcagaagtagatattatgtatggtcaaggtatctctaaggaaggagagctcattgatttaggtgtagagaatgatatcgttgataaatcaggtgcttggtattcttataatggagatagaatgggccaaggtaaagaaaacgtcaaaaattatcttaaggaaaatccacaaatcaaagaagaaattgaccgtaagttacgtgaaaagttaggtattttcgatggtgatgtggatgaaaatgagaatgaagacgattcaccaaaaactttatttgatgaa

SEQ ID NO: 34779 - DNA, 1557 bp, Staphylococcus epidermidis
gtgaatttattaagcctcctactcattttgctggggattattctaggcgttgttgtagggtatattgttgcccgaaatttattacaccaaaaacaagttcaagcaagacaaactgccgatgatattgttagctatgctaataaagaagcagacaatattaaaaaagaaaaattacttgaggcaaaagaagagaaccaaattttaaaagaacaagctgagaatgaactgcgtgaaagacgtggtgaacttcaaagacaagaaacccgacttcttcaaaaagaagaaaatttggatcggaaatctgatcttttagataaaaaagatgagattttggaacaaaaagaatcaaaacttgaagaaagacaacaacaagtagatgcaaaagagagtagtgttcaaacattaataatgaagcatgaacaagaattagaacgcatctccggtctcactcaagaagaagctgtgaaagaacagcttcaaagagttgaagaagaactgtcacaagatattgcaatacttgttaaagaaaaagaaaaagaagcgaaagaaaaagttgataagacagctaaagaattacttgctacaactgtacaaagattagcagccgaacatacaactgaatcaactgtttcagtcgtaaatctgcctaacgatgaaatgaaaggtcgtatcataggtagagaaggtagaaatatacgcacattagaaacacttactggcatagatttaattattgatgacacaccagaagcagttattttatcaggttttgacccaattagacgtgaaattgctagaactgcactagttaatttggtttctgatggacgtattcatcctggacgtattgaagatatggtcgaaaaagctagaaaggaagtagacgatatcattagagatgctggagaacaagctacctttgaaataaatgtacacaatatgcatcctgatttagtgaaaattttgggtcgattaaattatcgaactagttatggtcagaatgtacttaaacattcaattgaagttgcccacctttcaggtatgcttgcagcagaattaggagaggatgttactttagctaaacgtgctggattattacatgatgttggtaaagccattgatcatgaagttgaaggtagtcacgtagaaataggtgttgaattagctaagaaatataatgaaaataacataattattaatgctattcactcacatcatggtgatgttgaaccaacctctatcatttctattttagttgcagcagctgatgcattatcagcagcgcgaccaggtgcacgtaaagagacacttgaaaattatattagaagacttgagagactcgaaacgttatctgaaagttatgatggggtagaaaaagcatttgctatacaagctggtagagagattcgtgtagtcgtctcacctgaagaaattgatgatttaaaatcatatagattggcaagagatattaagaaccaaattgaagaagagttacaatatcctggacatatcaaagtgacagttgttcgagagactagagcaatagaatatgctaaa

SEQ ID NO: 34780 - DNA, 2271 bp, Staphylococcus epidermidis
atgattaaatcaaaatataattgggatataactcaaccgaatacctttataagtgagagtagcagtgatcaatttaaactttcacctatagtaaaaaaggtattagagagtaaaaatattgtggataatcaggagattcaaaatctatttgaaggcactaacattagtcatgattatatgttattaagtgatatgcaaaaagccattgatcgtattaaattagctatcgatcaaaatgaacgaatactagtatatggtgactatgatgcagatggtgttacatctactacaattctagtgtctactttacgtctacttggcgctcaggtggggtggtatattcccaatagatttacagaaggatatggacctaatgaattagcatttaaaaatgcttatgacgaagggatttccttaataataactgtagataatgggatacagggacatcatgaaataagtaccatacaagaattaggtgtagatgttatagtgacagatcatcatgaaataggagaaactttacctgatgcttttgcaattgtacatccgatgcatcctaattttgaatatccttttaaatatttatgtggtgcgggtgttgcttataaattggcccaaggattgatagagcatccacctcaacatttcatagcattagctgccataggtacaattgcagatttagtatcattgacagatgagaatagatatattgtaaagcaaggattaaagatattaaacaatcatacaccatcgtccataaaggctatcttaaatcaagcgggttttaatgatgaaataacagaagaaacaattggttttattattggacctcgattaaatgcggttggtagactagaagatgcatcattagctgctgaacttttattgtccgatgaatttgaagaggcggaatttttagctgaacaagttgaacattttaatcatgaacgtaaagatatagtatctaaaattactgatgaagcattgttattagcagaggaacaaatcaagcaaggccatttgtttcttttacttgccaaagaggggtggcatgagggtgtattaggtattgttgcatctaaaattgtagaaacatatgcactacctacattaattttaaatattgatgaaaatcaaaatcatgccaagggttctgcgaggtcaattgaacaagtttccatgtttgatattttaaatgaccatcaacagttaattgataagtttggtggtcatcacatggctgcaggaatgacaatgtctatcgataatattgaacatttacataaagagctagatatgtggatgaaagaactaactgttaccacttcattagagccttcaataaaggtggatgcacaacttgaagaaaaagaaattaacattaaaaatattaaagatatatttcaattaaggccttttggtacggactttaatagtcctctttttatggttagagatctaattgtcaagtcaacaaagggaattggacaggataataagcatcttaagttaacgcttggtcattcaggtttaactgctttattttggaatcatggacatttggcaagtgaacttgaaccaggtcaaccgattcatataataggaacattgcaaattaatgaatggaatggtaatcaaacacctcaatttatcatcaaagacattgctatagaccaattacaaattttagattatcgtagtaaacgtaaaaatatacaatttaaagaatctgaatcaaatgttgcctatgtcattcatccgaaacttaaaaaaagcaattcacattactatcattatggtgaggctattgatagaccttatgataaaatagtgtttagagatttacctaatactatggttgaaattgaacaaaccttagaacattcacaaatttctcaactatatttagttctgcagcatgaaaagtcaatatattttgaaggtatccctagcaagtcgctttttaaaaagtgttacaaagctttaataaacaaaaaagaaactgacttaattaaagaaggtatgctgctttgtgagtacttaaatattaagccagaaatattaacattcatgcttaaagtctttaaagaattggagtttatttacgacgaaaagggattgattaagataaatccagcgccaaataaacaagatatagaaaatagtcgtatttaccaaatgagacgagcacgtatggaagtagaagaacgtcttctctatgatgattttttaaatataaaagaatggataatatcaaagttaaca

SEQ ID NO: 34781 - DNA, 1137 bp, Staphylococcus epidermidis
atgcctgcagtgacatatgagcatataaaaacatgtaaacaatccggtgccagattaggaattgtacatacaccgcatggatcttttgaaacaccaatgtttatgccggttgggacaaaagcaacagttaaaacaatgagcccggaagaattaagaaacatagaagcaaagattatattaggaaacacatatcatttgtggttacaacctggaaatgatattatcaagcacgctgggggattacacaaattcatgaattgggacggtccaattttaacagattctggtggtttccaagtatttagtttaagtaatttgcgtaaaatttctgaagaaggtgtagaatttagacatcataccaatggctcaaaactatttttgagtcccgagaagtctatgcaaatacaaaatgatttaggttctgatattatgatggcatttgatgaatgtccaccaatgccagctgaatatgattacgtcaaagattcaatcgaacgtacaactcgatgggcagccagatgtttaaaagcacatcaacgccctggagatcaagcactgttcggtattattcaaggtggagaatacaaagacttaagagaacaaagtgctaaagagctagtcagtcttgattttccagggtatgcaataggagggctgtctgtaggtgagccaaaacctgttatgtatgacatggttgaacatacagaacaatttatgccgaaagataaacctagatatttaatgggagtaggttctcctgatgctttgattgaatgtagcattaggggcatggatatgtttgattgtgtattacctactagaattgctagaaatggtacttgtatgacatcaaatggtcgattagttgttaaaaatgctaaatatgcagatgatttaagaccacttgatgaacaatgtgactgttatacatgtcaacattacacaagagcttatattagacatctagttaaagcggaagagacttttggtatccgtcttactactattcataatttacattttctgctaaaattaatggaagatattagacaagccattcgagaagaccgtcttttagattttaaagatgaattctttgaacaatatggattaaatgtagaaaaccctaaaaacttt

SEQ ID NO: 34782 - DNA, 792 bp, Staphylococcus epidermidis
atgagaatattgtttataggtgacatcgttggtaaagtgggcaggaaaatgattactacttatttacctaaaattaaacaaacttatcacccaacagtttctatagtaaacgctgaaaatgccgcacacggtaaaggattaacagaaaaaatttacaaacaacttttgagagaaggcgtggatttcatgactatgggtaatcatacatatggtcaaagagaaatttacgattttattgatgatgctcatcgaatggtgagacctgcaaattttcctgatgaagctccaggaacaggtatgagaataataaaaattaacgatattaaattggctattattaatttacaaggccgttcatttatgcaagacattgatgatccatttaaaaaggctgaccagctaatcgaagaagctcaaaaatctacaccatatatatttgtagattttcatgctgaaactacatctgaaaaaaatgctatgggttggtatttagatggtagagtgagcgctgttgttggtactcacacacatattcaaacttctgatgatcgtatattacctcatggcacaggatatatcacagatgtcgggatgacaggttattacgatggtattttaggtatcaatagagatgaagttattcaacgttttattactagtttgccacaaaggcatgttgttccagatgatgggcgaggcgtattatcaggagttatcatagatttagataaagaaggtaaaacgactcaaataaaaagactgttaataaatgaggaccatcctttccaaatt

SEQ ID NO: 34783 - DNA, 1023 bp, Staphylococcus epidermidis
ttgaatatcgaagatttcgattatcatttgccagagtctctcattgcacaaacaccactaaaaaacagagaccaaagtagattgttagttcttagcaaagatactggtgagctgacacacttacattttagagatgtcatccattattttgagcctggtgatacattggttcttaatgatacacgtgttatgcctgctagattatttggcctaaaagaagaaactggtgctaaagttgaaatgctaatgctcacccaaattgaaggtaatgattgggaagttttacttaaacctgcaaagagaattaaaaaaggtcatcgtctaaattttggagatggtaaaatcgttgctgagtgtattgaggaacttgaacaaggcgggcgtattatgcgtctacattatgagggtatactccaagaacgcttagatgaattaggcgatatgccattacctccatatattaaagaaagattagatgatcctgataggtatcaaacggtttatgctaaagagagtggatcagcagctgcaccaacagcgggtttacattttactgatgatttgctaaataaaattaaacaaaaaggggtacatatcgcttttattacattgcatgttggattaggaacctttagacccgtaagtgttgaaaatatcgatgatcacgaaatgcatagtgagtattatcaaatgacacaagaaacagctgatttattaaataaaacaaaagaaagtgggaagcgtgtgatatcagttggaacaacatcaacgcgtacattagaaacgatacgtcgtgatcatcctcaatttgttgccacaagtggatggactgatatctttatttatcctggctttgagtttaaagcgatagatgggttaattactaatttccacttacctaaatcaacgttagtcatgctagtatcagcatttagcaataaaaaatatattttaaacgcttatcataaagctgttgaaatggagtatcgattctttagttttggagatgcaatgttaattata

SEQ ID NO: 34784 - DNA, 453 bp, Staphylococcus epidermidis
ttggacaataaagacaatcgaaaattttatttaattagagaagatgtactaccagaatctgtcatcaaaactttaaaagttaaggatgctttaaaaaataattcgaatttgtccatttatgatgctgtaaaacaattcaatctctctagaagtgcattttacaaatatagagagacaatatttccagtagatgaaaaaatattagatcaaagagaatttactttgattttatatgtaaatgatattgttggaatgttagcccaagttcttaatgcaatctctcaacttcaattatcagtgttgacaattcatcaaagtgttccaattgaagataaagcgacaatcacactatctttaaatgcgagaaattctaatttatccattgatgaggtcattgaatcattaagagagataaatcatgtaactaaagtagacttaataagtatgactatg

SEQ ID NO: 34785 - DNA, 1290 bp, Staphylococcus epidermidis
atgttcgtcgatcaagtgaaaatatctctaaaagctggtgatggaggtaatggcatcactgcttacagaagagaaaaatatgtaccttttggtggtccagctggtggcgacggtggtataggtgcttctgtggtatttgaagtggatgaaggattgagaactttattagatttcagatatcaaagacattttaaagctaaaaaaggcgaaaatggtcaaagtagcaacatgcatggtagaaatgcggaagacttagtgttaaaagtaccaccaggtacaattattaaaagtgttgaaagtgaagaagtgcttgcagatttggttgaagatggccaacgtgctattgtagctagaggaggacgcggcgggcgtggtaactcaagatttgctacccctagaaatcctgcgccagattttagtgaaaatggtgagccaggcgaagaattagaagtgactttagagttgaaattgttagcagatgttggattagttggttttcctagtgtgggtaaatctacattgctttcaatagtttctaaagcgaaacctaagataggtgcttatcactttacgacaataaagcctaatctaggtgttgtttcaactcctgatcatagaagttttgttatggcagatttaccaggattaattgagggcgcttctgatggtgtcggccttggacatcaattcttaagacatgttgaacgaactaaagtgattgttcatatgattgatatgagtgggtcagaaggtcgaaacccattagacgattataaaattattaatcaagaattaatcaattataaacaacgcttagaagatcgtccacaaattatagtcgcaaataaaatggatttacctgattcacaagggaatttatcgcattttaaggaacaattagataacgatgtgacagttgttcctgtttcaactattacgagagacaatattgatcaattattatatcaaattgccgataagctcgaggaagttaaagatgttgacttctcagttgaagaagatgagaatttaggtgttaatcgtgtattatataaacacacaccatcagcagataaatttactatttctagagatgatgacggcgcatatgtagtgagtggcaatgctattgaaagaatgtttaaaatgactgattttaatagtgatccagctgtaagaagattcgcaagacaaatgcggtcaatgggtattgatgatgctttaagagagagaggttgtagcaatggtgatattgttagaatcttaggcggagaatttgaatttgtcgaa

SEQ ID NO: 34786 - DNA, 2631 bp, Staphylococcus epidermidis
gtgaaaatagaaatggctaacattacaccaatgatgcaacaatatttaaagataaaatctgaatatgatgattgtttgctattttttagactcggagatttctatgaaatgttctttgatgatgctaaagaagcatcaagagtacttgaaataacattgacgaaaagagatgctaaaaaagaaaatcctattccgatgtgtggcgtaccatatcattctgctgataattacattgaaacattgattaataaggggtataaggtcgctatatgtgaacaaatggaagatccaaagcaaacaaaaggaatggttagaagagaagttgtaagaatcatcacaccaggaactgttatggatcaaaatggtatggatgaaaagaaaaataattatattttaagttttatcgaaaatgaagaatttggattatgctattgtgatgtttctacaggagaactcaaagtaactcatttcaaagatacagcaaccttgcttaatgagattacaacaattaatcccaatgaaatcgtcataaagcaagctctatctgaagaattaaaaagacaaatcaacatgataactgagacgattactgttcgcgaagatatatctgatgaagattatgatatgaatcagttgacacatcagttaatgcatgacacaactcaattattgttagattacattcatcacacacaaaagcgagatttatctcatattgaggaagtaattgaatatgctgcagttgattatatgaagatggattattatgcgaagcgaaatttagagctgacagagagcatacgattaaaatcaaaaaaagggactttgttatggttaatggatgagacaaaaacaccgatgggtgctagacgtttaaagcagtggattgatcgtccattaattaataaacaacaaatcaacgacagattaaatattgttgaagagtttatggaccgttttattgaaagagatacattacgtaatcatttaaatcaagtgtatgacatagaacgactagtaggaagagtgagttatggaaacgtaaatgcaagagatttaatacaacttaagcattctatatccgaaatacctcacattaaagcattactcaatgaattgggtgcacaaactaccacgcaatttaaagaattagaacctttagatgacttgttacaaattttagaagaaagtttagttgaagaaccacctatttccatcaaagatggaggattatttaaaaatggcttcaacgcgcaacttgatgaatatttagaagcttcaaaaaatggtaaaacttggcttgcagaattacaagctaaggaacgtgaacgtacaggtattaagtcattgaaaattagttttaataaagtgtttggttattttattgaaattacacgtgcaaacttaaataattttcaacctgaagcgtttggctataatcgaaaacaaacattatctaatgctgaacgatttattacggatgaattaaaagaaaaagaagatataatacttggtgctgaagataaagcagtagagttagaatatgaattatttgttaaattacgagaacacattaaaacgtacactgaacgtttacaaaagcaagcgaaaatcatttcagaacttgattgtttacaaagttttgctgaaattgctcaaaaatataattatgtcaaacctacatttagtgatgataaagttttacatttagaaaactcaagacatcctgttgttgagagagtgatggattataatgattatgtacctaatgattgccatcttgatgatgaaacgtttatttatctcattacgggacctaatatgtcaggtaagtcaacatatatgagacaagttgctataataagtatcatggctcaaatgggagcatatgtaccatgtgattcagcaacattacctatatttgatcaaatttttactaggattggtgcagcagatgatcttgtatcaggtaaaagtacatttatggtagaaatgttagaagctcaaaaagctttaacttatgctactgaaaatagtttaattatctttgacgaaataggaagaggtacatccacttatgatggtcttgcgttagcgcaagcgatgattgaatatgttgctcaaacttcccatgctaagacacttttctcaacacattatcatgaattgacatcacttgatcaaatgcttaagtgtttaaaaaatgtacatgttgctgcaaacgagtatcaaggtgaactgatatttttgcataaagtcaaagatggcgctgtggatgatagctatggtattcaagtggcaaaattagcggatttacctaatgaagtcattgatagagcgcaagttatattaaatgcatttgagcaaaaaccttcgtatcaactctctcatgagaatactgacaatcaacaaacggttccgtcgtataacgattttggtcgaacagaagaagagcaatcagttatagaaacacatacatcaaatcataattatgagcaagcgacctttgatttatttgatggttacaatcaacaaagtgaagttgaatgtcaaattcgagaattgaatctatccaatatgacaccattggaagccttaatcaagctgaatgaattacaaagtcaattaaag

SEQ ID NO: 34787 - DNA, 297 bp, Staphylococcus epidermidis
gtgaggtgtatcccgatgttaaaattaaacttacaattcttcgcatctaaaaaaggggtaagttctacaaaaaacggacgtgactctgagtctaaacgtttaggtgcaaaacgtgctgatggtcaatatgtatcaggtggttctatcctttatcgccaacgtggtactaaaatctaccctggtgaaaatgtaggtcgtggtggcgatgatacattattcgctaaaatcgacggcgttgttaagtttgaacgcaaaggtcgcgacaaaaagcaagtttctgtatacgcagttgctgaa

SEQ ID NO: 34788 - DNA, 318 bp, Staphylococcus epidermidis
atgattactgttgatattacggttaatgacgaaggtaaggtcacagatgtagtcatggatggtcatgctaatcatggtgaatatggtcatgatattgtctgtgcaggagcatcagcagtcttatttggaagtgttaatgctataatgggattaacatcagagaagccagatatcaactacgaagatgacggcggatattttcatataagaagtgttgatacgaataacaaagaagctcaattaattcttcaagcaatgttagtttctttacaaactatagaagaagaatataatgaaaatatcaaattaaattataag

SEQ ID NO: 34789 - DNA, 306 bp, Staphylococcus epidermidis
atgtttgctataattgaaacaggtggaaaacaaatcaaagtagaagaaggtcaagaaatctacgttgaaaaattaaatgctaacgaaggtgactcattcacttttgataaagttttatttgtaggtggcgactcagttaaagttggtgctccaacagttgaaggtgcatcagtaactgcgacagttaataaacaaggacgcggtaaaaaaattactgtcttcacttacaaacgtcgcaaagactctaaacgtaaaaaaggccatcgtcaaccatatactaaattaacaatcgataaaatcaacgca

SEQ ID NO: 34790 - DNA, 519 bp, Staphylococcus epidermidis
atgcgtactttttattactttctaataggtatacttctattttatattgataccattatagggcttaccatccccatgcatttcgggaaaattgatattatttttgtaccacatttaactatcatgtacattcttatcatgacggtttaccgaggttttggcgttgctatgtctttagcattctttttcggaatagtaactgatttatattttggaagtatatatggtttatatatgtttggttatatcattttagttgttatagttgataaattttttaaaatcttttatcgagattattctgtattattttttatcattttattatccacaatgtttttagaagtatatgtggctatgatctatggagtaataggtttcattaaatttaatttaatagaatttgtattattaagacttattccaactctcatcattaattttttattactgattatgttatttcctattattattaaatttactaaaaaagtaaaaaacacaattgacagtaaggca

SEQ ID NO: 34791 - DNA, 552 bp, Staphylococcus epidermidis
ttgagaataaatgaaatggcactgcatgaaaaacctagagaacgtttaattacatatggcgctaaaagtctatccaatgttgaacttttagcaattctcttaaacactggtagaaaaggattttctagtattgacattgcaaacgaattactgaagcaacaatccactattagagatttaaaaaaattgtctataaatgatctactgaaaataaagggcattggactttataaagctgtaataatacaggctgcatttgaactaggtgaacgtattaattctacaagcacttttgacaaagtacagattacacatcctagtgatgttgctagtctgatgatgtcgacaatgaaagatttagagcaagaacattttgttgtacttttacttaactcaaaaaatatagtcacaaaacaagcttgggtatataaaggcacattgaatagttcgattattcatccaagagaagtatttaatattgcaataagagagtcttctaattcaataatagttgtacataatcatccttcaggtgatgtattaaccatagta

SEQ ID NO: 34792 - DNA, 2628 bp, Staphylococcus epidermidis
atggaaatgaaaccaaaatatgatccaagagaagttgaaaagggtcgttatgaggaatgggtaagtaatggttactttaaaccatctgaagataaatctaaagaggcatatacaattgtaattccgccccctaatgtaacaggtaaattacatttaggtcatgcatgggatactactttacaagatataataactagaatgaaaagaatgcaaggatacgatactttatatctgcctggtatggatcatgctggtatagcaactcaagcaaaggttgaagcaaaacttaatgaacaaggtatatctagacacgacttaggaagagaaaaatttttacagcaagcatgggattggaaagaagagtatgcaacatttattagacaacaatgggctaaacttggcttagggttagattatagtagagaacgctttacgttagatgatggtttaagtaaagctgtaagaaaagtatttgttgatttatataataaaggtattatttatcgtggtgaaagaattattaactgggaccctaaagctagaacagctttatcagatattgaagtcattcatgaagatgtccaaggtgctttttatcattttaaatatccttatgctgatgggaatggatatatagaaatagctactacacgtcctgagactatgttaggtgacactgctattgttgtaaatccaaatgacgaaaggtataaagatgtgattggtaaaacagttatattacctattgtaggaagagagttacctattttagctgatgaatacgttgatattgaatttggttcaggagcaatgaaagttactccggcacatgatcctaatgactttgaaattggtcaaagacatcaattagaaaatattatagtcatggatgaatatggtaagatgaacgataaagctgataaatacaaagggatggatagatttgattgtagaaatcagcttgttaaagacttaaaagaacaagatcttgttataaaaattgaagaacatacacattcagtaggacattctgaacgttctggtgcaatagtagaaccttatttgtctacacaatggtttgtaaaaatgaaacctttggcacaaagagctttggataatcaaaatacaaaagatagaattgactttttcccaggtagatttgaaaatacattcaatcgctggatggaagaaattagagattggacgatttcgcgtcaactatggtggggccaccaaatacctgcttggtatcataaagatacaggtgaagtctttgttggtgaagaagcacctgaagacatcgagaattggatacaagatgaggatgtattagatacatggttctcaagtgcactttggccgttttcaacattaggatggcctgatacaaatgctgatgattttaaacgttattatccgacaaatgcattagttactggttatgatatcattttcttctgggtagcccgtatgattttccaaggattagaatttactgatagaagaccatttaatgatgtattactccacggtttagtcagagctgaagatgggcgtaaaatgagtaaatcattaggtaatggcgttgatcctatggatgttattgacgagtatggcgctgatagtctacgttactttttagcaacaggatcttcaccaggtcatgacttgagatattctactgaaaaagttgaatcagtttggaattttattaataaaatatggaatgctgcccgctttagtttaatgaatattggtgaagattttaaagtcgaagatatagacctaagtggtaatttgtcattagcagatcaatggatattgactagattaaatgaaacgatatctacagtaaccgaattaagtgataaatacgaatttggtgaagtaggtcgtgcgctttataatttcatttgggatgagttctgcgattggtatattgaaatgagcaagatacctatgaatggcgaggacgaatctcaaaagcaaacgacgcgatcagtacttagttatgttttagataaaataatgaaaatgttacatccatttatgccttttgtgacagaaacaatttggcaaagtcttccacatcatggagaaacaattgtaaaagctaactggccaactgttgatcaagcattaatctttaatgaaagtaaacaaacaatggaacaattagttgaaattattaaatctgtccgtcaatcaagagttgaagttaacacaccgttatctaaggcaataccgattttaattcaaactaaagatgaaaagattaaacatacacttatggataacataagttacctacacaaattctgtaatccaagtcaattgactattgatactgagattgaaattccagaaaaagctatgacaactgtagtagttgctggtaaggtagttttgccattagaaggtcttattgatatggacaaagaaattgctcgacttgaaaaagaattagataaattacaaagcgagttagatagagtagataaaaagttatccaacgagaattttgtaaataaagcaccagaaaaaataattaatgaagaaaaagaaaaacaacaacattatcaagaaaaatataatggtgttaaatctagaattgaacaattaaaggca

SEQ ID NO: 34793 - DNA, 429 bp, Staphylococcus epidermidis
atgcattggttaaaaatattttatcatttattatgcgcaaccacgattagcgtgatattacttattataactatattaatggatgcgttactacaaaacacacacttaactcagttattactcaatattgattttttaatcaaccctgatgaagtgccaacaattattgaagtactgattcatttaagtattggaatattgatttatctcgcctttttaattatctatcattattcaaaatccttgtatcatctcgcatacttacctttagtattgatatttactttgatgtatccacttctcgtttttcttgcgcaacgtccatttttttcctttagttggaacgaatttgcatggtggttagttgcacatctttttttcatcattttaatggcgacttgtttacctatcatttcgaaaaaaatttta

SEQ ID NO: 34794 - DNA, 888 bp, Staphylococcus epidermidis
atgaataaagaacaattagaaaaaatgactcatggtaaaggattcattgctgcattagaccaaagtggtggtagtacacctaaagcacttaaagaatatggtgtgaatgaagaccaatacagtaatgaagacgaaatgttccaacttgttcacgatatgcgtacacgtgttgtaacttcaccttcattttcacctgataaaattttaggtgcgattttattcgaacaaactatggatcgcgaagttgaaggtaaatacactggagactatttagcggacaaaggcgttgttcctttcttaaaagtcgacaaaggtcttgctgaagagaaaaatggcgtacaattaatgaaacctattgatgatttagatgcaactttaaatcgcgcaaatgaacgtcatatcttcggtactaaaatgcgttctaacatccttgaacttaatgaacaaggaatcaaagatgttgttgaacaacaatttgaattcgctaaaaaaatcatcgctaaaggtttagtacctattatcgaaccagaagttaatattaacgctaaagataaatctgaaattgagaaagttttaaaagctgaaatcaaaaaaggtttagattcattaaacgatgatcaattagttatgttaaaattaactattcctactgaagctaacttatataaagatttagctgaccaccctaatgttgtacgtgtagtagtattatcaggtggttacagccgtgatgaagctaacaaattgttaaaagataacgatgaattaattgcaagcttctcacgtgcattagcaagtgacttacgtgctagccaatcacaagaagaattcgataaagcattaggcgatgctgtagattcaatctatgatgcgtcagtaaataaaaac

SEQ ID NO: 34795 - DNA, 816 bp, Staphylococcus epidermidis
gtgaaggataataatgaagtattaaagttatttatagtttcagattcaattggagaaacagcgcaacgaatgattcatgcgacgctgacacagtttccagatttaactcaagtagaaattaagaaatttccatatattaaggacgaacaagaatttttaaatgtcttacaattagctaaagaacaaaatgcaattgttgcaacaacattagtaagtgagtcatttaatgcattaggtcatcagtttgcaaatgaacatcaaattccctatgtagattacatgtctgagttaattagcataattaaacaacatacacacgctaaaccattaatggaaagtggtgcgttgcgtaagcttaatgatgagtattttaagcgtatagaagcaattgagtattcagtgaaatatgatgatggtaagcattttacagatattggagaagcggatgctttaatagtaggtgtatcacgtacctctaaaacgccattaagtatgtacttagctaataaaggatataagattgcaaatattcctttagtccctgaagtggctattccagataatgtatttcaacaaaagaatttaaaggtatttggattaacagcaagtcccaattatatcgcaaatatacgacgtaatcgtgcagaaacattagggctatcttcagaatctaattacaatagtttagagcgtatcaaaaaagaattatcttatgctgaagaagtttttagaaaattaaatgcaacggtaattaatacagaatataaatcgatagaggaatcggcattttatattgaaaagtttttagctaaacgt

SEQ ID NO: 34796 - DNA, 972 bp, Staphylococcus epidermidis
atgaaatttgatagacatagaagattgcgttcatctaagacaatgcgtgatttagtaagagaaactcatgttagaaaagaagatttaatatatccaatatttgtagttgagcaagatgatataaaaagtgaaattaaatcactaccaggcatataccaaattagtttaaatttattgcatgaagagattaaagaggcatatgatttaggtattagagcaatcatgttcttcggtgtgccaaatgacaaagacgacattggatctggtgcatatgatcataatggagttgttcaagaagcgacacgaatatctaagaatttatataaggatttacttattgttgcagatacttgtctttgtgaatacacagaccacggacactgtggcgttattgacgatcatacgcatgatgtagacaatgataaatcacttccattacttgtaaaaacagctatttctcaagttgaagctggagctgacatcattgctccaagtaatatgatggatggttttgttgctgaaattcgtgaaggccttgatcaagcgggatatcaaaatattcctatcatgagttatggtattaaatatgcatcaagctttttcggtccattcagagatgctgcagattcagcaccttcttttggggatagaaaaacctatcaaatggatcctgcaaaccgtttagaggcattaagagaattggaaagtgatcttaaagaaggttgcgatatgatgatagttaaaccatctttaagttatctagatattattagagatgtaaaaaataatacgaacgtgccagtcgtagcatacaacgttagtggagaatatagtatgacaaaagcagcagcgttaaatggttggatagatgaagagaaaattgttatggaacaaatgatatctatgaaacgtgcaggtgctgatttaataattacttattttgcaaaagatatctgtcgttatttagataaa

SEQ ID NO: 34797 - DNA, 678 bp, Staphylococcus epidermidis
atgaaaccagttatagttatgacgcagacgaatgaagttcatagtcatttagttgatattatccataagccttttatccaactaaaacaacttcattttaatgaaaaattgcttgatcatagctacgactggcttattttttcgtctaaaaacgcagtaaaatacttttatccttatttaaaaaacgttaaagttaaaaaggtagctgttataggtgataagacagctcagtattgtaatgaattaggtattagtgtcgactttgtgccacgtgatttttctcaagaaggctttttggacgagtttaagattagcgaacaacatttattgttgccctcaagtgaaaaagcacgtcctaaattagttcaacaattgagcaaatataatgaagtcgttaaaattgatttatatagaccagtaccgaattttaaaaatataagtcaagttaagtctcttgttagaaaacatcaaatagacgcagtgactttttctagttcctctgcagttgaattttatttcaaagaggacaatgtgcctgaatttgatcattattttgctatcggtaagcaaactgctaggaccattttaaaattcaatacatctgtaaaagtggcaaataaacaaacattagattcacttattgataaaataatagaaagtagggaacaaaatgaaatt

SEQ ID NO: 34798 - DNA, 924 bp, Staphylococcus epidermidis
atgcgtaaattaattgttgggtcgcgaagaagtaaattagcgctaacacaaagtcaacaatttatagataaattaaaatttatcgatccgtctttggatattgaaataaaagaaattgtaactaaaggcgacaaaattgtagataaacaattatccaaagttggaggtaaaggactttttgttaaggaaatccaaaatgaattatttaataaagagatagatatggcgattcattctctaaaagatgtaccaagtatgattcctgacggtcttaccttaggatgtattcctgatagagaaattccttttgatgcctatatagcaaaaaatcatataccattacaagaattgtctgagggcagcattgtaggtacaagttctttacgtcgtggcgctcaaattttatcaaaatacccacatttaaaaattaagtggattcgtggaaacattgatactcgattaaaaaaattagagactgaagattatgatgctattatattagctgctgctggattaaaacgcatgggttggtcagataatattgttacgacttatcttgatcgagatatattactgccagctatagggcagggtgcacttggtattgagtgtaggagtgatgacaaagaacttttagatttactatctaaagtacacaatcatgatgtagcacaatgtgtgactgctgaacgtacttttctatcagaaatggatggcagttgtcaggttcctataggtggatatgcaacaattgctcaagataaccaaattgaatttacaggactgattatgtctccagatggtaaggaaagatatgagcatacagcattgggtactgatcctgtaaaattgggtatagaagtgagtcaagtacttaaaaaacaaggtgcttatgacataattaaaaaattaaacgaagcagaa

SEQ ID NO: 34799 - DNA, 810 bp, Staphylococcus epidermidis
atgcaagaaaccctgttaattcgatttcatgaaatcatattaatgatttatctgtttagtattatatgttactttgttgatttcattaataaaaattataagactagaactgtaggtttttattcattagggattgtttgggttttacaaacaatctctttgtctattttttttattcatactaaacaagtgccactaggttctatatttgacgtttttttctctttaacttggattattatatcaatttcgttgatattgaatttgattaaagtaatgaatttttctgtttttttccttaatttgattggatttatcctaatgagtttaaatacttttcagcctgaacattatcaaacgcaaattcaacaaattgcagtaattaatgaattattacttgttcatatagcacttgcagtattaagttatgcattttttgcaatcgcatttgtaaattcattactctacattattcaatatcgaaatttaaaggagaaaaatttcgatcaaaattactttagaattggtagtgttgctactttagaaaccatcgttttctattcaacacttgttgcatggattatccttatattaagtacgattttaggtgcacaatggggtatctttgcagtcggtaaacaaatatttatagatccaaaagtaatattttcaacaattattaatttattatatggtgtttatattttcattagaataaaaaaatggatatcacaaagaaatcttatctactttaacattatattattttgtttgtgtatgattaatttattctttttaactcattttaga

SEQ ID NO: 34800 - DNA, 1344 bp, Staphylococcus epidermidis
atgcattttgttgcaattagcataaatcatcgaacagctgatgtaacattaagagagcaagttgcttttagagatgatgccttacgattagcacatgaagatttatatgaaactaaagcaattttagaaaatgtcattttatctacatgtaatcgtactgaagtatacgctattgttgatcaagttcatacaggacgttattatatacaaagatttttagcgcgctcttttggatttgaggtagatgatattaaagatatgtcggaagttaaagtgggggacgatgcagttgaacatttattgcgtgtcacttctggcttagattcaattgtgcttggtgaaacacaaattttaggacaaatgcgcgatgcatttttcttagcgcaaaatactggtacaactggaacgatttttaatcatttatttaaacaagcgattacttttgctaaaaaagcacacagtgaaacagacattgcagataatgctgtgagtgtttcttatgctgctgttgaattagctaaaaaggtatttggaaaattaaaaagtaaacatgctgtcgttattggagcaggggaaatgggtgaattatcactcttaaatcttttaggttctggaatttcaaatgtaacaattgttaatcggacattatctaaagctaaaattttagccgaaaaacacaatgtttcatatgattcactttcagcattaccatctttattagaaacaacggacatagtaattagttctacaagtgctgaagactatatcatcactaattctatggtgaaaacaatttcagaaactagaaaactggattcattagttctgattgatattgcggttccacgagacattgaaccagggattgatgcaattacaaatatttttaattatgatgttgatgatttgaaagatttggtagatgccaatttaagagaacgtcaattagctgctgaaactattgcaggacaaatacctgaggagattgattcacacaacgaatgggttaatatgcttggtgttgtacctgtaatcagagctttacgtgaaaaagctatgaatatccaagcagaaactatggaaagtattgatcgtaaattgccagatctctctgaaagagaacgtaaagtcatttcgaaacatacaaaaagtattatcaatcaaatgttaaaagatcctatcaaacaggctaaggaattaagtactgataaaaaaagtaatgaaaaattagagctatttcaaaacatatttgatattgaagccgaagatcctcgtgaaaaagcaaagttagaaaaagagagtagagcaaaggaaatcttagcgcatcgaatatttagttttgaa

SEQ ID NO: 34801 - DNA, 1260 bp, Staphylococcus epidermidis
atgttcaaattcaatgaagatgaagaaaatttaaaatgttctttctgtggtaaagatcaagatcaagtaaaaaaattagtcgcaggaagtggcgtttatatttgtaatgaatgtattgaattgtgctcagaaatcgttgaagaagaattagcacaaaatacatctgaaggatttacggagttaccaactcctaaagaaattatggatcacctcaatgaatatgtcattggtcaggaaaaagccaaaaaatcattagcagttgctgtatataatcactataagcgtattcaacaattgggtccgaatgaagatgatgttgaattacaaaaaagtaatatcgcattaattgggccaactggtagcggtaaaacattattagctcaaacactagctaaaacactaaatgtaccatttgcaattgctgatgctacaagtttaacagaagcaggttatgtaggtgatgacgtagaaaacatcttattacgtcttattcaagctgctgatttcgacattgataaagctgaaaaaggtattatatatgtcgatgaaattgataaaattgcgcgtaaatctgaaaacacttcaatcacgcgtgacgtgtctggtgaaggtgtacaacaagcattgcttaaaattttagaaggtacaactgctagtgtaccgcctcaaggtggtcgaaagcatccaaaccaagaattaatccaaattgatacgacaaacatcttatttatcttaggtggagcttttgatggtatcgatgaagtcattaagagacgcttaggagaaaaagtgataggatttgctagtaatgaagcagataaatatgatgaagaagctttactggaacaaattcgtccagaggatctccaatcatatggcttaattccagaatttattggtcgtgtacctatagttgctaatcttgaaactttagatgttgctgcacttaaaaatattttaactcaacctaaaaatgcgctagttaaacaatacactaaaatgctagagttagataatgtagaattagagttttctgaagaggctctatctgctataagtgaaaaagcaatcgaacgtaaaacaggagcgcgtggattacgttcaattatagaagaagcattaattgacatcatgtatgatgtaccttcttctgaaaatgtaagtaaagtagtcattactgaacaaacaattaatgaagaaattgagcctgaattatatgatgatgaaggaaatctaattaataagaacaagacatctgct

SEQ ID NO: 34802 - DNA, 1716 bp, Staphylococcus epidermidis
atgagaagaaaacgcgattcatacgattatgtcatcattggtggcggtagtgcaggttcagttcttggtgcacgcctttcagaggataaagataaaaatgttttggtattagaagctggacgtagtgactatttctgggatttatttattcaaatgccagcagcattgatgttcccatcaggtaatcgtttttatgactgggaatatcaaactgacgaagaaccacatatgggacgtagagtagatcatgcgagaggtaaagtattaggtggctcaagttctattaacggtatgatttatcaacgaggtaacccaatggactatgaaggatgggcagaacctgaaggaatggacacatgggactttgcacattgtctaccatacttcaaaaagttagaaacaacatatggtgcagcgccatacgataaagttagaggccatgatggtccaatcaaattaaaacgtggaccagctactaatccattatttaaatcattctttaatgcaggtgttgaagcgggctatcataaaactgcagacgttaatggatacagacaagaaggttttggaccatttgatagccaagtacatcatggacgtcgtatgtctgcttcaagagcgtatctacgcccagcattaagacgtagaaacttagatgttgaaacacgtgcattcgttacaaaattaatttttgatgaaaataatagtaaaaaagtaacaggcgtgactttcaagaaaaatggtaaagaacatactgttcatgcaaacgaagttattttatctggcggtgctttcaatacaccacaactattacaattatcaggtattggtgactcagaattcttaaaatcaaaaggtatagagccacgtatgcatttaccaggtgttggtgagaacttcgaagatcacttagaagtatatattcaacataaatgtaaacaaccggtttcactacaacctagccttgatgtcaaacgtatgccgttcatcggtttacaatggatttttgcacgtaaaggtgcagcggcgtctaaccactttgaaggtggtggctttgtaagatcaaatgatgatgttgattatccaaacctcatgttccatttcttaccaattgctgtaagatatgatggtcaaaaagcaccagtagcacatggttaccaagtacatgttggaccaatgtactccaactcaagaggtagtttgaaaatcaaatctaaggatccatttgaaaaaccaagtatcgtgtttaattacttatctacgaaagaagacgaaagagaatggattgaagcaattagagtagcaagaaatatcctaaaacaaaaagctatggacccatttaatggtggcgaaatttcaccaggaccacaagttcaaacggatgaagaaattctagattgggtacgtaaagatggagaaactgcattacatccatcttgtagcgcgaaaatgggacctgcatctgacccaatggcagtagtcgatccattaactatgaaagtacatggtatggaaaatttacgtgtcgttgatgcttcagcaatgcctagaacaacaaatggtaatattcatgcacctgtattgatgttagctgagaaagcagcggacattattcgtggtagaaaaccgcttgaacctcaatatgttgactattataaacatggtattgatgatgaaaaagcaggtgcaatggaagatgatccattctaccaatat

SEQ ID NO: 34803 - DNA, 1488 bp, Staphylococcus epidermidis
atggaacttgtagataaattatcaaatcgtcaatatattgatggagaatgggttgaaagttcaaataaaaacacaagagatattataaatccttacaatcaagaaacaatcttcactgtagctgaaggaactaaagaagatgttgaaagagcaattttagctgctagaagatctttcgaagacggtgaatggtcacttgaaacaagtgaagtcagaggtaaaaaagtgagagccgttgctgataaaattaaagaaaatagagaagagttagctaaattagaaacattagacactggtaaaactttagaagaatcctatgctgatatggatgatattcataatgtgtttatgtattttgctggtttagctgataaagatggcggtgaaattatcaattcacctattcctaatgctgaaagtaaagtagttaaagaacctgtaggtgttgttactcaaattacaccttggaactatccattacttcaagcatcttggaaaattgcgccagctttagcaacaggttgctcattagttatgaaaccaagtgaaattactccgttaacaacaattcgtgtatttgaattgatggaggaagttggtttccctaaaggaacaattaatttagtacttggtgctggatcagaagtgggcgacgtgatgtcaggtcatgaagaagtcgatttagtttcatttacaggtggtattgaaacaggaaaacacatcatgaaacaagcagctaatcacgtgactgacgttgcattagaattaggcggcaaaaatcctaatattatttttgatgacgctgattttgaattagctgtagaccaagcacttaatggtggatatttccacgctggtcaagtgtgctctgctggttcaagaatcttagttcacaatgatattaaagataaattcgaaaaagctcttatcgatcgtgtaagcaaaatcaaattaggtaacggttttgatcaagatactgaaatgggaccagttatctcaacagcacaccgcgataaaattgaaggttatatggaagttgcgaaaaaagatggagcaacaattgcaattggtggtaaacgccctgaacgtgaagacttacaagccggattattctttgaacctactgtaattacagattgtgatacatcaatgcgtattgttcaagaggaagtctttggaccagttgtgactgtagaaggatttgctgacgaagaagaagctattcgcttagcaaatgattcaatttacggtttagcaggtgctatatttactaaagatattggtaaagcacaacgtgttgcaaataaattgaaacttggtacggtttggattaacgatttccatccatactttgcacaagcgccatggggcggttacaaacaatcaggtatcggtagagaattaggtaaagaaggattagaggaatatttagtaagtaaacacattcttacaaatactaatccagaaccagtggattggttcagtaaa

SEQ ID NO: 34804 - DNA, 597 bp, Staphylococcus epidermidis
atgagtgaatcaaatcatattacatggcatgactcagaagttacgaagaaacaaagacagcataaaaatggacacaaaagtgctgttatatggtttacagggctatctgggtcagggaaatcaacggtctctgttgccttagaaaaagaattatttaatgaaggaaaacaaacataccgtttagatggtgataatgtgcgtcatggtcttaataaaaatttagggtttagtcctgaagatcgttcagaaaatattcgacgcattggagaagtagcaaaattaatggtagacgctggagccttaacagttactgcttttatctccccatataaagaagacagagaaggtgttagagcattactagaggataatgagtttatagaagtatatacaaaatgtagtgttgaggaatgtgaaaagagagatcctaaaggattgtataaaaaagcacgatctggggaaatacctgaatttacaggtataagtgcaccttatcaagcacctgaaaaccctgaaattactatagatactgaacacgacactattgaacaatcagtggtacaaattatacgttatcttaaagaacacgaatatatt

SEQ ID NO: 34805 - DNA, 609 bp, Staphylococcus epidermidis
atgtctaaatttgatgaacaaataattgttgtaaacagagatattttatttaacaaagataagaatgcttttaatggttttttacataaaaataatttcaaaggaaaagaaatttttagtgcgttaagtaaatatgaagtgaaaagacgtggtgatatggaagatgatccatcgtttaaacaattaatatcatattgcctactagaaaatgagaagggtgaaatccttatttacgaacgtctttctggtggtggagaagaacggttacatggtcagtcatcaatcggtgttggtggtcatatgaacgatgttgttggagctgattctattaatgaagttttaagagttaatgctcaaagagaattagaagaagaagtaggattaagtaataataaatctcaaaatatggaatatttaggttttataaatgatgatgacaatgatgtgggtaaagttcatatgggcgtcgtatttaaaatcactgtgcattcaaacgatgttgaagctaaagaaactgatacgctaaaaattaaatggatagaacaaggcgacattcaatcctatgaggattttgaaacatggagtgcattaattcttcaagatatatca

SEQ ID NO: 34806 - DNA, 354 bp, Staphylococcus epidermidis
atgccacgagttaaaggtggaacagtaacaagagcacgtcgtaaaaaaacgattaaattagctaaaggttactttggttcaaaacatacattatataaagtagctaaacaacaagtaatgaaatcaggtcaatatgctttccgtgaccgtcgtcaacgcaaacgtgatttccgtaaattatggattacacgtattaatgcggctgcacgtcaacatgacattagctactcacgtttaatgaacggcttgaaaaaagctgagattgatatcaatcgtaaaatgttatcagaaattgcaatctcagatgacaaagctttcgctgaattagtatcaaaagctaaagaagctttaaaa

SEQ ID NO: 34807 - DNA, 198 bp, Staphylococcus epidermidis
atgcctaaaatgaaaactcaccgtggagcagctaaacgtgttaaaagaactggttcaggtcaattaaaacgttctagagctttcacatctcacttattcgcaaataaaaatactaaacaaaaacgtcaattacgtaaagctaagttagtttctaaaagtgatatgaaacgtgttaaacaattattagcatacaaaaaa

SEQ ID NO: 34808 - DNA, 525 bp, Staphylococcus epidermidis
gtgtcaaccatagcaaaagatcaaactcaaattaatgagaaaattcgtgcaaaagaactacgcttaataggccaagatggtgaacaaattggtgttaaatctaaacgtgaagctttagaaatggctgaacgtgtggatttagatttagttgttgtagcaccaaatgcaaaaccacctgttgcgagaataatggattatggtaaatataaattcgaacagcagaaaaaagaaaaagaaatgaagaagaaacaaaaagtcattaacgttaaagaattacgtttaagcccaactattgaagaacatgatttccaaactaagttgaaaaatggacgcaagttcttatctaaaggcgataaatgtaaagtttcaattcgtttcagaggtcgtgcgattacacataaagaaattggtcagcgtgtgttagaaaaatttgcagatgaatgtaaagatattgcaactgttgaacaaaagcctaaaatggaagggcgtcaaatgtttattatgttagcgcctatcaacgaaaaa

SEQ ID NO: 34809 - DNA, 1500 bp, Staphylococcus epidermidis
atgaaaaagaataataaacaaaatgacggtgttcaaagaggattaaaagatagacatatttcaatgattgccattgggggatgtataggaactggtctattcatgacttctggtggagctatacatgacgcaggtgcattgggtgctttgattgcctatgcagttattggagcgatggtgttctttctaatgacgtcgttaggggagatggcgacatatttgcctgtgtcaggttcatttagtacttatgctacacgctttgtcgatccttcactaggttttgctttaggatggaattattggttcaactgggtgataacagtagcagctgatgttactattgcagcgcaagttatacaatattggtcccctatgcaaggtataccagcttgggtctggagttgtattttccttattattattttcgcgcttaattctttatccgttagagtatatggagagagtgaatattggttcgcacttatcaaagtagttacagtcatcatatttataggaattggtatcttaactattttagggattatgggtggagaatttgtaggatttgatacgtttacaaaaggagatgggccaatactaggtgggaatttaggaggtagcttgctatcaattcttggtgtatttctagtcgcaggcttctcattccaaggaactgaacttattggtattacagcaggtgaatctgaaaatccagaaagagcagttccaaaagcgattaaacaagtattttggcgtatacttttattttacattctagctattttcattattggtatgttgattccatatgatagtaaggcattaatgggcggtggtgatagtatagctacttcaccttttacattagtatttaagaatgctggattagcttttgctgcttcatttatgaatgctgttatattaacaagtgtattatcagcaggtaactcaggaatgtatgcttcaacaagaatgttatattcgatgagtaaagataaattagcttataattcttttggaaaaacaaataaaagtggcgtaccttatgtatctctaattgcaactggagtactagtcattcttattttcgcattgcaacatttaagtggagatgcatatgaatacattgtagctgctagcggaatgactggttttattgcttgggttggtatagcaatcagtcactttagatttagacgcgcatttgataaacaaaattatgataaatcaaaattaaaatataaagcgaagttattcccatttggtccgatttttgcaggtattttatgtgtaatagttatcattggacaagatgtagattttattaaaacaggtaactttgatatgaatagattttttataacttacatgggaatacctgtattcttaattttcttcttttatcataaatttagatataaaactaaaaagattcctctaaacaaagttgacttaaggcaagatgtttcgatggaagaagtaagacaccataaaaataat

SEQ ID NO: 34810 - DNA, 1935 bp, Staphylococcus epidermidis
atgaatcaaattaatattcaatttccagatggtaatacaaaagaatttgataaagggactactacagaagacatcgctcaatcaattagtccaggattaagaaaaaaagcagttgcgggaaaattcaatggtcaacttgtagatttaacacgccctttagaacaagatggagctattgaaattattactcctgggagtgaagaagcgttagaagtacttcgtcattcaacagctcatttaatggcacaagcattaaaacgtttatacggagacgttaaatttggagttggacctgtaatagaaggcggattctattatgattttgatatggatgataaggtttcatcggatgattttgataaaattgagaaaacaatgaaacaaattgtgaacgaaaatcataaaattgtaagagaagtagttagtaaagaaaaagcaaaagacttcttcaaggatgacccttataaattagaacttattgatgcaattcctgaagatgagagtgtaacactttatactcaaggtgaatttactgatttatgtcgaggtgtacacgtaccttctacttctaaaattaaagagttcaaactattatctacagctggtgcttattggcgtggaaatagtgataataaaatgttacaacgaatttatggtacagcattctttgacaaaaaagatttgaaagcacatctaaaaatgttggaagaacgtcgtgagcgtgatcatcgtaaaattggtaaagatttagaattgtttacaaacaatcaactcgttggtgctggtttaccattatggttaccaaatggtgctacaatacgtagggaaatagaacgttatattgtcgataaagaagtaagtatgggatacgatcatgtttacacaccagtattagccaatgttgatttatataaaacatctggtcactgggatcattatcaagaagatatgttcccagcaatgaagttagatgaagacgaagcaatggtcttaagaccaatgaactgtccacatcatatgatgatttataaaaacaaacctcattcttatcgcgaattacctatacgtattgctgaattgggtactatgcatcgttacgaagcaagtggtgcagtatcaggtttacaacgtgttcgaggaatgacattgaatgattcccatattttcgttagacctgatcaaattaaagaagaatttaaacgtgtagttaatatgattcaagatgtgtacaaagattttggttttgaagattatcgcttcagattgagttatagagatcctgaagataagcataagtactttgatgatgatgaaatgtgggaaaaagctgaatccatgcttaaagaagcatcagatgaattaggtttaacttatgaagaagctattggtgaggcagcattctatggacctaagttagatgttcaagtaaaaacagctatgggaaaagaagaaactctatcaacagcacaacttgattttcttttaccagaacgttttgacttaacgtacattggtcaagatggagaacaacatcgtcctgtagttatacaccgtggtgtagtttctactatggaacgttttgttgcatttttaacagaagaaacaaaaggtgcatttccaacttggttggcgcctatgcaagttgaaattattcctgtaaatatagatttacattatgattatgcaagacttttacaagatgaactaaaatcgcaaggtgtccgcgttgaaattgatgaccgtaatgaaaaaatgggatataaaattcgtgaagctcaaatgaaaaaaataccttatcagattgttgtaggtgaccaagaagtagagaatcaagaagtaaatgtaagaaaatatggttctgaaaaacaagaatcagttgaaaaagatgaatttatttggaatgttattgatgaaatccgtttgaaaaagcataga

SEQ ID NO: 34811 - DNA, 897 bp, Staphylococcus epidermidis
atgcgcaaagtattaattttcgcaattgcgggatttttagcacaacttgttgatggattattaggcatgggatttggcgcttcatcgtcatcaatattattaacttacggtatagcaccggcagtagtgtcagcaaccgttcatttttctgaaattgcaacaacagctgcatctgggacatcacattggagatttgataatgttcataaaccaacaatgttgaagttagctatacctgggtcaataagcgcctttatcggtgcaggtgttttgacatttattcatggtgattatattaaaccattcattgctttattcttgttaagtatgggattttatattttgtatcaatttctatttaaacgtgcacatgaacatcatcatcatgtgggagatttgagtagttttaaagtaattccacaaggttttgtggcaggatttttagacgcaatcggtggtggtggttggggaccagttaatacaccactcctgctttcaagtaaaaaaattcaaccacgatatgcgattggaacagtctcagcaagtgaattttttgttacgtcatctgctgcattaagtttcattatctttttaggagtcactcaaattaattggtttgctgtaattgctttgagtcttggtggaatggtagcggcacctatttcagcgtatttagttaaagtgttacccattaacattcttgcaatttgtgtcggtggtttaattatttttacaaatagtaatgcattattaagctattttgtaaaagataacactatttcaaatacagttcgattcattattattcttgcaatcattattttgcttgtttttcaagtcgttcgaaacaaaaaattgtctttttcttataagaaaagccgagtaaacaaatataat

SEQ ID NO: 34812 - DNA, 1023 bp, Staphylococcus epidermidis
atggcaacgaatattgcaattaacggtatgggtagaataggtagaatggtgttacgaatagcactaaataataaaaatttaaatgttaaagcgattaacgctagttatccacctgaaacaattgcacatttacttaattatgatacgacgcatggagtttatgataaaaaagttgaaccgattgaaagtggtattaaagtgaatggacatgaaattaaattactttctgatcgcaatccagaaaatttaccatggaatgagatggatattgatgttgttatagaagcgacaggtaaatttaatcacggagataaagcagttgctcatattaatgcaggtgctaaaaaagtattactcactggaccgtctaaaggtggagacgttcaaatgattgttaaaggagtcaatgataatcaacttgatattgatacatacgatatttttagtaatgcatcttgtactactaattgtatcggaccagttgcaaaagtcctcaatgataaatttggaatcataaatggtctgatgacaactgttcatgcaataacaaatgatcaaaaaaatattgataatccacacaaagatttaagaagagcacgttcttgtaatgaaagtattattccaacgtcaacaggtgctgctaaagcacttaaagaagtattgcctgaagttgaaggtaaacttcatggaatggctttaagagtaccaacaaaaaatgtctctctcgttgatttagttgttgatttagaacagaatgttacagttacacaagttaatgatgcatttaaaaatgccgatttatcaggtgttcttgatgttgaagaagctcctttagtttctgtagactttaacacaaatcctcattcagcaattattgattctcaatctacgatggttatgggacaaaataaggtgaaagttatcgcttggtatgataatgaatggggttattcgaatagagttgttgaagtagctgacaaaattggacaattaattgatgataaagcaatggtaaaagccatt

SEQ ID NO: 34813 - DNA, 870 bp, Staphylococcus epidermidis
atgcctgaactacctgaagttgaacatgttaaaagaggtattgagccatttataaaaagtgcaaaaatagagaaagtaacttttgctaaaaatgtaattaacggtaagaataataaccgtgagacgattataaaaggtatggaattagatacttttaaaaaacttactgaaggttatgttataaaaaaagttgaaagaagaagtaagtacattattttttatatagcggatcatgacgatgatagaatcttagttagtcatttaggtatggcaggcggattctttgttgttaataaccttgatgagataagtacaccgaattatcgaaagcattggcaagtcattttcgatttggataataaacaaaaattagtctattctgatatcagacggtttggagaaattagaaatatagtcaattttgatagttatccatctttattagaaatcgctccagaaccatttgaagaggtggcatttgaacactatttagaatgtttgacaatgaaaaaatataagaataaaccaataaaacaaacgattcttgatcatcgtgttatagcaggagctggaaatatctatgcctgtgaagctttattcagagctggtattactccggataaaattactaattcactcactaaacaagaaagaaaatccctcttttattatgttcgagaagttttagaagagggtataaaatatggaggtactagtatttcagattataggcatgcagatggtaaaactggacaaatgcaattacatttaaatgtatataaacaaaaaaagtgcaaggtttgtggtcattcgattgaaacaaaagtgatagctggtagaaatagtcatttttgcccaaactgtcagaga

SEQ ID NO: 34814 - DNA, 2628 bp, Staphylococcus epidermidis
ttgaataaattagtattaatagatggtaatagtctaagctttagagcgttttatgctctccctttactttcaaaccatgcaggtattcatacaaatgcagtttacggctttgctatgctcttagaaaaaataattaaagaagaaaaaccgaatcattttttagttgcatttgatgcaggtaaaacgactttcagacattctaagtacagtgaatataaaggtggtcgtcaaaagactccacctgaattaagtgagcaatttccatatattcgtcaacttttagatgcgtatcatattaaaagatatgaacttgataattatgaagctgatgacattataggaacattaagtagacaagctgatgaagaagattttgaaaccattatcattacaggtgatagagacttaactcaattagccactgataatgttacaatatattatacaaaaaaaggtgttaccgacgttgatcattatacacctaaatttatagcagagaaatataatggtttagtgccgaaacaaattatcgatatgaaaggtctaatgggggatacctctgacaatattcctggcgttgctggtgtcggcgaaaagacggctattaaattacttaatcaatttgagtcagtagaaggggtctatgaacatattgaggaggtcactgcaaaaaaattaaaagaaaaactcatcaatagtaaagatgatgccttaatgagtaaagatttagcaacaatcaatgttcacagtccgattgaagtatcattagaagatacaaaattaactctacaagacgacactacagaaaaaattgaactatttaaaaagctagaatttaaacaactattagcagatatagacacatcctctacgaatgaagaagtcatagataaaacttttgaaattgagcaagactttcaaaatgtagatttgaatgatttaaacgaagcggtaatacattttgaactcgaaggcactaattatcttaaagacactattctcaagtttggtttttatacaaatcatcaacatgtagtgataaatgctgaggatgtaaaggattataaacatttagttcaatggcttgaagataaaaatacaactaaaattgtctatgatgcaaaaaaaacttatgtatctgctcatcgattagggattaatatagaaaatattgaatttgatgttatgttagcaagctatattattgacccatcacgttctattgatgacgttaaatctgtggtaagtttatatggacaaaattatgtaaaagataatattacaatatttgggaaaggtaagaaacatcatatacctgaagaaccaattctaaacgaacacattgcctctgtgacagaagctatagcagctgtaactccaaccatgaaatcacagttagaagattataatcaaattgaactgttgaaagatttagaattaccattagcaagaattttaagtgaaatggaagaaattggtatatataccgatatcaatgatttgaaagaaatggaattcgaaattcaaaaaaaattggatgtattaatatccaatattcatgagtcggctggtgaagcgtttaatatcaattctcctaagcaattaggtgttgttttatttgaaacattacaattgcctgtcattaagaagaccaaaacgggctattcaacagctgtagacgtattagaaaaactacaaggtgagcatcctattatagatgatattttagaatatagacaacttgctaagttgcaatctacgtatgtagagggattacaaaaagtaataagcaaagatcatagaattcacacacgttttaatcaaacgcttgctcaaactggtagattatcaagtatagatcctaatttacaaaatatacctatacgattagaagaaggaagaaagattagaaaggcctttaaaccaacttctaaagatagtgtgattttatctgctgattattcacaaattgagttacgtgtacttgctcatattacgcaagatgaaagtttaaaacatgcatttataaacggacatgatattcacactgcaacagcaatgaaagtatttaatgttgaatctgaccaggttgatagtttaatgagacgtcaagcaaaagctgttaactttggtattgtatatggtatcagcgattatggattgagtcagagcttgggtattactagaaaacaagcaaaagcatttattgatgattatttagctagttttccaggtgtaaaacaatatatgtcagacattgttaaagatgcaaaagcacaaggttatgtggaaacactacttcatcgtcgtcgatacattcctgatataacaagtagaaacgttaatttaagaagttttgcagaaagaacagcaatgaatacacccatacaaggtagtgcagctgacataataaaattagcaatggttaaattcagtgaaaagattaaagaaactaaatatcatgctaagttattattacaagttcatgatgaactcatatttgaaataccaaaatcagaagtagaagattttagtaaatttgtagaagaaattatggaacaagcattagtgctcgatgtacctttaaaagtagattcgaattatggtgcaacatggtacgatgctaaa

SEQ ID NO: 34815 - DNA, 1266 bp, Staphylococcus epidermidis
atgtctgcagaaaaaataacacagagtaaagatggtttaaatgtacctaatgaacctattattccgtttattattggtgatggtattggaccagatatttggaaagcagctagccgagtaatcgatgctgctgttgaaaaagcgtataatggagaaaaacgtatagaatggaaagaagtcttagcaggtcaaaaagcttatgatgaaactggagaatggttgccacaagaaacgttagaaacaatcaaagaatatttaattgctgttaaaggtcctttaacaactccaattggtggtggaattcgttcattaaacgtagcactgagacaagagttagatttattcacttgtttacgtccggtacgttggttcaaaggcgttccttcaccagttaagcgacctgaagatgttgatatggttattttccgtgaaaataccgaagatatatatgcagggatagaatttaaacaaggtacatcagaagtaaaaaaagttatagatttcttacaaaatgaaatgggagcaactaatattcgtttccctgaaacttctggtattggtataaagccagtatctaaagaaggtacagaacgtctagtaagagcagctattcaatatgcacttgataataatcgtaaatcagtaactttagttcataaaggtaatattatgaaatttactgaaggttcatttaagcagtggggctatgatttagctcataatgaatttggtgataaagtgtttacatggcaacaatatgatgaaattgttgaacaaaagggtaaagatgctgcgaatgaagcacaaagtaaagctgaacaagaaggtaaaattattattaaagactctattgctgatatcttcttacaacaaatattaactcgtccagctgaacatgatgttgtggcaactatgaatttaaatggtgactatatctctgatgctcttgcagctcaagttggaggcattggtattgcgcctggtgctaacattaactatgaaactggacatgctatttttgaagcaacacatggtactgcacctaaatatgctggtttaaataaggttaatccgtcatcagaaattttaagttcagttttaatgcttgaacatttaggttggcaagaagccgcagataaaatcactgactctattgaggcaacaattgcttcaaaaatcgtaacatatgattttgcgcgtcttatggatggtgcaaaagaagtttcaacatctgattttgctgatgaactaattaagaatattaga

SEQ ID NO: 34816 - DNA, 1119 bp, Staphylococcus epidermidis
atggcagaattaaaaagaggtttagaaggggttattgcagctgaaactaaaattagctcgataattgacagtcagttaacatatgcgggctatgatattgacgatctcgcagaaaacgcgcaatttgaagaaataatttttttactatggaattatagacttcctaatgaaaatgagttaagtgaattaaaagaaaaattatttgattatatgactcttaataatagagtatacaagcactttgaggagtatgtgacggatcatgtacatccaatgactgctctacgtacatcagtatcatatgtagctcattttgatccagaagcggaaaatgaatctgatgagaataaatatgatagagctattcgtattcaagctaaaatcgcttctttagtaacggctttcgctagagttagagacggtaaagaacctgtcaaacctaattctgaacttagttatgcagcaaatttcttatatatgttaaggggagaactaccaacagaagttgaagttgaagcatttaataaggcattaattttacatgctgatcatgaacttaacgcatctgcatttacggcacgttgcgcagtatcttcattatcagatatgtattcaggtgttgttgcagctattggttcattaaaaggaccattacatggtggtgcaaatgaacgagtgatgtcaatgcttaaagaaataggaagcattgataatgtagatcactatttagatgaaagatttgcaaataaagataaaattatgggctttggtcatcgtgtttataaagatggtgatccaagagctaaatatttaagagaaatgagccgtaaaatcactgaagaaacagggcaaagtgaactgtttgaaatgtcattagccattgagaagagaatgaaagaagaaaaaggacttattcctaatgtcgatttctttagtgctacagtctatcatagtatgaatattccacatgacttattcacaccaatatttgcagtaagtcgtacttctggctggattgctcatattttagagcaatatcgagacaatagaattatgcgaccaagagctaaatatataggtgaacaaaatcgtaaatatgtgcctattgaagaaagacca

SEQ ID NO: 34817 - DNA, 2010 bp, Staphylococcus epidermidis
atgactttcaagattttgtggaaaatgattaaacaaaattttgttaatcaacgtcatatcattgttccatttattagcgtaataagtattttattcggtattgaatacatattgttatcgttaacaaccaacatttactttaatgagcatcatcctgaattaaaaatatctgcgattattggaatagtgtttatgacgatgttattattcatatttttaatttatgcaaatcactttgttatgaatcataggaaaaaggaatttgccttaaatatggctcttggtatggagaaaaaacatctaagactcatcatcttgattgaacttttcattcaatttattatatctgcaatcttgagcattgttggaggttacttatttggtgagctcttttttatgttatttaataaaatagttaatacgcatcaacctcagttgtcagattatccatttgatgttttgtcaatgaaaatcacattaaccatgctactcagtttgatgatcatattgtttgttattaacaattttaaaatatcatttaaaaactccttacagttattgattaaaaataaaagtaagacgcatgaaaagtcacgtgtacggttaataatatttttaattttaggattaatttttatagggattggctattatttagctataaaacctaacacggctatcggttccttggggattatattttttgcgattttgtcaacgcttatcggtacctatttgctctttgttagcttaggatcaatagttttagaaatgttacaaaaattagatcattattattataaacccaatcattttttctttattgcaggactcaaatcacgcgtaaaatctagtgcgattggtttagctacgatttcatttatgtgtacatttctgattgttacgttaagtatgacagtctcaacttatagaaatatggatcataggtttgaatttgcatttaaaaatgattacgcaggttattatattggtgattttcataaagatagcaaaattcaacgtaagatagaaaatttaaaaaaagatattcgccaagaagttccaactggtcaatttaaaatctatgcacgaggtatggttggagcggaattgcagggaggcttaaaacataaaaagctaaaaagacaaactgtatcgagtggtttatttaatttcggaaataagcaaaaattcaactcttttatttctatatataataaaagtgattataataaaaacaataaaaaaataaaattagatgatgatgaaattgcaataagtacaagtgtgtcattatttaaaaaaatgaaaacgctcaatatatttgggaaaacatatagagttaaatatattgagtctacaaatatagataacttactctatgcagatggtataactttaattgtgaatcaacaacaactgatggatcgtatcgttaatgaatatcgtaatcacaatgatgaaaatttaatcatcactcctaatcaagtccaaactgccgttgaatttaatgtattaaaagaaaaggataagttgaatcatcgtattaagaaaataggtgttcaacacgatattgaatttcaagtgaaaaaacaaaacctattgatgtggaaacaagtcaactcaagtttagtttttgttggaagtgttgtatctctagttttattgataggtatatttcttatgatgtattataaacaagtttcagaaggacatgaagatagagatgcatatataacgatgaaacaactaggattagatgaaattttaatcaaaaaaacaattaataaacaagtaatatgggtatttctcattcctgtaattgttgcaatcatacatacgttagctgcttttcgcatcatatactctgtattaggaatcgttggtcaatatgacttgggactgtatgctacaagttatgtcggtgtgatagttgtatttattattttttattcaataatgtactggattacttctagaatttattatacgatgataaacggtaagcat

SEQ ID NO: 34818 - DNA, 1467 bp, Staphylococcus epidermidis
atgaaatttatgaacaaaatgggtaagacgacgcttgcttcatcaatcgtagcagcatccgttttaagtacggtaaacgtatcatatgcttcaggtagctcagaacaaagtgctcaaactaagcaaacacaaaacgatgccattgctttcggcaacacaaaaaatccaaaaaatgtcatctttatggttggcgatggtatgggaccttcttttaacactgcatatcgctattataaaaataagcctggtgctaagaaaatgactccaactgcatttgataaatatctaaaaggaacaaatcgtacttattctaatgatcctaaagaaaatgttacagactctgctgctggaggaacagcttttagtaccggtcacaaaacatataacggtgcgattagtgttgatacaaataaaaaaccaattaaatctgtgctagaacaagctaaagaacaaggaaaatcaactggtttagtaactactgctgaacttactgatgcaacacctgctgtatatgctgctcatatagattcacgcgacaaaaaagatgaaattgcacagcaattttataatgataaaataaatggcaaacataaagtcgatgtgatgttaggtggcggtgcaaaatacttcggtaaagaaaataaaaatttagcgaaaaaattcaaaaaagatggttatgatatcgtttctaataaagatgaattaaatcaatcacaaagcaagcaagttttaggtactttctcagaaaaagatatgccattacaaatagatgcacctcaatctaatccgttgctagtagacatgcaaaacagtgcactaaataaattaagtaaaaataataaaggattctttttaatggttgagggtgcttcaattgataaagctgcacaccctaatgatatcactggtgtgatgtctgaaatgtctggtttcgaaacagcttttgataatgctattaattatgcaaagacacataaagatacacttgttgtagcaactgcagaccactcaactggtggtctatcaaccgcaaaaggtaaagattataaatggaatccagaggctattcacaagatgaaacattctggaatgtatatgacaaaacaaatcgctgatggaaaagatcctgaaaaagtaattaaagatggatacggcattgatttcccaaataaacaactcgataaagtcaaaaaagcagcagacgagcttcacaaattacaaaaagaaggtaaagatgacaaagacgaaaaagttgtagaacaaacaacaaaattacaaaatgcaattcaaaaaccaattaacgatgcttcacacacaggttggacaaccaatggccatacaggtgtagatgttaacacatatgcatatgggccaggttctaacaaattcaaagggaatatggaaaatacccaaagcgctaaaaacttatttgactttttcggagacaatgtaacatcaaatcaaaat

SEQ ID NO: 34819 - DNA, 1755 bp, Staphylococcus epidermidis
atgagaaagactaaaattgtatgtacaataggaccagcttcagaatcagaggaaatgctcgaaaaactaatgaatgcaggaatgaacgttgcgcgtttaaatttctcacatggtagtcatgaagaacataaagcaagaattgatacaattcgtaaagttgctaaacgtttaaataaaacaattggcttgttattggatactaaagggccagaaattcgtacgcacaatatgaaagatggacttattgttttagaaaaaggcaaagaagtcattgtcagtatgaatgaagttgaaggaacacctgaaaaattctctgtaacatatgaaaatctaatcaatgatgtcaatattggatcatatatactattagatgatggtttagttgaacttcaagtcaaagaaattaacaaagataaaggcgaagttaaatgtgatatcttaaatactggtgaattaaaaaataaaaaaggtgttaacttacctggtgttaaagttaatttacctggtatcactgataaagatgccgatgatatcagatttggtataaaggaaaatgtagactttatagctgcaagttttgtaagacgtccaagtgatgttttagatatccgtcaaattcttgaagaagaaaaagcagaaataacaattttccctaaaatcgaaaaccaagaaggtatcgataatattgaagaaattcttgaagtatctgatggattaatggtagcacgtggtgatatgggtgttgaaattccaccagaaagcgtaccaatggttcaaaaagatttaattagaaaatgtaataaattaggaaaacctgtaattactgcgactcaaatgcttgattctatgcaacgtaatccacgtgcgacacgtgcagaagcaagtgacgtagctaatgcaatatacgatggtactgacgcggtaatgttatcaggtgaaactgcagcaggtcaatatcctgaagaagctgttaaaactatgcgtaatattgcagtttctgctgaagcagcgcaagactataaaaaattattaagtgatcgtactaaattagttgaaacttcattagtaaatgcaattggtgtttctgttgcacatactgccttaaacttaaatgtaaaagctattgtagcagcaactgaaagtggttcaacagcacgtacgatttctaaatatcgtccacattcagatatcattgctgtaacacctagcgaaaaaactgctagacaatgtgcaattgtatggggagtaaatccggtcgttaaagaaggacgtaaaacaactgatgctttactaaataatgctgtagcaacagcagtagaaactggtagagtttcaaacggagatttaattattattactgctggtgtacctactggagaaaaaggaactacaaatatgatgaaaatccacttagtaggtgatgagattgctaaaggtcaaggtgttggtagaggatctgttgtaggccatgcaattgtcgcagatagtgctagtgatttagaaggtaaagatttatctgataaagttattattacaaattctgttgatgaaacattagtaccatatgttgaaaaagctataggtctaattacagaagaaaatggtattacttcaccaagcgcaattataggtttagaaaaaggcatacctactgttgttggtgtagaacaagcaaccaaagaaattaaaaatgatatgttagtgactttagatgcgtcacaaggtaaagtgtttgaaggttatgctaacgtcctt

SEQ ID NO: 34820 - DNA, 921 bp, Staphylococcus epidermidis
atgaacgctgctgttcgtgcagtgactcggacagcaatttacaataatattgaagtttatggtgtttatcaaggttaccaaggtttacttgatgatgatattcataagcttgaattgggttcagtaggggatacaattcaacgaggaggaactttcctcttttccgcaaggtgccctcagttcaaagaagaggatgtacgtaagaaagctattgagaatttacgtaagcgtggtatcgaaggtttagttgttattggaggagatggcagctatagaggggcacaacgaattagtgaggaatgtaaagaaattcaaacaattggtattcctggtacaattgataatgatattaatggtacagattttacaattggttttgatactgcattaaacactattattgaatcagtcgataagattagagatacggcatcaagtcacgcaagaacgtttattgttgaagttatggggcgtgattgtggagatttagctttatgggctggattatctgtaggtgctgaaacgattgttttaccagaagtcaatacagatattaaggatgtagctgaaaagattgaacagggtattaaaagagggaaaaaacattctatcgttatggttgcagaaggttgtatgagcggccaagaatgtgcagatgagttaacgaagtatattaacattgatacacgagtttcagtgttaggtcacattcaacgtggcggtagcccatctggtgctgatcgagtattagcttctcgacttggtggatatgctgttgaactattaaaacaaggcgagacagctaaaggtgttggcattaggaataatcaattaacctctacgccgtttgatgaaatttttgctgaaagtaatcgcaaatttaatagtcaaatgtatgaattagcaaaagaattatcaatt

SEQ ID NO: 34821 - DNA, 942 bp, Staphylococcus epidermidis
atgttagattttgaaaaaccactttttgaaattagaaataaaattgattctttaaaagaatcgcaagaaaaaaacgaagttgatcttcaagatgaaatagatatgctggaagcatcattaaaaagagaaactacaaaagtgtacactaatctaaaaccttgggatcgtgttcaaatcgctcgtttaccagaaagaccaaccacattagattatattccctatatttttgattcatttattgagttacatggcgatagaagttttagggatgatccagcaatgattggtggaattggttacttagatggtaagtctgtaacagttataggccaacaacgtggtaaagacacgaaagataatatttatcgtaattttggtatggctcacccagaagggtatagaaaagctttgcgtttaatgaaacaagcagagaaatttaatcgtccaatatttacttttatagatactaaaggtgcttatccgggtaaagcagctgaagaaagaggtcaaagtgaatcaattgcaaaaaatttgatggaaatggcttcattaacggtaccagttattgctgttgttattggtgaaggcggaagtggcggcgctttaggaattggaatctcaaatcgtgttctgatgcttgaaaatagtacttattcagttatttcacctgaaggagcagctgcacttttatggaaagatagtaacttagctcaaattgccgctgaaactatgaaaatcactgcgcatgatttactagatttaggtattatagatgaagtgattaatgagccacttggtggtgcgcaaaaagatgaagaagcacaagctttatcaattaagaaaatgttccttaaacatttaaatgaattaaagcaactcacacctgaagaattagcaaatgatcgttttgaaaaatttagaaaaattggttcagttgtggag

SEQ ID NO: 34822 - DNA, 855 bp, Staphylococcus epidermidis
atgtttaaagatttttttaatcgaagcaagaaaaagaaatatttaacagttcaagattctaaacaaaatgatgtacctgctggtataatgacaaaatgtcctaattgcaaaaaaataatgtatacaaaagaattgaatgaaaatttaaatgtatgctttaattgtgatcatcatatagctttaaccgcatataaaagaatagaagcaatttcagacgatggatcatttatagaatttgatagaggtatgacatctgctaacccattagactttcctgggtatgaagaaaaaattgaaaaagatcagcaaaagactggacttaatgaagcgttagtgtctggtactgcgaaattagatggaatacaatatggtgttgcagttatggatgctcgttttagaatgggaagcatgggctctgtagttggtgaaaaaatatgcagaattattgattattgtacagaacatcgtttgccatttattctgttttctgcgagtggtggagctagaatgcaagagggaattatttctttaatgcaaatggggaaaacaagtgtttctttaaaaagacattctgatgcaggactattatatatttcttacataactaatcccactactggaggggtttctgcaagttttgcttcggttggagatattaatttaagtgaacctaaagcactaatcggatttgctggtagacgtgttatagaacaaacaattaatgaaaagttgcctgatgatttccaaactgctgagtttttattagagcatggtcaacttgataaagtcattcatcgaaaagatatgcgtgagactttatcaaatattttaaaaatccatcaagaggtgagtaac

SEQ ID NO: 34823 - DNA, 3195 bp, Staphylococcus epidermidis
atggtagcacatttaaatattcatacttcttttgacctgttagattctagtttaagaattgatgcattaatagataaagctaaaaaagaaggatatcgtgcgcttgcaataaccgatacaaatgtattgtacggttatccaaagttttatgatgcttgtattgcagctcacatacatccaatctttggtatgactatatatttaacggatggtctctatactattgaaacggttgttttagcaaaaaataatcaaggactcaagtcattatatcaactttcttctgctataatgatgagaaataaagaagaagtgccaattgaatggctaaaaagatacgacgaacatttaattatcatatttaaagaggctgagttgtctcataagcaagttattgatgcttttgaaggtaagaaagaattatatttaaatcacaatagtaataatacattgactggcaaacgtgtatggatgcaatctgcaagatacttaaatgaagatgatgctgaaaccattccagcgttacatgccataagagataatactaagttagatttaatacatgagaaagaaacacttgatgaacattttcctagtatagaagaacttcaaacactaaatcttagtgaagatatgattactaacgcgaatgaaattgaagaattatgccaagcagaaattgcataccatcaatccctgttgccacaatttgtgacacctaatggtgaaacttcgaaagattatctttggacgatacttatacataggttacgagaatgggaacttaatgataaaacttatttcaatcggttgaaacatgaatataaaattattactgatatgggtttcgaggattattttcttattgtaagtgatttgattcattttgctaaaacacatgaagtgatggttgggccaggtcgtggttcatcagcagggtcattagtaagttatttattaggtattactactatagacccgttaaaatataatcttttatttgaaagatttcttaatcctgaacgcgtaactatgccagatattgatattgattttgaagacacgagacgtgaaaaagtaattaagtatgtacaagataaatatggtgaacatcatgtatcaggtattgtgacatttgggcatctgttagctcgtgctgttgctagagatgtaggaagaataatgggatttgatgaaacgagtttaaatgagatttcaaaacttattccacataaattaggtataactcttgaagaagcataccaaaagccagagtttaaagcatttgttcatcgtaatcatagaaatgaacgttggtttgaagtgagtaaaaagttagagggattaccaagacatacgtctacgcatgctgcaggtatcattatcaatgatcaaccattattcaaatttgccccattaacaactggtgatacaggattattaacgcagtggactatgacagaagcggaacgtataggattattaaaaattgatttcttgggattacgcaatctatcaattattcatcaaattattttacaagttaaaaaggatttaaatataaatattgatatagaagctataccttatgatgataaaaaagtttttgatttattatcaaacggtgacactacaggtatatttcaattggaatcagacggtgttagaagcgtattaaaaagattgcaacccgaacattttgaagatatcgtagctgtcacatcattatatagaccaggaccaatggaagaaatatcaacttatataacccgtagacataatcctaaccaagttgcttatttacatccagatttagaaccaatcttaaaaaacacatatggtgttatcatttatcaagaacaaataatgctaatagcaagtcaagttgctggttttagttatggtgaagcagatattttaagaagggcaatgagtaaaaagaatcgtgcaatcttagaaagtgagcgtcaacatttcattgatggtgcaaaaaataacggttacgatgaacagataagtaagcaaatttttgatttaatacttaagtttgcagattatgggttcccacgtgcccatgctgttagttactcaaaaattgcatacattatgagctatttaaaagtgcactatcctcattatttttatgcaaatatcttgagtaatgtaataggaagtgaaaaaaagactgcagctatgattgacgaagctaagcaccaaagaattagcatcttgcctcccaatattaatcaaagtcattggtattataaggcaagtaataaaggaatatatctgtctttaggtacaattaaaggaattggatatcaaagcgttaaattaattattgatgaacgtcagcagaatggaccttatagagatttctttgatttttcaagacgtataccaaaaagggtgaaaaatagaaaattacttgagtctcttatcttagtaggcgcattcgacacttttggcaaaactagagcgacattattacaagcaattgatcaagtattagatttgaattctgatgttgagcaagatgaaatgcttttcgatcttttaactcctaaacaatcgtatgaagaaaaagaggaactacctgatcaattattaagtgattatgaaaaagaatacctaggattctatattagtaaacatccagttgaaaagaaatttgaaaagaaacaatatttaggcatatttcaattgtctaatggaagtcactaccaacctatacttgttcaatttgaccatatcaaacaaataagaacgaagaatggtcaaaatatggcatttgtaacgatgaatgatggaagaacgatgatggatggagtgattttcccagataagtttaaaaaatacgaaacttctatttcaaaggaacagatgtatatcgtattaggtaaatttgaaaagcgtaaccaacaaatgcaacttatcatcaatcaactttttgaagttgaagcgtatgagcaaacaaaattgtctaattcgaaaaaagttattttacgtaatgtaacacatctagaaccacaatttgaacattcaaaagtagaatctaatgaacaacatgcattaaatatttatggttttgacgaaagtgcaaataagatgacaatgttgggacaaattgaacgtcaacgtcaaaattttgatctattaatacaaacttattcgccagctgatattagatttatt

SEQ ID NO: 34824 - DNA, 1113 bp, Staphylococcus epidermidis
atgaaaattgggattcctaaagaaataaagaataatgagaatcgagtggggttatccccaagtggtgtacatgcacttgtagaccaaggacatgaagttttagtagaaacaaatgctggtctaggatcttactttgaagatggtgattatcaagaagccggtgccaaaattgttgatgagcagtcaaaagcttgggatgttgatatggtcatcaaagttaaagaaccacttgaatcggaatacaaattctttaaagaagagttaatcttatttacttatttacaccttgcgaatgaacagaaattaactcaggcacttgtggacaacaaggttatatctattgcctatgaaactgtacaattaccagacggttctttaccgttattaacaccaatgagtgaagtggctggtagaatgtctacacaagtgggagctgaatttttacaaagatttaatggaggtatgggtatcttactaggtggcatacctggagtacctaaaggcaaagtcactatcattggtggtggtcaagcaggtacaaatgcagctaagatagctttaggattgggagctgaagtgacaatactagatgttaatcctaaacgtttagaagaattagaggacttatttgatggcagagtaagaacaattatgtctaatccattaaatatagaaatgtatgtgaaagaaagcgatttagtgattggagcagtccttattccaggtgctaaagctccaaacttagtgactgaagatatgataaaagaaatgaaagatggatcagtgattgtagatattgcgatagatcaaggtggaatttttgaaacaactgataagattactactcatgataatccgacttacactaaacatggtgtcgtgcattatgctgtagctaatatgccaggtgccgttccacgtacatctacaattggattgaacaatgcaacattaccttatgcgcaattattggctaataaaggttatcgtgaagcatttaaagtaaatcatccattatctctaggtctgaatacatttaatggacatgtgactaataagaatgtagctgatacatttaattttgaatacacttcaattgaagatgcattgaaa

SEQ ID NO: 34825 - DNA, 945 bp, Staphylococcus epidermidis
atgtctgaagaaaatactattatggaacgtctatttcataaattagatgataaagctaaaacgttaaacaaagaaaatggacagagttttatcgaaaatttagggttagctatggaagatatttatacaaaccaaagagaacttttagaacaagcaacgcttcaagatagaaggaaagcttttcaatttgcatatttaagtttattacaagaagaaaatattcaagctaatcatcagatcacgcctgactctataggactcattctcggttttcttgttcaacgctttttagaacataaaaaggaaatgcacattgtagatattgcaagtggggcaggtcatctaagtgcagctgtgaaagaagtactttctgataaaacaattatgcatcatctgatagaggtagatccagtgctatcacgtgtaagtgtgcatttggctaattttttagagataccgtttgacgtttatcctcaagatgcgattatgccattaccattggaagaggctgatgtcgtgattggagatttcccaataggatactatcctttagatgaacgtagtagagaaatgaagttaggctttgaagagggacacagttattcccatcatctgttaatagaacaatctattaatgcgctaaaaggggcaggttatgcatttttagttgttcctagtcatctccttgaagatgataaagtgaaacagttggaaaatttcattgctacagagactgagatgcaagcatttttaaatttacctaaaacattatttaaaaatgaaaaagcacgtaaatctatattgattttacaaaagaaaaaatcaggcgaaactcgaccagttgaagtcttattagccaatatccctgattttaaaaatcctcaacaatttcaaggtttcatttctgaattgaatcagtggatagtcacaaatcatacaaaaaaa

SEQ ID NO: 34826 - DNA, 521 bp, Staphylococcus epidermidis
aatcatattcattatcaagaagccccaaatcttacaaaggttgaatatggtgaccattatgaacgcagatttatgaagcctaagaaattgaaggccaacatcgaatatacaacaccgcatggacacgtgtatcgaacggatcacaaaggccgtattaaagaagtatatgcggatgacctatcacttctagatggcggacgtaattcatatgcgcaacgaacagtaggaagagaagaccgattaccagatgatgacggcggtcatttaattgcgcgcggattcggaggttctaaagatatagataatctcgtcccccaaagtaaatacatcaaccgctcatttaaagagaacggagaatggtataacatgaagaaagaatggcaaaaagcaattaaaaagggagagaagtaaaaaatattaaaattgaagtgaaatatagcgagaatagtcaaaggcctaataaatttgacgttagttgtgaaattaatggagaagagcgtttgtattcaatagaaaatatt

SEQ ID NO: 34827 - DNA, 444 bp, Staphylococcus epidermidis
atgtctaaaaataaaaatgattacgaacatatgctgttttacttcgcgtataagacttttattactacagcggatgaaattattgagcaatatggcatgagtcgccaacatcatcgattcttatttttcattaataaattaccgggtataacaattaaagaacttttgattacgcttgaaatatctaaacaaggatcgcatgcaacgttacgtaaattaaaagaagaaggtttaatcgtcgaacaaacatctaagcaggatagacgagtaaaaaaactttttaccactgaagcgggtgatgatttaataggtaagttaaaccaagcacaagatgaattaattcaacagacactacaaaaagtaggccatgattggtacgcgatgatggaagaactagctaattatcgtgaaggattcaaaacaattgaacatttgaaagaagat

SEQ ID NO: 34828 - DNA, 600 bp, Staphylococcus epidermidis
atggctcgattcagaggttcaaactggaaaaaatctcgtcgtttaggtatctcattaagcggtactggtaaagaattagaaaaacgaccatatgcaccaggacaacacggtcctaaccaacgtaaaaaattatcagaatatggtttacaattacgtgaaaaacaaaaattacgttacttatatggaatgactgaaagacaattccgtaacacatttgatattgctggtaagcaatatggtgtacacggtgaaaacttcatgattttacttgctagtcgtttagatgcagttgtttattcattaggtttagctcgtacacgtcgtcaagcacgtcaattagtaaaccacggtcacattgaagtggatggtggacgcgtagacatcccatcttactcattaaaacctggtcaagtgattacagttcgtgaaaaatcacaaaacttagatattattaaagaatctgttgaaattaacaatttcgtaccagaatatttagacttcgatgctgacaacttaaaaggtactttcgttcgattccctgaacgtagcgagttaccagctgaaatcaatgaacaattaatcgttgagtactactcaaga

SEQ ID NO: 34829 - DNA, 438 bp, Staphylococcus epidermidis
atggttagacatgattttaaagttaaaactgaatggctaggtggacgcgaagaagtaggtaaacttcgaggagatattatcaatgaaaatatatccatcccctcttcactcggtggccaaggagaaggcacaaatccagatgaattactagtaagtgcagcatcatcttgttacatcatttcactcgctgcaacactagaaaagagtggttttactaatgtaaaaattaatcaacagtcaataggtacagcctcgtttgaaaataaaaaatttaaaatggaacgtattacacattatccctcaattaaagtaccctcttctcaaacagaaaagcttaaaagtattttagataaattattagtgattgcagataataattgtatgatatctaatgcaatacggaataatgtcattatttcaattgaacctaatttaata

SEQ ID NO: 34830 - DNA, 1161 bp, Staphylococcus epidermidis
atgcagtattaccaacctttattattaacacctggaccaactcctgtaccggaacaaatcttgagtgccgtacaattaccaatggtaggtcatcgttctactgactttgaggaaattgctagtgaagcatttaaaggtttaaagccagtatttggtagcaaaaacgaagtacttattcttacatctagtggcactagcgtattagaagcaagtatgcttaacatcgcgaatcctgacgatcatattgtgataattgtttctggtgcatttggaaatcgctttaaacaaatcgcacaaacttattataatcatgtacatgtatatgatgttaactggggtgaagctgtaatagttgatgactttatcacttatttaaagcaattaaacgttccagtcactgcagtattcactcaattttgtgaaacatctactggtgtcatacatccagttcaccaattaggtcatgcacttaaagcttttgataattccttatattttattgttgatggtgtaagctgtatcggtgcagtggatgttgatttaacaaaagataaaatcgatgtattagtttcgggaagtcaaaaagctatcatgctaccaccaggtctagcatttgttgcttatagcgatagagcaaaaaaacgatttgctgatgtaaaaacaccgagattctatttagatttaaataaatacataaaatcacaagagcaaaattcaacgcccttcacccctaatgttggtctatttagaggaataaatgcttatgtagaacttgtaaaaaaagaaggattaaatcacgttatttcacgccattttaaaatacgtaatgccttaagagcagcactaaaggcacttgaattagaattattagtaaaagatgatgctcatgcctcacctactgtgacctcatttgttccaaaaaatcaagaagaacttaatatcattaaaaatcaacttaaatctcaattcaatataactattgctgggggacaaggacacttaaaaggacaaattttgagaattggtcacatggggaaaatatctccttttgatattttagcagtcgtgtctgcattggaaattattttaacttctaatagaaatgtcaattatattggaacagggataactcaatttatggaggttattagacatgagtca

SEQ ID NO: 34831 - DNA, 1401 bp, Staphylococcus epidermidis
atgaatgacacaggagataaaaaattaagtcgaacatcattaatcggtcttgttataggttcgatgattggtggcggtgctttcaatattcaatctgatatgggaggccacgctggaggattagcaattataattggatggttgattactgctataggaatgatttcattagcacttgtctttcaaaacctaactaatgaacgatctgatttagatggtggtatttatagttatgctcaagcaggttttggtgattttatagggtttgcaagtgcttggggatattggttctcagcttttttaggtaatgtcgcatatgcaacgttattaatgtcttctatagggaacttctttccaatatttaaagggggcaacacatttcctagtatcatagtggcatcaatattattgtggagtgtgcactttttaatattaaaaggagttgagacggctactttaatcaatagtattgtcactattacaaaattaattcctatcttattagtgattatatgtatgattgtagcctttaattttaatacattcaagataggtttctttggaatggatggatatggatcattatcatttcatttcgctaatacgatgtcacaagttaaaagtacgatgttagtgacagtttgggtatttattggtattgaaggtgctgttgtattctccggaagagctaaaaataaaaaagatgttggaactgccactgttatcggacttatttcagtattgctcatttacttcttgctgactgtattagcacaaggtattgtaattcaaaatcatatttctaaacttgaggcaccatcaatggcacaaattttagcttatattgttggtgattggggagcaacatttgtcaatattggtcttattatttcagtattaggtgcatggctaggttggacattacttgccggagagttgccttttattgtagctaaagatggtttgtttcctaagtggtttgcaaaagaaaataaaaatggggcacctatgaacgccttattcattactaatgtgttagttcaaatattccttattagtatgctgtttaccaaaagtgcttatcattttgcattttctctcgcggcaagtgctatactttatccatacatgttcagtgcgttttatcaggtgaaatatacaatagaacacaagttaactgcaacgcctaaacaatggattataggaattctagcatctatttatgcaatttggctggtatacgcgtcaggtatagattacttgttacttaccatgttgctctatattccggggattatcgtctatattgttgttcagaaaaataatcaaaagcgacttacacaatttgactatattttcttcagtcttatcgttattttagcattgatagggttattacga

SEQ ID NO: 34832 - DNA, 912 bp, Staphylococcus epidermidis
atgagaaaactaatagccacaattatggtttcatcactaatattaggaggctgttcaacagtgcatgaagaagaaaattgtgcatcacaatcaattcccgcaagtcaatacaaaggtcaaggtttccaaccagtagctgaaaaaagtgctatcgcacatgcgaaaaaatatcgtgaagaatacgaaaaacttggcgaacaattttttaaagataattttagccttaatgttaaagccacaaatgttgtaggaagtggtgatgccgtcgaagtctacgttcattgcgatgatcatgacattgtgtttaatgcaagcatcccttttgatatggaatcaatccatgaagaaggctccatgcgaagcattgataacggagatactatgagtgatatggtaggaactgtgttaagcggttttgagtatagagcaaataaggaaaaaatggataacttagaaaaatacctcaaagataaagaagataaatatcactatactggattcaccgatgaagcaataactaaaactcaaaatataggttatcaaaataattacttttacattactactagttccacgaaattacgagattatagaaaacattttgaacctttaattaaagaaagtgacgatgattttaaaaagcatatgaaacaattaaagtctaaaaaagatacgtatattaatacagaaataacgactacacttttcagtactctggacgaatatgacgaaaaaatcattagaaaaaatactttatccatggctaaagaaatgagaaaagagccatctattccacataatttcacattccacttattatttagcaataacaaattaaaaatcaacgatccaaacataagtaacaatcaaattaatgagtatagggtgttcgaccatgacggatttaaaaat

SEQ ID NO: 34833 - DNA, 1938 bp, Staphylococcus epidermidis
atgaaaatacttgcaattacatcatgtccaaatggaattgctcatacatatatggctcaagaaaaattagaacaagcagcaaaagatatgggcgttgatattaaggttgaaactcaaggaggcgtcggagcagaaaacgtgctcacttctaaagaaatcaaagaagctgatggaatcatcattgctgccgatagacaggtagatttatcaaggtttaatggtaaacctctcatcaatgaaagtgtacgtgaaggtattcatagacccaaggaattaatacaacgtgtgattgaccaagatgcacaaatttaccatgatcaaaatatttcttcaaatatgtctagagaccaggaagaatctcataaaagtaatattcaaatggtatatcagcatttaatgaatggtgtttccttcatggttccatttatcgtcgttggcggtttactcatagctattgccttaactcttggaggacacaccactccaaaaggattagttatccccgaagattcattttggaaatctattgaaaatattggtagtttatcgtttaaattcatggttcccatccttgctggttatatcgcggtgagtattgctgataagcctggtcttgttccaggtatgattggtggtgccattgctgctgatggtagtttatatggaagtgaagcaggagccggtttccttggtggtatcgtcgcaggtttcttagcgggctatattgcaaaatggattaaacagattaaagttcctaaagctatggctcctattatgcctattattattatacctattctatcttctttaatagttggtctcatttttatatttgtaataggcgcaccaatttcaaatatatttggtgcattaacatcatggttaaaaggaatgcaaggtgctaacatcattattcttgctcttattattggcgcgatgattgcttttgatatgggaggtccagtaaacaaagtagcattcttattcggttctgcattaattgctgaaggcaactacactgtgatgggaatggttgctgtagcagtatgtacaccaccgattggtttaggtttagctacatttgttcgtaaacaccaattcaataaagcagaacaagaaatgggtaaggcatcatttacgatgggattatttggtattactgaaggggcaatcccttttgctgcacaagatcctctaagaatcattccagccaatatgattggcgcgatgattgcttcagtaatagcggcggttggaggtgtcggtgataaagttgctcatggaggtcctattgtcgctgtactaggtggaataagtaatattttatggttctttatagctgttgtcgttggaagcttagtaaccatgttcacagtcttgttatttaagcgtcacacccctgctatagcaaaaagcaataatggaaatgatacttctgttggaactgaaaatgtattttctgatgaccaatctattaatcacagcaaacaactctcacatcatatggtgttcgataaatcactcattgaaattaccaaggaaccaatgacaagagatcaagctattgatagattacttactaagttatgccatcgtcattacattacgaatatagaagaggtaagaaccgcaatccttaaacgagaggctgagtcaacaactgctatcggaatgaacgttgcaataccacatgctaaatctcatgcagttaaacgtcctatcgtcgctgtattaaatcataaagcaggtgtagagtgggaaagtctagatgaatcaaatcctcagctcatttttcttattgcagttcccaatgataataacgatacacatttaaaactgctacaacggttatcacgaacgctcatgaaagataatacgcgtgatgagttaattcatgctcaaagtcgtgatgaaatatttaatattttaaaagagata

SEQ ID NO: 34834 - DNA, 948 bp, Staphylococcus epidermidis
atggtactttttcttcaacccgtatttcaagaacgtttatggggtggcaccaatctcactcaatttggctacgatattccgaataattctaccggcgaatgctgggcaatttccgcacataaaaacggtcctaacacaattctcaacggaaaacataaggggaaatctttaaaacaagtttgggacgaagataaagcacttttcggaaatgactcacgtaaagattttccacttctcactaaaattttagatgcacatgattgtttgtcagtacaagtacatcctgatgatgaatatgcgcttaaacatgaaggcgaatacggtaaaactgaatgttggtatattttagacgctcaacctggtgctgaaataatctatggtgttaatgctacaagtaaaaatgaacttgaacatatgattgatcatcatcaattcgactatttatttaaacatgtacctgttaaaccgggtgatttcttttatgtaccagccggtacagttcatgctattggttccggaatcctcattttggaaactcaacaatcttcagatacaacatatcgtatatacgattatgacagaaaagataaaaatggtcatacgcgtgaattacatttaaaccaaagtaaagatgttattgatatcactacaactgaacctaatacaacacctaagactgaaatgataaatggcaattgtcacactcaatttgttgccaatcatttctttacggttgaagaatggtctatcaaagacatattagattttcaaaaaccacacacttattgcctagtgtcaatgattaacggccacgggcaagtttcaatcaataacaaagtatataaaatcgataagggcgatcattttattttaacttctgaagatcaatatattaaatttgttggtaatatggatttaatagtcagttttagtaaagatgaggcatat

SEQ ID NO: 34835 - DNA, 2856 bp, Staphylococcus epidermidis
atgaaaaacgcactaaaactttttatcacggatttaaaaagagttgctaaaacaccaggtgtatgggtcatcttagctggtttagcaattcttccttcattctatgcatggtttaacctctgggctatgtgggatccgtatggtcatacaggacatatcaaagttgccgtagtgaatgaagaccaaggtgaaaaagttcgtggtaagaatattaatgtaggaaataaaatggtcaaaactttaaaaaagaatgatagttttgactggcaatttgtgagtagagaaaaagccgaccatgaaattaagatgggaaaatattatgcaggtatttacataccgaagaaatttacacatgaaatcactggtactttaagaaaacatcctcaaaaggcggatatagattttaaagtaaatcagaagattaatgccgtagcagctaagttaaccgatacgggatcgtcgtttgtgattgataaagcaaataaacaatttaacaaaaccgtagcaaccgctttactttctgaagctaataaagtcggactatcaattgaagataatgtacctacaatcaataaaattaagagtgctgtatatcaagctaataattcattgcctaaaattaatcaatttgcagacaagattattgaactaaataaacatcaagacgatttggatgcttatgctaatcaatttagaagtttaggaaagtataaagggaatgtattagacgctcaagaaaaacttaatgctgttaattcgtctattccggcgcttaatgaaagggctaaattgatacttgcacttgatagctacatgcctaatattgaaagaattttaaatgttgctgctaatgatgttccagcacaatttcctagaattaataggggtgtcgatattgcaagtgaaggtattgatgcagcgagtggtcagttaaatgatgcaaaaggttatttgactcaagctaaagcgagagtgggagactatcaagaagcagctggccgcgctcaagatgtgaacaaccaagcaaatcaaaatctaagaaatcaaacatcaactacaccccaaagcgctataaaatcatcgcattcggaagggaagagtcattcaagcattaaaacagtacctgtgagtcaatcaggtgagaatcaacccgtttatggtgataacattttatctaacagtgatgtaaaatcaatgaatacagctttaacagaagctttattatcattatctaatcaaacagatcaacaagcacaagctacccaacaagacattaagtcattaaaaaatatagcatatggtgttatcgcttcagataaaccatcagagtttaaagaaccattaaaaaatataaaatcacgcttagaaaacgcatctaagtataatcaacaatttatagatatcttgtcagagttggaaaaaagtgaacatgttgatctatctaatgaaattaagcaagtgaaagaagcaaacaatagcattaatgataatttaaaaagtactaatcaattaatagatgcattgtcaaatggtagctccggacaattagaagcagtcaatgtattacgtgacttacctaacttaaataaaaggttagatacattacgaaattacattaaaaaagaacttaatcgtaatttactagctgtttctaatgagattactgatcaacttaataaaggtcaaaatacattatcgacaatccaatctaaattaaatactattaaccgagtgattaacgctggtcaagatattttaaatagcggtaaaaagagaattgatacgattcaaactgcattgccagcaatcgaaaacgcatatataaatgcaatgcgaactgcacaagcttacttcccaacagctaaaaaagatgtcgcgaaagctgcagactttgtacgtaatgacttgcctggattagagagagaattagctaatgtaacacagtctgtaaaccaaaaaataccatctttatttagtcgttatgataatgctgtagatttattaaacgagaaacagcctcaagcaaaagaagcacttgcttcgcttgccgatttctcagaaaataaattgccagatgttgagaaagacttgaaaaaagcaaataaaatcttcaaaaagttagataaagatgatgctgtagataagctaatagatacattgaaaaatgatttgaagaaacaggcagatattgttgctaaccctattaataaaaaaacgacagatgtgttcccagtaaaagactatggttctggtatgacgccgttctatactgcattgtctatttgggttggaggattattaatggtcagcttattatctgtagataacaaacatgaacacttacaacctattatgacgaagagacaagtgtatcttggtaaatctggtttctttttcttattaggtatcatacaggcattaatagtatctatcggtgatttagttatccttaaagcatcgatagaatcaccgatattatttgtctctattgccgtgtttagttctctcgtatttaattcgattatttacacatctgtatcattgttaggtaaccctggtaaggctgttgctattatcttacttgtgttacaaattgctggtggaggaggtacattcccaattcaaacaacgccagaattcttccaagcgatatctccatatttaccattcacgtattctatcgacgcattacgtgaaacagttggaggtatagttccagagatactgattacgaaagtgatcattttaggtttattcggaatcggattcatggttgtaggttattgcttgaaacctgtgactgaccctattatccgtaaaattgctgaaaaagctgatgaaagtaaagtaactgaa

SEQ ID NO: 34836 - DNA, 2028 bp, Staphylococcus epidermidis
atgaagagaacagataaaattggtgtctacctcaagctgtcatgttctgcgttgttacttagtggttcgctggttggttatggcttcacaaaagatgcttttgcagattcagaaagtacatcatcaaatgttgaaaatacttctaatagtaactccatcgctgacaaaatccaacaagctaaagatgatattaaagatttgaaagaactttctgacgcagatatcaaaagttttgaagaacgtttagataaagtcgataatcaatcaagtattgaccgtattataaatgatgcaaaagataaaaataatcatttaaaatcgacagactctagtgccacatcatcaaaaactgaagatgacgatacatctgaaaaagataatgatgatatgactaaagacttagataaaatactgtcggatttagattcaattgctaaaaatgttgataaccgtcaacaaggtgaagagagagcttctaaacctagtgactcaacaaccgatgaaaaagatgattcaaataataaagtacacgatacaaatgctagtacacgtaatgcaactactgatgattctgaagagtcggttattgataaattagataaaatccaacaagattttaaatctgactctaataataatccttctgaacaaagcgatcagcaagcatcaccatctaataaaaccgaaaataacaaagaagaatctagtacgacaacaaatcaatccgatagtgatagtaaagacgataaaagtaatgatggtcatcgctcaacattagaacgtatagcatcagatactgatcaaattagggattcaaaagatcaacatgtcacagatgaaaaacaagatatacaagcaattacacgttcattacaaggtagtgataagattgaaaaagcacttgctaaggtacaatctgacaatcaatcactagattctaattatataaataataaattaatgaatttaagatcactagatacaaaagtagaggataataacactttatctgatgataagaaacaagcgcttaaacaagaaattgataagactaagcaaagtattgaccgacaaagaaatattattatagatcaactcaatggtgctagtaataaaaaacaagcaaccgaagatatcttaaatagtgtttttagcaaaaatgaagtagaagacataatgaaacgtattaaaacaaatggccgaagtaatgaagatatcgctaatcaaattgccaagcaaattgatggtcttgcattaacttctagtgatgatattttaaaatcaatgttagatcaatctaaagataaagaaagtttaattaaacaattgttgacgacacgacttggtaatgatgaagcagatcgtattgctaaaaaattgttaagccaaaacttgtcgaattctcaaattgtagaacaattaaaacgtcatttcaatagtcaaggaacagctacagctgatgatatattgaatggtgtgattaatgatgctaaagacaaaagacaagcgattgaaacaatattacaaacccgtatcaataaagacaaagctaaaattatcgctgatgttattgcgcgtgtacaaaaggacaaatcagatatcatggatctcattcactctgcgattgaaggcaaggcaaatgatttattagatatagaaaaacgagcaaaacaagctaagaaagatttagaatatattttagatcctataaagaatagaccatccttgttagatcgtattaacaaaggtgtcggtgattctaattcaatatttgatagaccaagtttacttgataaacttcactcaagaggatctattcttgataaattagatcattcggcaccggagaatggattatctttagataataaaggtggccttttaagtgatctatttgacgacgatggtaatatctcattaccagcgacaggtgaagtcatcaaacaacattggataccagtggctgttgtactcatgtcattaggtggggcgctcatctttatggcgcgtagaaaaaaacaccaaaat

SEQ ID NO: 34837 - DNA, 657 bp, Staphylococcus epidermidis
atgtttggttcaagtttagattcatctcaattattacaagctctatacgaaacattgtatatggtgactgtatcacttgtaatcggtgctttaataggtatacctcttggcatcttgttagtggtaactagaaaaaacggtatatggtcgaatacaatattgcatcaagtattaaatcctatcattaatattttaagatcaattccgttcattattttattaatagccatagtgccttttactaaattgctagttggcacatctatcggcacaacagcagccatagtaccactcacggtttatgtagcaccttatatcgcacgcttagtagaaaactcattactggaagtcgatgacgggattattgaggcagctaaagcaatgggtgcatcacctcttcaaattatacgttattttttattgccagaagcacttggttcattaattctagctataactacagctattattggtctcataggtagtacagcaatggctggtgctgttggtggtggcggtataggtgatttggctttagtgtatggttatcaacgattcgatacaattgtcattgtgattacagtcattgtacttattattattgttcaaattatacaaacgttaggtaactttatcgctagggttatccgtagaaat

SEQ ID NO: 34838 - DNA, 384 bp, Staphylococcus epidermidis
atgattaaatgtgtttgcttggttgaagaaaagaatcatcagttactacttgtacaagttcgacatagagataagtattatttcccgggtggtaaaattgatgagggtgagagccttgtggaagctttacagagagaattgaaggaagaattgcgcttagaattagctaaagatgaattagaatttattggaactattgtcggagaagcctatccacaacctaatatgttgactgaacttaatggatttaaagttaatcgagctatagattggtcaaaagttgaaaccgatcatgaaattactgacatgaaatggttcgatatcaatgacagtgaaaatatagcgcctgcagtgaatacgtggattaaggaatttatcaatgat

SEQ ID NO: 34839 - DNA, 687 bp, Staphylococcus epidermidis
atgaattattcaccaaaacaaggtgttaaaagtcatggattgccacatgatccgttcaaaagtagcacagtacctagacctataggttggatttctacagtatctaaagaaggtaaagataacttggcgccgtacagtcaatatcaaaatcttacatgggatcccccaatggtaatgtttgcggctaatcagtcagtgcttggcgatcatgaaagaaaagatacagttaaaaatgcggaagaaactggttggtttgtatggaatatggcaacatatgatttgcgtgaagcagtgaatttatcatctaaagcattacctccagaagatgatgaatttgactttgctggtgtgacgaaagaattgtgtatcgaagctcctggaagtagggtaaaggaatcacctgttcattttgaatgtgaatatgttcaaacagtaagaattcccactggagaccctgtttcaactgtggatatagtcatcggtcgtgtagcacaagtgcatattgacgataaagtaattatggacaacggaaaattagacattaagtcaatcagaactatagcacgtctcggttattatgattacacggttgtcgatgaaatatttgaaatgaaagcacctgcagcttcgaaagaagaattggctggacttgaaggtcgaaattttgacaacactaataatgaatca

SEQ ID NO: 34840 - DNA, 1170 bp, Staphylococcus epidermidis
atggaagaaagtaaaaactataatctcattacgacaattatgtttatttcaggtatcattgtaatggcaagtttatatacggctctacctcttacagcaactttcgcagaagactttcatgttcctgaatctatagcaactttaaacggtgttttattctcattaacatattcaatcagttgtctattttatggaacgatttctgaaaagtatggcagaattaaaactattttagtaggtatgagtgcattagttatcatctgtcttatgataggtattgttcattcatttacagtgttattaatattaagagcactacaaggcgtatttgctgcatcattttctcctgtagtcatgacttatacaactgaaacttatccacgtgtgaaacgtgtaacagcaattagtttcatcagtacaagttttatgttatcaggtgtgttagggcaaaatatgagtgaattagtcgtaagttatttgaattggcagtgggtatattttattttaacaatcttatatttaattctcgtattagttatttataaaaatgtacctgagagtccacataaaaatcctgatattcaactcattaagtttttcaataactttaaagatttcaaagacaatcttaaagttttctattgtttatttatttcactaacattactgattatgtttataagtatgtatgatattttaaatgaatatgtcacatcacaccaagttgggggagacatgtctgtgtcctcaatgatgaaattgttcggtgtgataggcatgttattatctctattagcagggcgtgtaagcagtcgtataggtataaagcgcttgctaactatcgcattaacaacatgtattgtgtcgatcatactcatgggtgtaactacgaatattatacttattacaacatttagtgtgttgtttgttgcaggtatcgcatttgcgattcctactgttatttcaaaaataggtgtagttgttaaaaacaatcaaggtttctttttatctgttaatacatttgtattattcttaggaacagcgattgcacctattttaatgttatttgtaggcgaactgtctaactttttcttacagtttttaatgattgctattgtcggactgattgctttagttgtatcaatatttatgccaggtgaccaacgttct

SEQ ID NO: 34841 - DNA, 354 bp, Staphylococcus epidermidis
atggttttacgttatgctacaaatttaaaactagctaaagaattatatgatgcaagtaaacctaaattaaaaggcgatcaaggtatgattgatactttcactaatacatttggtttaccggaaaactcagttaagttagcaggtggcgttgaagctgcagctgctggtttatttgctgctagttttttaaataaaaatatttcacgcttaggctcacttgcagcaatttcagtacttggtgttgcagcttacaaacattttgaagcagggcatggtaaaaagggtgcacaacatgctttagacttattaggtttatcaacacttagcttattagatactttttcttgtaaaaaa

SEQ ID NO: 34842 - DNA, 2388 bp, Staphylococcus epidermidis
atggctaaaggtgttaaccaaattattaataatattaggttaagaaaattgcgcaaaatattaaatcaaattaatgcgcttagtgaggagttctcaaattttagtgatgaagcacttcaagcgaagacaaaagaatttaaagtttatttaaatgataataaagcttcactcaatcacattctgccacaagcttatgcaacagttagagaggcttctaagcgcgttttaggtatgtatccaaaagatgtgcagattttaggagcaatcgctatgcatcaggggaatattgcagaaatgcaaacaggagaaggtaagacgcttacagctaccatgcctctgtacttaaatgcacttacaggtaaaggtgcttatctaatcacaacaaatgattacttagcaaaacgcgattttttagaaatgaaaccactatatgaatggctaggcttgtctgtatcattaggatttgtggacattccagaatatgaatacgctgaaaatgaaaaatatgaactgtaccaccatgacattgtttacacgactaatgggcgactagggtttgattatttaattgataatttagctgatgatattcgtgccaaatttttaccgaaattaaactttgctattattgatgaagtcgattctattatattagacgctgcccaaacgcctttagttatttctggtgcaccacgtgtacaatctaatttatttcacatcgttaaaacgtttgttgaaacacttgagaaagataaagacttcatagttaattttaataaaaaagaagtgtggctcactgatgagggctcggaaaaagcaagccattatttcaaagtgaatagtatataccaacagcaatattttgatttagttaggatgattcatttatcgcttagagctaagtatttattcaaatataatttagactattttatttttgatggtgagattgtgcttatagatagaataactggtcgtatgctacctggaacaaagcttcagtctggtttacatcaagctatagaggctctggaaaatgttgaaatttctcaagatatgagtgtgatggcaaccataacattccaaaacttatttaagcaatttgatgaattttcaggtatgactggaacaggtaaattaggggaaaaagaattctttgatttatattcaaaagttgttatagagattccgactcacagtccgattgaacgagatgatagacctgatagagtatttgctaatggtgacaaaaagaacgatgcaattttaaagacagtgattggtatacatgaaactcaacaacctgtgttactaattacacgtactgcagaagcggcagaatatttttcagctgagttatttaaacgtgatatacccaacaatttattaatcgctcaaaatgtagctaaagaggcacaaatgattgctgaggcgggacaattatctgcagttactgttgctacaagtatggcagggcgtggaactgatataaagttatcaaaagaggttcatgatatcggtggcttagcagtgattattaatgaacatatggataatagtcgtgttgatcgtcaattaagaggacgctcaggtcgccaaggagatcctggatattcacagatttttgtatcacttgatgatgatttagtaaaacgttggagtaactctaacttggcagaaaataaaaacctccaaacgatggatgcatctaaactagaaagtagtgcactctttaaaaaacgtgtaaagtcaattgttaataaagcgcaacgtgtatctgaagagactgctatgaaaaatagagaaatggcaaatgaattcgaaaaaagtattagtgttcaacgagataaaatttatgctgaacgtaatcacatacttgaagcaagcgattttgatgattttaattttgaacagcttgcacgagatgtgtttacaaaagacgttaaaaatcttgacttaagtagtgaacgtgcacttgtgaattatatatacgaaaacttaagttttgtcttcgatgaagatgtatcaaatattaatatgcaaaatgatgaagaaatcatacaattcttaatacaacaatttactcaacaatttaacaatcgtttagaagttgctgctgattcatatttaaaacttcgtttcattcaaaaatcaattttgaaagcgatagatagcgaatggattgaacaagtagataacttacaacaacttaaagccagtgtaaacaatcgacaaaatggacagcgtaatgtcatttttgaatatcataaagtggctcttgaaacgtatgaatatatgtctgaagatataaaaaggaagatggttagaaatttatgtttaagtattctagcctttgataaggacggagatatggtcattcatttccca

SEQ ID NO: 34843 - DNA, 1557 bp, Staphylococcus epidermidis
gtggcacgtaaatttagagtacttcaagtaggtggtcatgatttaggttctttatttaatcaaaaaagtaatgtcgaatgggattattttgatgttggtttgtttgattttgaaagtggctatcaagatgttgtagtacatattttagatgaaaaaggacaatttgattttgtttttgtacgtgaaaaatattctgattcattaatgaaacttttatcattagtcagtacaccgtataatactgtgattgacaatgagtattgggataatcaataccaacaagataagacaatacaacgtaattttataaaaccactcatttatgaaaataaagaacaattacaacaaaaactagaggcagttacatttcctgggcaatatggagataaagttaaacctattcattgtcgcgttagtattcattttgatggttcttatcaatttaatggaaatgagtctattgaagtatcaggacgatttggggaatcataccaacccctcattacatggagtcaaaatatcattgctgatgccaataaggtgaatcaaatatggccagaatttaaagttgaaggtgatgctaaaatccaatatacattgagattgacgcctgtttattcaactgatcaaccagtagaaaagctaatatatgaacaagacgatttagacactcccatagaactacctgctcgtccttatcaaacatatgtgagtgtatcaatcaaagctaaaggtaaaggaacattatttataggtgctattcataaacgttggtcacgcttggaattagggcagttcatattaggcggaaaacgatatagtgatgaaaataagcaagaatttatacattacttccatcctggagatttaaaaccaccactcaatgtatattttagtgggtatcgtactgctgagggctttgaagggtactttatgatgaaacgtatgaatgctccatttattttaatagctgatcctagaatcgaaggtggtgccttttacctagggtcagagaattatgaacaggcaatccgtaaggttatccaaaatgctttggattatttgggatttgcgaacaaccaattaattctttctggattatcaatgggatcatttggcgcactttattacgctacaaaattaaatccagcggctgttattgtaggaaaacctttgataaatctcggtactattgctaataatatgaaactcgttcgtccaaacgattttggaacgtcacttgatattttgcgattgaatcaaaatggcataactaacaaagatgttgttcagttagataatcatttttggaagcaaattcagcatagcgatttgtcaatgactacatttgcgattgcttacatggagcatgatgattatgacaaatatgcatttcaagatttattgcctgttcttacaaaacaacatgcacgtgtgataagtaaaagaattcctggtagacataatgatgattctgctactgttactcattggtttattaatttttatcatttaatcatggaagagcgatttgggagggtaacacatgcaagaaga

SEQ ID NO: 34844 - DNA, 2801 bp, Staphylococcus epidermidis
gatcattcgtattttaatgtaacgtatttatctacactttatacaggtgatttggaaagtagcttaaatgaactagggaaccgagcaatacaggctgtacatgaaggtgcgaaaattttggtgttagacgatacgtctttaactcacgaaaatagttatgcaatgccaattttattagcgttaagtcacgtgcatcaattattaattcgagaaggattaagaatggagaccagcctcattgcgcagtccggtgaaacacgagaagttcatcacgttgcatgtttacttggttatggtgcaaacgctgtagttccatatttagcgcaacgaacgattgaacaattaacgcgtcaaggtcaactttcaggaactgtcgctgaaaatgttgctacgtataccaatgtattgtcagaaggcgttattaaagtgatggctaaaatgggcatttctactgtacaaagttatcaaggagcacagatatttgaagcggtaggtttatcgaatagcgtcattgaaaaatattttacaggtacacagtcaaaattatctggtataagtattgaacaaatagacaaagagaataaagcgagacaaagtgatgattctgattatcttgaatccggaagtgtattccaatggagacagcaaggtcagcatcatgcatttaatcctcgtacgatttttttattgcagcatgcatgtagagaaaatgattacgagttatttaaaaaattctccaaaactgtaaatttaaaacgtacggatcatattagacatttattagaattcaagacacgccaatctattgatattagtcgtgttgaaccagcaagtgaaatcgtaaaacgttttaatacaggagcaatgagttacggctctatctcagcagaggcacatgagacgttggctcaagctatgaatcaaattggaggtaaaagtaatagtggagaaggtggagaagattcttcacgttacgaaattcaaaaggatggaagtaataagataagtgcgattaagcaagttgcatcaggtcgttttggggtgacgagtgattacttgcaacatgcaaaagaaattcaaattaaagtcgcacaaggcgctaaaccaggggaaggtggacaactaccaggttcaaaagtatatccatggattgctgagactagaggttcgacaccaggtataggattaatttcaccaccaccacaccatgatatttattcaattgaggacttagcacagctcattcatgatttaaaaaatgcaaatagaagagctgatattgcagttaagcttgtatcaaaaactggcgttggaactatagcttcaggggtagctaaagctttcgccgataaaattgttataagtggttatgatggaggtacaggtgcatcgcctaaaacaagtattcaacatgcaggtttgccatgggagataggccttgccgaaacacatcaaacacttaaattaaatgatttgcgtagtcgcgtaaaattagaaacggatggtaagttactgacgggtaaagatgtagcttatgcttgtgcgcttggtgcagaagaatttggtttcgcaacagcaccacttgttgttttggggtgtattatgatgagggtttgtcataacgatacgtgtccagtaggggttgcaacacaaaacaaagatttaagagctttgtttagaggtaaggcacagcatgtagttaactttatgtattttatagctgaagaattacgtgaaattttggcttcacttggtttagaaacagtagaagagttagtaggaagaacagatcttcttcaacgttcgacgcaattgaaaccaaatagtaaagcagcttcgcttcaaatagaacgtttaatagaacaattgacggggttaatacgaaagagatatcacaaaaccatcatcttgatgaaggattcgatttgaattatctgtacccagacgcacgctatagtattgaaaacgggcactcttttaccggaaattatgttgttaataatgaacagcgagatgtaggtgtaattacaggtagtgcgatagctaaacaatatggagaagaaggattacctgaagatacgatacttgcttacactgaaggtcatgcaggtcaaagcttagctgcatatgcaccacgcggattaacaatccatcataccggtgatgctaatgactacgtaggtaaaggattgtccggtggaactgtcatcgtaaatgctccaaatagtcaacgtgaaaatgaaattatagcaggaaatgtaaacttttacggggcttctagaggtaaagcgtttatcaatggtaaagctggtgagcgtttctgtatcagaaatagtggtgcagatgttgtagtagaaggtattggtgatcatggacttgaatatatgacagggggacatgtcattatcttaggagatgttggaaagaactttggccaaggcatgagcgggggcgtaagttatattttctcttctgacgtggagaaatttaaaaaggttaatgcgcttgaaactttagaattcagtagcatacgttttgatgaggaaaaatctcttatcaaagacatgcttgaagcacattttaagcatacacgtagtaacaaagcacgccaattacttgaccaatttgacaatattgaaaagttagcaattaaagttattccgaaagattacaaattaatgatgcaaaaaattgatttgaaaaaacgtcaaatggaacgtgaagatgaagcaacactggcagcgttttatgatgacagagaaacaattgaacaagagctacagccagcagtcatttattaa

SEQ ID NO: 34845 - DNA, 1461 bp, Staphylococcus epidermidis
atgggcgaatttaaaggatttatgaaatatgataaacagtcgctatcagaattgtctttggtagaccgtctttcgaatcatgaagcgtttcaacaacgcttcactaaagaagatgcttcgattcagggtgcgcgctgtatggattgtggaacacctttttgtcaaactgggcaatcttatggaagagaaacaataggatgccctattggtaattatatacctgagtggaacgacttagtctatcatcaagattttaaagctgcttacgaaagattgagagagacgaataattttcctgaatttacaggaagagtttgtcctgcaccatgtgagcaatcatgtgttatgaaaattaatagagaatccgtggcgattaaaggtattgaacgtacaattattgatgaagcatatgagaatgagtgggttcatcccgcatatcctgaagatcataaagaccaacgagttgctatcgtaggtagtggtccagcgggacttacagcagctgaagaattaaactttaaaggctataaagttactgtttatgaaaaggcgcatgaaccaggcggcttgctaatgtatggtataccaaatatgaaactagataaagacgtaatacgtcgacgtgtatcacttatgaaagatgctggggttttatttaaaacaggcgttgaaattggcgtcgatgtgagccgtgaaacacttgaagaaaattatgatgctattattttatgcacaggtgctcaaaatgcgagagatttaccattggaaggacgaatgggctctggtattcattttgcaatggactatcttactgaacaaacacagtatctaaatggtgagattgaaagtttgagcattactgctaaagataagaatgtaattattataggtgctggtgatactggtgcagactgtgtagcgacagcattacgtgaaaactgtaaatctattgttcaatttaataaatatacgaaacagcctgaagagattacttttgaaagtaatacttcctggccattagcaatgcctgttttcaaaatggattatgcgcataaggaatatgaagctaaatttggtcaagaaccaagagcctatggtgtacaaacaatgcgctatgatgttgacgagttaggaaatgttaaaggcttatatacacaaatattaaaagaaacgcctgatggcatggtgatggaagatggaccagaacgattttggccggctgatttagtcttattatctatagggtttgttggtactgaaaccactgttccgcatgcgtttgatatacacaccgagcgtaataaaattgtagctaatgatacaaattatcaaactaatcacgctaaaatatttgctgcaggagatgcaagacgaggtcagagtttggttgtttgggcaataaaagaaggtcgtgaagtagcacattctgttgatcaatacttaagtaaagaagttctagtg

SEQ ID NO: 34846 - DNA, 1554 bp, Staphylococcus epidermidis
atgaaacgatttataccagcttggtatagccgtaacagatggtgggaaagtacctcaagaccattctatctaaaaaaacagtatacagattttgacgatatgattagtttaatgacaatgcatagttcgaataatgtggattatcaattgatagttttaagttttagtccatatcttagaacattcctccatcgatatgatttgtatgaaagtcattattggtctgtatttgatgagatacagggcattggacatcaaacgcctcaagctattgattatcgcgatctttcatggccagaaggcactgaatttatttttactccctttcaaattcaagcgattacgggtgataacacgttttctaaaattcacttcagccaagaggggtacctgatgtgggtagaggattacaagtatagtacaattcaaagacgatttgtattcgatgatagaggatttatatcggcagtgcgtacttatacacctgatggggataacaataaaaaacactatttttcaaaagatggggaagaaatatttgttgaagacttaaatgttaatacagtaacgattaataaaaatttccaatcaaaatttaaaaaggttacgtattcatctatggctgagttgatagaagagaaattccaatcatatgtagaaagagaattgaatgaagatgattctgttatagtggcatctgatgaacgtcataattcaatgatggctcgcacaattgatgcaccgtctttatgtttttctatttttactgagcgaaataaagtggtgacacaagatttatatgattctatttcgagagcatattattgtctcgttgatacacaagctaatcaaaatatgattgaacactacgcaggattgaatatgaataattttaatcttttaagggtaacgccttttgatgcgcagtcattacctaaccaaagtagtcaattgtatgacacttatattggattatggatagatggtttggacgagattgaaatacgagagattgtaaacagcttatttcaatatattcaacataaagatggctataagttgaaaattttaactaagagtagagataatcttacggaaaatcttatagatgaagttgctcatctcaatgatttatatcaccaagagaaaaaggaaataagtgatgtaattgaagacgtgatacagaataaaaaagaaacaatcattgatattgaaacagtaccgtttgaagaagatcttgtaagcgttatttcaaaattaagagttgtagtagatttatctttagagccgaaactttttttacaaatctgttgtattggcgcgggtataccacaaattaataaaaagagaacagattatgttaaacatatgcataatggatatattattgatgacatatcgcaaactgtagaatctttagattattttttggcacatttaaaaaattggaattattcttatgcatattccatgagattaacggatgattttagttcaattaatattattcatcaaattaatcagttatttaaaggtgatgtttcaagtggcacg

SEQ ID NO: 34847 - DNA, 1704 bp, Staphylococcus epidermidis
gtggattaccaagctttgtatcgtatgtatagaccgcaaagttttgatgatgtggttggacaaacgcatgtaactaaaacgctgcgtaatgcaatttcaaaaggtaaacaatcccatgcatatatttttagtggtccgagaggtacgggtaaaactagtattgcaaaggtttttgccaaagctattaattgtcttaatagtgacgatggtgaaccttgtaatgaatgtgcgatttgtaaaggaatcacacaaggtacgaataacgatgtaattgaaattgatgctgcaagtaataacggtgtagatgaaataaggaatattagagataaagttaagtacgcacctagtgaatctaagtataaagtatatattattgatgaggttcatatgttaactactggtgctttcaatgctttgcttaaaacattagaagaaccaccagcgcatgctatatttatcttggcaacaacagaaccacataaaattccacccactattatttcgagagcgcaacgatttgactttaaagcaattagcagtgaccaaattatagatagacttaagtatgtagctaattctcaatctttggattacgatgacgcagcattagaatttattgctaaagcatcagaaggtggtatgcgagatgcattaagcattatggatcaagcaatagcgtttggagacgaacgacttactttacaagatgctttaaatgttacaggtagtgttgatgaagcggcattaaatgagttatttaatgacattgtaaaaagtgatgttaaagccgcatttaatagatatcatcattttatttcagaaggtaaagaagtcaacagactcattaatgatatgatttactttgttagagatacaattatgaataaaacgtctaacgaatccgttcattttgaatcacttattcatttcgacttagatatgttatacaggatgatagatatcatcaatgatacactagtatccattaggttcagtgtaaatcaaagtgttcattttgaagtgttgctagttaaacttgcagaaatgattaagacacagcctcaaactgtacaaaatgtagcaacagcatcggtagctaatgaaccagataatgagatgttattacaacgtttagaacaacttgaaaatgagcttaaaaccttaaaagaacaagggatcaaaactaataaagttagtcaacaacctaagaaaccaacacgtacgattcaacgatctaaaaatacgttttctatgcaacaaatagcgaaagtattagacaaagcaaacaaagatgatatcaaattgttgaagaaccattggcaagaagtgattgatcatgcaaaaagtaatgataaaaagtctttagtaagtttgctactgaattcagaaccagtagcagctagtgaagatcatgtgttagttaaatttgatgaagaaattcattgtgaaatagtaaataaagatgatgaaaagagaaacaatattgaaagtgtagtttgtaatatagttaataaaactgtcaaagtagttggagtgccggctgaccaatggctgagagtgagagcagagtacttacaaaatcgtaacaccaatgaaacacatcaaagcgaaaaacaaagcacacaacagtctcaacaaatagatattgctcaaaaagctaaagacttatttggtgaggaaactgtacacttagttgatgaagac

SEQ ID NO: 34848 - DNA, 315 bp, Staphylococcus epidermidis
atgcgcggtggcggaaatatgcaacaaatgatgaaacaaatgcagaaaatgcaaaagaaaatggctcaagaacaagagaaattaaaagaagaacgcgttgctggaacagcaggcggaggtatggtgactgttactgtaacaggtcataaagaagttgtggatgtagaaattaaagaagaagctgttgatccagaagatattgagatgcttcaagatttagtattggcggctacaaatgaagcgatgaataaagcagatgagttaacacaacaacgtttaggtaagcatactcaaggcttaaacatccctggaatg

SEQ ID NO: 34849 - DNA, 5495 bp, Staphylococcus epidermidis
atgacaaagaaagaaaaggattataaaaaaagtcttgagcaacaaaaaacacgggtaaaaatatacaagtcaggaaaaagctgggtaaaagcaagtattaatgaaatagaattgttaaaaacaatggggctaccatttttaagtaaaaacgaaatacaagaaaatgtgactgaaaagacgaaaggtcataaattaaaaaaaagtgcagctaaaacaacagccctagttggtggagcatttacatttaatatgttgaataatcatcaagcatttgctgcctcagaaacaccaatcacctctgaaatttcatccaatagtgagacagtagccaatcaaaattcaactacgattaagaactcacaaaaagaaacagtcaattctacaagtttggaatctaaccattctaatagtacaaataagcaaatgtcttcagaagttacaaatacagctcaatccagtgaaaaagctggaattagtcaacaaagtagtgaaacatcaaatcaatcatctaagttaaatacatatgcctccacagaccatgtagagagtacaactattaacaatgataatactgcacaacaagatcaaaataagtcttcgaatgtaacctctaagtcaacacaatcaaacacgtcatcctcagaaaagaacattagctccaatttaacccagtcaatcgaaacaaaagcaaccgattcattagcgactagtgaagcacgtactagtacaaatcaaatatctaatctgacatcaacatctacttcgaatcaatcgagtcctacttcctttgcaaatttaagaacatttagtagatttactgttttgaatacgatggcagcaccgacaacaacatcaacgacaacaacttcaagtctgacatctaattctgttgtggtgaacaaagataactttaatgaacatatgaatctatctggatctgcgacgtatgatcctaaaacaggtattgctaccttaacgccagacgcatatagtcaaaagggtgccatatctttaaacactcgattagattcaaaccgtagcttccgttttataggtaaagttaaccttggtaatagatatgaaggttattctcctgatggtgtagcaggtggagatggcattggctttgcattttcaccaggccctttaggacagataggtaaagaaggggctgccgttggaataggcggtttgaataatgcctttggttttaaattggatacgtatcataacacatcaactcctagatctgatgctaaagcaaaagcagatccacgtaatgttggtggtggtggtgcttttggtgccttcgtaagtacagatagaaatggtatggctaccactgaggaatcaactgcggctaaattaaatgtacaacctactgacaattcattccaagattttgtcattgactataatggtgatacaaaagtgatgacagtgacgtacgctggacaaacctttacgagaaatcttacagattggataaaaaacagtgggggtacgacgttttctctatctatgactgcctcaactggtggcgcaaaaaatttacaacaagttcaatttggaacattcgagtatacagaatcagctgttgctaaagtacgctatgtagatgcaaatactggtaaggatattatcccgcctaaaaccattgcaggtgaagttgacgggactgtaaatatagataaacaattgaacaattttaaaaatttaggttacagttatgtggggacagatgccttaaaagcaccaaattatacagaaacgtcaggtacacctacacttaaattaactaactcaagccaaacggtgatttataaattcaaagatgttcaaggtcctcaaattagtgttgatagtcaaactagagaagttggaaagaccattaatccaattacaattactacaactgacaatagtaaagacgtattaactacaactgtgacaggtctaccttcagggttatcttttgatcaaacgactaatacaattattggcacgccaagtgaagtaggaactacaactgtgacagttaatactactgatgctactgggaacgtaacatctaagcaatttacaataacgattcaagatacaatcagccctgttgtaaatgtgacgccaagtcaagcatcagaggttttcacgccgattaatccaattacgataactgctacagataatagtggcaaagtggtaacgcatacagtaactggattgccacaaggacttaaatttgatgcatctacgaattcaattgttggaactccaactcaaataggaacaaatacaatcacgattgagtcaacggatgcgagtggaaataaaactacgactaaaattaattatgaagtaacgagaaatagcgcaagtgactctacttccactagcatagtaaatagtgtttcaacaagtataagtaatagtacatcgctaagtgatagtgtaaaagcgagtcaatcattatcaacaaaagaatcaacaagtaagagtctctcaggttcgttaagtgcgtcaacgtcgaatagtgcatcaataaaagcgagtgaatcagcaagcacaagtaagaagttatcagaatcagcgagtacgtcgatgtctgatagcgcatcaataaaagcgagcgaatcagcaagtacaagtaagaagttatcagaatcagcgagtacgtcaacgtctgatagcgcatcaataaaagcaagcgaatcagcaagtacaagtaagaagttatcagaatcagcgagtacgtcgatgtctgatagcgtatcaataaaagcgagcgaatcagcgagtacaagtaagaagttatcagaatcagcgagtacgtcgacgtctgatagcgcatcaacccaagcaagcgaatcagcaagtacaagtaaaaagttatcagaatcaacgagtacgtcgacttcagatagtgcatcaacatcaacgagtgagagtgactcaacaagtgaaagtacatcgttaagtgactcgacaagtgcgagtctttcagaatcgacaagtacatcaacatccgacagtgcgtccacatcaacgagtgagagtgactcaaacagtacaagtacgtcattgagtgagtcgacaagcacaagtctttcagaatcaacgagtacgtcaacatcagatagtgcgtcaacgtcagcaagtgtgagtgactccaatagcgcaagtacgtcattaagagaatcgacaagtacgagtctttcagactcaacaagtacatcgacatctgacagtgcgtcaacatcaacgagcgagagcgactccgatagcgcaagtacatcgttgagtggctcatcaagtacaagcgtttcagattcaacaagcgcgtcaacatcagaaagtgcatcaacgtcaacgagcataagtgactcaaacagtacaagtacgtcattaagtgaatcgacaagtacgagtctttcagaatcaacgagtacgtctacatccgacagtgcatccacatcaatgagtgtaagcgactcaaatagtgccagcatatctttaagtgagtcgacaagcacaagcgtttcagattcaacaagtacatcgacatcagaaagtgcatcaacgtcaacgagcgagagtgactccaatagcgcaagtacgtcattaagtgagtcgacaagcacaagcgtttcagattcaacaagcacatcgacatcagacagtgcgtcaacatcaacgagcgtaagtgattccaatagcgcaagtacgtcattgagtgagtcgacaagcacaagcatctcagattcaacaagcacgtcgacatcagacagtgcgtcaacatcaacaagtgtgagtgagtcaagcagtacaagtaagaagttatcagaatcagcgagtacgtcgatgtctgatagcgcatctgcatcaacgagtgaatcaaacagtacaagtacgtcattaagtggctcgacaagtacgagtctttcaggatcaacgagtacatcgacttcagaaagtgcgtcaacatcaacgagcgtaagtgactccaatagcgcaagtacgtcattaagtgaatcgacaagtacgagtctttcagactcaacgagtacatcgacatcagatagtacgtctgcatcaacaagtgagagtgactcaaacagtacaagcacatccatgagtgaatcattaagcacaagcgtttcagattcaacaagtacgtcaacgtcagacagtgcatcaacgtcaacaagtgtgagtgactccaatagcgcaagtacgtcattaagtgattcaacaagtacaagcatttcagactcaacgagtgcgtcgacatcagatagtgcgtcagagtcagcaagcgagagtgaatcaacaagtgaaagtacatcggtaagtgaatcatcaagtacaagcgtttcagattcaacaagtacatcgacatcagaaagtgcatcaacgtcaacaagcgagagtgaatcaacaagtgaaagtacatcggtaagtgaatcatcaagtacaagcgtttcagattcaacaagtacatcgacatcagaaagtgcatcaacgtcaacaagcgagagtgaatcaacaagtgaaagtacgtcattaagtggatcatcaagtacaagcgtttcagattcaacaagtacgtcaacgtcagaaagtgcatcaacgtcaacgagtgtgagcgactcaaatagtacaagtacgtcattaagtgaatcgacaagtacgagtctttcaaactcaacaagtacgtcaacatcagacagtgcatcaacgtcaacgagtgtgagcgactccaatagcgcaagtacatcgttgagtggctcattaagcacaaacgtttcagattcaacaagcacatcgacatcagacagtgcttcaacgtcaacaagcgagagtgactcgaacagtgcaagcacatcgctaagtggatcattaagtacaagcatttcagactcaacgagtacgtcgacatcagacagtgcgtccacatccacatcagaaagtgcatccacatcaacgagtgtgagtgagtcagacagtgaaagtacatccatgagtgtgagtgactcgaatagtacaagtacatcattgagtgactcgacaagtacgagcgtttcagactcaacaagaacatcaacatccgatagtgcatctacatcaaagagtgtaagtgagtcaaacagcgccagtacatcggtaagtggctcaacaagtacaagcatttcagattcatcaagcacgtccacatcaatgagtacatctgaaactttcacttctcaatctcctataaatagtgaaagtcaatttattggtgatagcttgtctgaagatacaatcgtgactcaatcaaaaaatacgaatatgcttaataaaactggaaaagattatgatttacaagaacaaagaggttatactgattcagaacaacacaatgaaacacaaagtaatcaagctgataatcactcaaacaacctcgatttacttcatcaaaatcgtttacaagataaagtcgttaaacaaccgactaa

SEQ ID NO: 34850 - DNA, 594 bp, Staphylococcus epidermidis
atgcattatccagaacctatatcaaagcttatcgatagttttatgaaactgccaggcattggaccaaagacggctcaacgtctggcttttcatactttagatatgaaagaagacgatgttgttaagtttgctaaagcactagttgatgttaaaagagaacttacctattgtagtgtttgtgggcatattacagaaaatgatccttgttatatatgtgaagataaacagcgagatcgttctgtcatatgtgtagttgaagatgacaaggatgtcatagcaatggaaaaaatgcgtgaatataaaggtttatatcacgtgcttcatggttcgatttcaccaatggatggtattgggcctgaagacatcaatatacctgcattagttgaacgcctcaaaaacgatgaggtgaaagagcttatattagctatgaatcctaacctagaaggcgagtctactgcaatgtatatatctaggttggttaaaccaattgggattaaagtcacaagactggcacaaggtttatctgtaggcggcgatttagaatatgctgatgaagtgactttatctaaagcaattgcaggtagaacggaaatg

SEQ ID NO: 34851 - DNA, 171 bp, Staphylococcus epidermidis; identical to SEQ ID NO: 34666

SEQ ID NO: 34852 - DNA, 393 bp, Staphylococcus epidermidis; identical to SEQ ID NO: 34428

SEQ ID NO: 34853 - DNA, 632 bp, Staphylococcus epidermidis; identical to SEQ ID NO: 34427

SEQ ID NO: 34854 - DNA, 366 bp, Staphylococcus epidermidis; identical to SEQ ID NO: 34425

SEQ ID NO: 34855 - DNA, 609 bp, Staphylococcus epidermidis
atgtctacatttataacgtttgaaggtccagaaggagcaggaaagacctcagtaattaaaaaagtaagcgaaagattagctaaagaatatgatattgttacaacacgtgaacctggtggagtattaactagtgaagaaatacgtcgtattgtacttgatggagatagtatagacattcgaactgaagctatgctgttcgctgcatctagacgtgaacaccttgttgaaaagattatcccatctttacaggcaggtaaaattgtcctttgtgatagatatattgatagttcattggcttatcaaggttatgcaaggggtataggaattaaagaagtaaaattattaaatgaatttgcaattaatggtttgtatccagacttaacgatttatttagatgttgatgcggaaattggtcgtcaaagaattctaaaaaataacagagaacaaaacagattagataaagaggaaaaagcttttcatgaaaaagtgatcgaaggatatcaaaaagtgattagtgataatcctcatcggtttattaaagtcaatgctaaccatagtttggataaagttgttgaagaaacataccaatctatcatcaaatatttaaaa

SEQ ID NO: 34856 - DNA, 924 bp, Staphylococcus epidermidis
atggatgaacaacaacagttagctaacgcatatcattctaacaaattgtcacatgcatatttgtttgagggtgatgatgcacaaacgatgaaacgtgtcgcaatccattttactaaattaattctttgtaataatagtaatcaatgcgaactgaaagttgatacttttaatcatcctgacttttcatatgtgtcttctgatgaaaatacaattaaaaaagaacaaattgaaaaacttgttcatcatatgaaccaactacctattgagggtcaatataaagtatatattattgaggattttgaaaaattaactgttcaaggggaaaatagtatactaaaatttttagaagagccccctgataatacaattgcgatacttttatcaacgaaaccggaacaaatattagacactatacattcaagatgtcagcatgtatattttaagcctattgataagcggcagtttatagagcgtttagtagagatgtcaatagcaagaccggtagcagaaatgctaagtacctatacaactcaaatagaagcagcatcgtcgttaaatgaggaatttgatttagttactttaagaaaatcaatcatcagatggtgtcaattaatattatctaataaagctatggctcttataggtgtcattgagttattaaaacaagctaagaatcgtaaattacaattacttactttatcagccgtcaatggctttttcgaagatataatgcatgcaaagatagaaatggataattattatacatttagtgatttaactgaagaaattgaaaattatgcaaatcaattaacttttaatcaattaatcctcatgtatgatcagattactgaagcgcataaaaagttaaatcaaaatgttaatccaacacttgtttttgaacaaatagtaataaaaggtgtgatt

SEQ ID NO: 34857 - DNA, 837 bp, Staphylococcus epidermidis
atgacaactttatatttagtaggaacaccaattggaaatcttggtgatattacatttcgagctatagaaacattaaaaaaagttgatgtgattgcatgtgaagatacacgtgtaacacggaaattgtgtaatcattatgaaatacaaacacctctaaagtcgtatcatgaacataataaagaacaacaaactgactatttaatcaagcagttacaaactggcttaaatatagcgttagtatcagatgctgggttgccattaattagtgatccaggatatgaattggttgtcgaagcacgtaaaaataatataaatatagaaacagtaccaggtcctaatgctgggttgactgcacttatgtcaagtggattaccatctttcacatacacatttttaggttttttgccaagaaaagaaaaagaaaaaattgaagtgcttgaggatagaatgtttcaaaatagtactttaatactttatgaatcgccttatagggttactgatactttgaaagcaatagctaaaatagattcacaaagatggattactgttggtagagagctaacgaagaaatttgaacaagttcttacacttacagttgatgatatgttgaaattgattaatcatgacaaattacctcttaaaggtgagtttgtgatactgattgaaggtgcattacctaagagtggtgaatcatggtttgaaagctatacggttaaagaacatgttgattattatattgaaaccaaacatgttaaacctaaaaaagcaattaaatttgtcgctacagatcgacatatgaagacgggtgacatatataatatttatcataatattgat

SEQ ID NO: 34858 - DNA, 1968 bp, Staphylococcus epidermidis
atggctaaagatacattttatataacaaccccaatatactatccgagcgggaacctacacatcggtcatgcatactctacagtcgcaggcgacgtgatagctcgctataaaagaatgcaaggctatgatgttcgttatttaactggcactgatgagcacggtcaaaaaatccaagaaaaagctcaaaaagctggcaaaacagaactagaatacttagatgaaatgatttcaggtattaaaaacttatggagtaaacttgagatttctaatgatgattttattcgaactacagaagagcgtcataagcaagtcgttgagaaagtgtttgagcgattattaaaacaaggtgacatttatttaggtgaatacgaaggttggtattctgttcctgatgaaacatattatacagagtcacaacttgttgaccctgtttatgaaaacggcaaaattgtaggtggtaaaagtcctgattctggtcacgaagtcgaacttgtaaaagaagaaagctatttcttcaacattaataaatatacagaccgcttattagaattttacgatgaaaatccagactttatacaaccaccatctagaaaaaatgaaatgattaataactttatcaaaccaggtttagaagatttagcagtatcacgtacatcattcgattggggtgtacgtgtaccatctaatcctaaacatgttgtatacgtgtggattgatgcacttgttaattatatttcttcattaggttatctatctgatgatgaaacattatttaataaatattggccagcagacatacacttgatggctaaagaaattgtacgtttccactctattatatggccaatattgttaatggcgttggatttaccacttcctaaaaaagtttttgcacacggttggattttaatgaaagatggtaaaatgagtaaatctaaaggtaatgtcgtagatcctaatgtattaattgatcgttatggtcttgatgcgacacgttattacttaatgcgtgaattaccgtttggttctgatggcgtatttacaccggaagcctttgttgaaagaacaaattacgatcttgcgaatgatttaggtaatctagtgaatcgtactatctctatgataaacaaatatttccacggcgaattacctgcataccaaggtccaaaacatgaattggatgaaaaaatggaagcgatggcgcttgaaactgttaaatcattcaatgataatatggaaagtttacaattttctgttgctttatcaacagtatggaaatttattagtcgtacaaacaaatatattgatgaaactcaaccttgggttcttgcaaaagatgaaaatcaacgtgagatgcttggtaatgtaatggcacatcttgtcgagaacattcgtttcgctacaatcttattacaaccattcttgacgcatgcacctagagagatatttaagcaacttaatattaacaatccggatttacatcaattagatagtctgcaacaatatggtatgttgtcagaggcaattactgtaactgaaaagccaacaccaattttcccaagattagacactgaagcagaaattgcttatatcaaagaatcaatgcaaccacctaaatcaataaaacagtctgatgaacccggtaaagagcaaattgatatcaaagattttgataaagttgaaatcaaagcagcaaccattattgatgcggaaaatgtaaaaaaatcggagaaactattaaaaataaaagttgaattagataatgaacaacgtcaaatagtatctggtatagctaagttttatcgtccggaagacattattggtaaaaaagttgcagttgttactaatttaaaaccagctaaattgatgggacaaaaatccgaaggtatgattttgtcagctgaaaaagatggcgtacttaccttgataagcttgcctagcgcaattccaaatggtgcagtaattaaa

SEQ ID NO: 34859 - DNA, 768 bp, Staphylococcus epidermidis
atgttaatcgatacgcatgtacatttaaatgatgaacaatatgatgaggatttaaatgaagtgatatctcgtgcgagagaagcaggcgtagatagaatgtttgtagtaggttttgatacacctactattgaacgtactatggagctaatagataagtatgactttatctatggtattatcggttggcatcctgttgatgcaatagattgtactgatgaaagattggaatggatagaaagtctttctaaacatcctaaaattattggtattggtgagatggggttagattatcattgggataaatcaccttctgatgtacaaaaagaggtatttaaaaagcaaattgcattagctaaacgtgttcaattacctattattattcataatcgtgaagcgactcaagattgcatagatattttgattgaagaacatgcagaagaagtgggcggaataatgcatagttttagtgcttcacctgaaattgctgatgtcgtgattaataaattgaacttctatgtttcgcttggaggacccgtcactttcaaaaatgcaaaacaaccaaaagaagttgctaaacacgtaccaatggatcgtttgttatgcgagacagatgccccgtatctatccccgcacccttatagaggtaaacgtaatgaaccagaacgtgttactttagtagcacaacaaattgcagatttgcgtggtatgacttatgaagaggtctgtcgccaaacaaccgaaaatgctgaacgtttattcaatttgaat

SEQ ID NO: 34860 - DNA, 543 bp, Staphylococcus epidermidis
atgaaaataaacgaatttattgttgttgaaggtaaagatgatactgaacgagtaaaaagtgctgtagattgtgatactattgaaacaaacggtagtgcaattgatacatatactttagaagtgatacaacacgcgcagcaaactagaggtgtgattgtactgacagatccagatttcccaggtgataaaattagaaatactatacgggaacatgtttctggtgttaaacacgcatatgtagatagagaaaaggccaaaagtaaaagaggtaaaataggaatagaacatgcaaacattaaagatattcaagaagcattaatgcatgtaagttcaccacttgaagaagctaaagaaactattgataaaagtgtactcattgatttgggattaattatcggtaaagatgcaagataccgtagaaatatcttaggtcgaaaattacacatcggtcactctaatggaaagcaattattaaagaaacttaatgcttttggctatactgaagacgatgtcagaaaagcgctatttgaagaagaggagaat

SEQ ID NO: 34861 - DNA, 888 bp, Staphylococcus epidermidis
atggaatataaagatatagcaacaccatctcgaacacgtgctttgcttgatcaatatgggtttaattttaagaaaagtttaggacaaaattttctaatagatgtaaatatcattaataaaattatcgaagcgagtcatatagattgtacaacgggtgtaattgaagttggaccaggtatgggatcattgactgaacaacttgcaaagaatgctaagaaggtgatggcttttgaaattgatcaaagattaatacctgtgcttaaagatacactttcaccatacgataatgtaacaattatcaatgaagatatacttaaagctgatattgctaaagctgtagatacacatctacaagattgtgacaagattatggttgttgctaatttaccgtattatattaccacacctattttacttaatttgatgcaacaggatgtacctattgatggttttgtcgtaatgatgcaaaaagaggtaggagaacgtttgaacgctcaagtaggtaccaaagcatacggttcgttatcgattgttgctcaatactatacggagacaagtaaagttttaacagttcctaaaactgtatttatgcctcctccaaacgttgattctatcgttgtaaaattgatgcaacgccaagaaccacttgtacaggttgatgatgaggaaggcttttttaagttagcaaaggccgcttttgcacaacgacgtaaaacaattaataataactaccaaaacttctttaaagatggtaagaagaataaagaaactatacgacagtggctagaaagcgctggtattgatcctaaaagacgtggagaaacactcacgattcaagatttcgccacattatatgaacaaaagaaaaaattctccgaattaacaaat

SEQ ID NO: 34862 - DNA, 1353 bp, Staphylococcus epidermidis
atgcaaagacatgcgattattctggcagcaggtaagggcacaagaatgaaatcaaagaaatataaagtgctccatgaggttgctggcaaaccaatggttgaacatgtgcttaacaacgtaaaacaagctggcgttgatcaaattgtaactattattggtcatggcgctgagagtgtgaaagatacattgggtaatcaatcattatatagttttcaggataaacaacttggaacagctcatgctgtgaaaatggcacatgaacatttagcagataaagaaggaactactctagtagtatgtggagatacaccacttattacataccaaactttacaatcacttattgaacatcatgaaagtacacaatcacatgttactgtattatctgcttctactatcaatccttatggttatggacgaattattagaaatcataatggaatattagagcgtattgttgaagagaaagacgcaaatgactcagaacgtgcgattaaagaaattagttcaggtatttttgcctttaataatcgagtactatttgagaagttagaacaagttaaaaatgataatgctcaaggagaatattatttacctgatgttttgtctttaattttaaaagacggaggtaaagctgaagtttattgtaccgaagattttgatgaaatcattggtgttaatgatcgtttgatgttaagtgaagctgaaaaggctttgcaacaacgtatcaatcgctatcatatggaaaatggtgtgacaatcattgatcctagttcaacatttattggaacagatgtgaaaattggaatagatacaactattgaaccgggcgtgcgcatcggaggtcatacaacgattgaagaagatgtgtggataggccaatactctgaaattaataatagcacaattcattcgaatgctaacataaaacaatcggttatcaatgactctattgttggagagaacacaacagttggacctttcgctcaactacgcccaggatctaatttaggttctgaagttaaagtaggaaactttgttgaagtgaagaaagcagatattaaagatggtgctaaagtatcacacttgagctacattggagatgctgaaataggtgagcgtacaaatatcggatgtggttctatcactgtaaactatgacggcgctaacaaatttaaaacaatagtaggtaaagatgcttttataggatgtaatacgaaccttatagcacctgtaacagtaggtaatcatactcttattgcagctggatccacaattacagataatatccctgaagatagtttagcattagcgcgtgcaagacaagtaaataaagagggctacctaaaaaaa

SEQ ID NO: 34863 - DNA, 963 bp, Staphylococcus epidermidis
atgttaaataatgaatataagaattcatcaatgaagatcttttcgcttaaaggaaatgaacctttggcacaagaagtagcagatcatgtagggattgaattaggtaaatgttctgtaaaacgttttagtgatggagaaattcaaataaatattgaagaaagcattcgtggttgtgatgtttttattgttcaaccaacttcatacccagtcaatcttcatttaatggagttacttattatgattgatgcgtgtaaacgcgcgtcagcagcaaatattaacatcgtagtaccatactatggttacgctcgacaagatagaaaagcccgtagtcgtgaacctattactgctaaattagtagctaatttaatcgaaacagcaggtgccaatcgtatgatcgcattagacttacatgcacctcagatccaaggattcttcgatattcctattgatcatttaatgggtgttcctatccttgcacaacactttgagaatgatcctgatattaatccagaagaatgtgtagttgtgtcccctgaccatggtggggtaacacgagctcgtaaattagccgacattttaaaaactccaattgcaattatcgacaaaagacgtccgaaaccgaatgtggcagaagttatgaacattgtgggtgatattgaaggacgtactgcaattattatagatgacattattgatactgcaggaacaattactttagctgctcaagctttaaaagataaaggtgctaaagaagtctatgcttgctgtacacatccagtgctttctgggccagcgaaagaacgaattgaaaactctgcaatcaagcaacttatagtaacaaactcaattcaattagaagagaatagaaaacctaataatacaaaagaactttctgtagctggtttaattgcgaaagcaattattcgtgtatacgaaagagaatcagtaagtgtattatttgac

SEQ ID NO: 34864 - DNA, 657 bp, Staphylococcus epidermidis
atggcttcattaaagtcaatcattcgtcaaggtaaacaaacacgttctgacctaaaacaattaagaaactcaggtaaagtacctgcagttgtatatggttacggtacaaaaaatacttcagttaaagttgatgaagttgaatttatcaaagtaatccgtgaagtaggacgtaatggtgttattgatttaggcgtaggttctaaaacaattaaagtaatggtttcagattatcaatttgatccattaaaaaaccaaatcactcatattgactttttagcaatcaacatgagtgaagaacgtactgttgaagtacaagttcaattagttggtgaagctgtaggtgctaaagaaggcggcgtagttgaacaaccattattcaacttagaagttacagctacacctgaaaatattcctgaaactatcgaagtagatatcagtgaattacaagttaatgacagcttagcagtttctgatattaaaatctctggtgatttcacaatcgaaaataatccagaagattctatcgtaacagtagttcctccaacagatgaaccttctgaagaagaagttgaagctatggaaggcgaatcagcaactgaagaaccagaagttgttggtgaagacaaagaagacgatgaagaagaaaataaagaagac

SEQ ID NO: 34865 - DNA, 3507 bp, Staphylococcus epidermidis
gtgaaatcaatgattgcaaattacattagcgaagataatcgttttcaagaattagatgaagtcttcggccaagagaatattttagttacgggattatccccgtcagcgaaggcaacaattattgctgaaaaatatttaaaagatcataaacaaatgctactcgtaactaataatttataccaagcagataaaatcgaaactgacattttacaatatgtagatgactcagaagtttataaatatcctgttcaagatataatgactgaagagttttctactcaaagtccacaattgatgagtgagcgtgttagaacgttgactgcgttagcccaaggcgaaaaagggttatttattgtgcctttaaacggctttaaaaaatggctaacaccggttgatttatggaaagatcatcaaatgacgcttaaagtaggtcaggatattgatgttgatgcattcttaaataaattagttaatatgggttatcgccgagaaagtgtagtgtcacatattggtgagttttcattgcgtggtggaatcatagatatatatccgttgataggaacacctgtgagaatagagctatttgatactgaagttgattccatcagagactttgatgtagaaacacaacgttctaacgataatataaatcaagttgaaatcacaacagctagtgactacattattactgatgaagtgatacaacacttacaaaatgaacttaaaaaagcatatgaatatacacgccctaaaattgaaaagtccgtacgtaatgatttaaaagagacatatgaaagttttaagttgtttgaatctacctttttcgatcatcaattgttacgacgtcttgtttcatttatgtatgaaaaaccatcaacccttattgactattttcaaaaaaacgcgattattgtagttgatgagtttaatcgtattaaggaaacagaagaaacacttacaacagaagttgaagattttatgagtaacttaattgagagtggaaatggatttatcggacaaggatttatgaagtatgaaagttttgacgcattattagagcaacatgccgttgcatatttcacattatttacatcttcgatgcaagtaccattacaacatattattaagttctcttgtaaaccagttcaacaattttatggtcaatatgacattatgcgctcggaatttcaaagatacgtgcatcaagattacactgtcgtagttcttgttgaaactgaaacaaaagttgaacgtattcaatcaatgcttaatgaaatgcatattccaacagtatcaaatattcacgaagatattgatggtggtcaagttgtagtgacggaaggtagtctttctgaaggctttgaattaccttatatgcagttggtagtcatcacagaaagagaattatttaaaacaagacaaaagaaacaacgtaaacgtacaaaaacgatttctaatgctgaaaaaataaaatcatatcaagacctaaatgtgggcgattatatagtgcatgtgcatcatggtgtcggacgatacttaggtgttgaaacactagaagttggagatacacatcgcgactatattaaattgcaatataaaggaactgatcaattattcgttccagttgatcaaatggatcaagttcaaaagtatgtggcttctgaagataagtcgcctagattaaataaattaggcgggacagaatggaaaaaaacaaaggcgaaagttcaacaaagtgttgaagatatagctgatgaattaattgatttgtataaagaacgtgaaatgtctgtaggttatcaatacggccaagatactgcagagcaatcagcatttgagcatgattttccatatgaattaacacccgatcaaagtaagtcaatcgatgaaattaaaggtgacatggaaagagcaagacctatggaccgtcttctttgtggtgatgtgggatatggtaaaactgaagtggctgtccgtgcagcgtttaaagctgtcatggatggtaagcaagttgcgtttttagtaccaacaacgattcttgcacaacaacactacgaaacactacttgaacgtatgcaagattttccggtcgaaattcaattggtaagtcgattccgcacagctaaagaaataagggaaactaaagaagggctcaaatcaggatatgttgacattgtcgtaggtacacataaattattaggtaaagatattcaatataaagatttgggattgcttattgttgatgaagaacaacgttttggagtgcgacataaagaacgcattaaaactttgaaaaaaaacgttgatgtactgacgcttactgcaacaccaataccaagaacattgcatatgagtatgttaggtgtacgtgacttatcagtgattgaaacaccacctgaaaatcgttttcctgtacaaacttatgtcttagaacagaatacgaactttattaaagaggcattagagcgtgaattatctcgcgatggacaagtattttatttgtataacaaagtgcagtccatttatgaaaaaagagaacaacttcaaaggttaatgcctgacgctaacattgctgtagcacatggccaaatgactgaacgtgatttagaggaaacaatgttaagctttattaatcacgagtacgatattttagtaacgactacaattattgaaacaggtgtagatgtaccaaatgctaatactttaatcatagaagaggctgatcgttttggtttaagccagctataccaattaagaggacgtgtaggacgttcaagtagaattggttacgcttatttcttacatccagctaacaaagtgttaaatgagactgctgaagagcgattgcaagctattaaggagtttaccgaactaggttcaggttttaaaatcgctatgcgagatttaaatattcgtggtgcaggcaatttactcggtaagcaacaacatggctttattgattcggttggtttcgatttatactctcaaatgttagaagaagcagtaaacgaaaaacgtggcattaaagaagaatcgccggatgcaccagatattgaagtagaattgcacttagatgcttatttaccagctgaatatatacaaagtgaacaggctaaaattgagatttataaaaaacttcgaaaagtagaaactgaagaacaacttttcgatgtcaaagatgaattaatagatcgttttaatgattatccaattgaagtcgaacgattattagatattgttgaaatcaaagtccacgctctacatgcgggtgtcgaattgataaaagacaaaggcaaatctatacaaatcattttatcacctaaagcgactgaagatattaatggagaagaattgtttaaacagacgcaacctcttggtagagcaatgaaagttggcgtgcaaaataatgcaatgaatgtaacgctaacaaaatcaaaacaatggttagatagtttgaaattcttagttagatgtattgaagaaagtatggcgattaaagatgaagac

SEQ ID NO: 34866 - DNA, 1188 bp, Staphylococcus epidermidis
atgacccatacaattacaatagttggtttaggtaattatggcattgatgagttacctttaggtatctatcgttttttagaaaaagagtctaaagtatatgctagaaccttaaatcatcctgtcatcaatacgctaaagaaagaaattgaattcgagagtttcgatagtatttatgaagcacatgaccgttttgaagatgtttatgaagcgattgtcacatcactaatagaattggcacaatctgaagatattgtttatgcagttcctggtcatcctagagttgctgaaactacgactgtaaaattattagagtatagtcattttaataaggatatctctgtgaaggtacttggaggaaaaagttttattgatgacatttttgaagcggttgatgtagaccccaatgatggttttacactgcttgatggtacgtcattaaaagaatcggccttaaatgttcgtacaaatacagtaattactcaagtttatagcgtaatgatagctgccgatttaaaacttactttaatggaaagatatcctgatgattttaatgtgaaaataattactggttctcatagtgatggagctcacgtaattgaatgcccactttatgaaattgatcgctacgacgattattttaataatcttacaagtttatttattccaaaaatcaatgaggatacattactttatcaagattttgattacgcagttcaaactattgatttactcgttgataatgaaaaagggtgtccgtgggataaagtacaaactcacgactcattaaaacggtatcttttagaagaaacgtttgaattatttgaagccattgataatgaagatgattggcatatgatagaggaattaggagatatacttttacaagtattattacattctagtataggtaaaaaagaaggatatattgatatcaaagaaattatagaaagtctcaacaccaagatgattcatagacatccacatatctttggtaatgcgcatgtaacttcgcaagaggatttaaaagacatttggtcacgtgctaaagaaaaagaaggtaaagtgcctcgtgttaaatttgagaaagtatttgcagaccacttcttgaaattgtatgataaaacaaaaaataggcaatttgacgaagatgatctcaaacaatttttacaacaaggagagaaaaattca

SEQ ID NO: 34867 - DNA, 261 bp, Staphylococcus epidermidis
atgagattagataaatatctaaaagtgtcacgattagttaaacgacgtacattagctaaagaaattagcgaccaaggtcgagtgactgtcaatggaaatgtggcaaaagcaggtacagatatcaaagaaaacgatgaactcattattcgttttggacaaaaattagtcacagttaaagtaacaggattaagcgaccatgctacaaaagaaaatgcaaaaggtatgtatgatttgattaaagaagaacgtattaatgaagag

SEQ ID NO: 34868 - DNA, 1296 bp, Staphylococcus epidermidis
atgaatatcaaaacagatggttggtctaaaaaagcacatattgttgtggctgtctcaacaggcattgatagtatgagtttattatatagcttattaaacgactatcaacatacatatcgtaaattaacatgtgttcatgttaaccacggattgcgtgaacagtcatatgaagaagaagcgtttttgagagagtattgccatcaacatcatattgacatttatataaagcgtttagacttaagtgatattgtagcagacggtaatagtattcaacaagaagcgcgtcaacgtcgttatgaatggtttggagatatcatagctcaattaagagcagatgtattgttaacagctcatcatcttgatgatcaatttgaaacgattatatatcgtttgtttacagggagatcaacacgtaattcattaggtatgacatatgagtcgtattttaatcaatacaaagtgtatcgtcctatgttaaatttaaaaaaaactgaaatattagcgtatcagtatgcgaaccaaattccatactatgaggacatgtctaatcaagatagaaaatatgttagaaatgacattagacaacgcatcatacctgcaattaacgagaacccgcatttaaacgcgcatcagctactcaaacttaaggattggcatgatattgaattgcaatcgttaaaagaacaagctgaaacgttcatcaataacgaagtttcaaaaagtaaatatttaacctattccttttctagaactgcttttaatgaattgaatgtgaatatcaaaagcgtagttatggatttgttattcgaaaaattagattgtcatttagcaatgccacaacatgcttatgacgagtggtttgaacagattagaaatgataaatctcaatttaatattcacgtaacagatgaatggataattcaaattgcatatgataaattaataataatggctaaaagtgaaatggatcaatatatattagaccgtatatgtattagaaagccaggtacatatgaatttaatgattatcaaattgatattcatcctgacttaccacaacagttatatccgcttactgtgcgtgtccgacaaaatggagatgtgtataaattaaatggtcaaaaaggtcataaaaaagtgagtcgtttatttatcgataaaaaagtgactcttgctgaacgtcagcgcatcccactcattattaatcaagaaaatgcagtgttagctattggcgatttatatgttaaagaaaattttaaagaatttattttgatttcgaataatggagatgaatta

SEQ ID NO: 34869 - DNA, 2100 bp, Staphylococcus epidermidis
atgcagaaagcttttcgcaatgtgctagttatcgcaattattggcgttattatatttggcctcttttcatttttaaatggaaatgggaatatgccaaaacaacttacatatactcagtttgttaataagttgaataaaggcgatttaaaaactttagaaattcaaccagagcaaaacgtatatatggtaagtggtaaaacaaaaaaagatgaagattactcatcgacaattttatataacaatgaaaaagatttacaaaaaatcacagatacagctaagaaacaagataatcttaaatttacagttaaagaagaagaaaaacaaagtgtattcgttagtattttaacgacactgattcctgtattaatcattgcattattatttattttcttccttagccaagcccaaggtggcggcggtggtggtcgtatgatgaactttggaaaatccaaagctaagatgtacgacagtaataaacgtcgagttcgtttctcagatgtagcaggagctgacgaagagaaacaagaattaatagaaattgtagatttcttaaaagataacaagaaatttaaacaaatgggttcaagaattccaaaaggtgtcttacttgttgggcctccaggtacaggtaaaacattattagcacgtgcggttgcaggtgaagctggtgcaccattcttctcaattagtggatctgacttcgttgagatgtttgttggtgttggtgcgagtcgtgttcgtgatttatttgaaaatgctaagaaaaatgccccatgtatcatttttattgatgaaattgatgctgttggacgtcaacgtggtgcaggtgtaggtggcggtcatgatgagcgtgaacaaacattaaaccaactattagttgagatggatggttttggagaaaatgaaggtattattatgattgcggctacaaaccgcccagatatcttagaccctgcattgttacgtcctggtcgttttgatagacaaattcaagttggacgaccagatgttaaaggtcgtgaagcaattcttcatgtgcatgcgaaaaataaacctcttgatgaaacagtagatttaaaagctatttctcaaagaacgccaggtttttctggtgcagacttagaaaacttgctaaatgaggcatctttaattgcagcacgtgagggtaaaaataaaattgatatgcgcgatattgaagaagcaactgaccgtgttattgcaggtccagctaaaaaatctcgtgtaatttctgaaaaagaacgtaatattgtagcgcatcacgaagcaggtcatactatcatcggtatggtgcttgatgaagctgaaattgtacacaaggtaacaattgtccctcgtggacaagcaggcggttatgcaatgatgttaccaaaacaagatcgcttcttaatgacagaaccagaattactcgacaaaatatgtggtttattaggtggacgagtatctgaggatattaactttggtgaagtatcaacaggtgcttcgaatgactttgaacgagcaacgcaaattgcaagatctatggttacagaatatggtatgagtaagaaattaggaccattacaattctcaagcaatagtggtggacaagtattccttggtaaagatatgcaaggtgagccgaattattctggtcaaattgcttatgaaattgacaaagaagttcaacgaattgttaaagagcaatatgaacgttgtaaacaaatcttgttagaacatgaagaacaacttaagttaattgctaaaacactactttcagaagaaacattagttgcagaacaaattcaatcattattctatgatggtgttttaccagaagtagattatgactctgcaaaagttgtgaaaaatgaaaatagtgattatagtgatggaaagtatggaaaatcatacaacgacattcgtaaagaacagttagaagatgacgataaagaagatgatgacaaccatgaaaaagatgaagtaaaccaagacaacacagacagagaagctgataatacttcacatacgaatgaaccaggtcatcaacaatctccgaacatcgataaaccatacaatcctaacgatccaaatcatagacaa

SEQ ID NO: 34870 - DNA, 879 bp, Staphylococcus epidermidis
atgacacatgattatatagtgagaggtttagcatacggtggggaaataagagcatatgctgcaatcacaacagagtcagtacaagaagcacaaacacgtcattatacatggcctactgcttctgccgctatgggaagaactatgacagctactgttatgatgggtgcaatgttaaaaggaaaccaaaagttaacagttactgttgatggcaaaggtccaattggcagaattattgctgacgcagatgctcaaggaaatgttcgtgcatatgtagaccatccacaaacgcattttccactcaacgatcaaggtaaattggatgtacggcgagcagttggtactgatggttccattcaggttgttaaagatgttggaatgaaagactacttttctggtgcgagtccaatagtatcaggtgagctaggagatgatttcacatactactatgccacaagtgaacaaacaccatcatcagtaggattgggtgtattagttaatccagacaactcaatcaaagcagcgggaggatttattattcaagttatgccaggtgctactgatgaaacggtgactaaattagaagaagccattagtcaaatgcaacctgtatcgaaattaattgagcaaggacttacacctgaaggaatattaaatgaaattttgggtgaaggtaatgttcaaattttaaattcaacgtcagcgcaatttgaatgtaattgtagtcatgagaaatttttaaatgctattaaaggtttaggagaggcagaaattcatagcatgattaaagaggatcatggagctgaagctgtatgtcacttctgtggtaataaatatcagtatagtgaaagtgaattagaagatttattagaaacaatgaaa

SEQ ID NO: 34871 - DNA, 930 bp, Staphylococcus epidermidis
atggcacaaaaacctgtagattatgttacacaaattattgggaatacacctgtagtcaaattaagaaacgttgttgatgatgatgcagctgatatttatgttaagttagaatatcaaaatccaggtggttcggtaaaagatcgtatcgctttagcgatgattgaaaaagctgagcgtgaagggaaaattaaacctggtgatacaatcgttgagcctacgagtggtaacactggtataggtctagcatttgtatgtgctgccaaggggtacaaagcagtttttacaatgcctgaaacaatgagccaagagcgccgtaacttattaaaagcttatggtgctgaactagtattaacaccaggatctgaagctatgaaaggtgcaataaaaaaagctaaagaattaaaagaagagcacggctattttgaaccacaacaattcgaaaatccagcaaatcctgaaattcatgaacttacaactggaccagaattagttgaacaatttgaaggtcgacaaattgatgcatttttagctggtgtaggaactggtggtacgttatctggtgttggtaaagtattgaagaaagaatatccaaatgtggaaatagtagctattgaacctgaagcttctccagtattaagcggtggtgaaccaggccctcataaattacaaggattgggagcaggtttcgtacctgatactttaaatacagaagtttatgacagcatcatcaaagtaggtaatgatactgctatggatatggcacgtcgtgttgctagagaagaaggtatattagcaggtatttcatctggtgctgcaatatatgctgctattcaaaaagcaaaagaattaggtaaaggtaaaacagttgtaacagtattaccaagtaatggggaacgttacttatcaacaccattatattcatttgataat

SEQ ID NO: 34872 - DNA, 816 bp, Staphylococcus epidermidis
atgattaaaacaaaaataatggggatattaaatgtgacacctgactcattttctgacggaggacagtaccactcagttgatcaagctgtgaagcgtgctaaagagatgatagatgaaggtgtagacatcatagacgttggaggtgtctcaacacgaccaggtcataaagaagtatcgcataaagaagtatcgcttaaagaagaaatgaatcgtgtattgcctgtggttgagtctatcgttaaatatgatgtgcaaatttcggttgatacatttcgaagtgaagttgcggaagcttgtcttaaacttggtgtttcaatgattaatgatcagtgggcaggcctatttgattcgaatatgtttaatgtggtatctcaatacggtgctgaaattgtacttatgcataatggtgacggtcatagagataaacctgttgttgaagagatgcttgtatcattacttgcgcaagcgaataaggctgaactagccggtataccacataataaaatctggttagatcctggaataggttttgctaaaacacgagaagaagaaaatgaagtaatggcaagattagatgaattagtagcgaccgaatatccagttttacttgcaacaagtcgaaaaagatacattaaagaaatgatgaatcaagattcttctccttcagatagagatgaggcaactgcagctacaacggcttatggtataatgaaaggcgttcgtggggttcgagttcataatgtattattaaatacgcgactagcccaaagtatggattttctaaaggagaatgaatatgaacgacatcatctttct

SEQ ID NO: 34873 - DNA, 477 bp, Staphylococcus epidermidis
atggttaaagcttatttaggattagggagcaatattggaaatagagaactacaactcaatgaggctattaaaatacttcatgactatcaaggtattcaagtaactcaagtttctcatatttatgagactgaaccagtgggatatactaatcaaccgaaattcttaaacttgtgcattgagatagagactgaattgaatccacaatctttgttaaaatgttgtttaacaacggaacaacaacttcatcgtaaaagagaaatacgttgggggcctagaactttagatatagatatactactgtttggtgatcaaattattgaacaagataatttatcagtgccgcaccctagaatgaaagaacgttcgtttgttcttatcccgttaaatgatatagccaccaaacaaatagaaccgatttctaataaaagtatcggacaactagtagtacctgataatagtgtgaaaaaatataaggaa

SEQ ID NO: 34874 - DNA, 1485 bp, Staphylococcus epidermidis
atgtcagaagaaatgaacgaccaaatgcaagttcgtcgtcaaaaattacaagaattaattgatttagggattgatccttttggtcatcgattcaatcgctcatctacttcaagtgagttaaaagaacagtgggaccaattctctaaggaagaattgcatgaaaaagaagacgaaagccacgtgtcaattgcaggtcgtcttatgactaaacgtggtaaaggtaaagcgggatttgcacatattcaagacttgaaaggtcagattcaaatttatgtaagaaaagatcaagttggagatgatcaatttaacatttggaaaatggctgacttaggtgacatcataggtgttgaaggtgtcatgtttaaaactaatacgggcgagatttctgtcaaagctaagtcatttactttactatccaaatcattacgacctttacctgataagttccatggtttacaagatatagaacaaagatatcgacaacgttatttagatttaattacaaatgaagatagtacgcaaacgtttattaatcgtagtaaaataattcaagaaatgagaaactatttaaataaacaaggattcttggaagtagaaacaccaatgatgcaccaaattgctggaggtgctgctgcacgtccgtttgttacgcatcataacgcattagatgctactctttatatgcgtatagctatagaactacatttgaaacggttaattgtcggaggtcttgaaaaagtctacgagataggcagagtttttcgtaatgaaggtgtatctacaagacataaccctgaatttacaatgattgaattgtatgaagcttatgctgattatcatgatataatggatttaactgaaaatatggtcagacacattgctcaagaagtgtttggatcagctaaagtacaatataatgatgaagaaattgacttagaatcttcatggaaacgacttcacattgttgatgctgttaaagaagttaccggtgtagatttttataatgttaattctgatgaagaagctattagattagcaaaagaacatgatattgaaattactgaaaatatgaaatatggccatatattaaatgaattttttgaacagaaagttgaagaaacacttattcaaccaacgtttatttatggtcaccctattgaaatttcaccgttagcaaagaaaaatccaaacgatgaaagatttactgatcgttttgaattatttattgtaggaagagagcatgcaaatgccttcacggaattaaacgatccgattgatcaacgccaacgttttgaagcgcagcttgttgaaaaagaacaaggaaatgatgaagctcatgatatggatgaggattacatcgaagcattagagtatggaatgcctccaactggtggtctaggtatcggtatcgacagattagtaatgctattaactgattctccgtcaattagagacgtattactattcccatacatgagacaaaaa

SEQ ID NO: 34875 - DNA, 171 bp, Staphylococcus epidermidis
atgacgtcaaatcatcatgccccttatgatttgggctacacacgtgctacaatggacaatacaaagggcagcgaaactgcgaggtcaagcaaatcccataaagttgttctcagttcggattgtagtctgcaactcgactatatgaagctggaatcgctagtaatcgtagat

SEQ ID NO: 34876 - DNA, 393 bp, Staphylococcus epidermidis; identical to SEQ ID NO: 34428

SEQ ID NO: 34877 - DNA, 632 bp, Staphylococcus epidermidis; identical to SEQ ID NO: 34427

SEQ ID NO: 34878 - DNA, 366 bp, Staphylococcus epidermidis; identical to SEQ ID NO: 34425

SEQ ID NO: 34879 - DNA, 171 bp, Staphylococcus epidermidis; identical to SEQ ID NO: 34666

SEQ ID NO: 34880 - DNA, 393 bp, Staphylococcus epidermidis; identical to SEQ ID NO: 34428

SEQ ID NO: 34881 - DNA, 632 bp, Staphylococcus epidermidis; identical to SEQ ID NO: 34427

SEQ ID NO: 34882 - DNA, 366 bp, Staphylococcus epidermidis; identical to SEQ ID NO: 34425

SEQ ID NO: 34883 - DNA, 885 bp, Staphylococcus epidermidis
atgtctaaaatagtaggatcagatcgagttaaaagaggaatggctgaaatgcaaaaaggcggtgtcattatggacgtcgttaatgcagaacaagctaaaattgctgaagaagccggagctgttgccgtaatggcattagagcgtgtaccatcagatattcgtgctgctggcggtgttgcacgtatggcgaatcctaaaatagttgaagaagttatgaatgccgtatcaattccggttatggctaaagccagaattggtcatattacagaagctagagttttagaatcgatgggtgttgactatatagatgagtctgaagtattaacgcctgcagacgaagaatatcatttaagaaaagatcaatttacagttccttttgtgtgtggctgtcgtaacttaggtgaagcagcacgacgcattggtgaaggtgcggcgatgttgcgtacgaaaggtgaacctggtactggtaatattgttgaagctgtccgtcatatgagacgtgttaattctgaagttagccgcttaacagttatgaatgatgatgaaattatgacatttgcaaaagatttgggtgcaccttatgaagtattaaaacaaattaaagataatggacgtcttcctgtagttaattttgcagctggtggtgttgctacgcctcaggatgcagcactaatgatggaattaggtgcagatggtgtatttgttggttcaggtatatttaaatctgaagatcctgaaaaatttgctaaagctatcgttcaagctacaacacattatcaagattatgagttaatcggaaaattggctagtgagctaggtacggctatgaaaggtctagatattaatcaaatttcactagaagaaagaatgcaagagcgtggttgg

SEQ ID NO: 34884 - DNA, 558 bp, Staphylococcus epidermidis
atgattaaaattggtgttttagccttacaaggtgctgtacgtgaacatatacgtcatattgaattaagtggttatgaaggcattgctataaaaagagtagagcaactagatgaaattgatggtctaatattacctggtggagagtctacaacattacgtcgtttaatggatttatatggatttaaagaaaagttacaacaattagatttgccaatgtttggaacatgtgctggattaattgttcttgcaaaaaatgttgaaaatgagtctggttatttaaataaattagatataactgttgagcgtaattcattcggtagacaagtcgatagctttgaatctgaacttgatattaaagggatagcaaatgatattgagggagtatttattagagcacctcatattgctaaagtggataacggagtggaaatacttagtaaagttggaggtaaaatagtagccgtcaaacaaggacaatacctcggtgtttctttccatccagaactaactgatgattatcgtatcactaagtattttattgaacacatgattaaacat

SEQ ID NO: 34885 - DNA, 1071 bp, Staphylococcus epidermidis; identical to SEQ ID NO: 34313

SEQ ID NO: 34886 - DNA, 561 bp, Staphylococcus epidermidis
ttgctttgtgaaaattgccattttaatgaagcggaagttaaacttactgttaaaggtatagatagtacgcatgaaaaatgggtatgttcagtatgtgcccaaggagaaaacccctggttacattctaacgatgataatacgtatcatacacaccaagacgatatagaagaagcatttgtagtgaaacagatacttcaacaccttgctgcaaaacatggtattaattttcatgagatggcatttaaagaagaaaaaaaatgcccaacgtgtcagatgacacttaaggatattgcacatgttggtaagcttgggtgtgctgattgttatgctacgtttaaagaagacatcattgatatagttcaacgtgttcaaggtggtcaatttgaacatgtaggaaaaacaccacaatcatcgtataagaaacttgcaataaaaaagcaaattgaagaaaaatcaaaatatctaaataaattgatagatggtcaagagtttgaagaggcagcgattgttcgtgatgaaattaaagctttaaaaagtgagagcgaggtgtctcatgatgag

SEQ ID NO: 34887 - DNA, 1023 bp, Staphylococcus epidermidis
gtgagagcgaggtgtctcatgatgagtaatatccatactaatattagtgagtggatgaagatgtctgaggagacacctgttattatttcttccagaattcgattagctagaaatcttgaaaaccatgtccacccacttatgttcccttcagagcaagaaggatatcgagtgataaatgaagttcaagatgcgctttccaacttaactttaaatcgattagatacgatggatcaacaaagtaaaatgaaattggttgcgaaacatcttgtgagtcctgaactagtgaaacaacctgcttcagcagtaatgttaaatgatgatgaatcggtaagtgttatgataaacgaagaagatcatatacgaatacaggctctaggaactgatttatcgctaaaggatttatatcaacgcgcttctaaaattgatgatgaattagataaagcgttagacattagttatgatgagcatttaggatatttaactacctgtcctactaatattggtacaggaatgcgtgcaagtgtgatgttacatttacctggactctccattatgaaaagaatgaacagaattgcacaaacaattaatcgttttggatttacaattcgaggtatatacggagaagggtcacaagtatatggtcacatttatcaggtttcaaaccaacttacactagggaaaacagaagaagacattatcgataacttaactgaagttgtaaatcaaattataaatgaagaaaagcaaataagagaaagacttgataaacacaattctgtagagacactggatagagtttatcgatcattaggtgtactacaaaacagtagaattatttctatggaagaagcctcatatcgtttgagcgaagtgaaactaggtattgatttgaattatattttgcttgaaaattttaaatttaatgaattaatggtagcaatacagtcaccatttttaatagatgacgatgataatagaacagtaaatgaaaaaagagctgatttattaagagaacatataaaa

SEQ ID NO: 34888 - DNA, 2451 bp, Staphylococcus epidermidis
atgttatttggtagattgacagagcgtgcacaacgtgtgttggcacatgcacaagaggaagcaattcgtttgaaccattctaatattggaacagaacatcttttgcttggtttaatgaaagagccagaaggtatagcagcaaaggtattagtaagttttaatattactgaagataaagtcatcgaagaagttgaaaaacttatcggtcacggtcaagagcaaatgggcacactacattatacaccgagagcaaaaaaagtaattgaactgtctatggatgaagctcgaaagctacatcataactttgtaggaacagagcatatactattaggtttaattagagaaaatgaaggtgttgcagcacgtgtatttgcaaacctagatttaaatattactaaagcacgtgcccaagttgtaaaagctttaggaagtccagaaatgagtaataaaaatgcgcaagctaataagtctaataacacgcctactttagatggattagctagagatttaactgttattgctaaagatggaacgttagatccagtcgtaggacgagataaagaaattactcgtgtaattgaagttttaagtcgtcgtactaaaaataatcctgtgctaattggtgaacccggtgttggtaaaacagcaattgctgaagggcttgcgcaagcaattgttaaaaatgaagtaccagaaactttaaaagacaaacgtgtaatgtcattagatatgggtacagtcgtagctggcactaaatatcgtggtgaatttgaagaaagattgaaaaaagttatggaggaaatccatcaagctggtaatgttattctatttatcgatgaacttcatactttagttggcgctggtggcgcagaaggagcaattgatgcatctaatattttaaaacctgctttagctcgtggagaattgcaatgtataggtgccacaacattagatgaatatcgtaaaaatatagaaaaagacgctgcattagaacgtcgttttcaaccaattcaagtggatgaacctacagttgaagacacgattgaaatcttaaaaggattacgtgaccgttatgaggctcatcacagaattaatatctcagatgaagctttagaagcggctgctaaattgagtgatcgctatgtttcagatcgtttcttgccagataaagccattgacttaattgatgaggcaagttcaaaagttagacttaaaagtcatacaacgccaagtaatttaaaagagattgaacaagaaattgataaagtaaaaaatgaaaaagatgctgcagttcatgctcaagaatttgaaaatgccgctaatttaagagataagcaatctaaacttgaaaagcaatatgaagatgctaaaaatgaatggaaaaatgcacaaggtggtttagatactgccttatctgaagaaaatatcgctgaagtaatagctggttggacaggtattcctttaactaaaattaatgaaactgaatcagatcgtttattgaatcttgaagatacacttcataaacgtgtcattggacaaaacgatgctgtcaattcaattagtaaagctgttagaagagctcgtgctggtcttaaagatccaaaacgtccaatcggtagttttattttcttaggacctacaggtgtgggtaaaactgaattggctcgtgctttagctgaatctatgtttggtgaagacgatgcaatgattcgcgtagatatgagtgaatttatggagaaacatgctgtcagtcgattagttggtgcacctccaggatatgtaggacatgatgacggcggtcaattgactgaaaaagttagacgtaaaccatactctgtgattttatttgatgaaattgagaaagcacatcctgacgtatttaatattcttctacaagttttagatgatggtcatttaacagatactaaaggtcgtactgtggacttccgtaatactgtgattattatgacttctaatgtgggagctcaagaattacaggaccaacgctttgctggttttggaggtgcttcagaaggtagtgactacgaaactgtcagaaaaacaatgatgaaagaattaaaaaattcattccgaccagaattcttaaaccgtgttgatgacattattgtcttccacaaacttacaaaagatgaattaaaagaaattgttacaatgatggtaaataaacttactcaccgtctttcagagcaaaatattaatattgttgttactgataaagcgaaagaaaaaattgcagaagaaggatatgatcctgaatatggtgctagaccactcattagagcaattcaaaaaacggttgaagataatttaagcgaattgattttagatggaaataaaattgaaggtaaagaagtaacaattgatcatgatggtaaagaatttaagtatgatatttatgaaattacagctaaaaaagaaacaacagaatca

SEQ ID NO: 34889 - DNA, 1371 bp, Staphylococcus epidermidis
atggccaagaaaaaagtaatattcgaatgtatggcatgtggctatcaatctcctaagtggatgggcaagtgccctaactgcggtgcgtggaatcaaatggaagaaatagtagaaaaggttgctcatcctaaacatggtgtaaaaacaaaagaaacagcaggtaaggtacaaaagttaaatagtgttaagcatgaagctacccctagattacttacagaatcaaaggaatttaaccgtgttttaggtggaggtattgtaagtggttcgttagtactaataggtggagacccaggtattggtaagtcgactttattgctacaaatttgtgctgcgctgtcacaaaataagaatgttttatatattactggtgaggaatctattaatcaaactaagttgcgcgctgatcgtttagaagaagattctagtcatcttaatgttttagctgaaactgatttagaagtgatacatcaaactgtaaaagaagagagacctgacttacttgttgttgattcgattcaaacaatctatcatccggaaattagttccgcacctggatcggtatcacaagtaagagagagtacgcagagtttaatgaacattgctaaacaaatgaatattgccacatttattgtgggacacgtaacaaaagaaggacaaatcgccggaccaagattattggaacatatggttgatacagttctttattttgaaggagatgagcatcacgcatatcgtatccttagagcagtaaaaaatagatttggttctacaaatgagatggggattttcgaaatgaagcaaagtggattaaaaggtgtacttaatccttctgaaatgtttttagaagaacgttctacaaatgttccgggctctacaatcgtccccactatggaaggaacaagaccactactcattgaagtccaagcgcttgttacaccaacaacatttaataatcctagacgaatggctacaggtatagatcataatcgattaagtttacttatggcggttctagaaaaaaaggaaaactatttactccaacaacaagatgcctatattaaagtagcaggtggcgtcaaattaacagaacctgctgttgatttaagcattattgttgcgacagcttcaagttttaaagatcaagctgttgatggattagattgttttgtgggtgaagttggattaacaggtgaagtacgcagagtatctcgcatagagcaacgtgttcaagaagcgaccaaactagggtttaaaagagctattattccacagacaaatattggaggttggacattcccagaaggcatccaagtcgttggtgtttcatcagtacatgaagctttgaaatatgcattacattcaaaacagcga

SEQ ID NO: 34890 - DNA, 1452 bp, Staphylococcus epidermidis
atgagtgaacgtatcagagtaagatatgcgccaagtccaacaggatatttgcatattggtaatgcaagaacagcattattcaattatttatttgctaaacattataatggtgattttgttgttcgcatcgaagatacagatagtaaacgtaatttagaagatggtgaatcttcacaattcgataatctaaaatggttaggtttggattgggatgaatctgtcgataaagataaaggttttggaccttatcgtcaatctgaacgtgcagaaatctataatccactaattcaacagctattagaggaagacaaagcatataaatgttatatgactgaagaagagttagaagcagagcgtgaagctcaaattgctcgtggagagatgccaagatatggtggacaacatgcgcacttaacagaagaacagcgtcaacagtacgaagcggaagggcgtaaaccatcaattcgtttccgtgtgcctaaagatcaaacatatactttcaatgacatggttaaaggagaaatttcctttgaatctgacaatatcggagactgggtaattgtaaaaaaagatggtgttccgacttataattttgcagttgccgtagatgatcattatatgcaaatatcagatgttatacgtggtgatgaccatgtttcaaatacacctaagcagttaatgatatatgaagcatttggatgggaagcacctcgttttggtcatatgtcactcattgttaatgaagagcgtaaaaaattaagcaagcgagatggtcaaatcctacaatttatcgagcaatatcgtgacttaggatatcttccagaagcattatttaactttattacattgttaggttggtcacctgaaggtgaagaggaaatcttttctaaagaagaatttataaagatttttgatgaaaaacgcttgtctaagtctccagctatgttcgatagacaaaaacttgcttgggttaacaatcagtatatgaaaacaaaagatacagaaacagtattcgaacttgcattacctcatttaatcaaggctaatcttatacctgaaaacccatcagaaaaggatagagaatggggacgtaaattaatagcgttgtatcaaaaagaaatgagttacgctggtgaaattgttccattatcagaaatgttcttccatgaaatgccggaacttggaaaagatgaacaagaggtattacaaggagaacaagtgccagaactaatgaaccatttatatggtaaattagaatctttagaatcgtttgaggcaactgaaattaagaaaatgattaaagaagttcaaaaagaaactggtattaaaggtaaacaattatttatgcctattcgtgttgctgttactggacaaatgcatggtcctgaattacctaacacaattgaagtattaggcaaagataaagtattgtcacgcttaaaaaaccttgtt

SEQ ID NO: 34891 - DNA, 639 bp, Staphylococcus epidermidis
gtgttaaaaagaatgagagacgatataaagatggtgtttgaacaggatcctgcagcgcgctcgactttagaagtaataactacttacgctggattacatgcagtttggagtcacttaattgcccataaattatataaaaatagacgctatgtagcagccagaatgatttctcaactatcacgtttttttaccggaattgaaatacatccaggtgcaaaaatcggtaagcgtttatttatcgaccatggcatgggtgtagttattggagaaacatgtacaattggtgataatgttactatttatcaaggagttactttaggtggtacaggcaaagaaaaaggaaaacgccatcctgatattggtgataatgttttgatagcagctggatctaagatattaggtaatataaaaattgaatcaaatgtgaatattggagctaattccgtagtattacagtctgttcctagttatacaactgtagtaggtataccaggtcacattgttaaacaagaaggtagacgtattggtaaaacatttgatcaccgtaacttacctgatccactttacgaacaaattaaacacttagaaagacagcttgaaaaagctaagaatggagagattcaagatgattacattata

SEQ ID NO: 34892 - DNA, 1822 bp, Staphylococcus epidermidis
ttgaaaaagctaagaatggagagattcaagatgattacattatataataccttaacacgtcggaaagagacgtttgagcccattgaaccaggtaaggtcaaaatgtatgtatgtgggccaacagtttacaattatattcatattggaaatgcacgaccagctattaattatgatgtagtcagaagatatttcgaatataagggatatgaagtcatctatgtttctaatttcacagacgttgatgataaactcattaatcgctctaaagaacttaatgaaagtgttcctgaaattgctgaaaagtatattaaagctttttatgaggacgttggtgctttgaatgtgaaaaaggctacatctaatccgcgtgtgatgcatcatatgggtgaaattattgattttattaaagaattagtagatgaaggttatgcatatgaaagtgacggtgatgtctattttagaacacgtcaatttgatggatatggtaaattaagtcatcaatcattagatgatttgaaagttggcgctcgtattgaagctggagaacaaaaagaagatgcgctagattttactttatggaagaaagctaaaccaggtgaaattagttggaatagtccatttggtaaaggtagaccaggttggcacattgaatgttcagtaatggcttatcatgaactagggtctacaatagatattcacgcaggtggttcagatttacaatttccgcatcatgaaaatgaaattgctcaatcagaggctcataatcatgcacctttcgcaaattattggatgcataatggttttattaatattgataatgagaaaatgagtaagtctctaggaaatttcattttagttcacgatatcattaaagaagtcgatccagacgtattacgattctttatgattagtgtgcattatcgtagcccaataaactacaatttagaattagtaggtgcggcgcgaagtggtcttgaacgtatacgtaatagctacaagttaattgaggaaagagaacaaattgcctcagatttggaagaacaatcagaatatatacaacaaatagataaaatactaaatcaatttgaaacggtaatggatgatgactttaatactgctaatgcagtaactgcatggtatgacttagctaaacttgcaaataaatatgtattagaaaatacaacttcaacaaaagttttaaatagatttaaagaagtgtacagcatttttagtgacgtccttggtgtaccacttaagagtaaagaaactgaagagttactagatgaagacattgaacaattgattgaggagcgtaatgaagcacgtaaaaataaagatttcgctcgagcagatgaaattagagatatgttaaaagcacgtcatatcattttagaagataccccccaaggtgtaagatttaaacgtggctaaacatatgaacgtaaaacttcttaatcctttaacattggcatatatgggtgatgcagtacttgatcaacatgtgcgtgaatatatcgtgctaaaattacaaagtaaacctcatcgtttgcaccaagtatcgaaaagttacgtttcagcgaaaagtcaagctaagactttagagtatttgttagatattgactggtttacagaggaagagctaagtgttttaaaacgaggacgtaacgctaaaagttatacaaaagctaaaaatactgacattcaaacttatcgtaaaagttcagcgttagaagctgttatcggatttttatatttagaccatcaatcagaacgattagaaaacttattagaaacaattgttaggatagtggatgaaaggtag

SEQ ID NO: 34893 - DNA, 525 bp, Staphylococcus epidermidis
atgaagaaaagatacttaattatagatggttacaatatgattggccaatcctcaacacttagcactgttgctaaagagaatttagaagaagctagagagcaattattagacacaattgccaactacaatgcattaatagcagatgaaattgtctgtgtatttgatgcctatgaacagtcagggatagaaagggaatacttctatcatggtgtcaaaacaatctttactaaagaaaaagaaactgcagatagttttatagaacgctacgtgtatgaattatataataaacacacgacacacattaccgttgtaacaagtgatatgagtgaacaacatgctatttttggttcaggtgcatatcgtatttcttcaagagaaatgtggcgtgaattaaaagaaaatgaggttgttgttaacaagtcacttgatgattttagcgaaaagaaaccaagaattagaattccgttatctaatgagatacttgaagaatttgaaaagattagacgtggcaatcagaaaaaagac

SEQ ID NO: 34894 - DNA, 180 bp, Staphylococcus epidermidis
atggctaaaaaagaaagtttctttaaaggcgttaagtcagaaatggaaaagacgagttggccaactaaggaagaattatttaaatatacaataatagttgtatcaacagtgatattcttcttagtctttttctatgccttagacataggaattaatgcattaaaacaattatttttaggt

SEQ ID NO: 34895 - DNA, 546 bp, Staphylococcus epidermidis
atgtctgaagaagtaggcgctaagcgttggtatgctgtacatacctattcaggatatgaaaataaagttaaaaagaatttagaaaaaagagtagaatctatgaatatgactgaacaaatttttagagttgtcataccagaagaggaagaaactcaagttaaggatgggaaagctaaaaagcttgtgaagaaaacatttcctggatatgtattagttgagttaatcatgacagatgagtcgtggtatgtagttagaaatactcctggagtaacaggatttgtcggatctgcaggtgcaggatcaaaacctaaccctctacttcctgaagaagtacgcttcattcttaagcaaatgggtcttaaagagaaaacaatagatgttgaactcgatgttggggaacaagttcgtatccaatcaggtccttttgctaatcaaattggagaagtacaagagattgaagcggataaattcaagcttactgtacttgttgatatgtttggtcgtgaaacacctgtagaagttgaatttgaccaaattgaaaaatta

SEQ ID NO: 34896 - DNA, 420 bp, Staphylococcus epidermidis
gtggctaaaaaagtagaaaaagtagttaaattgcaaattcctgcaggtaaagcgaatccagcaccaccagttggtccagcattaggtcaagcaggtgtgaacattatgggattctgtaaagaattcaatgctcgtacgcaagaacaagcaggtttaatcattccggtagaaatcagtgtttatgaagaccgttcatttacattcattacaaaaactccgccggctccagtactacttaaaaaagcagctggtgttgaaaaaggttctggtgaacctaataaaactaaagttgcaacagtaactaaagatcaagtacgcgaaattgctcaaacaaaaatgcaagacttaaatgctgcagacgaagaagcggcaatgcgtattattgaaggtactgcacgtagcatgggtatcactgtacaa

SEQ ID NO: 34897 - DNA, 693 bp, Staphylococcus epidermidis
atggctaaaaaaggtaaaaagtatcaagaagcagctagtaaagttgaccgcactcaatactatagtgttgaagaagcaatcaaattagctaaagaaactagcgttgctaatttcgacgcttctgttgaagttgcattccgtttaggaattgatacacgtaaaaatgaccaacaaatccgtggtgcagtagtattaccacacggtactggtaaatcacaacgtgtactcgttttcgctaaaggcgataaaatcactgaagctgaagaagcaggtgcagattatgtaggtgaagcagattacgtacaaaaaatccaacaaggttggtttgatttcgacgtagttgtagctacacctgatatgatgggtgaagttggtaaacttggtcgagtattaggacctaaaggtttaatgcctaaccctaaaactggcactgtaacaatggatgttaaaaaagcagttgaagaaatcaaagctggtaaggtagaataccgtgctgaaaaagcaggtattgtacatgcatcaattggtaaagtgtcattcgatgaagaaaaattagttgataacttcagaactttacaagatgtattagcgaaagctaaaccagcttctgctaaaggtacttacttcaaatctgttgctgttacaacaacaatgggtcctggagtaaaagttgatacttcatctttcaaacta

SEQ ID NO: 34898 - DNA, 498 bp, Staphylococcus epidermidis
atgtctgctatcattgaagcaaaaaaacaacaagtcgatactatcgctgaacaacttaaaaattcagtttcaacagttatcgttgactaccgtggtttaactgtagcagaagttactgaattacgttcacaattacgtgaagcaggtgttgagtataaagtatacaaaaacactatggttcgtcgtgctgctgaacaagcaggtatcgaaggcttggatgaattcttaacaggtcctacagcaatcgcaacttctactgaagatgttgttgcaccagcaaaagttattgcaggatttgcaaaagaacatgaagctttagaagttaaaacaggcgttatggaaggtaacgttatctctgctgaagaagttaaaacagttggttcattaccttcacacgatggtcttgtatctatgcttttatctgtattacaagcacctgtacgcaacttcgcttatgcagttaaagctgttggagaacaaaaagaagaaagcgctgaa

SEQ ID NO: 34899 - DNA, 366 bp, Staphylococcus epidermidis
atggctaatcaagaacaaatcattgaagcaattaaagaaatgtcagtattagaattaaacgatttagtaaaagcaattgaagaagaatttggtgtaactgcagcagctccagtagcagcagcaggtgcagctggtggcggagatgcagcagctgaaaaaactgaatttgatgttgaattaacttcagctggatcttcaaaaattaaagttgttaaagcagttaaagaagcaactggcttaggattaaaagatgctaaagaattagtagatggagctcctaaagtaattaaagaagctatgcctaaagaagatgctgaaaaacttaaagaacaattagaagaagttggagctagcgtagaattaaaa

SEQ ID NO: 34900 - DNA, 606 bp, Staphylococcus epidermidis
atgagtcattattatgatgaacaacctgatgttaaaagtaacccaaaaagaattagttatcaaattaaaaatgcgcaactagagcttactactgatgctggagttttttcaaaagataatgtagattttggatctgacttactaattaaaacttttttaaaagaacatcctccaggcccaagtaaaaccatcgcggatgtaggatgtggatatggtcctatcggtttagcaataggaaaagtatctccacaccatcaaatcacaatgttggatattaacaatagagccttggcgttggcagaaatgaataagacgaaaaatcaagtggataatgtaacgattatagaaagcgattgtttatctgctgtcaatcatcagtgctttgattacattttaactaatccccctattagagctggtaaggacattgttcatcgaatctttgaacaagcgtttgacagactcaagactacgggtgaactttatgtcgtcattcaaaaaaagcaaggtatgccttcagctaaaaagaaaatagaagaactatttggcaatgtagaaattatagctaagagtaaaggatattatattttgaaaagtataaaaggt

SEQ ID NO: 34901 - DNA, 3549 bp, Staphylococcus epidermidis
ttggcaggtcaagttgtccaatatggaagacatcgtaaacgtagaaattacgcgagaatttcagaagtattagaattaccaaacttaatagaaattcaaacaaaatcttatgattggttccttaaagaaggtttattagaaatgttcagagatatttctccaattgaagatttcactggcaacctatctttagaatttgtagattacagattaggtgaacctaaatatgatttagaagaatcaaaaaaccgtgacgctacttatgctgcacctcttcgtgtgaaagtgcgtcttattattaaagaaactggtgaagttaaagaacaagaagtcttcatgggtgattttccactgatgacagatacaggtacgttcgtaattaatggtgctgaacgtgttatcgtatctcaattagttcgttcaccatccgtgtattttaacgagaaaatcgataaaaatggacgtgaaaactatgatgcaacaatcattcctaaccgtggtgcttggttagagtatgagacagatgctaaagatgttgtatatgttcgtatcgatagaacacgtaaattaccattgactgtattactacgtgcgctaggtttctcaactgatcaagaaattgttgacttattaggagacagcgaatatttacgtaatacattagaaaaagatgggacagaaaatacagaacaggctttattagagatttatgaacgtttacgtcctggcgaaccaccaacagtagaaaatgctaaaagtttattatattctcgtttcttcgaccctaaacgctatgatttagccagtgtaggtcgttataaagcgaacaaaaaattacacctaaaacatcgtttgttcaatcaaaaattagcagaaccaattgttaacagtgaaactggtgaaattgttgttgacgaaggaacagtgttagatcgtcgtaaacttgacgaaatcatggacgtattagaaacaaacgctaatagcgaagtatttgaacttgaaggtagcgtaattgacgaacctgtagaaatccaatctattaaagtgtatgtgcctaacgatgaagaaggtcgtacgactactgtcattggtaatgcattacctgattctgaagttaaatgtattactccagcagatattgttgcctcaatgagttatttcttcaacttattgaatggcattggttatacagatgatattgatcatctaggtaatcgtcgtttacgttctgtcggtgagctattacaaaatcaattccgtatcggtttatccagaatggaacgtgttgttcgtgaaagaatgtcaatacaagatacagattctattacgccacaacaactcattaatatcagaccagttattgcatcaatcaaagaattctttggtagttcacaattatctcaattcatggaccaagctaacccgttagcagagttaacgcacaaacgtcgtttatctgctctagggcctggtggattaacacgtgaacgtgctcaaatggaagtgcgtgacgttcactactctcactatgggcgtatgtgtccaattgaaacacctgagggtcctaatattggtttaataaactcattgtcaagttatgctagagtgaatgaatttggttttattgaaacgccatatcgtaaagtggatttagatacaaactcaatcactgatcaaatagattatttgacagctgatgaagaggatagttacgttgttgcacaggctaattctagacttgatgaaaatggtcgtttcttagatgatgaagttgtttgtcgtttccgtggtaataacactgttatggctaaagaaaaaatggattacatggacgtatcaccaaaacaagttgtttcagcagcaacagcatgtattccattcttagaaaatgacgactctaaccgtgcgttaatgggagcaaacatgcaacgtcaagcggtgcctttaatgaatccggaagctccatttgtgggtacaggtatggaacacgtagccgcaagagactctggtgctgcaattactgctaagcatagaggacgcgttgagcatgttgaatctaatgaaattttagttcgtcgtttagtcgaagaaaatggaactgaacatgaaggtgaattagatcgttatcctttagcgaagttcaagcgttcaaactctggtacttgttataaccaacgtccgattgtatcaattggtgatgttgttgaatacaatgagattttagcggacggtccttcaatggaattaggagaaatggcattaggacgaaatgtagttgtcggtttcatgacatgggacggttacaactatgaggatgctgtaattatgagtgaacgactagttaaagatgatgtatatacatctattcatattgaagagtatgagtcagaagctcgtgatacgaaattaggacctgaggaaatcacacgtgatattccaaacgtatctgaaagtgcacttaagaacttagatgatcgtggtatcgtttatgttggtgcagaagttaaagatggtgacatcttagtaggtaaagtaacgcctaaaggtgtaactgaattaacagctgaagagagattattacacgctatctttggtgaaaaagcacgtgaagttcgtgatacatcattacgtgtacctcatggtgctggcggtatcgttttagatgttaaagtctttaatcgtgaagaaggagacgacactctatctcctggagttaaccaattagtacgtgtatatattgtccaaaaacgtaaaatacatgttggggacaaaatgtgtggtcgtcacggtaacaaaggtgttatttctaagattgttccagaagaagatatgccttatttaccagatggtcgaccaatcgatattatgttaaacccattaggtgtaccatcacgtatgaacattggacaagtattagaattacatttaggtatggcagctaaaaacttaggaattcacgttgcttccccagtgtttgatggtgccaacgatgatgacgtttggtcaactatcgaagaagctggaatggcgcgtgacggtaaaactgttctatacgatggacgaactggtgaaccattcgataatcgtatttcagttggtgtcatgtacatgcttaaacttgcacacatggtagatgataagttacatgcacgttctactggaccatactcacttgttacacaacaaccattaggtggtaaagcacaattcggtggtcaacgtttcggtgagatggaggtatgggcacttgaagcttatggtgctgcttatactttacaagaaatcttaacttataaatctgatgatactgtaggtcgtgttaaaacttacgagtctatagttaaaggtgagaacatttctagacctagtgttccagaatcattccgagtattgatgaaagaactacaaagtttaggtctagatgttaaagtgatggatgagcatgataatgaaatcgaaatggctgatgttgatgacgaagatgcagcagaacgcaaagtagatttacaacaaaagagtgctccagaatcacaaaaagaaactactgat

SEQ ID NO: 34902 - DNA, 3621 bp, Staphylococcus epidermidis
ttgattgatgtaaataatttccattatatgaaaataggattagcttcacctgaaaaaattcgctcttggtcttatggtgaagttaagaaacctgaaacaataaattaccgtacacttaagcctgaaaaagatggtctattctgtgaaagaattttcggacctactaaagattgggaatgtagttgtggtaagtacaaacgtgtacgctacaaaggtatggtatgtgatagatgtggcgttgaagtaacaaaatcaaaagtgcgtcgtgaaagaatgggtcatattgaattagcagcacccgtatctcacatttggtatttcaaaggaattccaagtcgtatggggctattattagatatgtctcctagagcattagaagaagtaatatacttcgcttcatatgttgtagttgatccaggaccaactggacttgaaaagaaaacattattatctgaagctgaattcagagaatattatgacaagtacccaaatcaatttgttgccaaaatgggtgcagaaggtattaaagacctattagaagaaattgatttagatgaagaattaaaagagttacgtgatgagcttgaatctgcaacaggtcaaagattaacacgtgcgattaaacgtttagaggtagttgagtcatttagaaattctgggaataatccttcttggatgattttagatgtattacctattataccacctgaaattcgtccgatggttcaattagacggtggacgtttcgctacaagtgatttaaatgacttgtatcgtcgtgttatcaaccgtaacaaccgtttgaaacgtttattagaccttggagcaccaggtatcatcgttcaaaatgaaaaacgtatgttacaagaagcagtcgatgctttaattgacaatggtcgtcgtggtcgacctgtaacaggaccaggtaaccgtccattgaaatctctttcacatatgcttaaaggtaagcaaggacgtttccgtcaaaacttattaggtaaacgtgttgactattcaggacgttcagttatcgcagttggaccaagcttgaaaatgtatcaatgtggtttaccaaaagaaatggcgcttgaattatttaaaccattcgttatgaaagagttagttcaacgtgaaattgctacaaacattaaaaatgctaaaagtaaaattgaacgtatggacgatgaagtttgggatgtgcttgaagatgttataactgagcatccagtgctattaaaccgtgctccaacattacacagattaggtattcaggcatttgaacctactctagtagaaggtcgtgcaattcgccttcaccctcttgttacaactgcttataatgcagactttgatggtgaccaaatggctgttcacgttccgttatcaaaagaagctcaagctgaagcacgtatgcttatgcttgcagcacaaaacatcctaaaccctaaagatggtaagccggttgtaacaccatcacaagatatggttttaggtaactattacctaacattagagcgaaaagatgccgtgaatactggtgcaatctttaacgatactaatgaggttttaaaagcttatgcaaatggttatgtacatctacacactcgtattggtgttcatgctaattcattcaataatccaacgtttactgatgagcaaaatagcaaaattttagctacatcagtaggtaaaattattttcaatgaaattattcctgattcatttgcatacatcaatgaaccaagtcaagctaacctagaaagaacgacacctgataaatactttgttgatcctacgcaattaggtgaaggtggactaaaagaatactttgataatacagaacttattgaacctttcaacaaaaagttcttaggaaatatcatcgcagaagtattcaatagatttagcattactgatacttcaatgatgcttgatagaatgaaagatttaggattcaaattctcatctaaagctggtattactgttggtgtttctgacattgttgtacttccagataaacaagacattttagatgaacatgaaaaattagttgaacgtgtgactaaacaatataatcgtggtttaatcactgaagacgagcgttacaatgcggttgtagaaatttggactgacgcaaaagaccaaattcaaggcgaattaatgcagtctcttgagaaaactaacccaatattcatgatgagtgattctggtgcccgtggtaatgcatcaaacttcactcaattagctggtatgcgtggtttaatggcagcaccatctggtaagattatagaattaccaatcacatcttcattccgtgaaggtttaacggtattagaatactttatttctacacacggtgcgcgtaaaggtcttgccgatacagcacttaaaacagctgactctggttaccttactcgtcgtcttgttgatgtagcacaagatgttatcgttcgtgaagaagattgtggtacagaccgtggtttattagtttctgatataaaagaaggaactgaaatgattgaaccatttatcgaacgtatcgaaggtcgttattctaaagaaacaattcgccatcctgaaacagacgaagtaattattcgtccagacgaattaataacaccagatattgcaaaacaaatcactgatgcaggtattgagcaaatgtatatacgctcagcatttacatgtaacacacgtcatggtgtatgtgaaaaatgttatggtaaaaaccttgctactggtgaaaaagttgaagtgggtgaagcagttggtacaattgccgctcaatctatcggtgaaccaggtacccaacttacaatgcgtacattccacactggtggggtagcaggaagtgacatcactcaaggtcttcctcgtatccaagaaatctttgaggcacgtaatccaaaaggtcaagctgtgattactgaaatcgaaggtgtagttgatgatattaaattagcaaaagatcgccaacaagaaataattgttaaaggtgctaatgaaactagatcttatctagcatcaggtacttcaagacttaaagttgaaataggtcaatctgttgaacgtggtgaagttctaacagaaggatcaattgaacctaaaaactatttatctgtagcaggcctaaatgcaactgaaagttacctattaaaagaagtacaaaaagtttaccgtatgcaaggtgttgaaattgacgacaaacacgttgaagttatggtaagacaaatgttacgtaaagttcgcatcattgaggctggtgacactaaattattaccaggttcattagttgatattcataactttactgacgctaacagagatgcattcaaacatcgtaaacgtccagctacagctaaaccagtattacttggtattactaaagcttctctggaaactgaaagcttcttatcagcagcttcattccaagaaacaacacgtgtgcttactgatgcagctattaaaggtaaacgtgatgatttacttggtcttaaagagaatgttattattggtaagttaattcctgctggtactggtatgagacgttacagtgatattcaatacgataaagctactgcaccagtaacagaaacaagtgaagaagttgaaacgatagaa

SEQ ID NO: 34903 - DNA, 411 bp, Staphylococcus epidermidis
atgccaactattaaccaattagtacgtaaaccaagaaaaagcaaaacgaaacaatcagattcaccagctttaaacagaggtttcaatagtaaaaagaaacaatttactaacttaaactcacctcaaaaacgtggtgtatgtactcgtgtaggtacaatgacacctaaaaaacctaactctgcgttacgtaaatatgcacgtgtgcgtttatcaaataacattgaagttaacgcatacattcctggtatcggacacaacttacaagaacacagtgttgtacttgttcgtggtggacgagtgaaagacttacctggtgtgcgttaccatatcgtacgtggtgcacttgatacttcaggtgttgatggacgtagacaaggacgttcattatacggaactaaaaaaccaaaaaat

SEQ ID NO: 34904 - DNA, 870 bp, Staphylococcus epidermidis
atgaagaaaaaagcgttactacctttgtttttgggaataatgatttttctagcaggttgtgattactctacacctgagaagcaagatggattcttctttaatacttttgttcaacctatgaaacatctcttacagtggttaggaaatgatgtttttcataataattttggactagcaattattgtattagttcttttcattcgtttaatcttgttaccatttatgttatctaactataaaaatagtcacatgatgcgtgagaaaatgaaagtggctaaacctgaagtagatggcattcaagaaaaggttaaacgtgcgcgaacacaagaagaaaaaatggctgcaaaccaagaacttatggaagtttataaaaaatatgatatgaaccctatgaagagcatgttaggatgtttacctatacttattcaaatgccaattattatgggattatactttgtattaaaagataagcttgtaaatggtttatctgaacatccgcatttcttatggttcaatttaactaagcctgatatttggattacagttattgccggtgtgctatactttattcaagctgtagtttcaagcaaaacgatgcctcaagagcaacgtcagatgggctatatgatgatggttatttctccaataatgattatttggatttctttacaagcatcatcagctttaggtttatattggtctgtcagtgcattattcttagtaattcaaacgcattttgctaatatttattactctaaacttgctaaaaaagaagttcaaccttttattgaaaagtatgaaagagaacataatccatcttcaaagaaaaaagggaaaaatactcaagtagtatcaaaaaagaataaaaaa

SEQ ID NO: 34905 - DNA, 639 bp, Staphylococcus epidermidis
atgatgtttgattcaaaacaattatcagtctattttatttgcggaacacaagatatacctaaaaataaatcaattgagcaagttctcaaagaggcattagaagctggaatcacgctatatcaatttcgtgaaaaaggtccgaatgcactaaaaggggaaaagaaaaaacagttagccttaaaacttaaacaattatgtcactcatatcacgtacctatgatagttaatgatgatgttcaattagcccaagagattaatgctgatggcattcatgtaggtcaagatgatatggaaattcaacaatttgcaagccaatttaaaaataagattataggtttaagtgttgggaatttgaaagagtatcaacaatctgatttgtctaaagttgattacattggagtaggtccaatgtatacaacatcatcaaaagatgacgctagtaaacctgttggtccatctatgatatctcaattaagattatatattcatgattttcctatagttgccattggaggtataaatgaaactaacgtgcagcctattgttgacgaaggtgcagatggtatttctgtcatctcagctattacacgtagtaccaatatagacaaaacggttaaatatttcttaagatatttcacc

SEQ ID NO: 34906 - DNA, 786 bp, Staphylococcus epidermidis
atgaataatttagaacgattacgttcagaaaatccactcgtaatttgctataccaatgatgttgtgaaaaactttactgcgaatggtttactaagtttaggtgctagtcccgcaatgagtgaggcaccagaagaagctgaagattttactcgaatggctagtgcgcttttaattaacatcggtacactcacacgtgaaaatgaagaagacattatcaaaataggtaaaattgctaatcagcaaggtacaccaatagtttttgatccagtggcagttggtgcttctacatatcgtaaaaatttttgtcaacgttttcttggtgaagttaatgtcacagtaataaaaggcaatgcttcagaaatattgacattaatagattttaatacaactatgaaaggtactgacagtgacagcgaattagattcagtaaatattgcaaaaaaagcggctaatactttaaatactgctattgtcattactggaaaagatgatattattgcaaaaaatgagaaaataattaaattatctaatggttctccgcttcttactaaaatcacgggggctggatgcttgttaggtggtgtattagcaagtttcttgtttagaaatactcaaccttcaattgatttattagttgaagcggtaagtgtctacaacatcgcagcagaatttgctgaacaagcgcctcatgtaaatggacctggtacttttctatctgaactgctagatcaactttatcagatgaatgacattacttataaaaatcaagtcaaaaaggtagagata

SEQ ID NO: 34907 - DNA, 687 bp, Staphylococcus epidermidis
atgacattttcaaaagagttgagggaagcatcaagacctattattgatgacatttacaatgatggttttattcaagatttactagcaggtaagttatctaatcaagctgtaagacaatacttaagagcagacgcttcttatttaaaagagtttacaaatatttatgcaatgctcatacccaaaatgagttctatggaagatgttaaatttctagtagaacaaattgagtttatgttagaaggagaagttgaagcgcatgaggttctagctgatttcattaatgaaccatatgaagaaatagtaaaagaaaaagtatggccaccaagtggtgatcattatattaaacatatgtacttcaatgcatttgcacgtgaaaatgcagccttcacgattgcagcgatggcaccctgtccatacgtctacgctgtcattggtaaacgtgcgatggaagatcccaaattaaataaagaatcagtgacttctaaatggtttcaattttatagtactgaaatggacgaacttgttgatgtgttcgatcaattgatggaccgtttaactaaacattgtagtgagacagaaaaaaaagagattaaagaaaatttcttgcaaagtactattcatgagagacatttcttcaatatggcatatattaatgaaaaatgggaatatgggggaaataacaatgaa

SEQ ID NO: 34908 - DNA, 1509 bp, Staphylococcus epidermidis
atggccataaaagctgaagaaatcagtgcattgcttcgctcacaaattgaaaattatgagtcagaaatgtccgttacagatgttggtacagtactccaaattggtgacggtatcgcattaattcacggacttaacgacgttatggctggtgagctagtagaattccataacggtgttcttggtttagcacaaaaccttgaagaatctaatgtgggtgtggttattttaggaccatatgaagaaattagtgaaggtgacgaagttaaacgtactggccgaattatggaagtaccagtcggagaggaaatgataggaagagttgttaatcctcttggacaacccattgacggacaaggtccaatcaatgcgactaaaactcgtcctgtagagaaaaaagcaactggcgtaatggatcgtaaatctgtagatgaaccattacaaacaggtatcaaagcaattgatgctttagtaccaattggccgtggtcaacgtgaattaatcattggtgaccgtcaaactggtaaaacaactgttgcaattgattcaatcttaaaccaaaaagatcaagatacaatttgtatttatgttgcaataggtcaaaaagattcaacagttcgtgcaaatgttgaaaaattaagacaagcaggtgctttagactacacaatcgttgtatctgcatccgcagctgatccagcaccattactttatattgcaccttattctggtgtaactatgggtgaagagttcatgtttaatggaaaacatgttcttatcgtttacgatgatttaactaaacaagcggcagcataccgtgagctatcattattattacgtagaccaccaggtcgtgaagcatatcctggggacgtgttctacttacacagtagattattagaaagagctgcaaaacttaacgatgatcttggaggcggttcaattactgctttaccaatcattgaaactcaagctggcgatatctcagcatacgttccaacaaatgttatctcaattactgacggacaaatattcttacaatctgatttattcttctcaggtgttagaccagcgattaatgctgggcaatcagtatctcgtgttggtggttcagctcaaattaaagcgatgaaaaaagttgcaggaacattacgtttagacttagcttcatatcgtgagttagaatcatttgcgcaatttggttctgatttagatgaatttacagctaaaaaattagcgcgtggtgaacgtactgttgaagtattaaaacaaggtcaaaataacccactgcctgtagaacatcaagtacttattatttttgctttaactaaaggttacttagatgatattcctgtccaagatatcaatcgttttgaagaggaatttaaccactgggctgagtcaaatgcaactgaattattaaatgaaattagagaaactggtgctttaccagatgctgataaatttgattctgctatcacagaatttaaaaaaggatttaataaatcagaagaa

SEQ ID NO: 34909 - DNA, 537 bp, Staphylococcus epidermidis
atggcaaaggtagcaaaaaaatatgccaaagcattatttgatgtcgctctagatacaaatcaactagatgttgtctatgaagatttagaaacaattagccattcatcgtttgatttcatcaaacaacttaaagcaattgatagtaatccaagcttaactgcaaatcaacgtgaagaatttgtagaaagagtttacaacgaagcaaatccatatgtggtaaatactttaaaagtattagcagataaccgacatatttcaattgtagagaatgtttttaaatcattccaaaatttatataacaaatactacaaacaagattttgcaattattgaatcgacttacgagttaagcgaagatgaaatatcaagaattgtagaacttatcaaaaagcaaactgaattatcaaatgtaattgttaacactaaaatcaatcaagatttaattggtggatttagagttaaggttggaactacagttatggatggtagtgttagaaatgaccttgttcaattacaaagaaaatttgaaagagctaac

SEQ ID NO: 34910 - DNA, 513 bp, Staphylococcus epidermidis
gtgactgcaacagctaatacatttattctcggtgcaggagttgaatgggggacaacatttgtaacactcgtaacatttgtaatcctcatcatacttttgaagaaatttgcttggggtccattaaaagaagtaatggacaaacgtgaacgtgatatcaataaagatattgacgacgcagaacaagctaagataaatgctcaaaaacttgaagaagaaaatagaaagacacttaaagaaactcaagatgaagttcaaaaaatcttagacgatgctaagattcaagcacgtaagcaacatgaagaaattattcatgaagctaacgaaaaagctaatggtatgattgaaactgctcaaagtgaaattaatagtcaaaaagaacgtgcaatttctgatattaataatcaagtttctgaactatcagtacttattgcatctaaagttcttagaaaagaaatttcagagcaagatcaaaaagaattagttgaaaagtatttaaaagaggcaggggataaa

SEQ ID NO: 34911 - DNA, 726 bp, Staphylococcus epidermidis
atggatcacaaatccccactcgttagttggaacgtctttggtttcgatattgtttttaatttggccagtgttttaatggtagtgattacagcaattttagtttttattttagctatagtttgcactcgaaacttaaagaaacgaccaactggaaaacaaaacttcattgaatgggtatttgattttgttagaggtattattgaaagtaatatggcctggaaaaaaggtgggaatttccacttcttagcagtgacattaattcttttcatttttgtggccaacatgcttggtttaccgttcgcaattgtcactcatgaccatacgctatggtggaaatcaccaacagcagacgctacggtaactctaacgttatctacaactatgattttgttaacgcactattacggtattaaaatgcgtggaacaaaagcttatgcagctggatattttaaacctttctggccattagctattattaatgtattcgaagaattcacttctacattaactttaggtctacgtttgtacggtaatatttttgcaggtgaattattactcggtttacttgcatcattgttctttgaacaacctgcatggggttggataattagtattcctggattaattgtttggcaagcgttctctatattcgtgggaacaattcaagcatatatctttgtaatgctttcaatggtttacatgtcacataaagtggcagacggacat

SEQ ID NO: 34912 - DNA, 1146 bp, Staphylococcus epidermidis
ttgatgaaaaaagttatgaccatatttggaactaggcctgaagctataaaaatggctccgttgattaaaacgttagagaaagattctgacctggaacccgttgttgtagtcaccgcccaacatagagagatgcttgattcagtgttgaatacttttaacataagtgcagattatgatttgaatattatgaaagctggtcaaacattgtctgaagtaacatctgaagcaatgaaaaagttagaagatatcatacaaaaggaagtgcctgatatggtacttgttcatggtgatacagtgacaaccttttctggagcattagccgcattttatagtcaaacacctataggacatgttgaagctggattaaggagttataataaatattcaccttatcctgaagaaataaatagacaaatggttggggtaatggcagatttgcactttgccccaacctataatgctgcacagaatttagtaaaagagggtaaattagccaaacatatagctatcactggtaatacagctattgacgcaatgaattatacaatcgatcaccaatattcatcatctatcatacaaaaacataaaaataaaaactttattttactcacagcacatagacgtgaaaatataggtaaacctatgataaacgtgtttaaagcgattagaaagttgattgatgaatatcaggatttagcgttggtctatcctatgcatatgaatcccaaagtaagagatattgcgcaaaaatatttaggaaatcatcctaggattgaattgatagaaccacttgatgtggttgattttcataattttgctaaacaagcatatctcattatgactgactctggtggaatacaagaggaggcaccatcattacacaaaccagttttagtattgagagatagtactgaaagaccggagggagtagatgctggaactttgagagtcattggtacgaatgaagaagatgtctataatgaaactaaaaaattaatagaaaacccagacctttatcaaaaaatgagtcaagctgttaatccatatggcgatggacaagctagtgagagaattgtgcaacatataaaatattattttaatttgacaaatgacagacccaatcattttgaatttacaaaagattta

SEQ ID NO: 34913 - DNA, 627 bp, Staphylococcus epidermidis
atgagtaaagtacatgtttttgatcacccattaatacaacacaaactaagttatattagagatgctcgcactggaacaaaagagtttagggaacttgtagatgaagtcggtatgttaatggcttatgaagtaactagagacttagaactgcaagatgttgaaatacaaacacctgtgactaaaatgacagctaaacgtttggcgggtaaaaagttagcaattgtacctattttaagagctggtctaggcatgacagatggtgtgttaagtcttgttcctgctgctagggtaggacatataggactatatagagatccagagactcttgaagcggtagagtactttgcgaaaatgcctcaagacatcgatgaacgtcaaattattgtggttgatcctatgcttgctactggtgcttcagctattgaagcaatttcttcattaaaaaaacgtggagctaaaagtatacgttttatgtgtttaatagctgcccctgaaggcgttgaaaaaatgcaagaagcacacccagatgtagatatatatattgcggcattagatgaaaaattaaatgacaaagcgtatattacaccaggtttaggtgatgcaggggatagattattcggtactaaa

SEQ ID NO: 34914 - DNA, 1236 bp, Staphylococcus epidermidis
atgtcttatatcgagaaaaaggataaagttgtttacgatgctattcaaaaggagtttcaacgacaaaatagtaatattgaactcattgcatcagaaaatttcgtatcacaagcagttatggaagcccaaggttcagtattaacgaataaatatgctgagggttatcctgggcgtcgttattatggagggtgtgagcatgtagatgtaactgagtccattgccattgaaagagcaaaagctttatttggagcagaacatgttaatgttcaaccccattcaggttctcaagctaatatggctgtgtatttggttgctttagaaatgggcgatactgtgttaggtatgaatttgagtcatggtggtcatttaacacatggggcaactgtcaattttagtggtaaattttatcattttgttgaatatggtgtggaccaagaaaatgaattaataaactatgatgaagtgagacgtttagcaattgagcatcaacctaaattaattgtagctggtgcttcagcatattcaagaactattgactttaaaaaatttaaagaaattgctgatgaagtaggagctaaattgatggtagatatggcacatattgctggtttagtagctgctggtttacatcctaatcctgtagaatatgctgattttgtgactactacaactcataaaactttacgcggtccacgtggtggtatgattttatgtaaagaagaatataaaaaagatatagataaaacaatcttcccaggtattcaaggcggtccattagaacatgtcatcgccgcaaaagctgttgcatttggagaagctttgaacgacgattttaaagattatcaaaatcaagtcattaaaaatgcacaagctttagctcaaacattaattgaagaaggcttcagagttgtatctggcggaacagacaatcatttagttgcagttgatgttaaaggttctatcaatatgactggtaaattagctgaagagacacttgataaagtaggaattacatgtaataagaatactattccatttgataaagaaaaaccgtttgtaacaagtggtgttagactaggaacaccagcagctacaactcgtggttttgatgaatctgcatttgtggaagtagcaaaaattattagtttagcattaaataactatgataatgatactaaactaaatgaagctaaagagagagttcacgcactcacatctaaatatccattatataat

SEQ ID NO: 34915 - DNA, 834 bp, Staphylococcus epidermidis
atggtgaattataaagagaagtttgcagaagccaagacaattgccgtaaatgaggggtttgaatcaactcgtgccgaatggttgtttttagatgtttttggttggtcgaaaacagattatttaattcataaagatgagcaaatgtctttgacatcaattaacaaattggataaagcgttggatagaatgatcacaggagaacctattcaatacattgttggatttcagtctttttatggttatcaatataaagtgaatcaacactgtcttataccaaggcctgaaaccgaggaagttatgttgcattttttagaattgtgtaaaaagactgataccatagcagatattggaactggaagtggtgctatagcaattacgcttaagttactgcaacctgaattaaatgttattgcaacagatttgtatgaagatgctttaaatgtagctaagcaaaatgctagtcattatcaccaaaatattcagtttttgcgtggaaatgctttaaaaccgctaattgaaaatgatataaaattggatgggctgatatctaatccaccatacataggccatagtgaaataatagatatggagtcaacagtactaaattatgagccacatcatgctctatttgctgagaaaaacggatttgctatttatgagtcaatattagaagatttaccatttgtaatgaaacaaggtggacatgttgtttttgaaataggttatagtcaaggagatatcttaaaaagaatgattcaagatttatatcctgaaaaagaagtagagattttcaaagatatcaatggaaatcagcgtattatatctattatttgg

SEQ ID NO: 34916 - DNA, 1074 bp, Staphylococcus epidermidis
gtgtttgatcaattagatatagtagaagaacgatatgaacaattaaatgaattactgagtgatcctgatgtcgtgaatgacgctgataaattaagaaaatattcaaaagaacaagctgacttacaaaagactgttgatgtgtacagaagttataaaaccaaaaaagaagaattacaagatattgaagatatgctaaatgaaacatctgataaagaagaagttgaaatgctaaaagaagaaagtagtgctttaaaaacagaattacctgatatggaagaagaattaaaaatcttacttatacctaaagatcctaatgatgataaagatgttatagttgaaatccgtgcagctgcagggggagatgaagctgcaatatttgctggggacttaatgagaatgtattcaaaatacgccgaggcaaacggatttaaaacagaaatagttgaagcttcagaaagtgatcatggtggatataaagaagtgagtttctcagtatctggtacaggtgcttacagtaaattaaaatttgaaaatggtgcacatagggtccaacgtgtgcctgaaacagaatcaggggggcgaattcacacttctaccgcaactgttgctgtattacctgaagctgaagatgtcgaaattgagatacgtaatgaagatttaaaaattgatacttatcgctctagtggtgctggtggtcagcacgttaacacgactgactctgcagtgcgtattacacacttgccgactggtgttatagcaacttcttctgaaaagtctcaaattcaaaaccgagaaaaagctatgaaagttttaaaagcacgattgtatgatatgaaattgcaagaagaacaacaaaaatatgcttctcaaagaaaatcagctgttggtacaggtgatcgttctgaaagaataagaacttataattatcctcaaagtcgtgtgacagatcatcgaattggtttaacgcttcaaaagttaaatcaaatcatggaaggaaatttagacgagattgtggaggcactcacactttcagaacaaactgagaaactgaaagaattaaacaatggtgaatta

SEQ ID NO: 34917 - DNA, 597 bp, Staphylococcus epidermidis
atgtatgaaacgtaccattcaggttggattgaaaccataacaggaagtatgtttagtgggaaatctgaagaacttatacgtcgcttaagacgtggaatatacgctaaacaaaaggtggttgttttcaaaccagcaattgatgatcgttaccataaagaaaaggtcgtctcacataatggtaatgagatagaagcgattaatatatctacagctcaagaaattttaaatcataagctagaagaagtaaacgtcatcggaattgacgaagtgcaattttttgaagacgatattgtcaacatagttgaaaaattagctgaaaacgggcatcgtgttattgtagcaggtttagatatggattttagaggagaaccgtttaaacctatgcccaagttgctcgcagttagtgaacatattacaaagttgcaagcagtatgttctgtatgtggttcaccttcgagtcgtacacaacggttaataaatggtgaaccggcgaaagtagatgatcccatcatattggttggtgcaaatgaaagttacgagccacgttgtagagcacatcatatagttgcacctagtgaaaatgagaaggaggaaatg

SEQ ID NO: 34918 - DNA, 1314 bp, Staphylococcus epidermidis
atgcctggtagagaacgaacatctccgcagtatgaatctttccacgaattatataaaaacaatactactaaagagctcactcaaaaagccaaatctttaaaattaactaattacagtaaattaaataaaaaagaattggtacttgccattatggaagcacaaatggaaaaagatggtaattactatatggaaggaatattagatgatattcaacaagatggatatggtttcttaagaaccgttaactattctaaaggtgagaaggatatttatatttctgcaagccaaattcgacgttttgaaataaaacgtggtgataaagtaacgggtaaagttcgtaaaccaaaagataatgaaaaatattatggtctacttcaagttgattttgtaaacgaccataatgcagaagaagtcaaaaaacgtcctcacttccaagctttaacacctctttatccggaagaaagaatcctattagaaacgcaatctacaaattattccactcgtattatggatttagtcacaccaataggtcttggtcaacgtggtcttatagttgcaccacctaaagctggtaagacaagtttattaaaagaaatcgctaacgcaatagcgagtaataaaccggaagcgaatttgtttatattactagtaggtgagcgtccagaagaagtgacggatattgaaagatcggttgaatctgcagaagtcgttcattcgactttcgatgaaccaccagaacaccatgttaaagttgctgaattattattagagcgtgcaaaacgattagttgaaattggagaagatgtaattatacttatggactccataacacgtttggcacgagcatataatctagtcataccacctagtggacgtacattgtcaggtgggcttgatcccgcttcattacacaaacctaaagcgtttttcggtgcagcacgtaacattgaagctgggggaagtttgacaattttagctactgctttagttgagacaggatctcgtatggatgatatgatctatgaagagttcaagggtacaggtaatatggaattacatcttgatcgtaagttatcagaacgtagaatattcccagcgatagacataggtcgtagttcaacacgaaaagaagagctattaatcactaaagcggaattagattcattatggcaattacgaaatttatttactgattcaacagactttacagaacgttttattagaaaacttaagcgttcgaaaaataatgaagaattctttaagcaattgcaaaaagcagctgaagagagtactaaaactggaagaccaattatt

SEQ ID NO: 34919 - DNA, 1425 bp, Staphylococcus epidermidis
atgagaaatttcactaaacaatatataaacggtgaatgggttgatagtgcaagcggtgaaactattgatgttattaaccctgcaactgaagaagtaatgggtaaaattgctaaaggtaacgaagaagatgttaataaagctgtagatgctgcagataaagtatatttagaatttagacatagttctgttgaagaaagaagagaacttttagataaaatcgtaaaagaatatcaaaatagaaaaaatgatttaattgaagcaattactgatgaactaggagcgcctttatcagtttccgagaacgttcattatcaaatgggattgaatcattttacagctgcaagagatgctttagatagcttccaatttgaagaacaacgtggcgatgatttggttgttaaagaagcaattggagttgctggacttgttacaccttggaatttccctacaaaccaaacttcacttaaattagctgctgcgtttgctgctggtagccctgttgttttaaaaccatctgaagaaacaccatttgctgcaattattttagcagaaatttttgataaagtaggcgtacctaaaggtgtgtttaacttagtcaatggtgatggatctggagtaggaaatcctttaagtgaacatccaaaagtaagaatgatgtcatttacaggttctggtcctacaggttcaaaaattatggaaaaagctgcaaaagacttcaaaaaagtgtctcttgaattgggtgggaaatcaccttatatcgtattagatgacgttgatgttgaagaagctgctaatgcaacaacgaaaaaagtagttaacaatacaggtcaagtttgtactgcaggaacacgtgtacttattcctgaaagtattaaagaagactacttaacagcagttaaagaagcatttagtaaagttaaagtaggtcaaccaagagaagaaggaactcaagtaggtcctattattagtaaaaaacaatttgatcaagttcaggattacattgataaaggtatcaatgaaggagcagagttattctacggtggtccaggtaaaccagaaggattagataaaggatattttgcgcgtccaactatatttattaatgtagataatcacatgacgattgcacaagaagaaattttcggacctgtcatgtctgtaatcacttataataatcttgacgaagctattgaaattgctaatgatactaaatatggtcttgctggctatgttattggtaaagataaagatacattgagacatgttgctcgttcaatcgaagctggtacaattgaaattaatgaagctggtagaaaaccagacttaccattcggtggttataaagaatctggcttaggtcgtgaatggggcgattatggtatcgaagaattcttagaagtaaaatcaatagctggatattttaaa

SEQ ID NO: 34920 - DNA, 1071 bp, Staphylococcus epidermidis; identical to SEQ ID NO: 34313

SEQ ID NO: 34921 - DNA, 1257 bp, Staphylococcus epidermidis
atggctcaagaggtaataaaaattagaggtggacaagcactaaaaggagaagtagaaattagtggagcaaaaaatagtgcagttgctattatccccgcaactttattagctcaaggacaagtaaagttggaaggccttcctcaaatctctgatgtcgaaactctagtaagtttgttagaagatttaaatattgaagcaagattaaatggtaaacaattagaagtggatactacacaaatagagaatgcacctctacctaataataaagttgagtctttacgtgcttcttattatatgatgggcgcaatgcttggtcgttttaaaaaatgtgtaattggattgccaggtggatgtccactcgggccaagacctattgatcaacatattaagggattcaaagcattaggagcagaaattgacgaatctagcaatacatccatgaaattagtagcaaaagaacttagaggcgctcatatatttttagatatggtaagtgttggagcgacgattaatattatgcttgcggcagtccatgccaaaggtcaaactgttattgataatgcagccaaagaacctgaagtcgtagatgttgcaaactttttaatgagtatgggtgctgatattagaggagcaggtacaacatcaataaaaatcaatggtgttgaggaactaaaaggttcagagtatcaaattattccggacagaattgaagctggttcttatatgtgtatggccgcagcaatgggtgaggaggtcattttacataatattgttcctaaacatgttgaagctttaactgttaagttgcaagagttaggtgtagatattgaaattgaagatgaaaaaataatcattcgtaaacaaacaccgtataaaaatgtagatataaaaacgcttgtttatccaggttttgcaactgatttacaacaacctattacaccattattattcatgacagaaggaccttcgtttgtgactgatactatttatccagcgcgttttaaacatgtagaagaattacagcgtatgggtgctaatattaaatcggatgagggaacagctgtgattaaaccttcgacacttaatggagctgaagtatatgcaagtgatttacgcgcaggcgcttgcttaattactgcaggtttaatagctgaaggtgtgacgacaatatttaatgtaaaacatatttatagaggatatactaacatcgttgaacatcttaaagcacttggtgctgatatttggacggaaacggta

SEQ ID NO: 34922 - DNA, 858 bp, Staphylococcus epidermidis
atgcctttagtttcaatgaaagaaatgttaatcgatgcgaaagaaaacggttatgcggttggtcaatacaatcttaataacctcgaatttacacaagctattttagaagcgtctcaagaagagaatgcgccagttattttaggtgtttctgaaggggcagctcgttatatgagtggtttttatacagttgtgaaaatggtagaaggtttaatgcatgacttaaacatcacaatcccagtagcaattcatttagaccacggttcaagctttgaaaaatgtaaagaagcaattgatgctggattcacatctgtaatgattgatgcatctcatagtccttttgaagaaaatgttgaaatcacttctaaagtagttgagtatgctcatgatagaggcgtttctgtagaagctgaattaggtacagttggtggacaagaagacgacgtagttgctgatggcgttatctatgcagaccctaaagaatgtcaagaattagtagaaaaaactggaattgatactttagctccagcattaggttctgtacatggaccatataaaggtgaacctaaattaggatttaaagagatggaagaaattggtgcttcaactggattacctttagtattacacggtggtacaggtattccaactaaagatattcaaaaagctattccttatggtactgctaaaattaacgtgaatactgaaaatcaaattgcgtctgctaaagcagttcgtgaagtattaaacaacgacaaagatgtgtatgatccacgtaaatatttaggaccagcacgtgaagcaattaaagagacagttaaaggtaaaattagagaattcggtacttctaatcgcgctaaa

SEQ ID NO: 34923 - DNA, 1605 bp, Staphylococcus epidermidis
atgacaaagtttatttttgtaacaggcggggttgtgtcatcattaggaaaaggaataacagccgcttctctaggaagattacttaaagatagaggacttaaagttacaatacaaaaattcgatccatatttaaatgtagacccaggcacaatgagtccgtatcaacatggtgaagtgttcgttacagacgatggtgctgagactgatttagacttaggacattatgaacgttttatagatattaatttaaataaatattcaaatgttactgccggaaaagtatattcacatgtgttgaaaaaagaacgccgtggtgattacttgggtggtactgtacaagttattccccatattacaaacgaaattaaagaaagattgctattagctggtgagagtactaatgcggatgttgtaattactgaaattggtggaacaacaggtgatatagagtctttacctttcttggaagccattcgtcaaattagaagcgacttaggtcgtgaaaatgtaatgtatgtacattgtactttgctaccatatattaaagctgctggggaaatgaaaacaaaacctacacagcacagtgttaaagaattacgaggtctaggtattcaacctgatttaatagtagtacgtacagaatacgaaatgacacaagatttgaaagacaaaatcgccctattttgtgatatcaaaaaggaaagtgttatagaatgtagagatgcagattctctttatgaaattccgttacaacttagtaagcaaaatatggacgacattgttattcaacgtttacaattaaatgccaagtatgaaacgcaattggatgagtggaaacatctattaaataccgttaataatttagatggtaaaattacaatcggtttagttggtaaatatgtgagcttacaagatgcttatctatcagttgttgaatcacttaagcatgctggttatccatttaaaaaagacgttgtggtaaaatggattgattcaagtgaggtcaatgatgataatgttgaggcttatttatccgacgttgatggtattttagttcctggtggatttggattcagagcaagtgaaggtaaaattgcagctattcgttatgcccgtgagaataacataccattctttggcatttgtctaggaatgcaattggcaactgttgaatttgcgcgtcatgttttaggctatgaaggtgcgcattcagcagaattagatccaagtacaccatatccaattatagatttattaccagaacaaaaagatattgaagatttaggtggaaccttaagacttggtctttatccttgccacattaaagaaggtacattggcagagaaaatttataataaaaacgatattgaagaacgtcatcgtcatagatatgaattcaataacgagtttagggaacaattagaaagtaacggtatggtattttcaggtacaagtccagatggtcgtttagtagaaattattgaaatacctaaaaatgatttctttattgcatgtcaattccatcctgaattcttatcaagacctaatcgtccacagcctatatttaaatcatttgtagaagcggcgttgaattaccaacaaaaa

SEQ ID NO: 34924 - DNA, 1935 bp, Staphylococcus epidermidis
atggggaaaataaaagaacttgagacgtctctagctaataaaatagctgcgggtgaagtggttgaaagaccaagttccgtagttaaagagctcttagaaaatgcaattgatgcacaagcgacagaaattaatattgaagttgaacagtctggagtttcatcaataagggttgtagataatggcactggtattgctcaggaagatttagggttagtatttcatagacacgcaacgagtaaaatagtcgcagatgatgatttgttccatattcgtactttaggttttagaggagaagctttagctagtatttcatcagtagcaaaggtgacattaaagacctgtactgataatgaaaatggacatgaaatatatgccgaaaatggtaaaattattcatcaaaaacctgcaaaagctaaaaagggtacagatatacaagtggattcattattctacaatacacctgctcgattaaaatatataaaaagtttgtataccgaactgggtaaaattacggacattgtaaatagaatggcgatgagtcatcccgaaattagaatttctttagtttcagatggtaaaaaacttttaagtacgaatggctcaggaagaacaaatgaagtaatggctgaaatttatggaatgaaagtagcaaaggatttagtgcatatttcgggtgatactagtgattatcatcttgaagggtttgtagctaaacctgagcattctagaagtaataaacattacatttctattttcatcaatggtagatacatcaaaaactttgtactcaataaagcaattttagagggatatcacacattgcttacaataggaagatttcctatatgttacattaatatccaaatggatcctattttggtagatgtaaatgttcatccaacaaaattagaggtgagactttctaaagaagatcaactttatgatcttatcgtaaccaaaatcagagaggcttttaaagacaaaatcctcatcccacaaaacgatttaaatcacgcgtccaaaaagaataaggttttagaaacatttgaacaacaaaaaattaatttcgagaagcaacaatcacaaattggagaaacatctgcaccatatgtacatgatcaaaaagataagaatcatgatgtagagtcgcataagaataatttagattcaacttcatcgacaaataatgaaagtacggaagtttctaatgaattacacaatcacattgatgatagttacttacaaagtcaaaaagaagtattgtttgatatggaacaaaacacatctaacgaatatgagatatcaaatcagcaatcaaacgatattaaaggaacagtgagtcagacacctcatcgtagggtgccttatatggaaattgtaggtcaagtacacggtacgtatatcattgcacaaaatgaaaatggaatgtttatgattgaccaacatgctgctcaggaaagaattaaatatgaatattttagagaaaaaattggcgaagtgaccaatgaagtgcaaaacttattaataccacttactttccatttctctaaagatgaacaaatgattattgatcagtacaaagatgaattagataaagtaggagtacatcttgaacattttggtgggcatgattatattgtaaatagctatccagtatggtttccgaaagaagaagcggaagaaattattaaagatatgattgaacttgtcttaaaacacaaaagtgttgatgtgaagaaaataagagaagatgcagcaatcatgatgtcttgtaagaaatcaattaaggctaatcactatttaaaaaataatgaaatggcagatttaattgatcaactaagagaagcagaagatccttttacttgtcctcatggtagaccgattattatcaatttttcaaattatgaattagaaaagttatttaaaagagtaatg

SEQ ID NO: 34925 - DNA, 816 bp, Staphylococcus epidermidis
ttgttatggagtgatagacatatgaagattggaattgatgccggagggactttaattaaaattgtacaagagcatgacaatcgtagatattacagaactgaattaacaactaatatccaaaaagtcatagattggcttaacaatgaagaaatcgaaacattaaagcttacaggtggaaatgctggagtaatagcagatcaaattcatcattcccctgaaatatttgtagagttcgatgcatcatcaaaaggtttagaaattttattggatgaacaaggtcatcaaattgaacattacatttttgctaatgtaggtacaggtacttctttccactattttgatggaaaagaccagcaacgtgttggaggtgtaggtaccggaggcgggatgatacaaggtttaggctatttattgtccaatataacagattataaagaattaacgaatttagctcaaaatggagatcgtgatgccattgatttaaaagtaaaacatatttataaagatactgaaccaccaattcctggagatttaacagcagcaaattttggaaatgtattacatcacttagataatcagtttacatcagctaacaaacttgcctctgcaattggcgtcgttggtgaagttataacaactatggctattacattagcacgtgaatataagactaagcacgttgtatatatcggttcatcatttaataacaatcaattactacgtgaagttgttgaaaattacactgttctaagaggatttaaaccgtactatattgagaatggtgctttttcaggcgctttaggagcactttacctc

SEQ ID NO: 34926 - DNA, 822 bp, Staphylococcus epidermidis
atgaatgcttatttagcagaatttttaggtactgcaatccttattctttttggtggtggcgtttgtgcaaacgttaacttaaagagaagtgctggtaacggtgcagattggattgttatttcatttggttggggttttgcagtaacaatgggcttttatgctgttggaacgttttctggtgcacatttaaatccagctgtaacagttgctttagccatggatggtggatttagctgggcgcaagtaccgggctatattgtttgtcaaatgcttggcggtattgttggtggagtttttgtatggttaatgtatttaccacactggaaagttacagaagatccagcagtcaaattaggtgtattttcaacagcaccagccattaaaaattattttgctaactttttaagtgagattatcgggactatggctttaacattaggaattttatttatcggggttaataaaattgctgatggtttaaatccaattattgttggtagtcttatcatagcaattggtttaagcttaggaggtactactggttacgctattaatccagcccgtgacctagcaccacgtattgcacatgctattttgccaattcatggtaaaggtaaatctaactggtcttacgcaattgtacccgttctgggacccatggcaggtggtatgttaggtgcgattgtttacgaagtgttttataaacaaacattcaattttagttgtttcattggtttaattgtacttatattcacacttatacttggcgtgatactaaataagatatctcaaaataaaaacaacgatattgaatcaatttat

SEQ ID NO: 34927 - DNA, 1497 bp, Staphylococcus epidermidis
atggaaaaatatattttatcaattgatcaaggaactacgagttcacgtgcgatactttttaataaagaaggagaaattaaaggtgtttctcaaagagaatttaaacaacactttccacatccaggctgggtagaacatgatgctaatgaaatatggacatctgttctatcagttatggctgagttacttaatgaaaacaatattaatgcaaatcaaattgaaggtattggtattacaaaccaacgtgaaacgacagttgtatgggataaaaatacaggtcgtccaatctatcacgctatcgtttggcaatcacgtcagacacaagatatttgtacaaatttaaaggaacagggttatgaagaaacatttagagaaaaaacaggtttacttttagacccgtactttgcgggaactaaagtaaaatggattcttgatcatgttgaaggtgctagagaaaaagctgaaaatggtgatttactcttcggaacaatcgattcatggttagtatggaaattgtcaggacgtactgctcatattacagattacactaatgcaagtcgtacattaatgtttaatatttatgacctaaaatgggatgatgagttgttagaacttttaaatattcctaaacaaatgttacctgaagttaaagaatcaagtgaaatttacgggaaaactatcgactatcacttctttggtcaagaagtacctattgctggtattgccggtgaccaacaagcagcattatttggtcaagcatgttttgaccgtggtgatgtaaaaaatacatacggcacaggtggatttatgctaatgaatactggtgaagaagcagttaagtcagaaagtggcttgttaacaaccattgcatacggtttagatggaaaagttaattatgcacttgaaggttcaattttcgtatctggttctgctatccaatggctacgagatggtttgagaatgattaattctgcgccacaaaccgaaaactatgcttcaagagtagagtcaactgagggtgtttatatggttccagcatttgttggtttaggtacaccttattgggattcagaagcaagaggtgctattttcggattatctcgtggtacggaaaaagaacatttcattcgtgctacattagaatctttgtgctatcaaacaagagatgttatggaagctatgtctaaggactcaggtattgaagttcaaaatttacgcgttgatggtggtgctgtaaaaaataacttcattatgcagttccaagcagatatcgtaaattcatctgttgaaagacctgaaatccaagaaacaacagcacttggtgctgcatatttagctggattagctgttggattctgggatgataaagaggatatccgtgaacgttggaaacttcaaactgagttcaaaccagaaatggatgaagatcaacgtcataaactttatagtggttggaaaaaagctgttaaggcgactcaagtatttaaattagaagat

SEQ ID NO: 34928 - DNA, 1182 bp, Staphylococcus epidermidis
atgcataataaacaaaagatattagattttatagaaaataataaatatgattatgttgaaataagtcatcgtattcatgaacgccctgaattaggcaatgaagaaatttttgcatcgagaacattaattgaccaattaagagcaaatcgattcgaaatcgaaacggatattgcaggacatgcaacaggatttatagcaacgtatgattctgatatgactggaccggttataggatttctagctgaatatgatgctttacctggtcttggtcacgcatgcgggcataatattattggtactgctagcgtacttgctgcagtagcactaaaagaagtcgtcgatgaaattggtggtaaagtagtcgttttgggatgtcctgctgaagaaggtggggaaaatggctccgcaaaagcttcttatgttaaagcaggtgtcattgatgaaattgatgtagcattgatgattcatcctggaaatgaaacttatcgtacaattaatactttagctgtggatgttctagatattaaattctatggacgtagtgcgcatgcatctgaaaatgcagatgaagcattaaacgctttagatgcaatgatttcatatattaatggtatagcacagttaaggcaacacattaaaaaaggacaacgagttcacggggttattttagacggtggtaaagcggctaatattatacctgattttacacatgcgagattttacactcgagctacttcgcggagagaacttgatgttttaactgaaaaagtaaaccaaattgcaagaggtgctgctattcaaactgggtgtgattttgaatttggtcctatccagaatggtgtaaacgaatttatcaaagcacctaaacttgatgatttatttgaaaaatatgcaactgaattaggagaagaagtgattgatgatgattttggctatggatctacagatacaggtaatgtaagtcatgttgtaccaacaatacatccacatattaaaattggttctcgaaatcttgtaggacatacccaccgctttagagaagcggctgcaagtttacaaggtgatcaggcactcattcgaggtgcaaaaattttagcattaatgggactagaattaatcgaaaataaaccgttgttagacgaaataattgaagagcatacgcatataaaggggcatgttaag

SEQ ID NO: 34929 - DNA, 924 bp, Staphylococcus epidermidis
gtgagtcaaagtcattttaaaataacagttgaagatggaacaatgttagaggtgaaaattgataaagcaaaaaagagtactattggtattgttcatcttttccatggcatggctgaacatatggaccgttatcaagagttagttgaggctttaaatacacaaggttatgacgttgttagacataatcaccgtggacatggtaaagaaatagatgagaatgaacgtggtcattttaatagcatgaatcaaattgtagatgatgcttatgaaattattgagacattatatcttgaagagctcaatgtaccctatattatcataggtcattcaatgggctccattattgctagatcatttgttgaaaagtatcctgacattgctcaaggtttaattcttacaggaacaggtatgttccccaagtggaaaggtgtaccaatacgtttagcaatgaagttagttacatttatttttgggaaacgacgtcgactcaagtgggtgaatcaattattgaataaaactttcaataaaaaaatcactcaacctcgaacagatagtgattggatttctacacgtcaggatgaagttgataaatttgtggaagatgaattttgtggattcaaagtatctaatcagctcatttatcaaactttaaagaccatgatgaagacagtagaacgacaacaactaaaaagaatggacaaagaactacctatactatttatttctgggaaagatgatccttttggtgaatatggtaaaggtataaagcatttagctagattatataaaagagtaggtattaaacatataacagtacaactatataaacataagcgtcatgaaatattatttgaagaagattatttgaaaacatggcaacacatgtttgaatggatggaaaagcaaattttgaaaaaacaaaag

SEQ ID NO: 34930 - DNA, 660 bp, Staphylococcus epidermidis
atgaataaagcaaaattgatagaccatacattattaaaaaccgattcaacaaaggaacaaatagatacaattataaatgaagcaaaagcatatcagtttaagtctgtatgtgtgaaccctacacatgtacaatatgcatctgaacaacttaaaggaacagacgttttagtgtgtactgttattggatttccactaggtgcaacaactacagcggttaaatcttatgaaacaaaagatgcgattaacaatggtgcccaagagattgatatggtgataaatattggagcacttaaggatggtcgttttgataaagtgcaaaatgatatcgaagccgtcgttcaagcagccaatggtaaaacagttaaggtaattattgagactgttttattaactgagaaagagaagattaaagcatgtcaattatctgaagcggcaggtgcacattttgttaaaacatccacaggttttgctggtgggggtgcaacagttgaagatgtaaaattaatgaaagatactgttggtgatcgtttagaagtaaaagcgtcaggtggcgtgagaaatctagaggattttaataatatgattgaagcgggtgctacacgtattggtgctagtgccggtgtgcaaattattcaaggacttgaatcaaatactgattac

SEQ ID NO: 34931 - DNA, 444 bp, Staphylococcus epidermidis
atgagtcaacaacaagatgtagtcaaagaattaaatcaacaagtcgcaaactggacggtagcttatacaaagttgcataatttccattggtacgttaaaggtcctaatttcttttctttacacacaaaattcgaagaattatacaatgaagctagtcaatatgttgatgatttagcagaaagaattttggcaataggtggtaatccaattggaacactttccgagtgtttagataaatcaatagtaaatgaagcaggaaaacattattcagctgaagaaatggtagaagaattgtctaaagatttttctaaaatctctaaacaattagaacaatcaattgaagtggcgggaagtgctagtgatgacgtttcagaagatatgtttatcggcatgcaaacttcagttgataagcataattggatgttacaatcttatttaggtcat

SEQ ID NO: 34932 - DNA, 1338 bp, Staphylococcus epidermidis
atgccaaaacgtagttttacaaaagatgatattcgtaaatttgctgaagaagaaaacgtaagatatttaagattacaattcactgatattttagggactattaaaaatgttgaagttccagtaagtcaattagaaaaagtattagataatgaaatgatgtttgatggttcatctattgaaggtttcgttcgtatcgaagaatcagatatgtatttacatcctgatttagatacttgggttattttcccttggactgctggacaaggaaaagttgcacgactaatctgtgatgtatttaaaacagatggtacaccatttgaaggtgatccacgagctaacttgaagcgtgtattaagaagaatggaagatatgggctttactgattttaatctagggcctgaaccagaatttttcttatttaaattagacgaaaaaggcgaacctacattagaattaaacgatgatggtggttatttcgatttagctcctacagatttaggtgaaaattgtcgccgtgacatcgttttagaattagaagatatgggctttgatattgaagcaagccaccatgaagtagcgccaggtcaacatgaaattgactttaaatatgcagatgccgttacagcatgtgataatatccaaacatttaaactagttgttaaaacaattgcacgtaagcataatttacatgcaacatttatgccaaaaccattatttggtgtaaacggtagtggtatgcacttcaacgtatcactatttaaaggaaaagagaatgcgttctttgatcctgaaggtgatttacaattgactgatactgcatatcaatttacagctggtgtccttaaaaacgctagaggattcactgcagtatgtaatccaattgtcaactcatataaacgtcttgtaccaggttacgaagcaccatgttatattgcatggagtggtaaaaaccgttcacctttagtacgtgttccaacatctagaggtctatcaactcgtattgaagtacgctcagttgaccctgcagctaacccgtacatggcattagcagcaatcttagaagcagggttagatggaattgagaataaacttgaggttccagaacctgtaaaccaaaatatctacgaaatgaatcgtgaagaacgagaagcagttggtatccaagacttaccttcaactttatacactgcgttaaaagcaatgcgtgaaaataaatcaattaaaaacgcattaggtaatcatatttacaatcaatttattaactcaaaatcgattgaatgggattactatagaactcaagtatccgaatgggaaagagaacagtatattaagcaatac

SEQ ID NO: 34933 - DNA, 855 bp, Staphylococcus epidermidis
atgaaaaatataaaagcaatttttttagatatggatggaacgattttacatgaaaataataaagcctcggaatatactaaacaagtgattaatgaattgagagagcaaaattataaagttttccttgctactgggagatcttattcagaaatcagtcagcttgttcctgatggattcactgtagatggtattatcagttcgaatggaacttcaggtgaaattcatggagataatttgtttagacatagtttaactttagaacgagtacagaaaattgtggaattggctaaaaaacaacatatttattatgaagtttttccttttgaaagtaatcgtatatctcttaaagaagatgaagattggatgaaagaaatgatttccactatagagccacctgacgctgtaagtcaaagtgagtggtcatcgcgaagagaggcaattaaaggaaaaatagattggcgagataccttacctgatgcacacttttctaaaatatatttatttagtcccaacttagataaaataactgattttcgcaaccagcttgttgaaaaccaatcaaatttaggtattaccgtatctaattcttcgcgttataatgctgaaacgatgccatatcatacagataagggtacaggtatcaaggaaatgattgatcactatggtattaagcaagaagaaactttagttattggtgatagtgataatgatagagctatgtttaattttggccatcacactgttgcaatgaaaaatgcaagacaagaaattaaaaatcttacagatgatattaccgaatacacgaacgaagaagatggtgcagcacattacttaaaaagtcatttattagataac

SEQ ID NO: 34934 - DNA, 1803 bp, Staphylococcus epidermidis
atgtgtggaattgttggttatattggctacgataatgccaaagaattactattaaaagggttagaaaaattagaatatcgtggttatgactcagcaggtattgctgtagttaatgatgatggtacaaaactttttaaagaaaaaggaagaattgctgaattacgtaaagttgcagataatagtgatgaggatggtacgttaggaattggtcatacacgttgggcgacacatggtgttccaaattatgaaaattcacatccacaccagtcaacatctggacgttttacattagttcataatggtgtaattgaaaattatgaagaattaaaagctgaatatttatctgatgtcactttttcatcagaaactgatacggaagttattgtacaattagtagattatttttctagacaaggattagctacagaagatgcatttacaaaagtagttaaattattacatggttcatatgctttaggattattagatgataatgataaagatactatttatgtggctaaaaacaagtctccgcttttagtaggtgtaggtgaaggtttcaatgttattgcttctgatgctctagcaatgttacaaactacaaaccaatacaaagagatacatgaccatgaaatagttattgttaagcgagacacagtagaaattaaagatcttgaggggcacattcaacaacgtgatacgtatacggcagaaatagatgctgctgatgcagaaaaaggcgtatatgatcattacatgttaaaagaaattcatgaacagcctgcagtgatgcgtcgcattattcaagaatatcaagatgaaaaaggtaatttaaaaatcgattcagagattattaatgatgtagcagatgctgatcgtatttacatcgttgcagctggtactagttatcatgctggattggttggtaaagaatttattgaaaaatgggcaggtgtacctactgaggttcatgtagcttctgaatttgtatataatatgccacttctttctgaaaaaccactatttatttatatttcacaatctggtgaaacagctgatagtcgtgctgtattagttgaaacaaataagttaggtcacaaatcattaacaattactaatgttgctggttcaacattatcacgtgaagcggatcatacattacttttacatgctggacctgagattgcagtcgcatctacaaaagcatatacagcgcaaattgctgttttatctatcttatctcaaattgttgctaaaaatcatggtcgtgaaaccgatgttgatttattaagagaactagctaaggttactacagctattgaaacaattgttgacgatgcacctaagatggagcaaattgcaacggatttcttaaaaactactcgtaatgcattcttcattggacgaacaattgattataatgttagtttagaaggtgcattaaaattaaaagaaatttcttatattcaagctgaaggatttgcaggtggggaattaaagcacggaacaatcgctttgattgaagatggcacacctgttataggtttagctacacaagaaaacgttaatctatcaattcgtggaaatatgaaagaagtagtagcacgtggtgcatatccttgtatgatttcaatggaaggtttgaataaagaaggagacacatacgtgattccacaagtacatgaattattaactcctttagtatctgtagtgacaatgcaattaatctcatattatgctgcgttacaacgagatttagatgttgacaaacctcgtaacttagccaaatcggttacagtagag

SEQ ID NO: 34935 - DNA, 1353 bp, Staphylococcus epidermidis
atgggaaaatattttggtactgatggtgttcgtggtgtcgctaaccaagaactcacacctgaattggcttttaaactaggtagatacggaggatatgttctcgcacataataagggtgaaaagcatcctcgagttttagtaggaagagatacaagagtttcaggagaaatgctagaatctgcattaattgctggtttaatttcaattggcgcagaagtgatgcgcttaggtgttatttcaacaccgggtgtggcttatttgactaaagaaatggaagcagcattaggtgttatgatttctgcgtcacataatccggttgctgataatggaattaaattttttggttcagatggctttaaattgtcagatgatcaagaaaatgaaattgagcaattattagatcaaaccaatcctgatttaccacgaccagtaggagaggatattgtacattattcagattattttgaaggtgcacaaaagtatctaagttatcttaaatcaactgttgatgttaattttgagggtcttaaaattgtattagatggtgcaaacgggtcaacttcttctttagccccattcttgtttggcgatttagaagcggatactgagacaattggatgtaatccagatggttataacattaatgaacaatgtggctctactcatccagaaaaattagctgaagctgtgttagaaactgaaagtgactttggtttagcttttgatggagatggcgatcgaattattgcggtagatgaaaatggacaaattgtagatggagatcaaattatgttcattattggtcaagagatgtataaaaaccaagaactcaatggaaatatgatagtttcgacagtaatgagtaaccttggtttctacaaagctctagaaaaagaaggtattcagtcaaacaaaactaaagttggagatcgctatgttgtcgaggaaatgagaagaggaaattataatcttggtggtgaacaatccggtcatatcgtattaatggattacaatactactggtgatggattattaacgggtgttcagttggcttccgttattaaaatgagtggtaaaactctaagcgagttagcttctcaaatgaaaaagtacccacaatctttaattaatgtgagagtgactgacaaatatcgtgttgaagagaatattcatgttcaagagataatgacgaaagttgaaacagagatgaatggtgaaggaagaattcttgttcgtccttctggaactgaacctttagtacgtgtaatggttgaggctgcaactgacgcggatgctgaaagatatgctcaaagtatcgctgacgttgttgaagacaaaatgggcttagataaa

SEQ ID NO: 34936 - DNA, 1092 bp, Staphylococcus epidermidis
atggaatcaagaagttggggagtgagaataggggaattaagtactttaatatatttaatatttcctattttagctatatttgttgacaaacgtggtaatttcttaacttatttaattgtttgtactatttttataatcagctatgtgacgatgattttattttataaataccttagtaatagtattttatattcattactggttattcattatttaggaatcttttattttgtctatagtgtcaatcctatgaatagtttgtttttcttctatagtgctttcgctttaccttttatatttaatgttcgtgttgtttcaaaagaatttataacctttttaatagctatggtaagttgcttaatactaacttatatatttaatccaacatttgtggttctattaagtgcattttatttggttatattaattgttgctataggtaattttaaaaatagagacgaacgaattatgaaagctaaacttgaagaaaagaataagtatattaatgtattaatagctcaacaagagcgtaatagaataagtcaagatcttcatgatacattaggacatgtatttgctagtcttacattgaagtctgaattagctgttaaactcatagatactaatccagaagaagcaaaaaatgaaatgcaggcaataaatcaactttcaacagaagccttaaataaagttagactcattattgatgatttgaagatacaatcttttgaagatgaaatttcatcattggaaaagttattgcaaaatgctaatctacattttaagtttaacaataaaagtgcggctaaatcattaaatccagcaaaacaatcaatattatctatgatttttagagaagcaattaataatgttattaaacacgcacatgcgactgaagtaacaggtgaattggaggtacatgagcatcaaatcattttaaaaattaaagataatggtgtggggatggaaaatgaagatgcttcaaatttgaaaagtattaaagaacgtgtagattatttaaatggtaaattaattgtacaatcaaataatggaacacttattattgttgaaatacctagaggtgatttatta

SEQ ID NO: 34937 - DNA, 933 bp, Staphylococcus epidermidis
atgcttgaaagtaaatggggattaagatttgtcgctctcatattagcagtttttttctttttatcagtaaataatgtgttcggaaatatttttaatacagatgatttatctcaaaaatcatccaaaactattcaagatgtgcccgttgatgttatctataatagtaaagacctacatgtaactaaaattcctgaaaacgtcgatgttaatttaacaggaccacaatcaaaattaatcaaaattgaaaaccctgaagatttgaaagtagttgttgatctttctggaaaaaaagcagggaaatatcaaaaaaaatatcaagttagaggcatagatagtggtatcaactatcaaattaaacctgaagttgcacacattaaccttgaaaataaaataacacgagttatgcatgtgcaaccagacattagtagtaacagtttagatccaaaatataaaataagtaaacaaagtatttcaccagaaactgtaaaagtgactggtggagagcaacaattaaaaaatatagcttatttaaaagcaacctttaaaaattctagtaaagtgaacaaagacaccaatgatgttgcagatgttagtgcatttgataaacaattgaataaattaaatgtatcaattaatccaaatgaagttaatttaaaagtaacagttgaaccattcagtaaaatggttaaggtacgtacaaaaacaacgggtaagcttaatgaaaataaagaattagatagtgttaaactggaagataaagaagtagaaatctttggtaatagagatgaattacaaaatattaatgaaattactgctgaagtagatattgatggaatttcagaatctacagaaaaaacagtatcatttaacttacctaaagatgtgactaaagtgaatccaaaggaaacaaaagcgtatataaatgttaaaaat

SEQ ID NO: 34938 - DNA, 600 bp, Staphylococcus epidermidis
atgatatcgcttgtcataactgaggatcaattgatgttaagaaaagctatggtacaactgatagaaatgcatgaagaaatgaatgtattaaaagattttgaaaatggtctagagacactcgaatttattgaaaataatgaacccaatgtagccattttagatattgaaattccgggtataacaggcttggaaatcttatcttatgtaagaaaaaaacaactcaatacaagaataatcatagtgactacatttaaacgtccaggttattttgaaaaagctgtagcaaatgatgttgatgcttatgtactaaaagagcgttcaattgatgatttaattaaaactatttataaagtgacaaagggtgagaaggaatatagcccttcactcatgacatcattgtttaccgaatcgaatccattaactcataaagaacaagttgttttaagagaaataggcaatgggttaagtagcaaagagattgctagcaaattgtatttatcgaacgggactgtgcgtaactatacgagtactattatagacaaaatgaattcagatcatcgttttgaggcatggaaaaaagcaaatgaaaaggggtggatt

SEQ ID NO: 34939 - DNA, 366 bp, Staphylococcus epidermidis; identical to SEQ ID NO: 34425

SEQ ID NO: 34940 - DNA, 632 bp, Staphylococcus epidermidis; identical to SEQ ID NO: 34427

SEQ ID NO: 34941 - DNA, 408 bp, Staphylococcus epidermidis
ggtacaggaatatcaacctgttatccatcgcctacgcctgtcggcctcagcttaggacccgactaacccagagcggacgagccttcctctggaaaccttagtcaatcggtggacgggattctcacccgtctttcgctactcacaccggcattctcacttctaagcgctccacatgtccttgcgatcatgcttcgacgcccttagaacgctctcctaccattgtccaaaggacaatccacagcttcggtaatatgtttagccccggtacattttcggcgcagtgtcactcgactagtgagctattacgcactctttaaatgatggctgcttctaagccaacatcctagttgtctgggcaacgccacatccttttccacttaacatatattttgggaccttagctggtgg

SEQ ID NO: 34942 - DNA, 171 bp, Staphylococcus epidermidis; identical to SEQ ID NO: 34666

SEQ ID NO: 34943 - DNA, 1374 bp, Staphylococcus epidermidis
atgaaagttgctaagtttggtggaagttctgtatcaactgcagaacaaattaaaaaggtattaactatagtgaatgaagaccctgaacgtaaaatcattatcgtttcagctccaggcaaaaggcataatgacgacattaaaactactgatttattaattcgtctctatgaaaaagtacttaataaattaaattatgaaagtaaaaaacaagaaattattcaaagatatgctgatatagtagaagaattaggtataggaaatgacattttaataacaattaatgacactttagaggaatacattaaaaatctttctgacaaacctaaccgtttatatgatgctttattatcttgtggcgaaaattttaatgctcaattaatagcccagtataataatagtcaaggtattcctactcgttatatttctcctaaagaagctggattaaccgtaactgatttaccacagcaggctcaaattttagattccgcatataatgatatatacaaattgcgtgattatgatgaaaaactaattattcctggttttttcggagtttcaaaacaaaattatatcgttacgtttccacgcggtggttctgacataactggtgctatcatagcacgtggcgtccgagcctcactttatgagaacttcactgatgtatcaggaatatataaagctaatccaaatatcataaataatcctgaactcattgaggaaataacttacagggaaatgcgagagctatcttatgcaggatttggagtttttcacgatgaagcactacaacctttatacaaagatcgaattccggtagttatcaaaaatactaatcgtccaaatgataaaggaacctacattttacatgaccgtgaaatcgattctaaaaatgtcattagtggaattagttgtgataaaggctttactgtgattaatattaaaaaatatttaatgaatagattagttggatttacacgaaagattcttggcgttttagaagattataatatatcatttgaccatatgccttctggtattgataacataagtattatcatgcgtacaaatcaaattcaaggtaaagaaagtcaagttcttaatgccatacgcaaacgttgtgaagttgatgagttaagtatcgaccatgatttggcagtattaatgattgttggtgaaggtatgaatcaagttgttggtacagctagtaaaattactcacgccctttcagaatcaaacattaatttaataatgattaaccaaggggcttctgaaatttcaatgatgtttggaattcatgaagcagatgctgaaaaagcagtattatctacgtacgaattttgttacaacggcgtttgtttaaaaaatttgtgtaaa

SEQ ID NO: 34944 - DNA, 918 bp, Staphylococcus epidermidis
atggaggaagttttaaaacttaaaatccctgcatcaaccgcgaatctaggtgtaggttttgactcaattggtatggcattggataaatatttgcatatgtctatacgtaagattgaaagagctaattgggaatttctatattatagttcagaactagaaggtttacctaaagatgagaataattatatttatcaaactgctctaaatgttgcgcgtaaatacaatgttacacttccaagcttgcaaattgaaatgagaagtgatattccattagctagaggactaggttcatctgcctctgcattagtcggtgctctttttattgctaattactttggtaatattcaattatctaaatacgaattgttacaactagcgactgaaattgagggacaccctgataatgtagcacctacaatatatggaggtttgattgcaggtttttataatccaataactaaaataacagatgttgctagaatagaagttccgcacgtagatataattttaactatacctccatatgagcttcgtacagaagactctagaagggtcttacccgatacattttcacataaaggtgctgtgcaaaatagtgccattagtaacactatgatttgtgctctcattcagcataaatataaacttgctggaaagatgatggaacaagatggttttcatgaaccatataggcaacaccttattccagaattcaatcaagtacgtaaactatcacgtcaacatgatgcatatgcaactgttatcagtggagctggacctacaatactcactctttgtccaaaagaaaaaagtggtaaattagttagaacactacgtgagaaaattaataattgtgcttcagaactagtaacaattaatgaaataggtgttaaagatgaagtggtgtacctaaagtcc

SEQ ID NO: 34945 - DNA, 804 bp, Staphylococcus epidermidis
atgactcagtataaaatggtagttttagatatggatgatactttaatgaatagtgataataaattatccattgagacaaaatcttacttattagatattcaaaagcgtggttattatgtagtattggcctcaggtagaccaacagaaggtatgttacctactgcgagagaattagagttaaataaatataacagcttcattattagttataatggaggtaaaactataaatatggctaatgaaaatgtagaggtcgatcagcctgtttcaaaggaagatttcgataatattgtagattattgtagagataagaactttttagtacttacttatgataatggatatatcattcacgatagtagtcatgaatatatgaacatagaatcacaacttaccggattacctatgaatcgtgttgctgatttgaaggaatatattaatcatagtgtgcccaaagttatgggtgtggattatgtaggtcatattaccgaagcacgtattgaattggatggttacttcaataatgatattgatgtgacaacgagtaagccttttttcctagagtttatggcaaagaatgtttcgaaggggaacgcaataaaagcactttgtaaaagattacaaatttctctagaagaagttatagtattcggggacagtttgaatgataagtcaatgtttgaagttgctggatattctgtagcaatgggaaatgctagtgatgaactcaagaaaattgctgacgaggtaactttagataataattctaacggtattccttatgctttaaaagaacttttggtt

SEQ ID NO: 34946 - DNA, 681 bp, Staphylococcus epidermidis
atgtctcaatcatctaagcgaaaaaacgattctgtggtagaaacttttaaggacatcattcctttaacatttggagaagagattggtaatgcagcatcacatggtgctgctgcattacttacattatttattcttccatatgcagcagtgcatagttttaacaatggtggcacattagagtcaattagtgtgtcagtttatgtgattagtatttttatgatgttcatatcatcaaccatttatcattcaatgcaaaataatacgtctcataaatatatattaaggattattgaccatagtatgatttatgtggctatttcaggaacatacacacctgttttgttaagtgttgtcggcggttggttaggttggctcgtgacaatattattatggggaacgacattatgggggattttgtataaatcaatagcaactaaagtcaatcatagattaagtctcattgtttatttggtgatgggatgggtaggtatcatatttttacctattattattatgcgaacatcatggtggtttattttctttatatttcttggtgggttatcttatactatcggagcatggttttatgcccaaaaaaataaaccttattttcatatgatttggcatatatttattgttcttgcttctttcttacatatgataggcattttttattttatg

SEQ ID NO: 34947 - DNA, 1185 bp, Staphylococcus epidermidis
atgttagacaaaaatcaattggaaaagtataaccaagagcatttgtatgaatatgaaaaattaatgagtagtaatgaaaagaatgctttagatgaaaaagtagatcagttaaatcttgcagaaattcaagatttatatcaagatttatatgttaatagaaaaactattgatgatgtatcttctgtatctgaagtcaaatatgaagtgaaatcacgactcaatgaagaagaacgacatacatatgaacaaaaaggttatgaggcaatacgaaatggtgaatttgctgtattattgatggctggaggacaaggtacgcgtttaggatataaagggcctaaaggttcttttgaaatagagggtacgagtttatttgaacttcaggcgcgtcaactgattcgtttaaaagaagaaaccggccacacaattaattggtatattatgacaagtgacattaatcataaagatacaatagagtattttaaacaacataaatattttaactatgatgccaatcatattcatttctttaagcaagataacattgttgctttaagtgaagaaggaaagcttgttttaaatagagatggacatataatggaaacacctaatggtaatgggggtgtattcaagtctcttaagaaagcaggataccttgataagatgcaacaagatcacgtcaaatatatcttcttaaataacattgataatgtcttagttaaagttttagacccgttatttgccggttttacagtgacacaaagtaaagacatcacatcaaaaacaattcaacctaaagatagtgaaagtgtaggtcggcttgtaaatgttgattgtaaagacactgtgttagagtattctgaattagatacagacatagcaaatcaatttaacaatgctaatataggtatccatgcttttaaactaggtttcattaccagtgctgttgatagagaattaccgtatcatttggcaatcaagcaattaaagcaattagatgaaaattttggtgtggttgaacgtcctacattaaagtttgaattattttattttgatatatttaggtacggtacaagctttgtaacattacaagttccaagagaagaagaattttcacctttaaaaaataaagaaggtaaggatagtgtacatacagctacagaagatttaaaacgaatggatttgatt

SEQ ID NO: 34948 - DNA, 1512 bp, Staphylococcus epidermidis
atgtcaaaacaggatggaaaattaactggactttttggtgcgccagtttcggatagagaaaatagtatgacagcaggacaacgtggaccattattaatgcaagacgtttattatttagaacaaatttctcacttcgatagagaagtgattcctgaacgtcgtatgcatgcgaaaggttcaggtgcatttggaacgttcacagttacaaatgacatcacacaatatacaaatgcgaaaatattctcagaagtcggaaaacaaacagagatgtttgcacgtttttctactgtttcaggagaacgtggagcagcagatttagaacgtgatatacgtgggtttgccttgaaattctacactgaagatggaaactgggatttagtaggtaacaatacgccagttttcttctttagagatcctaaactatttattagtttgaatcgtgctgtaaaacgagatccacgtacaaatatgagaagtgcacaaaataactgggacttttggacaggtctaccggaagcattgcatcaagtgacaatattaatgtcagatagaggtatgccaaaaggattccgaaatatgcatggattcggttctcatacgtattctatgtataatgataaaggtgaacgtgtatgggttaaatatcatttccgtacacaacaaggaattgaaaactatactgacgaggaagcggctaaaattgtaggtatggatagagattcttcacagagggatttatataatgctatcgaaaatggagattatccaaaatggaaaatgtacattcaagttatgacagaggaacaagctaaaaatcatccagacaatccttttgatttaacaaaggtatggtataaaaaagactatccactgattgaagtgggagaatttgaattgaatcgtaatcctgagaattattttcttgatgtagagcaggcagcgtttacgcctacaaatattgttcctgggttagattattcaccagataaaatgctacaaggacgtttattctcatatggagatgcccaacgttatcgtttaggagttaatcattggcagattcctgtcaatcaacctaagggagttggagttgagaacttgtgtccatttagtcgtgatggacaaatgcgtttcttagataataaccaaggtggaggcccacattattatcctaataatcaaggtatatatgagtcacagcctgaacacaagaagccaccattcccgacagatggtgatggttatgaatataattatcgccaggatgatgacaattactttgaacagccaggtaaattattcagattacagtctgaagatgcaaaagagcgtatcttcacaaatacagctaatgcaatggatggggtctctaaagatgtcaaagttcgccacattcgccactgctataaagctgatccagaatatgggaaaggtgtagcaaaagctttaggtattgatatcaatcaaatagatttagagacaaatcaagacgaaacatatgaaaactttaaa

SEQ ID NO: 34949 - DNA, 267 bp, Staphylococcus epidermidis
atggcgaagaaatctaaaatagcaaaagaacaaaaaagacaagaattagtaaataaatattacgagttacgtaaagaattaaaagcaaaaggggactatgaagcattaagaaagttgccaagagattcatctccaactagattaactagaagatgtaaagtaactggtagacctagaggtgtgttacgtaaatttgaaatgtctagaattgcatttagagaacatgcgcataaaggtcaaattccaggtgtaaaaaaatctagttgg

SEQ ID NO: 34950 - DNA, 975 bp, Staphylococcus epidermidis
atgaaaatttttgattatgaagatatacaattaattcccaataaatgtattgttgaaagcagatctgagtgtaatacttcggttaaatttgggcctcgtacttttaaattgccagttgttccagcaaatatgcaaacagtcatgaatgaagaacttgcacaatggtttgcagaaaacgattatttttatatcatgcatagatttaatgaagaaaatagaattccatttataaaaaaaatgcatcatgcagggttatttgcttctatttctgttggagttaaagaaaacgaatttaattttattgaaaaattagcttcttcatcgctcataccagaatatataacaattgatattgctcatggtcactcaaattcagttataaatatgattaagcatataaaaaaacatttaccaaatagttttgtgatagctggtaatgttgggacgcctgaaggagtaagagaacttgagaatgccggtgcagatgctacaaaagtaggtattggtccaggaagagtatgtattactaaaattaaaactggatttggtacaggaggttggcaactttctgcgttaaatctttgtaataaggcagctagaaaacctattattgcagatggagggttaagaacccatggtgatatagccaaatcaattcgttttggtgccactatggtaatgattggctctttatttgctgcccacgaggaatcaccgggtgaaaccgtcgagctagatggcaaaaaatataaagaatattttggtagtgcctcagaatatcaaaaaggtgaacataagaacgttgaaggtaaaaaaatgtttgtagaacacaaaggatctcttaaagatacccttactgaaatggaacaagatttacagagttcaatttcatatgcaggaggaaaggacttgaagtcattaagaacagttgattacgtcatagtaagaaattcaatctttaatggtgatagagat

SEQ ID NO: 34951 - DNA, 963 bp, Staphylococcus epidermidis
atgattaaacaaaacctgaagatgcgctataccattgtcttactgttattaatttttagtacaatctttagtctatgtataggatcagtaatgattaatcctattcatgcagttacaggcttctttttacacaatgactttattttaaatgaatatcgaattcctagaacacttttaggattacttataggcagtagtttagctatttctggctcggtgatacaaggggttataagaaatccacttgcttcacctgatgttattggaataacaaaaggggcaagtttagcagcagtaatgatcataatgatatttccatcagcacctctatttgttcttcctttaggttcatttatcggtgctttgacaataagtattattctttcagttcttatttcaaaatttgatgtaaagggatcaaaattagcattgataggtttagcgataggtgcaatttgtacggccattgtccaattcttgcttatacgtaatcctcttgatgcaaataatgcgttattatggttgactggtagtttatacggtcataatatagtcaatttttatagtttattaccatggtttattatcactgtacctatagtattgttattagggtatcaacttgatattttaaatttaggtgatcatgtagccattgcactaggagcacgtgtaaaaatcttaaaaatgattttacttgtattagcagtaatgttagcaggtgcttccattgcggtagtagggggtattagttttttaggtcttatagcacctcatattgcacgtcaacttgtcggccataaaaatatacatgttataatcatgtcaggtttggtaggagcaatattattaacttttggtgatggtttagcaagaggtatacaacctcctcttgatattcctgtaggtgttgtaatagcaattataggcgcaccttatttcttatttttattacgtaagatg

SEQ ID NO: 34952 - DNA, 1029 bp, Staphylococcus epidermidis
atgactatggtgaataaagatagtcaatccgctattgaacaaaaaaagaaaaagcgcactacactcacttttattgtgggtgtgtgccttctttttatttcagtatatttgaatttagcgattggttcttcaaaaatacaatttaatgatattttaagttatgtaactggacacacgaatacaaaggcaactttcttaatacacaatgtacgtatgccaagaatgttagctggtttaattattggtggcgctttagcaattgcaggtttattgatgcaagcaattaccaaaaatcctttggcttcaccacagatttttggtgtgaatgcaggtgcttccttcgttattgtacttataactgtacttataccatcactaggctcttactctacaattttagcgataattggtgccttcttaggaggttttactgtttatacattgtctggctctactaagtcgattacaccgattaaattagcacttgcaggtatggctattcatctgttctttagtagtatgactcaaggtataattattttaaatgaagattctaatgatacagtgatgttctggttagttggttcattagccggtataaaatggcaacagattatattcatcttaccatttttactccttgctatttttgtgaccatatttatgggaagacaattaactatattagagttaggtgatgatattgccagaggattaggacaaagaacagaaatcgtcagaatgattgttggaatattggtcgttgttcttgctggtgtttctgtttctattgctgggcctataggatttgtaggtttgatagttccacacatagtgaaaagatatataaataaaaattatgtattgatgatacctttaacatttatattcggcgctactttattacttatttctgatgtattgtgtcgcttaattacttatccattcgaatcgccagtaggtattgttacatcatttgttggtgctttttacttcttattcataactgttagaggggtgaatcgcata

SEQ ID NO: 34953 - DNA, 1986 bp, Staphylococcus epidermidis
atgtttaatgaaaaagatcaattagctatagatacgatacgtgctttaagcattgatgcaatcgaaaaagcaaattcaggacaccctggattacctatgggagcagcacctatggcgtatactttatggacgcgccaccttaattttaaccctcaatctaaagatttttttaatagagatagatttattctatcagcaggtcatggttcggctttattgtatagcttattacatgtctctggtagtttagaacttgaagaacttaaacaatttagacaatggggttcgaagacgcctggacatccagaatatagacatactgatggcgtagaagttactactggtccattaggtcaaggttttgccatgtctgtagggatggcgttagcagaaagtcatttagcaggtaaatttaataaggaccaatttgatatagttaatcattacacttatgtattagcgtcagatggtgacttaatggaaggtatctcacatgaagctgcatcttttgcaggtcataatcagttagataaattaattgtcctttatgattcaaatgatatatctttagatggagatttagataaatcattttctgaagatacaaaacagcgtttcgaagcctatggttggaactatattctagttgaaaatggtaacgatttagatgagattgataatgcaatcactcaagctaaatcacaacaaggacctactattatcgaagttaaaactattatcggttttggttctcctaataaagctggttcaaatggagttcatggtgccccacttggtgaagaagaacgtgcacttacatttaaagaatatggattagatcctgaaaaacgttttaatgttcctgaagatgtatacgaaatatttaaatcaacaatgttaaaacgtgcaaatgaaaatgaagaggcttggaataatatgcttaaaaattatagtgaagcctatccggaattagctgaagaatttaaattagcaatgagtggtaagttaccaaataattacgctgatgccttaccagaatatgatttaaatcacagtggtgcttctagagctgattcaggagaaataattcaaaaattaagcgagtttgtaccttcattctttggtggatcagcagacttagcaggttcaaataaatctaacgttaaagaagctaaagattataataaagatactccagaaggtaaaaacgtatggtttggtgtacgtgaatttgcaatgggagcagcaataaacggcatggcagcacatggtggacttcatccatatgcagcaacattctttgtattcagtgattacctaaaaccagctttacgattatcatcaatcatgggactcaattcaacgttcatctttactcatgattcaattgctgtaggtgaagatggccctacacacgaacctattgaacaattagcaggtcttcgtgctattcctaacatgaatgttattcgtccagctgatggtaatgaaacacgtgtagcttgggaagttgcacttgaatcagaacaaacaccaacatcattagtgttaactcgtcaaaatttaccaactttggatgttgataaacaaacagttgaaaatggtgtgagaaaaggcgcatatattgtttttgaaacagaacaacaacttgaatatttattattggcatctggatcagaagttaatttagctgtagaagccgcaaaagaattagagcaacaaggtaaaggtgtacgagttatttctatgccaaactggtacgcatttgaacaacaatcttctgaatataaagaatcaattttaccttctgatgttactaaacgtatagctatcgaaatggcatcaccacttggttggcataaatatgttggaattgaaggtaaagtcattggtataaatagttttggcgctagtgctcctggagatttagtagttgaaaagtatggattcactaaagaaaatattttaaaacaagtccgttcatta

SEQ ID NO: 34954 - DNA, 993 bp, Staphylococcus epidermidis
gtgagaggtttaaaaattttaagtgtaattggcttattgtttgttttaattgcaactgcagcatgtggaaataatagttcaagtaactcaagtaaagagtcatcaaaagatggagttgaaatcaagcacgaagaaggtactacgaaagtacctaaacaccctaaacgtgttgttgttcttgagtattcatttgttgatgcgttagttgctttagatgttaaacctgttgggatagcggatgataacaaaaaaaatcgtattattaaaccattaagagataaaattggaaaatacacttctgtaggaacacgtaagcaacctaacttagaagaaatcagtaaacttaaaccagatttaattattgctgataataatagacacaaaggtatttataaagacttaaataaaattgctcctacgattgaactgaaaagtttcgatggagattataatgaaaatattgatgcttttaaaacaatttcaaaagctttaggtaaagaagaagaaggtaaaaaacgcttagaagaacacgataagaaaattgaagaatataaaaaagaaataactatggataaaaatcaaaaggtattgcctgcagtagctgctaaatcaggtttgcttgctcatccaagcaactcttatgttggtcaattcctaagtcaactaggttttaaagaagcattaagtgatgatgttactaaaggtttaagtaagtatcttaaaggaccttacttacaaatgaacactgaaactttatctcaagtgaatcctgagcgtatgttcataatgacaaacaaagcaagttctaacgaaccttcactaaaagaactagaaaaagatcctgtatggaagaaattaaacgctgtgaaaaatcaacgtgttgatattttagaccgtgacttatgggcaagatcacgtggtttaatttcttcagaagaaatggcaaaagaacttgttgaattatctaagaaagatagtaaaaaagataataag

SEQ ID NO: 34955 - DNA, 1122 bp, Staphylococcus epidermidis
atgaaaattgtacataccgctgattggcatctgggtaaaattttaaatggaaaacaattgcttgaagatcaaaaatatattttaactcagtttaaacaacatatggagaaagaacagccagatttaatagtaattgcaggtgatttgtatgatacctcatatccaagtaaagaagcgataggtttacttgaagagactattgaatacctaaatatagaacttaaaattccaataatcatgataagcggtaaccatgatggtagggagagattgaattatggctctaaatggtttgagaataatcaactttacataagaactcaactagaaaatattgatgatccaatagaattgagtggtgttcaatttttcactttacctttcgcaactgtgagtgaagtacaaaattattttaaggataagcaaatagaaacatatcaacaagcattaaacgaatgcttagagcaaatgtctagttccatagataataataaggtgaatatattaattggtcatttaactattgagggcggtaaaacttcagattcggaaagaccattaactattggaacagtagaatcagttgatatgcattcttttcggttgtttgattatgtaatgctcgggcacctacatcatccatttagtataaataactcttttatcaaatatagcggttcgattttgcaatactctttctctgaagtaaatcaatctaaaggatatagagttcttgatattgaaaacaaccaactattaaatgaaaccttcgttcctttaaaacctctaagagaactagaagttattgaaggtgattatgaggatattattcaagaaagaattaaagtaaaaaataaaaataattattttcattttaagttaacgaatgtttctcatattactgatccaatgatgaaactgaaacaaatttatcccaatatattagcactatcgaatgtagtatttgatcatagtgagaattttagccatgttgaaatcaaaaaacaagatgatcagacaattatagaaaatttttataaaaatatgacagatcaacatctgagtcaagttcaatcagacaaaataaagcacttgttaagttttatattggatagggagggg

SEQ ID NO: 34956 - DNA, 1959 bp, Staphylococcus epidermidis
atgaatttcaatcaatttataaataaacaaaatataataatgactgaagatgaacataatgtatatgactttcttaaacatcataatcctaattggtcttctaattatattgatcatttattagatggacgtgataaagtaagtcaacgtttaattacatctttacatagggagaatttagtaaaaagtcgcgatcatagtcgtatacttaatcgacatcagtttgctggatacggagttaatgtgattgccattttagaaatctattttccaacatctaatatttatttgtatgcaccaataactggaatgcatgcattcgatcgcattgatgttgaaggacctttttattttaagaatctaagtaaagaagatgattttgaacgtgtactacatcctaatcaaatattagattggatattaattgaagatgaaaacttaaataacgaggctagcgtacaatttagaaatgatttaaataatagtgcagctaatatgacttttgctttaagtttccagcactatacgatgcgtaatgaaagagcgccattatataaccttattaaaaatgcaaatgatagttacttgcgttccgaacaatctgtcatcgaaggtcatccccttcatcctggtgctaagttaagaaaaggaatgaatgctgaggaaaactttatgtattcatcagaatttggtaatgttattcatctaagagccgtttttattcataaaagtataagtcgtattcaatcatcgaatgtagattacaatgttgccgtaaagcaaatgtttcccgacttaattaaaaccttagaaaaagaatttggcgaagattttaatttacaaaattatcatttaatgatggttcacccttggcaaataaaacatattttacaaagtgattatcgggatgaactaaatgaaaagttaatattgataagtaatcattcggtaccatattatgccggtctatcatttagaacgttagtacctaaacaacctgatttatccccgcacatcaagttatcgacgaatgtacatataaccggtgagattcgaacattgtctgaacaaacgacatataatggaccactagtgacgcaaattttaagagagattatgtcaaaagatgaagatttttcacattatcaatctacttatatcgatgaaaatgcagggattcacttttataatcgaaacgacaatgaggcaattcaaacagatagaagtgaacaattagggactttgtttagaaataatttatatcaatttatatctaatgaaacagtgccagtaattccatcaagtttggttgcgacctatccttataatactgaagcaccaatctgtacgttaatcaaaacgtatcaaaatacgtatcaatataaaaattatgaagaagcagcgaaacaatggattaaagactatagcaaagctcttcttggcttagttatccctctttattcaaaatatggaatttcgctagaggcacatttacaaaattcagtggcaacttttaataaagatggctcactaaatatgatttatatcagggactttgaaggattacgtattgataatgaacaattgaataatgctggatttaccactagacatttccatgaaaaatctagaatccttacaaattctaaaacatcagtatttaataaaatgttctattcaacagttcaaaatcatttaggtgaactcgttattacaatagctaaatattctaatagtaaagtccttgaacaagaaatatggcaaattatttcacaaacagtagaagacatttttaatcacatgactcacatttcaaaacaacatctcaacaacatcaagcgcactattttcgcatccgaaatcgattataagtgtgtcacaacaatgcgtttagaggatcaagcacatgaatatacgtatattaaagtgcataatccacttcatagaaagaatgattta

SEQ ID NO: 34957 - DNA, 3027 bp, Staphylococcus epidermidis
ttgaagcctttacatatagttatggagaactttggcccttttattaaagaaactattgattttgagcaagttgaaactgatcaactctttttaattagtggtaaaactggatctggtaaaacaatgatttttgatgctatagtatacgcattatacggtatggcttcgaccaaaactagaaaagaaggagatttaagaagtcattttgcagacggtaaatcgccaatgtctgtaatttatcaatttaaagttaataatcaaacttttaaaattcatagagaagcgccatttattaaagaggggaatataactaaaacacaagccaagttaaatatatatgaattagttgataatcaatttgaattaagagaaagtaaagtgaatcaaggtaatcaatttatcgtacaattattaggcgttaatgctgaacaatttcgtcaattatttattttgcctcaaggagaatttaaaaagtttcttcagtcaaatagtaaagacaaacaatcgattcttagaacactttttaatagtgagcgatttgatgagattagacatctacttgtagaaaatgtaaagcaagaaaaagtacaaattgaaaatagatacactcaaattgaaaatttatggaatgatatagatacatttaataatgatgaattggccttatataaagaattagagagttctcagacagataaaatgattgaaaaattcccacaatttaatgattatggatgcaaaattctcaagtcatttgaagaagctaagaataaaataactaaggaattagatgatttaaatcataaatataaagtgaatgttgaattaagtgagaatactaaaaaattaaaagcggaaaaaatcaaatttgacgatttgaaaaaagaacaaaattatattgataaattaaagcaagaattaaaaatgattcaggaatctaaagtattaatcacttattttactaggttacaaagtttaaaaaaagataaagatgaattagtgtcacttcatgagcaatcaaaattaaacgaaacaaactatcacaatgaaattaaaggttttcaaaaacaactcgaacatttatcaacacgagaaaatgaaataactcaatttaatcagtatctagaaaaaaaccaagttttcttcaatcaattagataagattattagtagttatcaacaaaaaccggtaattgaagaagaaataaaaagattatacagtgaatataatgatttaataaccaaaaaagaagaattgacgaaagaaatgaacaacaagaacaaagattttgcaattattgaacattacactgaagagatttataagctgaaaaagattatagatgaatctgaaagacaaaaaaaggatgagaaattatttgataaattacaactagataaatcatcttatcttagcaaattaaaagagaagaaagaacagttaaatgaaattgaatcatcaatcaccaatatagatgcgactttaattgatttgaatgacaaaaaggattttgtaaatgaaataaagtccgctatgtcaattggagatacctgtccaatttgtggtaatgaaatacattcattgggagaacatattgattttgaatcaattgctcaaaaaaataataaaataaaacggttagaaagtaagaaggtaaaaattcgtgatgaaataatcaaaatagaaactcgaattgaagaattaaatcatagagaaaatgaattaaattttgagaaacaagaaaagaaggatattagtgagcttcaaaaacagcttaatcatttgaatcaactaaaagacgagcaacaaagcataaataagttagtagaaaattttgagaaacaagaaaaagaaatagttaataaaatacatcagtttgatttagatttgagtcgaaagaacacgcaaaaagaaaaactggaaattcaaattaatgattttgaacgacattcacaattttcatcagtaaatgattttgaaacttattattctcatgctaaaaaacaagttgagacgtatgagtatgagaatgagaaaactaaagataaattgaacgagttgaataataagttaaagatagaaatgaatgatcaaaaacatttaactgagaatttaactcaaacaagtaaggaaataaataatttagaattaaaaatggaaaaagaaatgcaacaacttggttttgagtcttatgatcaagtcaaaagcgctgcagatttaagtgctcaaaaagatgaaatagaaagagaaattaatatttataataagaactatcaaagttatgaaatagagattaacagactcaaagaattggttaagggcaaaaaattattaaatttagaagaattacgacaatctatagaaaaaacaaacttgaaactagatgaaacgaattcacaaatagctacgattagctataaaatagataataactctaacaaatttaataaaataaaaaatataattcagattctcgatgatgaattaaaagtgcaaaaagaaattttcttgctatcagaaatattagctggtaaaaatgattataaattaacactagaaaattatgttttaatttattacttggaaaaaataatttttcaagcgaatcaacgactttcatttatgagtggaaatagatatcaactgattagaagagaggccatttccttagggttaagtggattggaaattgacgtgtttgattttcattcaaataaatcgagacacataagttcactttcaggaggagaaacatttcaagcatcactagctttagctttaggattaagtgaagttgtacaacaagaatcaggtggaatcactttagattctatgtttatagatgaaggatttggcactttagatcaagaaacactcgaaactgcgatagatacattaattaatttaaaatcatctgggcgcatggttggtataatctcacatgtaagcgaacttaagcaacgcatacctttgattttagaagtgacaagtaaccaatacgaaagtcatacacaatttagaaaaaat

SEQ ID NO: 34958 - DNA, 237 bp, Staphylococcus epidermidis
atggctgataataacaatcaaaacggacaagacgctactcaacaatttataaatattttaaaatcgtttaaatggcgtattattggatttttagcatttttaattatagctatattattcctaactctcggattttggaagacaattttaattatagtgttatgtttaataggaatcggtatcgggtatattaaagaccgtacacaagatttcttaaacttcctaaatagatggagt

SEQ ID NO: 34959 - DNA, 534 bp, Staphylococcus epidermidis
gtgaaaagacttaagaattttattctcggcttactcattgtggctatagttggcttcctattatttatgtatatagatgatagtcgcattcaaagttatcaagactacttcttacaatttaattggttccaaccactattgattgggcttgcaggattacttatattaatcggacttatattagtacttagtatttttaaacctacgcatcgcaaacctggactttataaaaactttgatgatggacatatttacgtatcacgtaaagctgttgaaaaaacaatttacgatacaatcgctaaatatgatcaagttagacaaccaaatgttgtaagtaagctttataacaaaaagaataaatcatttattgacatcaaagcagatttcttcgtaccaaaccatgttcaagttaagagtttaacagagagtatccgtgctgatatcaaaagtaatgttgaacactttactgaaattcctgttagaaaattagaagttaacgtacgtgatcagaaaacatctggtccacgtgtattg

SEQ ID NO: 34960 - DNA, 1008 bp, Staphylococcus epidermidis
atgaaagcgataggatttaagtcttcattccaattagatgaaggaaattgttttgaggaatttaactttgatatacctcatccatccggccatgaattattagtcaaggttcaaagtattagtgtgaatcctgttgatacaaaacagcgtacaatgccagttgacaaagcgccacgtgtacttggctttgatgctgttggtgtgattgaaaagataggagatcaagtgtcaatgtttcaagaaggggacgtcgttttttattcaggttctcctaaccaaaatggttcgaatgaagaataccaattaatagaggaatatttagtagctaaagcacctacaaatttgaaaagtgaacaagcagctagcctacctttaactgggctaacagcttatgaaacgcttttcgatgtttttggaatttcaaaagaaccatctgaaaataaaggtaaatcattgttaataattaatggagcaggtggtgtaggtagtattgcaacacagatagcgaaattttatgggttgaaggttattacaactgcttcgagagaggatactataaagtggtctgttaatatgggtgctgatgttgtactgaatcataagaaagatttaagtcaacaatttaaagataatcatattgagggtgttgactatatcttttgtacattcgatacagatatgtattatgaaatgatggttaacttagttaaacctagaggacatattgcgacaattgtcgcatttaattcgcaacaagatttaaatttattgaaatctaaaagtgtaacatttacgcatgaatttatgttttcaagaccattacaccatacagatgatgtaatcaaacatcatgaatatcttaaggatataacagaaaaggttgaacagggatattatcaaccaactaccacgaaagttatcgacggattagatgtagatagcctttatgaagcgcatcaaattttagagtctcattctatgattggtaagcttgttatcaatcttaag

SEQ ID NO: 34961 - DNA, 1002 bp, Staphylococcus epidermidis
atgaataatgaacaaatagtatttaataaagtaccagacggaatgccacaagacgatacatttaaatatgaagatatagatgttattgaaccttcagaaaatgaattgcaattgaaaacattatatatatcggttgatccatatatgagaggacgtatgacaaatgctgattcttatgtagatccgttcaaacaaggggaaccgttcaatggacatacggtatctaaagttttgaaatccaaggatagtaattttgatgaaggtgatatagtagtgggtatgctaccttggagaaaaataaatacagtaaatagtgagtatgttaacaaagtacctacttctgacgtaccattacatctttatcttagtgtgttggggatgcctggtcagactgcttatcatggattacttgatattggacaacctaaagaaggtgaaacagtagttatttcagcagcttcaggtgcagttggttcagttgtgggccaaattgcgaagcttaaaggttgcagagtcgttggtatagctggtggagataaaaaagtgaactatctaaaaaatgaacttcgttttgatgctggtatcgattacaaaaaagataatttccctgaagcgttaaaagaagcggtgcctaacggtatagatgtctacttcgaaaatgtaggtggatatattggcgatgaagtcttcaaacatctcaatacacatgcaagaattcctgtttgtggtgcgatttcatcctataatcatccagaaaaagatattggaccacgcattcagcaaacattgattaaaaatcaagcaatgatgagaggtttcatagtagcagaattcgctgatggttttaaagaagcgagcaaacaattagctcaatgggttcaagagaataaaattaaaacacaagtttcagtagaagatggttttgataaagtgccgcaagcctttagaaatctgctaactggtgataattttggtaaacaagttattaaagtggcaagtgaa

SEQ ID NO: 34962 - DNA, 991 bp, Staphylococcus epidermidis
atgagattaagtttacttgattatgtcccgttgttcgaagggcgtaccccaaatgacgccctaaagcatagtattaaattagcccaacacgctgagaaacttgggtacttacgatactgggttgcagaacatcatcaagtttattctgtcgtttctagtgcacctgaaataataatgatgtcgattttagaacacacacaacacatcagagttggtagtggaggtgtgatgttaccacattatagtccttataaagtagctgagcaatttaaaattatggaagcaagacaccccccaacgtatcgatatggctatcggacgttcgccaagctttaaaaatgttaatgcagcactaaatgaaaacaaaaatgaaaaattaccattcaatactcagattactgatttgcttaaatacttcaataacgatacaactcaagaccatcgttttaaatcattattagctacacctatggttacttcatttcctcaactatatattttaggtatgagtaatagaagcgcaaaattagctgctcagcgcggactaccttttgttattgcacgaatgggacaatctgagacagaccttcatgaagctataagcacttatagaaaatattttaaagcttatcatggtgaaattaataatgcgaaaccatatgttattttagcaacttttgtggtaacagcttctaatttatctagagttaaacaattgctacatacgcttcaactttggttgatgcgtattaactatttaaatcaacctaagagttatccatcgattgaaacagcacagaacaagcattatagtcaacgagaattagaaaagcttgaaaagatgaaatcgaaaatcatatacggaatgccaaatgatgttgcggaacaacttaccttacttcatcaacaatttaaagtggatgaaatcatcatcttacctcatgtatttggtgaagacgctagaatggaattaattgagttaattgcgaat

SEQ ID NO: 34963 - DNA, 606 bp, Staphylococcus epidermidis
atgatgatcatcgtcatgttaatcttgagttatctgattggtgcattcccaagcgggttaattattggtaaattattttttaaaaaagatataagacaatacggtagtggaaatactggagcaactaacagttttcgtgttcttggaagaccagctggatttatagttacgtttttagatattttcaagggatttattacagtcttttttccactatggttcccagttcatgcggatggtgttataagcaccttctttacaaatggtttaatagtaggattgtttgcaatactcggtcacgtgtatccaatatatctgaaatttaatggcggaaaagcagtagctaccagtgcaggagttgtattaggtgtcaatcctattttacttcttatcttggcaattatcttttttagtgtattaaaaatctttaaatatgtttctttatcaagtatcattgcagcaattagttgtgtgattggttcaatcatcattcatgattatattttacttgctgttagcggaattgtttcaatcatattaataattcgacacaaatctaatatagttagaatttttaaaggagaagaacctaaaattaaatggatg

SEQ ID NO: 34964 - DNA, 1410 bp, Staphylococcus epidermidis
atgactaagaaattacctgatgactttatttttggtggagcaaccgctgcttatcaagcagaaggagctactcagactgatggtaaagggcgtgtcgcttgggacacgtatttagaggagaattattggtacacagctgaaccagcaagtgatttttataacagatatcctgttgacttggaattaagtgaacgctttggtgtaaatggtatacgtatctcaattgcttggtctcgtatttttcctaaaggttacggtgaagtgaatcaaaaaggtgtcgagtattatcataatcttttcaaagaatgtcataaacgtcatgttgaaccttttgtaacattacatcactttgacacaccagaggtacttcacaaagatggagacttcttaaatcgtaaaacaatagactattttgtagattatgctgaattttgttttaaagaatttccagaagttaagtattggacaacattcaatgaaattgggccgattggtgatggtcaatatttagttggtaaattccctccaggtatcaaatatgactttgaaaaagtattccaatctcatcataatatgatggttgcacacgcacgtgctgttaaactttttaaagatgaaaattataagggagaaataggtgttgtccatgcattacctacaaaatatccatatgatccatctaatcctgaagatgtgagagcagccgaacttgaagacattattcataataaatttattttagatgcaacataccttggtaagtactcacgtgaaacgatggaaggagtacaacacatcttatctgtgaatggtggtcaattagagatttctgatgaagactacaaaattttagatgaagctaaggatttaaacgatttcttaggtattaattattatatgagtgactggatgcgtggttttgaaggcgaatctgaaataacacataatgccactggtgataaaggtggatctaagtatcaacttaaaggtgtaggacaacgtgaatttgatgttgatgttcctagaaccgattgggattggatgatttatccacaaggtttatatgaccaaattatgcgtgtagtaaaagattatccgaattatcataagatttatattactgaaaatggattaggatataaagatgtattcgacgaaaaagaaaaaacagtacatgacgatgcacgaattgactatattaaacagcatctaagtgtgatagcagatgcgattgcagatggtgccaatgttaagggatacttcttatggtctcttatggatgtattttcatggtcaaatggttatgaaaaaagatacggtttattctacgttgattttgaaacacaagaaagattccctaagaaaagtgcatattggtacaaagaacttgcagaaagtaaagaaattaaa

SEQ ID NO: 34965 - DNA, 1998 bp, Staphylococcus epidermidis
ttggcaatgaataaacaaaataattattcagatgattcaattcaggtacttgaaggactagaagcagttaggaagagacctggtatgtacattggatcaactgataaacgaggattacatcatcttgtatatgaagttgtcgataactccgtcgatgaagtattaaatggttatggtgatgcgattacagtaacaattaatcaggatggtagtatttctatagaagataatggtcgaggtatgccaacaggtatacatgcgtctggcaaacctactgcagaagttatatttactgttttacatgctggaggtaaatttggacaaggaggttataaaacatctggaggtctccatggggtgggtgcttctgtagtaaatgcccttagtgaatggcttgaagttgaaattcatagagatggtaatatctacacacaaaatttcaaaaatggtggtattccagcgacaggtttagtaaaaactggaaaaacaaaaaaaactggtactaaagttacatttaaaccagactcagaaatatttaagtcaacgacgacttttaattttgatattttaagtgagcgtttacaagaatctgcatttttacttaaagatttaaaaattacacttactgatttacgtagtggaaaagaacgagaagaaatttaccattacgaagaaggaattaaagaatttgttagttatgtcaatgaaggtaaagaagtattacatgatgttactacatttgcagggcattccaatggaatagaggtagacgtagcattccaatataatgatcagtactctgagagcatattaagttttgtaaataatgttcgtacaaaggacggaggtactcatgaagttggtttcaaaacggcgatgactcgtgtttttaatgaatatgcacgtcgtataaacgaactgaaagataaagataaaaatttagacggtaatgatatacgcgaaggtttaacagcgataatttcagtacgtataccagaagaacttcttcaatttgaagggcaaacgaaatcaaaacttggcacttcagaagcaaggagtgctgtagactctgttgtttcagaaaaattaccatattacttagaagaaaagggccaattatctaaatcattagttaaaaaagcaattaaagctcaacaagcacgcgaggctgctcgtaaagctagagaagatgcacgctccggaaagaaaaataaacgtaaagatacattgttatcaggtaagttaactcctgcgcaaagtaaaaatactgataaaaacgagttatatctagttgagggtgattcagcgggaggttctgcaaaattgggacgcgaccgtaaattccaagctattttacctcttcgtggaaaggttattaatacagaaaaggcacgtttagaggatatttttaaaaatgaagaaattaatacgattattcatactattggtgctggtgttggtactgactttaaaattgaggatagtaattacaacagaattattatcatgacagatgctgatacggatggtgcacatattcaagtattattgcttacatttttctttaaatatatgaaaccacttgttcaagctggacgtgtctttattgcgttaccgcctttatacaaattagaaaaaggcaaaggtaagaataaaaaagttgagtacgcttggactgatgaagaattagaaaatttacaaaagcaattaggaaaaggtttcatattacagcgttataaaggtcttggtgaaatgaatccagaacaattatgggaaactaccatgaatccagaaactcggacattaattagagttcaagttgaagatgaagttcgttcatcaaaacgtgtcactactttgatgggggataaggttgccccacgaagagagtggattgaaaaacacgttgaatttggtatgcaagaagatcaaagcattttggataataaagaagtccaaatactagagaatgaaaaatatattgaggaggaaacgaat

SEQ ID NO: 34966 - DNA, 1746 bp, Staphylococcus epidermidis
atgaataaattaatagcatggatagaaaaaggaaagccattctttgaaaaaatatcacgaaatatttatttaagagcgattcgtgatggatttattgctgctattccaattatcttattctcaagtatatttattttaattacctatgtaccaaatgtgtttggttttacttggagtaaaactatggaaggtatattgatgaaaccctataactatacaatgggaatagttggtttgcttgtagcaggaaccacagctaaatctttaactgattcttacaatcgaaaactagataaaacgaatcagattaactttatttcgacaatgatggcagctatttgtggatttttattcttagctgctgatcctgttaaagatggtggattttcaagtgcatttatgggaacaaaaggtttattgacagcctttatttctgcgtttattaccgtgattgtttataatttctttgtcaaaagaaatattaccattaaaatgcctaaagaagtaccaccaaatatatctcaagtatttaaagatattttccctttatcagccgtaattttaattttgtatgctttagacttactttctagagcaatagtccacacgaatgtagcaaatgcagtattaaaagtatttgagccactatttactgcggcagatggttggattggggtaacactcatattcggtgcgtttgcgttcttctggtttgtaggtattcatggaccttctattgttgaaccagcgattgcagcaattacttatgcgaaccttgaaacaaatttacacttaatacaagctggagaacatgctgataaagtaattacaccgggtacacagatgttcgtagcaactatgggaggaaccggtgcaacattagttgttccatttatgtttatgtggttaacaaaatcaaaaagaaataaagcgataggtagagcatcagtcgtacctacattctttggtgtcaatgaacccatactttttggtgcaccactagtactaaatccggtattctttataccttttatttttgcacctatagtaaatatatggatttttaaattttttgttgatgttttaaatatgaatagttttagtatctttttaccttggactactcctggtccactcggtattgttatggggactggatttgcattttggtcatttgtgttagcaatattacttattgttgttgatgtgattatttactatccattcttaaaagtatacgatgaacaagtgcttgaagaagaattaggaaataaagaagcaaataatgaattaaaagaaaaagtatcagcaaactttgatacgaaaaaagccgatgctattttagcaactgcaggggcaagtgaagcggatactgatgatacatcttcagttgatgaaacaacttctacatcctctacagatactattagtgaacaaacaaatgttttagttttatgtgcaggtggaggtacaagtggtttactagctaatgctttaaataaagctgctgaagagtatgaagtaccagtaaaagcagcagcaggtggttatggtgcacatatggatattatgaaagattatcaattaattatcttagcaccacaagttgcttcgaattttgaagatattaaacaagatactgatcgcttaggaattaaattagccaaaactgaaggcgctcaatatatcaagttaacaagagacggtgaggcggctttagaatttgtaaaacaacaatttaacaat

SEQ ID NO: 34967 - DNA, 2400 bp, Staphylococcus epidermidis
ttgagtgagataattcaagatttgtcacttgaagatgttattggtgaccgatttggacgttatagtaaatatatcattcaagaacgtgcattacctgatgtacgtgatggtttaaaaccagtacaacgacgtatactattcgcaatgtattcaagtgggaatacgtatgataaaaatttccgtaaaagtgcgaaaactgtcggtgatgtaataggtcaatatcatcctcatggagactcttcagtatatgatgctatggtgcgcttaagtcaagattggaagttacgtcatgttctaattgaaatgcatggtaataatggtagtatcgataacgatcctccagctgctatgcgttacacagaagctaaacttagtcaattatcagaagaactattaagggatattaataaggaaacagtatcatttattccaaactatgatgacacaactttggaaccaatggtattaccagcgagatttcctaatttattaattaatggatctacggggatttcttcaggatatgctactgatatcccgccgcataacctcgccgaagtaatacaaggcacattgaagtatatcgatcaacctgatattacaattaatcaactgatgaaatatatcaaagggcctgactttcctacaggtggtatcattcaaggaatagaaggtataaaaaaagcgtatgagaccggtaaaggaaaggttgtcgtgcgttcacgagtagatgaagagcctttaagaagtggacgtaaacaattaattgtgactgaaattccgtatgaagtgaataaaagtagtttagttaaaagaattgacgaattacgtgccgataaaaaggttgatggtattgtagaagttcgagatgagactgatagaactggattacgaattgcaatcgaattaaaaaaagatgctaatagcgaatcaatcaaaaactatttatataagaattcggatttacaaatttcatataattttaatatggttgctattagtgaaggtcgccctaagttgatgggattacgtgaaattatagaaagttatttaaatcatcaaattgaagtggttacaaatagaacgcgttatgacttagagcaagctgaaaaacgtatgcatattgtggaaggattaatgaaagctttatctatacttgatgaagttattgcattgatacgtaattctaaaaataaaaaagatgctaaagataatttagttgcagagtatgactttactgaagctcaagcagaagctattgtcatgttacagctgtatagattaacaaatactgacattgaagctttgaaaaaagaacatgaagagttagaagctttaataaaagaattaagaaatatcttagataatcatgaggcacttttagcagtaattaaagatgaactaaatgaaattaaaaagaaatttaaagtggatcgactatctacaatcgaagctgaaatttccgaaatcaaaattgataaagaagttatggtgcctagtgaagaagtgattttaagtttgacgcaacatggctatataaaacgtacatctacacgtagttttaacgcaagtggtgtgactgaaatcggtttgaaggacggcgaccgtttattaaaacatgaaagcgtgaatactcaagatactgttcttgtatttacaaataaaggtagatatttgtttatacctgttcataaattagccgatatccgttggaaagagcttggtcaacacatatcacaaattgtgccaatagatgaagatgaagaagtggtaaatgtatacaacgaaaaagattttaaaaatgaagccttttatattatggctacaaaaaacggcatgattaagaaaagtagtgcttcacaatttaaaactactcggtttaataaaccactcataaatatgaaggttaaagacaaagatgaacttattaatgtcgttcgattagagtctgatcagttaattactgttctaacccataaaggcatgtcattaacttattcaactaatgaattatcggatacaggcttaagagcagctggtgttaaatcaattaatcttaaagatgaagactatgttgttatgacagaagatgtgaacgactcagattccataataatggttacacaacgtggtgctatgaagcgtattgattttaatgttcttcaagaagctaaacgcgcacaacgtggaattactttactaaaagaattaaagaaaaaaccgcatcgaattgtggcaggtgcagtagttaaagaaaatcacacgaaatatattgtattctctcaacatcatgaagaatatggtaatatcgatgatgtacacttatctgaacaatatactaatggatcatttattattgatactgatgattttggagaagtagaaagtatgattctagag

SEQ ID NO: 34968 - DNA, 312 bp, Staphylococcus epidermidis
atgaatagagatgaggtacaattactcggatttgaaattgttgcctatgctggggatgcacgttcaaaattattagaagctttaaatgctgctaaagatagtgaatttgataaagcagaacaacttgtagaggaagcgaatgaatgtattgctaatgcacataaagcacaaaccaatcttctagctcaagaggctaaaggcgaggatatcgcatatagtatcactatgattcatggtcaagaccatttaatgacaacattacttttaaaagatttaatgaagcatttaattgaattatacaaaaaagggagc

SEQ ID NO: 34969 - DNA, 975 bp, Staphylococcus epidermidis
atgacaaaatcacaacaaaaagtgtcatcaattgagaaattaagtaatcaagaaggtattatttcagctttagcatttgatcaacgtggtgcattaaaaagaatgatggcagaacatcaatctgaaacaccaacagttgaacaaatagaacaattaaaagtacttgtttctgaagaattaactcaatatgcgtcttcaattttattagatccagaatatggtttaccagcatcagatgctcgaaataatgactgcggactattacttgcatacgaaaaaactggatatgatgtgaatgcgaaaggtcgtttgccagattgcttggtagaatggtctgcgaaacgtttgaaagagcaaggggccaatgcagttaaatttttactttattatgatgtagatgacacagaagaaattaacatacaaaagaaagcatatattgaacgaattggttcagaatgtgttgccgaagatattcctttcttcttggaagttttaacatatgacgacaatattcctgacaataaaagtgcagaattcgctaaagttaagccacgtaaagttaatgaagcaatgaagttattctctgaagatcgttttaatgtggatgtacttaaagttgaagtacctgtgaatatgaattttgtggaaggattttcagaaggagaagttgtttatactaaagaagaagctgcacaacatttccgtgatcaagatgcagctactcacttaccatatatttatttaagtgcaggtgtatcagcagaattgttccaagatacattaaaatttgcgcatgattctggtgcgcaattcaatggtgttttatgtggacgtgccacatggtcaggagcagttaaggtatacattgaagaaggagagcaagctgccagagaatggttgcgtacggtaggatttaagaatattgatgatttgaatacagtattgaaaacaacagctacatcatggaaaaacaaa

SEQ ID NO: 34970 - DNA, 513 bp, Staphylococcus epidermidis
atgaaaattgcaataggttgcgatcatattgttactgatacaaaaatggaagtttcacaacacttaaaatcacagggacatgaagtgatagatgttggaacttatgatttcacacgtacacattatccgatttatggaaaaaaggtaggagaaaaagttgcgagtggtgaagcagatttaggtgtatgtatttgtggtactggtgtaggaattagtaatgctgcaaacaaagtaccaggtgttagaactgctttagttagagatatgacatcagcgctttattctaaagaagagttaaacgccaatgttgtaagttttggcggtaaagtagcaggtgaattatttattttcgacatcgttgatgcattcattgaggcagagtacaaacctactgaagaaaataaaaaattaattgctaaaatcaatcatttagaagcacataacaatgaccaagctgatccacatttcttcgacgagttcttagaaaaatggaataaaggtgaatatcacgat

SEQ ID NO: 34971 - DNA, 426 bp, Staphylococcus epidermidis
atgacgattattattggttcagatgtagatggcaaacgcttaaaagaattaattaaagattatttggaagacaacgattatgatgttttagatgttacagaaggaaaagatctagactttgttgattcaacagtctctgtagctaaagaagttcaaaagtccgacgacaatctaggtattgctatagatgcctatggtgcaggtagttttattgtagcaactaaaattaagggaatgattgcggctgaggtttcagatgagcgttcagcttacatgacacgtagccataataatgcacgcatgattactatgggagctgaaattgttggagatacgcttgctaagaatgtcgcaaaagaatttgtcaatggtcattacgatggtggacgtcatcaaatccgcgtagatatgttaaataaaatgtgt

SEQ ID NO: 34972 - DNA, 987 bp, Staphylococcus epidermidis
atgactgaacagaaggatattaaagaaacagagtatcgacgacagaaaggaacaacttcgacaccttctaggcgaagaaataaaaaaagaatgcggaagttaccttttatcattttagtcatccttattattttaatttctatcattgtgtatattacccatcagtataacagtggtatgaagtatgctaaagaacatgctaaggatgttaaggtgcataaatttaatgggaatatgaaaaatgatgggaagatttcagttcttgtccttggcgcggataaggctcaaggtggtaaatcacgtactgactcgattatgattgttcaatatgattacgtacataaaaaaatgaaaatgatgtctgtcatgagagatatttatgctgatattcctggttatgataaatataaaattaatgccgcatattcacttggaggcccggaattgttaagaaaaacacttaacaaaaatttaggtgttaatcctgagtattacgctgtagtagattttactggatttgaaaaaatgatagatgaactacagcctaatggtgtcccaattgatgtggaaaaagacatgtctgaaaatataggtgtgtctttgaaaaaaggacatcataagttaaatggtaaagaattacttggttatgctagattccgtcatgatccggaaggcgattttggtcgtgtgagaagacaacaacaagtgatgcaaacattaaagcaagagttagttaatttcaatacagttgcgaaactaccaaaagttgctggtattttaagaggttatgttaatacaaatatgcctaactctgcgatttttcaaacaggtataagttttggaattcgtggagataaagatgtgcaatctttgacagtccctattaaaggaagctatcaagatattaatacaaataatgatggtagtgcgcttcaaatagactctgagaaaaataagcaagcaatcaaaaatttctttgaagataat

SEQ ID NO: 34973 - DNA, 390 bp, Staphylococcus epidermidis
ttggcacaagttgaatataaaggcacaggccgtcgtaaaaactcagtagcacgtgtacgtttagtacctggcgaaggtaacattactgttaacgaacgtgatgtacgtgactacttaccattcgaatcattaattttagacttaaatcaaccatttgatgttacagaaactaaaggtaactatgatgttttagttaacgtacacggtggcggatttactggacaagctcaagcaatccgacatggaattgcacgtgctttattagaagcagatcctgaatacagaggttctttaaaacgtgctggattacttactcgtgacccacgtatgaaagaacgtaaaaaaccaggtcttaaaaaagcacgtcgttcaccacaattctcaaaacgt

SEQ ID NO: 34974 - DNA, 435 bp, Staphylococcus epidermidis
atgcgtcaaacatttatggcaaatgaatcaaacattgagcgcaaatggtatgttattgatgctgaaggccaaacattaggtcgtttatcatcagaagtagctgctatattacgcggtaaaaataaagtaacttatacaccacatgttgatactggtgattatgtaattatcattaatgcatctaaaattgaattcactggtaacaaagaacaagacaaaatgtactaccgtcattcaaatcacccaggcggtttaaaatcaatctctgctggtgaattaaaaagaacaaatcctgaacgtttattagaaacttcaattaaaggtatgttaccaagtacacgcttaggtgaaaaacaaggtaaaaaattatttgtatatggtggcgctgaacatccacacgctgcacaacaaccagaaaactacgagttacgtggt

SEQ ID NO: 34975 - DNA, 801 bp, Staphylococcus epidermidis
ttgcgtatattagttgaaattgcttatcaaggtaaccaatttttaggttttcaaattcagcaacaaggacgaactgttcaacaacaatttgaaaagattcttaaacgaatgcataaacatcatgtacgaattcatccctcaagcagaacagacaggggtgtgcatgcgtatcagcaattctttcatttcgataccgaattgaatattgataacaaacaatggcaatatgcgatgaatcgagctttaccagatgatatttacgttaaaaatgtacgaaatgtcgacgagtattttcattgtcgttatgactgcgtaggcaaacgctatcgttacaaagtttatcaaggtaatcatcgaaatccttttaagagtggtactgaaacatttgttaatgaaacattagactatgataaaatgaacaaagctgctcaagaatttataggtacacatgattttaccggtttttgttcacagaaaacagaagttgaaagcaaagtaagaacactatatcagagtgaaattgttgctactaaagaagggtttgattatgtcgtaacaggttctggattcctttataatatggtccgtgtattggtagctttcttaattgaagtaggaaaaggaaagcgtgaacctaatgacgtccctaagctcttagaggacaaaaatagaaataatgtgcctctcacagctccacctgacggattatatttagaaaagatttatttaagcccagaagaattgatacaagaatatgggaaagatgtaaaaatacactacaaaaaatcgttggaaaaacac

SEQ ID NO: 34976 - DNA, 804 bp, Staphylococcus epidermidis
atgaagaataaattaatcattggacgatatcttcctatgcaatcaattattcatcagcttgatcctagagctaagttaatatttgtctttttctttattcttttaatttttttctgtcattcactaggtacatatgcatggttgtttctttttataatattatttattaagttagcacgtattcctttttggtttttaattaaaggattaacacctatctttttcttcttggttttcactttttctatgcatgtgttatttactaatggaggtatcgtattatttcaatggaagtttatcactattgaatcaaatggtgttatggaaggaatttacatatcactaagattgatttttatagttatgattgcaacaatcatgacactttcgactagtccgattgatttaacagatgcttttgaaaaattatttgtacctcttaaagtgattaaagtaccagtacatcaattaagtatgatgatgtctattgctctaaggtttataccaacattaatggacgaattagaaaaaattatacttgctcaaaaatctagaggatcagaaataagttcaggaagtttaataacacgaattagagcttttatacccatcatgattccattatttatttctgcctttcaaagagcagaagaactagctatagcaatggaagtcagaggttatgatattaacatcaaacgaacaagctataggttattacattggcaatataaagacacattaacagtcttacttttaatacctatcgctactatattatttattttaaaattttcaggagtg

SEQ ID NO: 34977 - DNA, 858 bp, Staphylococcus epidermidis
atgagtatacaatttaatcaagtgagttatatttatcaacaagggacaccttatgaatttgaagctattaaaaacgtttcactaactcttgaacagggcaagtattatgcaattattggtcaaactggaagtgggaaatccactctgattcaacatttgaatgctttattaaagcccactacaggttcagtcaacattaatggtttagaagttacaaataaaactaaagacaagcacttacgtcacataagaaaagaagtaggtatagtatttcaatttccagaatcccaattatttgaagatagcgttgaaaaagaaattgagtttggacctaaaaattttaatatgaacctaaaaaatgttaaagacaaagcttttcaacttcttcttgaattaggtttttcaagaaatgtgatgtcatcctctccatttcaaatgtcgggaggacaaatgagaaaaatagccattgtttccattttggctatggatccacaagtaattattctggatgaaccgactgctgggttagacccgaatagtaaacaccaagtcatgtctttaataaagaaaatacaaatagaagaaaataaaacgattattcttgtttcacatgatatggatgatgtagcacgttattcagatgaagttgtagtaatgaataaagggacgatagtagaaaaatcaaatcctagaaatttatttaatcaaaaaacgcaattattaaagtggcatatagagttgcctaaagtagtgaagttacagaaagatatcgaaaaaaaatataatatgttatttccaaagcttgccatgaatgaagaagagtttgtgaagttgtataaggagtggcatcatgaagaa

SEQ ID NO: 34978 - DNA, 807 bp, Staphylococcus epidermidis
gtgaatgggtcaaatcctatcattgaatttaaagatgtatcatttcaatatcaaagtgacgctgctttcacattaaatcgcgtttcattctcaataccagctggacaatggacttctattgtaggtcacaatggttcaggaaaatctactattgctaaacttatggtaggtatagaagaaccaagtgaaggacaaattctatttcaaaatctaccagtagactctcaaaataagcgagaagtgaggaaacatatcggaattgtttttcaaaaccccgataatcaatttgtaggttctatagttaaatttgatgttgcttttggtcttgaaaaccaacttgttccttataaagaaatggtatctaaagttaatcaagtattaactgaagtagatatgataaataaagccgatgatgaaccccattcactttcaggagggcagaaacaacgtgttgccattgctggggtacttgcacttaatcctgatgtgctgattttagatgaagcgacaacgatgctagatcctcatggaaagtcatctttacttaaccttgtaaatgaagttaaagtaaataatcatgttacaattatttcaatcactcatgatttagatgaagcaatgcatgctgatcaaatcattgtattgaataaaggaactgtttttaaacaaggaacacctcaagatatttttaagtgcgaagaggcactaatatcggttggattggacttaccatttcctttgaaaatgaatcgacttttaggttttgattcaacttatgtaacttatgaagggttgattaaaaaatta

SEQ ID NO: 34979 - DNA, 366 bp, Staphylococcus epidermidis
atgggttacagaaaattaggtcgtacttctgatcaacgtaaagcaatgttacgtgacttagcaacttcattaatcgttagtgaacgtatcgagacaactgaagctcgtgctaaagaagttcgtagtgtagtagagaaattgatcacacttggtaaaaaaggtgatttagcatctcgtcgtaatgctgctaaaactttacgtaatgttgaaattttaaatgaagatgactctacacaaactgctcttcaaaaattatttggtgaaatcgctgaacgttatagtgaacgtcaaggtggttacactcgtattcttaaagtaggccctcgtcgtggtgacggcgctgaatcagtaattattgaattagtt

SEQ ID NO: 34980 - DNA, 942 bp, Staphylococcus epidermidis
atgatagaaattgaaaaacctagaattgagacaattgaagttagtgaagatgctaaattcggtaaattcgttgttgaaccacttgaacgtggctatggtactacactaggaaactccttacgtcgtatcctactatcttcattaccaggtgcagccgttaagtacatcgagattgaaggagttttacacgaattttcagcagtagataatgtagtagaagatgtttcaacaatcattatgaacattaaaaaacttgcattaaaaatttactctgaagaagataaaactttagaaattgatgttaaagatgaaggcgaagtaactgcaagtgacattactcacgacagtgatgttgagattttaaatccagagcttaaaatcgcaacagtgtctaaaggtggacatcttaaagtgcgtcttgttgctaataagggtagaggttacgcattagctgaacaaaataatactagtgatttaccaattggtgtaattcctgttgattcactatattcacctgttgaacgtgtaaactatacagttgaaaatacacgcgtaggtcaaagtagtgattttgataaattaactttagatgtttggacaaatggttcaatcacaccacaagagtcagtatcattagcagctaaaataatgactgaacacttgaatatctttgtaagtctaactgatgaggctcaaaacgctgaaatcatgattgaaaaagaagaagatcaaaaagaaaaagtacttgaaatgtctattgaagaattagacttatctgtacgttcttataactgcttaaaacgcgcaggaatcaattctgtacaagagttagctgataaatctgaagctgacatgatgaaagtgcgtaatttaggtcgtaaatctctagaagaagtaaaatataaattagaagatttaggattaggattaagaaaagaagat

SEQ ID NO: 34981 - DNA, 993 bp, Staphylococcus epidermidis
atgacccttcttgagaaaattaaacaaaataaatctttatctaaaaaagatatgcaatcatttattgttacactgtttgattcaaatatagaaaccaatgtaaaggttgaattattgaaagcttatacaaataaagacatgggtcaatatgagctaacgtatttagttgaatattttatccagacaaactatccaaaccaaccattttataataaagctatgtgtgtttgtggcacaggtggagatcaatcaaatagctttaatatttctacaactgtagcttttgttgtagcaagtgcaggagtgccagtcattaaacacggtaataaaagtattacttcacattcaggaagtacagatgtattacatgaaatgaatataaaaacaaacaaaatgaacgaagtagagcaacaattaaatttgaaaggattagcattcataagtgcaactgattcttatccaatgatgaaaaagcttcaatcaattagaaaatcgattgcaacacctacaatttttaacttgattggaccattaattaatcctttcaaattaacttatcaagtgatgggggtatatgaagcttcacaacttgaaaatatagcacaaacattaaaggatttaggtagaaaacgagcaattttaattcatggtgcaaatgggatggatgaggccacgctttctggtgaaaatatcatttatgaagttagcagcgaaagagcattaaaaaaatatagtttaaaagcagaagaagtcggtttagcttatgcaaataatgacacgttgataggtggttcacctcaaacaaataaacaaattgcattgaatatcctaagtggcacggatcactcaagtaaacgagatgtagttttgttaaatgctggaattgctttatatgttgctgagcaagtggaaagtatcaaacatggcgtagagagagcgaaatatctcattgatacaggtatggcaatgaaacaatatttaaaaatgggaggt

SEQ ID NO: 34982 - DNA, 786 bp, Staphylococcus epidermidis
atgactattttaaatgaaattattgagtataaaaaaactttgcttgagcgtaaatactatgataaaaaacttgaaattttacaagataacggaaatgttaagaggagaaagctgattgattcacttaactatgatagaacattatcagttattgctgaaataaaatcgaaaagcccatctgtacctcaattaccgcaacgtgatcttgttcaacaagttaaagattatcaaaaatatggtgctaatgctatttcaatattaactgatgaaaaatactttggcggtagttttgaacgattaaatcagttatcaaagataacatcgttaccagttttatgtaaagattttattattgataaaattcaaatagatgttgcaaaacgagctggtgcatctattattttattaatagtaaatattttaagtgatgaccaattaaaagaattgtattcatatgcaacaaaccataatttagaagctctagtagaagttcatacaattagagaacttgaacgtgcacaccaaattaaccctaaaattattggtgttaataatcgtgatttaaaacgatttgaaaccgatgttctacatacaaataaattacttaagtttaaaaagtctaattgctgctacatttcagagagtggcattcatacaaaagaagatgttgagaaaatagtagattcaagtattgacggtttacttgtaggggaggcattaatgaaaacaaatgacttaagtcagtttttgcctagtttaaagttaaagaagaatctctatgatagt

SEQ ID NO: 34983 - DNA, 1206 bp, Staphylococcus epidermidis
atgaaaattcaaacagaagtagatgaattgggctttttcggtgaatatggtggccaatatgtacctgaaacattgatgccagctattattgaacttaaaaaagcatatgaggacgcgaaatcagatactcacttcaagaaagaatttaattattatttaagtgaatatgttggtagagaaacgcctttaacatttgctgaatcatacacaaaattgttaggtggtgccaaaatatatcttaaaagagaagacttaaatcacactggtgctcataaaattaataacgcgataggacaggcactattagctaaaaggatggggaaaactaaattagtagccgaaacaggtgctggtcaacatggtgtagcaagtgccaccatcgctgctttattcgatatggatcttattgttttcatgggaagtgaagatatcaaacgtcaacaacttaacgtatttagaatggaattgctaggagctaaagtagtgtctgtgtcagatgggcaaggaacactatcagatgctgtaaataaagctttgcaatattgggtgaatcatgtcgaggatacacattatttattaggctcagcgttgggacctgatccgtttccaactatggtcagagattttcagagtgtgattggtaatgaaattaaaagccaaattttaagtaaagaaggacgacttccagatgcgttagtcgcgtgtgttggtggaggatccaattcaataggtacgttctatccatttatacaagatgatgttaaattatatggggtagaagctgcgggaaaaggaagtcatacgcataatcatgctttagctatagggaaaggtaaaccaggtgtattacatggttccaaaatgtaccttattcaaaatgatgatggacaaattgaattggcacactctatatcagcgggactagattatccaggtattggacctgaacattcgtattataatgatattggtcgtgtatcatatgtaagtgctacagataatgaagctatggaagcacttataacattctcaaaagttgaaggtatcattccagcaattgaaagtgcacatgcattgagttatgttgaaaaattagcgccaaatatggatgaaaaagaaattattgttgtgactatttcaggtcgtggagataaagatatggaaacaattaaacaatacaaagaaaacggtggtgaacaaaatgag

SEQ ID NO: 34984 - DNA, 669 bp, Staphylococcus epidermidis
gtgtatatattcatgagtaaaaaagttttatttgttttaacaagtacaagtcaatttacagacggtacagaaactggattatggttagaagaagctggagcaccatataatatattgactgaagaaggtatcaatgttgatgttatttctattaaaggtggaaaagtaaatcttgatcctaattctgtttctaatgaatcactgaatcagtatgctaaattcgtgtcacacttaaacgatacacctagtatcgaaaatgtaaatgcagatgagtatgacgctatttatctaccaggtggacatggtactgtatacgattttgccaataatgagaaattagctgatattttacttcaatttaaaaatagtaataaaataatctcttcagtatgtcatggacctagtgtgtttgtaggtgtaaaagatgcaaataatcactatctagtagatggtgtcaaaataacttcatttactgatagtgaagaaaaagcaatgggatttgaaaataaagtaccatttttaactcaatctaaattagaagagcaaggtgcaaattttgtagtgaaagatgactttacatctcacgtagaaaaagacggtcaatttatcactggacaaaatccccaatcaagtgaagacattggtaaagcacttgcaaatgaattaaaa

SEQ ID NO: 34985 - DNA, 1251 bp, Staphylococcus epidermidis
atgaaatttacagagttaacagttaaagaatttgaaaactttgtacaaaatccatcattagaaagtcattatttccaagtgaaggaaaatattgctacacgtgaatcagatgggtttcaagtagtgttattaggtgtaaaagacgacgacaatagagtgatagcagctagcctgttttctaaaatccctacaatgggcagttatgtgtattattccaatagaggccctgtaatggactattcagatttaggtttagtggatttttatttaaaagagcttgataaatatttacatcaacatcaatgcttatatgtaaaattagatccttactggttgtatcaagtttatgataaagatattaatcctttaacagaaaaaaatgatgctttagtaaatctatttaaatcacatggttatgatcatcacggatttacaacccaatatgattcttccagccaagttagatggatgggggtattagatttagaaggcaaaacccctgcatctctaaggaaagagtttgatagtcaaagaaaacgaaatattaataaagcgataaactacggtgtgaaagttagatttcttagtaaggatgaatttgatttattcttagacttataccgagagactgaagctagaactggatttgcttctaaaactgacgattatttctataactttatagagcattatggcgataaagtattagttcctttagcttacatagatttaaatgaatatatacaacatttgcaagaatcactaaatgataaagaaaatcgacgtgatgatatgatggcaaaagaaaataaaacagataaacagttaaagaaaatagctgagttagataaacaaattgatcacgataaaaaagaattgcttcaagctagtgaattacgtcaaacagatggcgaaattttaaatttagcttcaggagtatactttgctaatgcatatgaagtgaactatttctctggagggtcttcagaaaaatataatcaatatatgggaccatatgcaatgcattggcacatgattaattattgttttgataacggttatgatagatataatttctatggcttatcaggtgattttactgaaaacagtgaagactatggtgtttatcgctttaagagaggttttaatgttaggattgaggaattaatcggtgatttctataaaccaatcaataaagtgaaatattggttattcaatacattagatcgcatacgtaataaattgaaaaag

SEQ ID NO: 34986 - DNA, 1470 bp, Staphylococcus epidermidis
atgtataaacttttgcaacatttgggtaggtctctcatgttacctgtagcagttctgccagcagccgcaattattgtaggcataggtcatgttttagatgctttaaatatacttcctcaagctgcactctttttcacaagtgttgggaccactatattagagcaattaggtatattatttgctattggtgtagctatcggtatggctaagaagaatgatggcgcagtagcattagcggcagcgttaggattttttatagttacagtagtactatctccagaaaaattagcaactttgttacaaattaaagaatctaaaattgatttagcattcagtcaaatgaataatggaaatgtgtttgtagggattattataggtttgattgctgcatatagttataacaaatttagtgaaacgaatttacctatggccttatcattcttcagtgggaaacgacttgttccaatcatgacagcattcttttgtacaattttagcgattattttattattgatttggcctccagtttataatgggatagttacttttggtaagtggattgttggtatgggtccattcggtgcattattatatggtttttttaatagattgttaatacctactgggttgcatcatgcgctcaataatgtattttggtttgatactgctggaataaatgacataggtaaatttcaaagtggtaaaaatgccattaagggaattactggcagataccaagcaggatttttccctgttatgatgtttggtgtaccggcagcagctttggcgatgtatcatactgcaaagacgaatcaaaaaaaacaagtttatgcttggtttttagcaagttcagtttcggcattctttgtgggtgtaactgaacccatagagtttgcattcatgtttgtagctccagttttatttgttattcatgctgttttaactggattatcattatttatagcagcaatgtttcattggacagcaggattttcatttagtgcaggtcttatagattatgtgctttcattggttaatccgatatctaatcaaccttggatgttattattgcagggtgtagtcttttttattatctattacgttatctttagagttgtcatacaagtctttaatttaagtactataggtaggggagataatgaacttatcgatccaacatcaaatgatacttctgaaatggaagtattacagaacaaaaccactacaagtaaatattatcaaaacgcaaaacgtattttagacggattaggtggtaaagaaaacattattagtttaaatcattgtgcaacaaggcttagattggagcttaaagataattcgattatagatgagcagaaaattaaaaatgctggagctattggtataactcaaaatggacaccattatacccaagtgattattggaacacacgtacaacaagttgccaatgaaatggatcaccaaatgaat

SEQ ID NO: 34987 - DNA, 621 bp, Staphylococcus epidermidis
atgtacaattttataagtaagattttagatgttattttagtgaaaatgtctaaatcattatatgttattggtaaggaaaatattcctaaagatagtaaatatgttgtaacttgtacgcatgaaagttataacgaagtaatcatgttaggaatggcattactacctaatcaaatccattatatggctaaaaaagaattatttaagaatcagtgggctggcaaatttttgaaatcactaaatgcatttccagttgatagagaaaatcctggtccaagtacattaaaaaaaccagtgaatttacttaaagaacataaaactataggtattttcccaactggtcatcgtacttcagtagagggagccccattaaaacgtggtgcagctactatagcaatgcttgggaaagcacctatcttaccagcagcttatgtgggtccaaaaaaaattcatggtttgattacaggtcaagcattaatcaaaattggtaaaccaattgagatggatgatattccaaaggatttgaaacggaacgagaaagttgatttcttaaccaaagaaatcgaaagacgcacaactcaattacaaaaagaacttaatgaaatttcacatagtttaaagaaa

SEQ ID NO: 34988 - DNA, 1236 bp, Staphylococcus epidermidis
atgtcagaacaagaaaagaatcaacaccactatcgtaattcttcacagaagcgacacacttttccatggattaaaacaattattgttgcaataatcgctggaattattggagcacttctcgtcttaggtattggtaaactcctaaataaaaatggttttaacaatgaaagtgctactgttcatcaagtttcaaatagtcatggtggcaatcagttagatggtaaaagtaatcaatacaaatcagtacatgacatgattaaagacgtttctcccgcaattgtcggcgtgataaacatgcaaaaatctacaaaccttgatgatttattcaacggtaaggcatctaaatcaaaagaagcgggaattggttccggtgtgatttatcaaataagtgaaggttccgcatatatcgttacaaataatcacgttgttgatggtgcttcggaaattaaagttcaactacataattcaaaacaagtagatgccaaattaataggtaaagacgccctaacagatattgctgttctaaaaataaaagatacaaaaggaataaaagcaattcaatttgctaattcgtcaaaagttcaaacaggagatagtgtttttgcaatgggtaatcctctaggattagaatttgcaaattctgttacatcaggaattatttcagctagcgaacgtacaattgacgccaatacttctgctggtaatactaaagttaatgttttacagacagacgctgcaataaatcccggtaattcgggtggtgcattagtggatattaacggaaatctcgttggtatcaattccatgaaaattgcggcagcacaagtagaaggtataggttttgctatacctagtaatgaagttagagtgaccatcgaacaactcgttaaacatggtaaaatcgaacgcccttcaatcggtataggtcttataaatttaagtgatattcctgaaaactatcgtaaagaactacatactcataaagacaaaggcgtttatgtagctaaagtagacagtgaaaatgccattaaaaagggtgatattattactggaatagatggtaaacaaataaaagatgatacagatttaagaacttatttatacgagagcaaaaaaccaggtgaaacggttactctaaaagttatcagagatggtaagacacaagacattaatgtaaaattaaaaaaacaagcatctgcatctgaatcatctcaatcacaaagtcaatttgctcaa

SEQ ID NO: 34989 - DNA, 1263 bp, Staphylococcus epidermidis
atggctaatgctttaatagaagatttaaaatggagagggttaatttatcaacaaacagatgaagagggtatcgaagaattattaaataaggaacaggtcactttatattgcggcgcagatcctacagctgatagtttacatattggtcacttgttaccttttttaacattaagacgcttccaagaacatgggcatcgtcctatcgtcttaattggtggaggtactggtatgataggagatccttctggaaagtctgaagagcgcgtgttacaaacagaatcacaagttgaagctaacgtcaaaggcctgtctaatcaaatgcatcgattatttgaatttggcagtgataaaggggcaaaattagttaataataaagattggcttggtcaaatttcgttgattagttttcttagagattatggtaaacatgttggcgttaactatatgctaggaaaagattctattcaaacacgtttagaacatggtatctcttatacagaatttacttatactattttacaagctattgattttggctatttaaatcgtgagttaaattgtaaaattcaagtaggcggatctgatcaatggggtaatattacaagtggtattgaattaatgcgacgaatgtatggacaaactgaggcatatggcctaacaatcccattagtaactaaatcagatgggaagaaatttggtaaatcagagtctggagctgtgtggttagatcctgaaaagacaagtccatatgaattttatcaattttggattaatcaatctgacgaagatgtaattaaattcttaaaatattttacttttttagaaaaagaagaaattaatcgattagaacaatcaaaaaatgaagcgcctcacttacgtgaagcacagaaagcactagcggaaaatgttacgaaatttattcatggtgaagcagctttaaaagacgctatacgtatttcaaaagcactgtttagtggagatttaaaatcattatctgctaaagaacttaaagaagggtttaaagacgtacctcaagtaacgctatctacaaaaacgacaaatatagttgaagcacttattgaaacaggtattgcttcatctaaacgccaagcacgtgaagatgtaaacaacggtgcaatatatattaatggtgaacgtcaacaatcagtcgattatgagttaagtagtaaagaccttattgaagatgaaattacaataattcgacgaggaaagaaaaaatatttcatggttaattaccaatca

SEQ ID NO: 34990 - DNA, 1089 bp, Staphylococcus epidermidis
atgactaataaattagaacagtatagagaagaaattgtttccttaaatgatcaaatattagaattactatcgaagcgaggagaattagcacagaaaattggtgaagaaaaaattaagcaaggtacacgagtatatgatcctcagcgtgaaaaggaaatgattaatcagctattagataaaaataaaggtccatttaacgacaatgtgattaagcaattatttaaagaaatttttaaagcctctacagatttacaaaaatcagaaaatgaaaaacatctttatgtatcacgtaaattgaaacctgaagatacgatcgttaaatttgataatggtggaatcattggtgatggtaataaatcatttgtatttggtccttgttctgtagaatcacaagaacaagttgatgctgtagcacaagatttgcaggctaaaggcgagaaatttattcgtggcggagcgtttaagccgagaacttctccttatgatttccaaggtcttggagtagaaggtctcaaaattttgaaaaatgttaaagataaatataacttaaatgtagtaagtgaaatagttaacccaaatgatttcgaaatcgcttcagattatttggatgttttccaaattggtgctagaaatatgcaaaattttgagttactcaaagaagctggtcgtacagataaacctattttattgaaacgtggtttatcagcaacgatagaagaatttatctatgcagcagaatatattgcttcacaaggtaaccgaaatattattttatgtgagagaggtattcgtacatacgaaaaagcaactagaaatacattagatatctctgctgtacctattttaaagcaaggaacacatctacctgttatggttgatgtaacgcatagtacaggtagaaaagatattatgttaccgacagcgaaagcggctttagccgttggtgctgatggagttatggctgaagttcatccagatccttctgttgcgttaagtgatgccggtcaacaaatggatcttaatgaattcaatcaattttatcacgaattaaaaccacttgctgatatgtacaattcgaagaaactgaaa

SEQ ID NO: 34991 - DNA, 873 bp, Staphylococcus epidermidis
atggttaattcacaagtagcagacaaagagaaattagacgcacaaacaaataatcaagactcagttgccacaatagttactactgaaaacaataagaaatatacaattccagacagtgaaaagaagattgtttattcaactcaaaatctagatttatggtatggagaaaatcatgctttacaaaacattaatttagatatattggaaaataatgtgactgcaataatcggaccatctggatgtggtaaatctacatacatcaaagctttaaatagaatggtcgaattagttccatctgtgaaaactgcaggcaaaattttgtatcgtgaccaaaatatatttgatgcaaagtattctaaagagaagctacgtactaacgttggaatggtttttcaacaacctaacccattccctaaatcaatttacgataatattacttatggtcctaagactcacggtattaaaaacaaaaaaattctagatgaaatcgtagaaaaatcattacgtggcgctgcaatatgggatgaattaaaagatagattgcatacaaatgcttatggattatcaggtggacaacaacaacgtgtttgtatagctagatgtttagcaattgaaccagatgtcattttaatggatgaacctacgtcagcattagatcctatttctacattaagagttgaagaacttgtacaagaattaaaagaaaattactcaattattatggttacacacaacatgcaacaagctgcgcgtgtttcagataaaactgctttcttcttaaatggatatgtcaatgaatatgatgatactgataaaatcttttcaaatcctgcagacaaacaaactgaagattatatatctggtcgttttgga

SEQ ID NO: 34992 - DNA, 924 bp, Staphylococcus epidermidis
atggcttcacaaacaaaggtgagagaaatgatagctaagaataatgctaaaaagggcggactaagtgataaaattgtcccaattattttagctattatttcagctatatctatattaactacaattgctattttatttacacttttaactgagacgattacgttcttcacacgagtaccattatctaaattctttttatctggtacctggaacccaactggttcatcgccagaatttggaatttgggcactcatcattggcacattgaaaattactgttattgctacaatcgtggcagttccaattggtttaggtgcagctatttaccttaatgaatatgcatctgatcgttcacgtagaatcattaaaccaatattagaaattttggctgggattcctacaattgtatttggtttctttgctttaacatttgttacacctatattaaggaatctaattcctaacttaggagagtttaattcaatcagtcctggtattgttgtgggtataatgatcgtccctatgattacaagtatgagtgaagatgcgatgtcatctgtacctgataaaattcgtgaaggtgcttttggattaggcgcaactaaatttgaagtcgctacaaaagttgtattaccagctgcgacatcaggcgttgttgcttcaattgtattaggtatatcaagagcaataggggaaacaatgatcgtttctttagctgctggtagttcaccaacatcatctctaagtttaacaagttcaattcaaacgatgacaggatatattgttgaaattgctacaggtgatgcagcatttggttctgatatttactacagtatttacgctgtaggatttacacttttcattttcactttaattatgaatttattatcacaatggatctctaaacgattcagagaggagtat

SEQ ID NO: 34993 - DNA, 1221 bp, Staphylococcus epidermidis
atggaacattataatcgtgataatttcgagaaaagccatacaagcgaagaattgtatcatcgcacatctcgttcacaatctaactcattgaagcgtaaggattttgtagttagtttcatagcaagtgcgatagtaggttctgctgttggattgtactataaaaataaaatatataaaaaaacggatgaattgaaagaaaaagaacaagatttacgtagtaaagttgaaaactatagacaacgagcggaagatacagtggtttctgttaaatctaaagttgagcaattaaaatatgattccaaagataatatccatgcagatgaattacaagctcaaaaagctgctattcaacgcgaaacagacttagcggatgaatcaccggaagcgcaagcaattcaagaagcaaaaaaagaaacaaaacaagtggatgatgtgagaccatcagcaacagaattagcagctcaacaaaatgctattcaacacgaaacagacttagcggatgaatcaccggaagcgcaggcaattcaagaagctaaaagtgaagttgattcaaacaataaaacatctacgacgcacatagatagtgagaaagaaccttctgctgaagaaattgcaattgctcaaacggcagttaaagaagaagcacgcaatcatgatttagcaaacccttctgcaagtggagaagatactaaaagtaagtcagaaactgaaacagaaaaattagctgcagcggcaaaagcaaaaaaagatagaataaataataataatgaagttgctagtaacacgaaaaatctaatgcaagaagaagctataaaagcttcaaataactctgatgttccaaatcttgtaactaatttaaatcaatctcaagcatcagatactaattcagttgcttatcgcttagcacaggcagcaaaagaaaaaagatctaagctcacaaatggctctaaagaaacacaacttacagaagcgttgttaaaagaaccatcaattgctaaagctcaaacaaaattgaagcgtatccctacacttattactgaatctaaaaaacattcaaataatccgcacagccaaaaaaattcgaatcagactaagaatataacagcaactaaagaggattccaaaggcaaacagcaacatacacctaaccaaaacaaacgtaataaacaacaaaaagtagaaaaaactagtagcaaaattgaaaaacgaacatttaatgat

SEQ ID NO: 34994 - DNA, 1311 bp, Staphylococcus epidermidis
atgacacactatcattttgtcggaattaaaggctcaggcatgagttcattagcacaaatcatgcatgacctcggtcatgaagtacaaggttcagacatagaatcatacgtttttacagaagttgcattaagaaataaagggattaaaattttaccttttgatgcaaataatattacaaaagaaatggttgtcatccaaggtaatgcatttcctgataatcatgaagaaattgttagggcacatgaattaaagcttgatattataaaatatcatgactttcttggtcatgttataaatcaatatacatctgttgctgttacaggtgcacacggtaaaacgtctacaactggtttgttgtcacatgtgatgaatggagataaaaagacatcattcctaatcggtgatggtacaggtatgggactaccaggaagtgactattttgcttttgaggcttgtgaataccgtaggcacttcttaagttatcatccagattatgcaattatgactaatattgattttgaccatccagattattttaaaaatatcgatgatgtttatgatgcattccaacatatggcattaaatgttaagaaaggaattattgcttggggcgatgatgaatatttacgtaaattagatgtggatattccggtttattattatggctttaaagaaacagatgacatctatgctaaaaatattcaaattactgaaaagggtacgcaatttgatgtatatattaaaggcgaattttatgatcaattcttatccccacaatatggaaatcacaacattctaaacgcacttgctgtaatagcaattagttatttagaagacatgaatgtagaaaatattaaagaagcactgataacatttggtggtgtaaaacgtcgttttaatgaaacaaaagtatcaaatcaagtaatagtagacgattatgcacaccatccaagagaaattagtgctacaattgagacagcgcgaaaaaaatatccgcaaaaagatgttgttgccgtttttcaaccacatacgttctcaagaactcaagcatttttaaacgaatttgctgagagtttaagtaaggcagaccaagtatttttatgtgaaatattcggttcaataagagaaaatacgggagatttaactatagaagatttaatcaatcgtattgacggctcgacgcttatagatgaaaatagtattgatgtattagaaaaatttgataacgctgtaattttatttatgggcgctggtgacattcaaaagttactaaaagcttatttcgaaaaattaggcgtaaaaaatgatttt

SEQ ID NO: 34995 - DNA, 3507 bp, Staphylococcus epidermidis
atgagctggtttgataaattatttggcgatgacaacggttcgaatgacgatttgttacgcaaaaataaaaatagacgtcagtctcagcaatcaaaacaaaataatcaagactcattactgcctcaaaataatgatatttatagtcgaccaagaggtaaatttagatttccaatacaagtttctgaaaatgaatatacgcaaaaaaatgaaaattataatgaacataaccaagaagaaacaaacgatataatgagatcatataaccagcatgataatcctgaatttgattcttctggtaaaagacatcgacgccgacgccaagcgtattcaaaacacgatcaatctaagattacacaacaaaagcaatttgcagataacaattatacaaataataacagtgtttttaatcaaaacgacaataagaaatcttcacaacaacgtaaatcaatacaatctgaaaatatcaaaaacaaagcaaacactaagaatacgtcgacatctcctgaatttacatatttaaatcatagttttaaatcaagcgaggtaccctcagcgatttttggtacaaaaaaacgaagaccgattgagaatggtgtcataccgccagaacataaggaattaaatgataaagagattgttcaacaggatgaagtctcgcattcaacgaaatcaatagatgcatcaaaaaatgtttctaatagtaacgataacaatattgaaaaaaatcaacagaaaaaacaacaaacaactgctcaaactgagtcatcatcagaaaatatgcataatgttgaaaagtcaaattatcaaactactaagcgtaaaacaccaaattactctaaagtagataatacgattaatattgaaaatatctatgcttcacaaattgtagaagaaatcagaagagaaagagaacgtaaagttctacagaaacgacgttttaagaaagccttacaacaaaaacgtcaacaaaatcaacagtcagaagaggattcaattcaaaaagctattgatgaaatgtatgctaagcaagcccaacattacacaggcgaaagttcattggatttagaaaatgaaagtaatcaagattcgtcatctaatagtctagagaaacaatcaaatagcagcaacattgacaataaagaagcccaaaataacacacctttatttaactacgaagaaattgacttagatacgacatcagatgtatataaagttaatgaagaagaaactgaatctaaaaatgatgaagatttagtatcatcaaatcattatcattctaatgatgatgcggaagtagaagatgccgaatatcacgaattagatgataaccgacaacaaaaccaaagtaactctcaagacgatataattagttcaaaatcaagtacttcaaatatgtatgataatgcaatcagtgcaagtgtagataataacactgaaagagctaaatcaaatgaagataaaaatgatacagaaattacacacttagatggaacaacaagtgcaaaagttagtgacgagaaaattgaatctaatacaaacaatcatttagaacaagataagaatgtaaaattaaaaaatgtaaattcattaaaatcttcaaattctgatacaggtcaaacaagaaaacaacgttttggtggtagtagaccgtttaatgttttaatgacaccatcagataaaaagagaatgatggatcaaaaccacaaaaaagtaagtgttccagagcttaaacctgaaaaacaagcgaatgcaaatcatagaaaagacagcgaatctaataaatctgaagaatttaaacaaatcaatactaatagagaaaccgattctaatagttatgaatctaatggcatagagcatgatatgaattcatcaagtgatgagcacgtatatgaaacaccatccaaacaacaggatgagcaaatacaaaagctacaagatgattttcattttgaaaacgcaaatcatgctaaaattaacaattcaaatgaaactggcaatcaaagtaatataagtcattcaaaacggtcacaatattcaacaaatgaaagtaaaaatattgatacacaaacttcaaattcaagtacatcaaatcaaaattttcaacgtattcgtaaaggaccgaatattaaattgccgagttatcaattattggaagccccagaaccacatgaaaaagatcaagattggatagataataaaaagcaagaattaaacgacgcattatattatttcaatgtgcctgcggaagtgaaaaatgtaacagaaggaccgagtgttactcgattcgaattatctgttgaaaaaggtgtcaaagtatcaagaatcacggcattacaagatgatataaaaatggctttagctgctaaagatattagaattgaagcaccaattccaggtacaagtttagtaggtattgaagtgccaaatcaaaatcctactaaagtgaatttaaggtcaattattgaatcacctaaatttaaaaatacagagtccaaacttacagttgcaatgggttatcgaattaataatgaacccttattgatggatatcgctaaaacacctcatgcacttatcgctggtgctacagggtcaggtaaatcggtatgtataaatagtatcttaatgtctttactttataaaaatcatccagaagaattgcgtttattactcattgatccgaaaatggtagaacttgcaccttataatgatttaccacatctcgtatcacctgtaataacagatgtaaaagcagctacacaaagtttaaaatgggctgttgaagaaatggaaaaacgttataaattgtttgctcaatatcatgtcagaaatattactgctttcaataaaaaagcaccttatgagcaaagaatgcctaaaattgttatagtaattgatgagttagctgatcttatgatgatggcaccacaagatgtagaacaatcaattgcacgtatagctcaaaaagctcgagcttgtggtatccatatgttagttgctacacaacgaccatcagtgaatgtaatcactggtcttattaaagctaatatacctactagaattgcatttatggtttcatcgagtgttgattctagaacgattttagacagtggtggcgctgaaagattattaggttatggtgatatgctttatttaggtagcggtatgaataaacctatacgtgttcaaggtacatttgtttcagatgacgaaatagatgaagttgttgactttattaagcaacagcgtgatcctgaatatttatttgaagaaaaagaattattaaagaaaacacaaactcaagcacaagatgatttatttgatgatgtatgtgagtttatggttgaagagggacatatttctacttctcttatccaaagacatttccaaattggttataacagagcggcaaggattatcgatcagctagaacaattaggatatatttcaggtgctaatggttctaaaccaagggatgtttatattacagaagcggatttaagtaaagaa

SEQ ID NO: 34996 - DNA, 594 bp, Staphylococcus epidermidis
atgaacttattttacaatcctaaaggtgttggagatgttgcatttattcaaattgaaccttcagttggtccttttgaatatgaacaaaaacatggtgtggtagaaatcaaaaaagaaaatgaggtagtaggttataatatatttaatgtgtctaataatgtgacaataaatgataatggacatattaaactaactactgaattaatcaaagatttacaacaactgattactgaagcaggttttgattatcaacttgatactgatgtatcgcctaaatttgtagttggttacgtagaaactaaagaaaaacaccctaatgcagacaaactaagtgtgttgaatgtaaatgtaggtactgaaaaacttcaaattgtttgtggagctccaaatgtagaatctggtcagaaggtcgttgttgcaaaagttggggccgttatgccaagcggaatggtaattaaagatgcccaattacgtggggtagattctagtggtatgatttgctcaatgaaagaattaaatttgcctaatgctcctaaagaaaaaggaattatggtacttaacgatgactatgatattggtcaggcattttttgaa

SEQ ID NO: 34997 - DNA, 1605 bp, Staphylococcus epidermidis
atgttacaagtaactgatgtaagtttacgttttggtgatcgtaaactatttgaagatgtaaatataaaatttacagagggtaattgttatggattaattggtgcaaatggtgctggaaaatctacattcttaaagattttatcaggcgaaattgattcacagactggtcatgtatctctaggtaaagatgagcgtttggctgtattaaaacaagatcattttgcttatgaagatgaacgtgttttagatgttgtgattaaaggacacgaacgtttgtatcaagtgatgaaagagaaagatgaaatttatatgaaacctgatttcaacgatgaagacggtattcgtgctgcagaacttgaaggagaatttgcagaaatgaacggttggaatgctgaagctgatgccgctaatttattatcaggattaggcatagaacctgacttacatgataaaaatatgtctgaacttgaaaataatcaaaaagttaaggtattgttagctcaaagtttatttggtgatcctgacgttcttttactagatgagcctaccaatggtttagatataccagcaataagttggttagaagactttttaattaattttgaaaatactgtcattgtcgtttcgcatgaccgtcacttcttaaataatgtttgtactcatatagctgatttagactttggcaaaattaaactttatgttggtaactatgatttctggtatcaatcaagtcaattagcacaaaaaatggcacaagaacaaaataagaaaaaagaagaaaaaatgaaagagttacaagatttcatcgcacgcttctcagcaaatgcttctaaatctaaacaggcaacaagtcgtaagaaacaattagaaaaaattgaattagacgatatccagccatcatctcgtagatacccttatgtgaaatttacccctgaacgtgaaattggaaatgatttacttacagtagaaaatctttctaaaacaattgacggcgaaaaggtactagacaatgtttcattcactatgaatcctaatgataaagctattttagttggtgatagcgaaattgctaaaacaacattgttaaaaattttagctggagaaatggaaccagatgaaggtacatttaaatggggcgtaacgacatctttaagttacttccctaaagataactctgaattctttgatgatgtcgatatgaatctagttgaatggttacgtcaatacgccccagaagacgaacaaactgaaacatttttacgtggtttcttaggacgcatgttatttagtggtgaggaagttaagaaaaaagcaagcgtgctttcaggtggagaaaaagtacgttgcatgttaagtaaaatgatgctatcaagtgctaatgtacttttacttgacgagccaacaaaccatttagatttggaaagtatcactgctgtaaatgatggattaaaatcatttaaaggttctatcatcttcacttcttatgattttgaatttattaatacaatcgcaaatcgagtgattgacttgaatcaagctggtgccctttctaaagaagtaccttatgaggaatacttacaagaaattggcgtattacaaaataat

SEQ ID NO: 34998 - DNA, 987 bp, Staphylococcus epidermidis
atgacaagattagcagtagctggagcaacaggattagttggaacaaaaatgttagagacactagatcgaaaacaaataccttttgatgaattagtattattttcttctgctcgctcagcaggaaaaaaagttgaatttcaaggacaatcgtatactgttcaagaattaactgatgaagcagcaagtgaacattttgattatgttttaatgagtgcgggaggtagcacaagtgagcactttgccccactatttgaggcggctggagccattgttattgataattcaagtcaatggagaatggctgaagatgtcgatttaattgttccagaagtgaatgagcctcaatttacacgtggtattattgccaatccaaattgctctacaattcaatcagttgtacctcttaaaattttacaagatgcatatggattaaaacgtgtcgcttatacgacttatcaagctgtatcaggttctggtgttaaaggtaaaagagatttaactgaaggcgctaatggaaaaaaacctgaagcatatccctatccaatttacaataatgtattaccacatatagatgtttttcttgaaaatgggtatacaaaagaagaacaaaaaatgattgatgaaacgaaaaaaattcttaacgaccaaaacttaaaagtaactgccacatgtgtacgtgtaccagtacaagatagtcacagtattgaaatcgatgtgactttaaatcaagatactacagttaaagagatacaagaattatttgcacaagatcaacgtgttgttcttgtagataatccaagtaaaaatgaatatccattagccattcattctactggcaaagatgaagtatttataggacgtattcgccgagatgactctcttgaaaatacatttcacgtatggtgtacctctgataatttactcaaaggcgcagcattaaatgcagttcaagtattagaacaaattttaactttgaaaggggcaaga

SEQ ID NO: 34999 - DNA, 720 bp, Staphylococcus epidermidis
atgaacatactactaattggatatggtgcaatgaatcaaaaagttgcacgattagctgaagataaaggtcatgaaattgttggagtcatagacagaactccaaaatcatcgacaccttattcccaatataaacacattagtgaatgtaaagaagctgatgttgctattgacttttcaaatcctgaattgctctttcctctattagaagaacaattcaatctgcctcttgtcatcgcaactacaggtgaaaaagaaacgttaatacaaaaattggaaacgctaagtcaaagaacacctgtattttttagtgcaaatatgagttatggtgtccatgcattaactaaaatattagaaactgcagttcccttactcgaagatttcgatatcgaactgacagaagcgcatcataataaaaaagtcgatgctcctagtggcacattagttaaattgtatgatgtcattaaagaattacgtgacaatatctcacctgtttatgatagacacgaaaaaactgagaagcgtacacatgatgagataggtatacatgctgttcgtggcggtacgattgtcggggaacatgacattttatttgcaggtactgatgaaacaattactatctcacatagagcacaatcaaaagatatctttgcaaatggtgccattggcgctgcagaaaaattaattcacaaaaacccaggtttttatacttttaataatcta

SEQ ID NO: 35000 - DNA, 720 bp, Staphylococcus epidermidis
atggtacaacatttatcagctcaagaaatcattcaatatattagcgatgctaagaaatcaacaccactcaaagtttatgtaaatggtcattttgaaaatgtgacattcccagaatcttttaaagtttttggctctgaacattcaaaagtaattttctgtgaagcagatgaatggaaacaattttatcaaaaaaatcattcattaatcactgaattagaaattgagatggatcgtcgtaattcagctataccgcttaaagatttaacaaacacaaatgctcgtattgagccaggtgcgtttattcgtgagcaagctatcattgaagatggtgctgtggttatgatgggtgctacgattaatattggagctattgtaggtgaaggaacaatgatagacatgaacgcaacacttggtggccgagctacaacaggaaaaaatgttcatgttggtgcaggagctgttttagctggtgtcattgaacctccaagtgcttccccagttgtcattgaagacaatgttttaattggagcaaatgctgttattcttgaaggtgtacgcgttggtgcaggagctattgtagcagcaggagctattgttactcaagatgtgcctgctggtgctgtagttgctggtacgcctgctaaagtaattaaacaaacttcagaagttcaagactcaaaacgtgagattgtgtctgcactgcgtaaattaaataatgaa

SEQ ID NO: 35001 - DNA, 789 bp, Staphylococcus epidermidis
ttggagcagttttatcagttagggtggacacttgattcggcaggaggagcttctggtgaagcatatatggctgaacaagatggacaaaaattatttttaaaacgaaattcaaatccttttattgctgcgctatctgcagaaggaattgtacctaaacttgtttggacgaaacgtattgaaacaggtgaagtagtaacagctcagcattggaaaaatggcagagaattaaatgaagatgaaatgaaccaaacaagagtcgctgaactactacataaaattcacggttcaagacctttattaactatgctaaagcgtatggagatggaacctattacgcctgacattatgttgaataaaattaacgcatcactttcaagagaagttttgacacatcatgttgtgagaagagctttaacttaccttgaagatcatataccgaatttagacgcacgtttctttactgttgtacatggagatgttaatcataacaactggttattatcagatcgggatgaactttaccttgtggattgggaaggtgcaatgattgcagacccagcgattgacattggtatgctgctttacaattacgttcctcaaaacaaatggtctcagtggtttaaaacttatggcgttgaagaaagtgtcaatttgaataaacgtatgaaatggtacacagttattcaagcaataggtcttattcaatggtatgaagaacaaaaacgctatagagatatgaatacatggctgaaatttttaaatgaagtaatgaatagtaacttatttata

SEQ ID NO: 35002 - DNA, 1407 bp, Staphylococcus epidermidis
atgtggaaagaaaaggttctagagtacgaaaatcaaatgattgaagatcttaaaggtttattatctatagaaagcatcagagatgattctaaagccactgctgatgcacctgtgggaccaggaccgagagaagctcttgattacatgtacaatttaggtaaaagagatggtttttcaacgcatgacgttgatcatatagctggtagaattgaagctggtaaaggagaagatgtattaggtattttatgtcatgtcgatgtagtacccgcaggcgatgggtgggattcaaacccattccaaccagtagtgacagacaatgcaattatagccagagggacactggatgataaaggacccaccattgctgcctattatgcagttaaaattttaaatgagatgaaggtagattggaaaaaacgtatacacattattatcggaactgatgaagaatcagattggaaatgtacagacagatatttcaaaacagaagaaatgcctgccttaggttttgctccagatgcagaattcccagcaatacatggtgaaaaaggtataacaacctttgatttagtacaaaatgaagtgacagaagatacagatgaacctgactatgagttattaaaatttgaatctggtcaaagatacaatatggttcctgattatgctaaggcagaagtgctcgtcaaagaaaatatgacagatgtcattcaaaactttgaaaactttttacaacaaaatcaactacaaggtgaaagtacagttgacagtggtattttaatattaacaattgagggtaaagcagttcatggcatggatccatctttaggtgttaatgcaggattgtttttacttaaatttttagcaagtcttaatctaaataaaagcgcaaaagatttcgtagaattcaatgagcgatacttatttgaatctcactttggtgaaaaaatgggtatgaagttccatactgatattatgggagatgtcactactaatatcggggttatcagttatgataaagaaaaagcaggccgttatggtattaatctaagatatcccgaaggatttaaatttgaagacgcaatcgatagatttagaagtgaaattaatgaactaggttttaatttagaacttggcaaagttcaaaaaccacactatgtcgataaaaatgatccatttgtaaaaacacttgtaaacgcatatagaaatcaaacaggtgatatgactgaaccatatacgattggtggaggaacatatgcgagaaatttagataagggtgtcgcatttggtgcgatgtttgcagattcagaagatttaatgcatcaaaaaaatgagtatataactaaaaagcaattgatcaatgcaacaagtatttatttagaagctatttacgctttatgtgtggaggat

SEQ ID NO: 35003 - DNA, 690 bp, Staphylococcus epidermidis
atgagattagataaatttctagctaatatgggtgttggaacgcgatcagaagttaaacagttactcaaaaaaggatctgttaaagtcaaccaaaatatagttaagttacctaaacttcatgttaatcctaattctgatgagataatggtaaatgatgaagtagttagttatatcgacaaagtgtatatcatgttaaacaaacctaaaggttatatttcagcgacagaggatgagttgcatcctactattattgatttgatacctgaatatgcacatttaaatatttttccggtcggacgtttggacaaagatacagaaggattactccttgttacaaatgatggacagtttaatcatgaagtaatgaatcccaataagcatgtttcaaagacttatgaagtctattcaaaacacccaataactcaattcgatattgataaatttaaatccggaatagaattatcagatgggaaattaaagcctgcaattttaaagaaagttgatgattatgtatcacatgtcactatttacgaaggaaaatatcatcaagttaaaagaatgtttcatagtatcgaaaatgaggtattagaattgaaacgcataaagattgctcaactagaactagatcataatttagatttgggtagttatcgtttgttaacacaaatagattttgataatcttaagaac

SEQ ID NO: 35004 - DNA, 1659 bp, Staphylococcus epidermidis
atgagtgaaagtaaagaaatggttcgtggaacctttttaattacaataagtattttaattacaaaagtattaggtgtcttatttattattccgtttactgctttaataggtggacaagccaacatggcaccttttacttatgcttatgcaccatacaatatagctatagctatagcaacagctggtgttccgcttgccgcgtcaaaatatgttgctaaatataatgcactaggtgcatataaggtcagtcagaagttttataaatcaagttttgtagtcatgagtattacaggaattgtaggtttcctagttttatatttattagcaccatacatagctgaactaaccttatcacgtaatactcatggtaatagtggatggacagtagctgatatcacttggattattagaataataagtatggtagttatatttattccagttctcgcaacttggagaggaatatttcaaggatacaaatcgatgggacctactgcagtgtcagaagttacagagcaaattgcaagaattgtatttattttagtaggtagttatttaacgctcaatgtatttggaggtacagttcttcaggcaaatggtattgcaacgtttgcagctgcaataggtgcaatcgcaggaatacttacattatggtattactggattaaaagaagaaaaaatattaaaaaaatggtcgactcagatacagcgaatctaaatgtttcatacgggaaaatgtataaagaaattattgcttatagtataccgtttgtcatagtaagtttgaattttccactatttaatttggtcgatcagtttactcataatggtgcgcttaaccttgtaggtgtcaaacctggtttgcaagatatattctttaacatgttaaacatgtctacaaacaaaatagtaatgattccaacatcattaagtgctggatttgctgtcagtttaataccatttataactaaaacctatgaagaaggtagatatgcagagatgcatcgacaaattagaacttcgattggagttttaatgttcattactgttccagctagtattggtatcatggcattagcgcaacctttgttcacagtattctatggttttgatccagttgttcacggtcacgatccaaatttcgatggaagtagattattattttattatgctcctgttgcaattttaatttcattattaagtgttacagcatcaatgttacagggtatcgataaacaaaaactaacagtttttattattttaggatctgttttaattaaactgattctcaattatcctttaattatgttattacacacacctggcgctgtattaagtacagcaatagctttattatttgcaatttgttgcaatttctatattcttaaaaaatatgcaaactttaaatttagttacagttggatacatttagctaagattattctaatttcaatcatcatgatgattggggttgaggtgattttcttcattttaagattattcttggaaccaactagatttaattacttgattattgttgcaattggtgtcattgtgggagcaatcatttatggtggtattacaatcaagactaaattagctgatgaatttttaggtgatattcccgctaaaataagacgtaaagtgaagatgttgcga

SEQ ID NO: 35005 - DNA, 1275 bp, Staphylococcus epidermidis
gtggaggttatcatcatgtatcaaacaattgttatcggaggtggcccaagtggggctatggctgcagttgctgcaagtgaaaaaaataaatcagttttattaatcgaaaagaaaaaaggtcttggacggaaactaaaaatctcaggtggtggtcgttgcaacgtaactaatagacttccatatgatgaaatcataaaaaatattccgggtaatggtaaattcctatatagccctttttcagtttttgataatctttctattataaatttttttgaaacccgtggagtcaaacttaaagaagaagatcatggtagaatgtttccagtttcaaataaatctcaagatgttgttgatgtgcttattaaccaactcaaagaaaatcatgttgaggttaaggaagaaacaccagttgtcagtgtttcctatgaccataattttaaagttaaaacacaaataggtgaatttgaaagtcacagtttaattattgctacaggcggtacatcagttcctcaaaccggttctactggagatggttacaaatttgcaaaatctctaggtcattctataacagaattattccctactgaagtgcctatcacttcatcagaaacttttatcaaatcaaatcgcttaaaagggttaagtttaaaagatgttaatttatcggtcttaaagaaaaatggtaaaaaaagagtaagtcatcaaatggatatgatattcacacattttggaattagtggtcctgctgctcttagatgtagtcagtttgtttataaagagcagaaaaatcaaaaaaagaaaaatatccatatgcaattagatgtttttcctgaattaaacgtagatcaactatctcaaaaagtgagaaaaatacttaatgcagaaccagataaatatattaaaaatagcttgcgaggattaatagaagagcggtatttattgtttattctcgaacaatctggtattaatgatgaaatgactgcacatcatttatcaaatcaacagtttcaaacttttattaatcttctaaagacttttacctttacagtagatggcacacttccattagacaaagcttttgtgacaggcggcggtatttctttaaaagaaatagaaccaaaaactatgatgtctaaattagtgccaggattatttttatgtggcgaagtcctagatattcatggatacactggaggttataatataacaagcgcattagttacgggtcatgttgctggaatgtttgctggtgaatttaaaatagatcaaaacaaa

SEQ ID NO: 35006 - DNA, 2412 bp, Staphylococcus epidermidis
ttgaattataatcataaggaaattgaaaaaaagtggcagaattactgggaagaaaataagacctttaaaacgaatgataatttaggacaaaagaaattttatgcattagacatgtttccttatccatctggtgctggtttacacgtaggtcatccagaaggatatacggcaacggatatcatctcacgatataaaagaatgcaaggttacaatgtattacatcctatggggtgggatgcttttggtttgccggcagaacaatatgctttagatactggtaatgatcctcgtgaatttacacagaaaaatattcaaactttcaaaagacaaattcaagaattaggatttagttatgattgggatagagaagtgaatactacagatcctgaatattataaatggacgcagtggatatttattcagttgtataataaagggttagcttatgttgatgaagttgctgtcaattggtgtcctgcattaggtactgttttgtcgaatgaagaggttgtcgatggggtatcagaacgtggcggtcatcctgtttatcgtaagcctatgaaacaatgggtactcaaaattacagaatatgctgatagattactagaagatttagatgagttagattggcctgaatcaattaaagacatgcaacgaaactggattggacgttcagaaggtgccaaagtaacatttaaaattgagcaatctgaccaaaatattgaagtgtttacgacacgaccagatacaatctatggtacttctttcttagttttaagcccagaacacccacttgtgaatgaaattacgacaagtgataaagaacaagaagtcaaattgtatcaaaatgaagcatcaaaaaaatctgatttagaacgtacggacttagctaaagaaaaaacaggtgtgtttactggaacatttgcaattaatccgctctctggcgataaattacctatttggatagcagattatgttttatcaacttacggtactggtgcagtaatggctgtgcctggacatgatgagcgagatcatgaatttgctacgaagtttaatttaccaattatcgaagttatagagggtggcgaagttcaaaaatatgcatacacaggtgaaggaaaacacattaattctggagaattagacggtctagaaaatgaagcggcaataagtaaagcgatagaattgcttgaatctaaaggtgctggtgagaaaaaagtcaattataaattacgtgattggttatttagtaggcaacgttattggggagagccaattcctattatacattgggaagatggatcaatgactacagttcctgaagatgaattgcctttactacttcctgaaacagatgaaattaagccatcaggtaccggtgaatctccacttgcaaatatagatgcgttcgtaaacgttatcgatgaaaagacaggtatgaaggggcgccgagaaaccaatacaatgcctcaatgggctggcagttgctggtactatttacgttacattgatccacataacgaaaaaatgatagcagatcctgaaaaattaaagcattggctacctgttgatttatatattggaggcgtggaacatgcagtacttcacttattatatgcaagattctggcataaagtgttatatgacttaggtgttgtaccaacaaaagaaccattccaaaaactatacaatcagggaatgattttaggcgaaggcaatgaaaaaatgagtaagtctaaaggtaatgtgattaatccagatgatattgttgcatcacatggtgctgatacattacgactatatgaaatgtttatgggacctttagatgctgcgatcgcatggagtgaaaaaggtttagatggttctagaagattcttagatcgtgtttggagacttatcattactgatgaaaattcaatcaataaaaaaattgtagattctaacaatcattcacttgataaggtttacaatcaaactgtgaaaaaagtaacagaagattttgatacacttagttttaatactgcaatcagtcaattaatggtgtttattaatgagtgttataaaactaatgaagtttacaaaccttatatcgaagggtttgtaaaaatgttatcgcctattgcaccacacattggtgaagaattatgggatcgattagggcatgaaaataccattacttatcaaccatggccaacatttgatgaaagtttattagtagatgatgaagttgaaatcgtagttcaagtcaatggtaaagttagagcaaaaatcaatattccaaaagatttatctaaagaagaaatgcaagacttagccttgtctaatgataatgttaaaatgagtattgaaggaaaagaagttaaaaaagttattgctgtacctcaaaagctagttaatatagttgctaaa

SEQ ID NO: 35007 - DNA, 1236 bp, Staphylococcus epidermidis
atgcatgtatttaactttttacttttctatccaatttttatgtcaatttactggatagtaggatcgatttactatttttttattaaagaaaaaccctttaatcgatcattgttagtaaaatctgaacatcaacaagttgaaggcatctcctttttattagcttgctacaatgaaagtgaaacagttcaagacacgctttctagtgttttatctctagaatatcctgaaaaagaaattatcattatcaatgatggaagttctgataatactgctgaaatcatctatgacttcaagaaaaatcatgattttaaatttgttgacctcgaagtcaatagaggtaaagctaatgcactcaatgagggaatcaaacaagcatcttacgaatatgttatgtgtttagatgctgacactgtcattgatgacgatgcgcctttttatatgattgaagactttaaaaagaatccaaaattaggcgcagttacaggtaatccacgtattcgtaataaaagttctattttaggaaaaatacagaccattgaatatgcaagtattattggttgtatcaagcgaagtcaatctcttgcaggagcaatcaatactatttcaggtgttttcacactatttaaaaaaagtgcactcaaagatgtaggttattgggatactgacatgattactgaggatattgctgtttcatggaaactccatctttttgattacgaaattaagtacgaaccacgtgctctatgctggatgttagtgcctgaaactataggtggtttatggaaacaaagggttcgatgggctcaaggcgggcatgaagtacttttaagagacttttggccaacaattaaaactaagaaattatcactatatattttaatgtttgaacaaatcgcatcgattacatgggtctacatcgtactatgttatttatcttttttagtaatcacagccaacatcttagattacacatatttaaaatatagtttttcaatctttttcttttcatcctttacgatgacctttatcaatatcatccaatttacagttgccttatttattgacagtcgctacgaaaagaaaaatatagttggcctgatatttttaagttggtatccaacgttatactgggttatcaatgccgcagttgtcattatggcatttcctaaagcattaaaaagaaagaaaggtggctatgctacatggtcaagcccagacagaggcaatatccaacgg

SEQ ID NO: 35008 - DNA, 459 bp, Staphylococcus epidermidis
atgaattttgaaggtaaattagttggtaaggatttaaaaattgcgattgttgttagtagatttaatgattttattactacacgtttacttgaaggggctaaagatacacttattcgtcatgaagtagaagatacaaatattgatgtagcttatgtgcctggcgcattcgaaattccactcgttgcaaaaaaattagctcaaaaaggtgaatatgatgctgtgataacattaggatgtgtgattagaggcgcaacttcacattatgactatgtatgtaatgaagtagctaaaggtgtttctaaagcaaacgacatttcagatactccggtgatttttggagttctaacaactgaaagtattgaacaagcagttgaaagagctggtactaaagctggaaataaaggttcagaagcagcagttagtgcaatcgaaatggctaatctaattaagcaaatcaat

SEQ ID NO: 35009 - DNA, 1179 bp, Staphylococcus epidermidis
atgcaattcgatacaattgagttggctatagaggctttaagaaatggagagagcattattgtagttgacgatgaagatagagaaaatgaaggagatcttgtagctgttacggaatggatggatgataataccattaattttatggctagagagggtcgtggtctgatttgtgcaccaattgataaatctatagctgaaagattaaaactacaatctatggagcaaaataacactgatatttatggcacacattttactgtaagcattgatcattataaaactactacaggaatcagtgcacatgaacgtacacaaacggctagagcactcatagatgaaaatactaatcctgaagattttcatcgtccggggcacttatttccacttatagcaaaagagaatggtgtgttaacacgtaatggtcatactgaagctgccgtagatttggcacggttaacaggagcacaaccagctggagtaatctgcgaaattatgaatgatgatgggacaatggctaagggtgaagatctccagtcatttaaagaacgccaccatttaaaaatgattactataaaaagtttggttgcttttcgtaaggctgttgaacttaatgttaatcttaaggcaaaggtcaagatgccaacagattttggtcattttgatatgtatggatttacaacgaattatagcgatgaagaaatcgttgctattgttaaaggagatttaaaaagcaatcctaatgtacgtatgcattctgcttgtctgactggggatatttttcatagtcaaagatgtgattgcggggcacaacttgaagcgtcaatgaaatatattgacgaacatggtggaatgattatttatttacctcaagaaggtagaggaatagggttaattaataagttgcgcgcatatgagttgatagaaaaaggttatgatacagttactgcaaatcttgctcttggttttgatgaggatttgagagattatcatgttgcagctgaaatattaaagtattttgatataagtgaaattaacttgctcagcaataatcctaaaaaatttgaaggtttagaagattacggcattgagatcgtagatagaattgaacttatcgttccagaaacacaatataaccatagttatatggaaactaaaaaaaataaaatgggacatttaata

SEQ ID NO: 35010 - DNA, 630 bp, Staphylococcus epidermidis
atgtttacaggtatcattgaagaaataggtactgtacaacaagttcgctctgagcaatcagtaagaacgcttgaaattaaagcacaaaacattttaattgatatgcatattggtgattcaataagtgttaacggtgcatgtttaactgtgatagatttcactgactcaagtttttcagttcaagtcatcaaagggactgaaaacaaaacatatcttggaagtgttcaacgtaatacagaagttaatctcgaaagagccatgagtggaagtgggagatttggtggacatttcgtgttaggtcatgttgatgagcttggaacaatttctaaaatcaatgaaactgctaactcaaaaattatttctattaaaacaactaaaaacattttgaatcaaatggtaaagcaaggttctataactgtagacggagttagtcttactgtatttgatttacatgattatacttttgatatacatcttataccagaaacacgtcgatctactattctttcatctaaaaaagtgggcgacaaagtgcacttggagtctgacgtactattcaaatatgttgaaaacatcatgaatcaaaatcaatcgcagttaacagaagaaaagcttagagcatttggtttt

SEQ ID NO: 35011 - DNA, 1041 bp, Staphylococcus epidermidis
ttgagtagatttatggatgatgctattcaattagcaaaaatggtaaatggacaaacaggtgttaatccaccagtaggatccgttgttgttaaaaacggtaggattgtaggtttaggtgcacatttaaaaaagggagataaacatgccgaagtacaggctattgaaatggcaggtttaaatacccaaggtgctaccatatacgtttcattagaaccttgtacacaccatggttcaacgccaccttgtgtggataaaatcattgaagcgggcatatctaaggtcatctatgctgttaaagatactactttagtaagtaagggtgacgagattctgagagaagctggtatagaggttgaatttcaatataatgaaaatgcagctgcattataccgtgacttttttactgctaaaagaaacgaagttccagaagtaactgtaaaggtctcatctagtttagatggtaaacaagcaacagactttaatgaaagtaagtggataacaaacaaagaagttaaagaagatgtttatcaattaagacatgagcatgatgcagttattactgggcgtagaaccattgaagcagacaatccattgtatacaaccagggttcctgatggaaagcatccgattcgagttattctttctaagaaaggtcaactcgattttaatcaacaaatatttaaagatactgcatcggagatatggatttacactgaaaatgaaaaattaaaaacaaataaaagttttattaaaataataaatataagtaattgtgatacaacgacaatattacaagacttatatcaaagaggtattgggaaactgctagtcgaggcaggcccaaatattacatctcaatttctccaatccaaacatctaaatgaactcattttatatatagccccgaaattaattggtggttctggcaaacatcaattttataagactgacgaggtcattgatttgcctgaagcaactcaatttgaaattgttgattccaagttaattaatcaaaatttaaaattgaaattacgaaagaag

SEQ ID NO: 35012 - DNA, 711 bp, Staphylococcus epidermidis
atgacaaaattaaatgttaaagtgtttgcggatggtgcagatattgaagaaatgaaatcagcatataagaatcaactcgttgatggttttacaacgaatccaagcttgatggctaaagcgggtgtaactgattataaagcttttgcagaggaagtggttagtgaaataccagacgcttcaatttcttttgaggtgtttgctgacgatttacctactatggaaaaagaagctgagattttaaaacaatatggtgataatgtatttgtaaaaattcctattgttacaacaactggtgagtctacactaccattaattaaacgtttatcatcgaaacaggtaaggttgaatgtcacagctgtctatactatagagcaagtaaaagcaattactgacgctgtgactgaaggtgtgccaacatatgtgtcagtatttgcaggacgcattgcagatactgggattgatccacttcctttgatgaaagaatcagttaaggtcactcatagtaaagaaggtgttcaattattatgggcaagttgtcgtgaagtatataatgtaattcaagctgatgaaattggagctgatattattacttgcccagctgatgttgtaaaaaaggttaataacaatttaggccgtgatataggagaactttcagtagatacagtcaaaggttttgccaaagacattcaaagttccggtttgtcaatttta

SEQ ID NO: 35013 - DNA, 612 bp, Staphylococcus epidermidis
atgttacgagttgcattagcaaagggtcgtttattaaagagttttatcgaatatttacaacaagttaatcagatagatattgcaactgtacttttaaatagacagcgacagttattgcttacagtcgacaacattgaaatgattttagttaaaggaagcgatgtgcctacttatgtagaacaaggtattgctgatgtaggaatagtgggaagtgatattctgaatggtcaaaaatataatattaataaattactcgatttgccatttggtaaatgtcattttgcgttggcggcaaagccagaaacatctcgctataaaaaagtagcaacaagctatgtacatacagctactcaattctttaataaagaaggtatggatgtagaagtgattcaccttaacggttcagttgaattgtcatgtgtagtggatatggttgatgctattgtagatattgtacaaactggttctacgcttacagctaacgggctcgttgagaaaaagcatatcagtgaaattaacgctaagttaattacaaataaagaatcatattttaagcaatcatctgaaatagagagactaatcaagcagttaggagtgtctattaactatgct

SEQ ID NO: 35014 - DNA, 513 bp, Staphylococcus epidermidis
atgacaaaatttaactttgatcaagttcacagtgatattcagtttaaaattaaacatcttatggtgtcccaagtaaaaggaacatttaagcaattcgatgttcaattagatggagatattaatgatttaacttcactaaaagcaacagctactattattccaagttcaattgacactcaaaatgaggacagagacaaccatttaagatcaaacgatttctttggtacagaagacaacgataaaatgacatttgtaactaaagaaattaacgaaaatcaagtagttggagatttgacaattaaaggtgaaactcatgaagagacatttgatgttgaatttaatggtgtaagtaaaaatccaatgaatggacaacaagtcactggttttatcgttagtggaacaattaaccgcgaaaaatatggtattaattttaaccaagctttagaaactggtggcgtgatgttaggtaaaaacgtaaaatttgaagcatcagcagaatttagcatcgacaat

SEQ ID NO: 35015 - DNA, 960 bp, Staphylococcus epidermidis
atggattatagagtactactttattataaatatgtaactatagatgaccctgaaacttttgcagccgaacatttgaaattttgtaaggaacatcatttaaaaggaagaatactagtttcaacggaaggcattaatggaacattatctggaacaaaagaagatactgataaatatatagagcatatgcatgcagatagtcgttttgctgatttaacttttaaaattgatgaagctgaaagtcatgcgtttaaaaagatgcacgtgcgtccaagacgtgaaattgttgcacttgacttagaagaagatattaatccacgtgaaattaccggtaaatactattctcctaaagaatttaaagccgcactagaagatgaaaatactgttatattagatgctcgaaatgattatgaatacgatttaggacatttccgtggagctattcgtcctgatataacacgattccgtgacttacctgaatgggtgcgtaataataaagaacaactcgacggaaaaaatattgtcacatattgtacaggtggcattcgttgtgaaaaattttctggttggttagtaaaagaaggatttgaaaacgtaggtcagttgcatggtggtattgctacatacggtaaagaccctgaaactaaagggctatattgggatggtaagatgtatgtatttgatgaacgtattagtgtcgatgtgaatcaaattgataaaacagtcatcggcaaagagcattttgatggtacaccttgtgaacgttatattaattgtgcaaaccctgaatgtaataaacaaattcttgtttctgaagaaaatgaagaaaaatatttaggtgcatgttcgtatgattgtgcaaaacatgagcgcaatcgctacgttgcccgtcatcatattagcaatgaagaatggcaacgtcgtttaaataatttcaaagatgtgcctgaacacacacatgca

SEQ ID NO: 35016 - DNA, 510 bp, Staphylococcus epidermidis
atgaaaaggtttgcaaaagcatttgtcgtaagtggtattactttaggtgcagttttaggtttaaacgtaacagagcataatggtgtatctaatgaagcaaaggcacaaacagcacacagttactggtataaatataatggttatactgcatcgggtggcgactttgtacttagcaattcattttatcaaggtttaaaagctggaaacgttacatttaatggtattaaggtaaatcaaaaatatgaatctaagactgctactaaaaaaatatacgatcagacatttcaacaaattaatggaaataaagcaaacaacgtacaatttaaaattgcttccagaactgttactttagatcaagttaaacaaaagtatggaaaaaattataattatcagccgtcattatctaaaaacaaaacaagtaagacagatggcttgtacggttatcaagtcggaaaaggaaacatcgttttccacgttaaagatgggtatgtcacaagtgctacattgtca

SEQ ID NO: 35017 - DNA, 834 bp, Staphylococcus epidermidis
atggagacggttcaattttataacggaagaacaatgccgaaaatagggctcggaacttatagagtaaaagatggcgatgaatgtagagaatctgtaaaatatgctatcgaacaaggttatagaagtatagatacggcaatgatttatggtaacgaagaaacggtaggtcaaggtattaaagaaggattagaatcgactggtttaagtcgtgaagatttatttataacttctaaattatggctaactgattttggacgtcaaaatgtggaagatgcctatcgacaatctgttgcaaaattaggactggattatttagatttatatctgatgcattggccaggtacaaatgaagcggtaatgattgatacttggagaggtatggaagacttgtataaacaaaatcaggtgaaaaatattggtgtgagcaattttactccagaacattttgaagcattgcttgcccaagtttctattaaaccggtcattaaccaagtagaatttcatccttatttaacacaaaatgaattacgaaagtatttagaagctcaaaatattatcatggaatcatggtctccattaatgaattcacaaattctccatgatgaagtcataaatgaagtagctaatgaagtaggaaaaactccagcccaagttgtaataagatggaatattcagcacgatgttgttgttatacctaaatccgtaacaccacatcgcatagaagaaaatttagacgtatggaattttgaattaagcgacaaccaaatggaaagaatcgatcaattaaatcaagataaaagaattggacctaaccctcttgaatttaacggtaag

SEQ ID NO: 35018 - DNA, 1197 bp, Staphylococcus epidermidis
atgacatacaataaacgattatttacctcagaatcagttactgaaggccatcctgataaaattgctgaccaagtttcagatgccattcttgatgaaatattaaaggatgatcccaatgctcgtgtagcatgtgaaacaacagtaacaacaggaatggcacttatttctggagaaatctcaacaactacttatgtagatattcctaaagtggtgagagaaacgattaaagatattggttatactagagcaaaatatggttatgattcacaaacaatggcagtgttaactgcgattgatgaacagtctcctgatattgcacagggtgtagacaaagctcttgagtatcgaaatgatatttctgaagaagaaattgaagcaacaggtgcaggtgaccaaggattaatgtttggatatgcaactgatgaaactgatacgtatatgcctctacctatattcctgtcacatcaacttgctaaacgattggctgatgtacgaaaagatgaaattttagattatcttcgtccagatggaaaagtacaggtgactgttgaatatggtgaagatgacaaacctagacgtattgataccattgtagtttctacacaacatgctgaagatgtagagttagcacaaattgaaaaggacattaaaacgcatgttatttacccaactgtagataaagctttattagatgatgaaactaaattttacattaacccaactggacgtttcgttattggaggacctcaaggagatgctggtttaactggacgtaaaattatagttgatacgtatggtggttatgcccgtcatggtggaggttgttttagtggtaaagatcctactaaagtagatcgttcagcagcttatgcagcaagatatgtagctaaaaatattgttgcagctggtttagctaaacaatgtgaagtacaacttgcatatgcaattggtgtagcagaacccgtttccatttcaattaatacgtttgatactggaaaggtttcagaagcacgtttagttgaagctgtaagaaagcattttgatttaagaccagcaggtatcattaaaatgttagacttaaaacaaccgatatatagacaaacagcagcgtatggtcattttggacgtacagacgtattgttaccatgggaaaaattagataaagtcaatgttttaaaagatgctgttgaaattcaa

SEQ ID NO: 35019 - DNA, 1707 bp, Staphylococcus epidermidis
atgttgtcaattttatacattgtcactatttctattttaaagtggataaattcaatctgtatgttatactatctaaatgtaagggcttacataaattatcgtatggagggattgggtatgtctatagatacatacacagaaacacttaagataaataagctaatagaaaaagctacatcacattttcaactatcatcaacacaattatacaaaaaaattttaaaaaatcatgagggtgagttaactgaactgggggcaataaatgttaaaacaggtaagtacactggtcgttcacctaaagataaatttatagtcactgaaccatcgtataaggataatataaattggggagatatcaatcagcccatggatgaagaaacatttctaaaactttacaataaagtactcgattatttaaatcagaaagaggaactttacatatttagtggatatgcagggagcgataaagagtcacgtcttaaacttaaggtgataaatgaattagcttggcataatttatttgctcgtaacatgtttattcgtccagaatctatagatgaagctcaaaatataaaacccaacttcacaattgtttcagcacctcactttaaagctaatcccaaattagatgggacacatagtgaaacatttgtcattatatcttttaaacataaagtgattttaattggtggcacagaatatgctggtgaaatgaaaaaaggtattttctctgtaatgaactatttgcttccaatacaggatatcatgagtatgcattgttcagctaatgttggagaaaaaggagatgtagcactattctttggattatcaggaactggtaagacgacgctttctgccgatccaaaacgtaagttaattggtgacgatgaacatggttggaataaaaatggcgtttttaatattgagggtgggtgttatgcaaaagcaattcatttatctaaacagaaagagcctcaaatttataatgctattaaatacggaacaatattagaaaacacagttacaaatgatgacggtacggtagattttgatgataacacctatactgaaaacactcgcgccgcctaccctattgactatatagagaatattgttacaccttcaaaggcagcacatccgaatacgattatattcttaaccgctgatgcatttggagttatccctcctatttctaagctaactaaagatcaagcaatgtatcatttcttaagtggattcacgtctaaactagctggaacagaacgtggtgttactgaacctcaaccttcgttttcaacttgctttggtgcaccattcttacctttgagtccaacaaagtacgctgatctacttggaaatttaatcgatattcatgatgtagatgtatatctagtaaatactggatggacaggtggtaaatatggtgtagggcgaagaattagtctacactatactcgtgaaatggtagatcaagcaatatcaggtaaattaaaaaatactaaatatattaaagatgatacatttggcttaaatattccagttcaaattgacagtgtacctacaactattctgaatcctatcaatgcttggaacaataaagataactacaaagcacaagcttacgatttgattcaacgctttaataataattttaaaaaattcggcaaggaagtcgaacatattgccaacaaaggtgcatttaatcaa

SEQ ID NO: 35020 - DNA, 495 bp, Staphylococcus epidermidis
atgaagtcttcagttcgattgttgaatcacatcataaagataatgaacttacaacaatcattaattataagagatgaacagtggaatcaatcttatgaggcatacaattttaatattaatggctacgtatttaaaagtaggttagctaagaaaacaacaaagaaaaaaggatattttttatcgctttgggaaaaagataaaacaaagaaaaatcgagcatttgactatgagtcatttcctgggaaattaattgtacacgtgatggatgattctcaagtaggtcagtttatttttccaaaacatgtactttttcataaaggtattttaagaaatcatgcatctaaagggaaaatggcttttcgagtgtatcctacatgggagaaagatttaaatcgtgtcgctcacaagacacaagagtggcaaaaacaatactttatagatatgtctcaaacaattgatgtaccaagtattaaacgtgcttattttaatgaagat

SEQ ID NO: 35021 - DNA, 1338 bp, Staphylococcus epidermidis
atgaaagcaaataagtatttaatctttattttgggagcacttggtggcttattatatggttatgataatggtgtgatttccggtgctttattatttatacataaagacatacctctcaatagtacaactgagggtatcgttgtgtcttcaatgttaattggcgcaatagtcggtgcgggaagcagtgggccacttgctgataaattaggtcgtcgacgtctagtaatgctcatcgctattgtatttattattggggcactgattcttgctgcatcaaccaatttagcattattaattattggacgtttaattattggtttagcagtaggtggttcgatgtctacggtacctgtttatttaagtgaaatggcaccgacagaatatcgtggctcactaggttcacttaatcaactaatgattacaattggtattttagcagcatatttagtcaactatgcatttgcggatattgagggttggcgttggatgctaggattagcagttgttccatcggttattttacttgtgggtatttattttatgcctgagagtccaagatggttacttgaaaatagaaacgaagaagccgctcgtcaagtgatgaagattacttatgacgatagcgaaattgataaagaacttaaagagatgaaagaaattaacgctatctctgaatctacatggacagtcattaaatcaccatggttaggtagaatattaattgtaggttgtatatttgctattttccaacaatttattggtatcaatgcagtcattttctattcatcttcaatctttgctaaggctggactgggtgaagcggcgtctatattaggttcagttggtataggaactattaatgttcttgtaacaatagttgccatttttgtagtagataagattgatcgtaaaaaactacttgttggtggtaatattggtatgattgcctcattattaattatggcaatcttaatttggacaattggaattgcttcatcagcgtggattattattgtttgtttatcattatttattgtattctttgggatttcttggggacctgttctatgggttatgctacctgaattattcccgatgcgcgcacgtggcgctgctacgggcatttcagcgcttgtgctaaatatcggaacgcttatcgtgtcattgttcttcccaatattaagtgatgcattaagtacagaatgggtatttttaatctttgcattcataggtgttttagcgatgattttcgtaattaaattcttaccagaaacacgcggacgtagtttagaagaaatagaatatgaattacgtgaacgtacaggagcaagaactgaa

SEQ ID NO: 35022 - DNA, 7161 bp, Staphylococcus epidermidis
atgaatattgaagcactatattttcaaaaatatttttattttaaacatttaaatcaatcaagttcagaacacagtgtgacatactgggtaaagttaagtcgcgacattgagttacatagattaatgtatgcattagtagatgtcgttcaaaatcaacctgtgttgcgtacacagtttgtgacagatgattttaatcaactcaagataaatttaagagatttttttccatttattgaaattaaagaagttaatgaaatgtcgcaaagcatagatttagaagcattctttacacgtaatttaaattcctaccatttcaatcaattacctctgtttaattttaagatatatcaatttctagatgacgcctacttacttttagatttccatgctactatttttaatgaaagtcaattaactccatttttacaacaattaaatatcgcctatacccactctttaaaaagtgaatatagtatctcggatttttataattggattaaagaaatgaatcaaaagatggatcaaaatcaagttgtgtgtccatcaaagcacttcaacgtattgaatgcagacggtgataattacgcttacatacctgttaagaatacatgtgaaaagaaaaaaatgtgttctttgcatgcagaactaccatctttagacattgatgtgtggattgtaagtatttacttagcgcatcattttataagtcaatcttctgatgtgacgttaggcatccatttttcgatagataataaaaatactgagaatatgatggttttaaacacagacattgccccacttaatttaagtattagtcaaagtgacgtcgtaaaagatatggtagatgagtgttccgcgctacttgaagagcttcaaatgtgtggtgcgtcttttgttgttcaacctaaagcagtacaaacagatgtagaaacgatgattcatattgaaaaagtacaagaacaatttgagcttaatcatatatgtcatcatatacatcgtctatacaatgaagcatcatcattcgcggatttagagttttatcctcatgtgcaggatggttttgatatagtttataatgacaacgtttatgatgatttaactgtacatacgttagtcaaattaattaatgggatttatatgcaaattacacaaaatccatcattattaattaaagatataaaactcagtgatcgctcagatttagctaaatataatgacatcaataatcaaaacaatgacattaattatagtgaggtcacttataaaaccgtggttgaaagattcgaacgtcaagtgcaccaacatcccgatagtattgcgttgcaatatgaacaacgatcgatgacatatcatcaattaaatcaatgtgcgaatcttttagcatatagattgcgtttaaatcatcagattgaacctaatgatatggtggcattaatagcagaacgcagcttagaaatgattattggaatgttagggatcttgaaagctggtgcaggctacataccaattgatccggattatcctgaagaaagaatgaattatattattgaggacgcaaaacctaaagcggttgtaacatatcgtacatcatttcaatcaggtttacctcaaatggatatagaattgatagttgattcaagagaacatgatattgataacccgagaggcattaattgttcagaagatatcgcttatgtcatctatacatcaggaacgactggtaaacctaaagggacactggtgccacatagaggaattgatcgcttagtacacaatccaaattatgtcgaattgaacgaaaatacaaccgtcttattatcaggaacagtagcttttgatgcagcaacctttgaaatatatggtccattattgaatggtggacggttagtcattacatctaaagatacgttgttaaatcctcaattgttagatcaagctattactgaaaataaagtcaacacgatgtggttaacgtcatctttatttaatcaaattgctagcgaacgtatcgaagcactagaatctttaacttatttgcttattggtggggaagtgttaaatgctaaatgggttcacttattaaattcgcgtgagtgtcatcctcaaataatcaatggttatggaccgacagagaatacaacatttactacaacttttgcgattccacaagagatgccttcacgtatacctattggtttacctattagtggaacgacagtttatgtcatgcaaggtgatcgtatttgtggcgtaggtgttccaggtgaattgtgcattggtggtgcaggtttagcaaaaggttatttaaatcaacctaaacttactgctgaacgttttattcagtcaccttttaataatgaaatgctttatcgaagcggtgatttagttcgccttcaagaagatggctatattgattatattagtcgtatcgataagcaagttaaaatacgtggttttagaatagaattatcagaaattgaaaaagcattagaagctatacgtgatattaataaagctgtagtcatcgttcgagagcaagaccaagataaacaaatagtggcatattatgaagcatcgcaattaaaatcaacaggtcaattaaaagatattttaagtgaaacattacctgaatatatgatacctgtacattttatgaaggtagatcgtatacctatcacgatgaatgggaaattagatgtgcgtgcattacctgaaattaatctaaagaataatagaaattatgtagaaccacgtaacgatattgaacgcactgtttgccgtattttcgaagagattttacatgttgatcaagtaggtgttaaagataatttctttgaactaggtggacactctcttagagcaacattagttgtaaaccgtattgaagaaaggttaaaaaaacgtcttaaagtaggtgatttaatgaaatcgcctactgtagagcaacttggacaacaaattgaagaactgcaaaatgatgtctatgaagtgattcccaaagcaaatgaatcgtatcaatatgatttaagtgcgtctcaaaaaagtatgtatcttttatggaaggtcaatcctaaagacacagtgtataacattccattcttatggagattatcttctgaacttaatgttatgcaattgcaacgtgcattatctaagttgattgaacgtcatgaaatattacgaacacaatatgtaattgatgacaatgaagttaaacaacgtattgcgacacatgtttcgcctgattttgaagaggtaacgacatctctaacgaacgagcaagatattattcaatcatttatggaaccgtttgatttagaacaatcaagtcagatgcgagttaaatatatacatggaccacaacaagattatttatttatggatactcatcatagtattaatgatggtatgagtaacacgattttactatctgatttgaacgctttataccaagataaatcattacctgaacttaagcttcagtataaagattatagtgagtggatggtgcacagagacttatctaaacaacgtcacttttggttacaacaatttgaaaatcaggttccaatattaaatatgcctacggattatcctagaccaagtattaaaacaaccaacggtaatatgttgacatttcattacaatcgtcaaatcaaacagcaattgaaatcttatgtagaacaacatcaagtgacagactttatgttctttgctagtgcaatcatggtattattgcacaaatatacacgtcaggacgatatcgctattggtagtgtaatcagtgcgcgtactcatcgcgatactgaaaatatgttaggtatgtttgctaatacacttgtatatcgtggtcgacctcatgatcaaaagacatgggatcaattgatggctgagatgaaagaaatgtgtctaggggcatatgaacatcaagaatatccttttgaaagcttagtcaatgatcttgttgatgaaagagatgcttcacataatccgttatttgatgtgatgctcgtacttcaaaataatgaaacaaatcatgcgaattttggacatagtcaattgacacatattccacctcagtcaacaacagctaaatttgatttgtcatttattattgaagaagatcaagatgactatgtcatcaatattgaatataatacagatttatataaacaagagaccattcatcatattgctgaacaacttcaaatgattattaaacatgtaatatctaccgaaaacctaaaaattcaagatattgatgaaaatgatgacttattaatttggttggacaagcatgtgaatgattgttctttagacttgccaaaaaataagtcaatacagcaacttttacatgatgtcatgaaagcgaaagcagatgatgtagcacttaaaatgaatggacaatcgatgacgtatcaagaacttgatgattattctaatagtatggctcaaacattgatacaaaatggaattcaaaaaggggaacgtgtagcccttttaactgaacgaagttttgaaatggttgctagtatgattgctgtattaaaagttggaggttcttatgtacctattgacgtcacttatcccaataaacgcattgaatttattattgaagacgctgaagtcgcagcagtgctcacatatggaaaaacaatatcctcacatataccagtaattaaaattgaagatattgataacactgaaaataataaaaggttaaatatagaatatgcagggaatttggaagatgatatgtatcatatttatacatctggaacaacaggaaagcctaaagcagtatcagtgaaacaacgtaatatattaaatttagtatgtgcttggacaaaaagactcaatttatccgatgatgaagtttatctgcagtacgctaattatgtgttcgatgcttcagcaactgatttctactgtagtttattaaatggatatccgcttgtcattgcaacatcagttgagcggaccaatacagatttattagaaaaggtaatttcacaagaaaatatcaccatcgcatctattccactacaggtatataatgtgatgcatcatttctatattcctaaagtgattacaggaggtgcgacaagtactccagcatttgttcaacatatttctaagcattgtgatatgtacgttaatgcctatgggccttctgaaaatacagttatcacatcttgttggatatacgaaaaaggtgacgccataccatcgactattccgattgggaaaccgttagctaatgttgatatttttattatgtcaggcggtaaactatgtggcgttggtattccaggtgaattatgtattgcaggagaaagtttaacttcaggatatttaaacagacccgaactttctgctgaaaaatttataaataatccttttgggccaggacaactttatcgaagtggtgatttagcacgattgatgccagatgggcaaattgaatttcttggtagaatagacaagcaagttaaagtacatggctatcgcattgaactaggtgaaattgaaaatatcattaattcagtagatactgttacagatagcgttgttattttagctaaacagggtgagcgtgaagtgctgcatgcttattatgttggaagtcaagaagacgaaaatcatatttcacaacatttaaatcaatatttgcctaaatacatgattcctaagacattaacagctattagcgaaattccattaacaggaaatgataaggtggatgagtcaagattacctgtacctaatgtacacaaaaataaatttgttgcaccacgtaataatatcgaacgagaaatagcacaaatcgttagcggagtgttggacgtatcgtctatgagtatagatgatgacttctttgaaatgggtggtacatcactagatgctatggtggtagtatcaaaactaaaatcaaatggcatacacattacaatgcaagatgtatatcaatttaaaactgttcgttatatagctaatcacacagaaaaacgccaagcactaccagaagtagtattaccagatcatctaccacaattacaatctttggttgaaagacgataccaactaaaatcacaacacctaacgcaatcatctctaggtcatgtattgctaactggtgcaacagggttcctaggcgcatatttaattgatgaaatgcaagatgatgctgatcaaattacatgtattgtcagaggtcatgatatcaatcaagctaaaactaacttggaaaataatttaaattgttattttgatacggctcatgtggataaattaatgaagcacattgatattattttagcggatttatcagaacttgaccatctcattatcgattcagccattgatacaattattcatgctggagctcgtacagatcactttggcgatgatgaaacatttttcgatgtcaatgtaagaagtacacaagcattaattgatttagctaaggataaaaaagcgaaattaatctatatatcaacgataagtgtgggtacggtatttgaagtacatcaagacgatattacattttctgaaaaagatttatataaaggccagttatttacatcaccatacactaaaagtaagttttatagcgagattaaagtgttagaagcggttaatgaaggtttagcagctcagattataagattaggaaatctgacaagtgcttctactggaccattaaatatgaaaaatttaacaactaatcgttttagtattgtcatgcatgatttattaaaaatgccgtttataggagaaagtatatcgaaagctaaagttgaattttcatttatcgatgtcacagcgcgccatattattaaattggcaagatccaatgcaatacctattatttatcatgtatacgcaccatgttcaataactatgaaacaagtaattgacaatgccaaagggtcagaaatgactgtagtaagtgatagtgagtttgaacagaaattacatgaattaggtatgcatgaattgattggtcttaatagtaatggagataatcaaatttcaggtgtgacagattcaaatatgactcaaacagtaatgaaagaattacaaggtgagtggccacatctttcttaccaatggttgcaacaatggtaccacttattgtttgaaaaatttgatgccaac

SEQ ID NO: 35023 - DNA, 552 bp, Staphylococcus epidermidis
atgacagacattataattgtacactcaaaacatggtaattctaaaaatcattggtatgaatggttaaggcataatttaactttggaagggtatgatgtttctttattcaatcttgaagcaaatgatcatgctcaaattgatgagtgggttaatgaaatgaaacaacaactacatatccgtaaaaaagatacatattttgtgacccacggatttggctcaatcgctgctttaaaatttcttgaagaaacgcatcatcacattgaaggtttctttagtatcgcaggatttaaagaagatgcacaagatatagacgaagatgtagatttaaaaggggtaaccatcgattacgataaaataaaagagcaagtagataaattttatggactcacgtctaaagatgatcaatatgtttcatacaaggaaacacaaaggctgatgaattcacttaatggacatacacgtgtagtagaagatgggggacactttttagaagaggaaggttttgtaacatttacttctttaattaacagaatgcaaggatatatgactagg

SEQ ID NO: 35024 - DNA, 1239 bp, Staphylococcus epidermidis
gtgaagcaattaagtacaactttaaaagtccgattaatatgcgatttttttcaaaatattatagtcacggcatttttaccatttattgcgttgtatttaacagatatggtcaatcaacatttttcagggctttttttatttgggcttgtaatgataaattttccaatttctttgatttcaggtcatattattgaacgtttacctaaaaagacgttaacacttagttatcaatttatattaagtttaatgctcgtaattatggcgatttcaatatcacaacatacttttaagatcattttattttgtatcgcttacgcaatatttagtatcacaataggcatgcagcaacctataatggacacgattattatggatgcgattacgcctgaagttgagcaatatatttataagataagttattggctgacgaatattgctgtagcctttggtgcgctcataggtggattgatgtatggggcacataaatctatgttgtttttcatcgcttttgtcatttacattatggtttttatagcacttatcgtatggttgcctaaagatttaaatattgttactcagtcgcacacacatcatgctaatgagaaacaattctccatgggtcaaatattaaaaagttataaaccagcatttaaagatacaacatatctacttctaattataggatttagtattttaacaatgggtgagttatctgcatcatcgtacatttcagtgcgtttaaaacaagagtttgatccgatgatattgttttcgttacatatcaatggcgttaaaatgtattcacttctattaatgacgaatacaatcattgttataatttttacctattttatttcaaaaattgttatgagaatgaatgttaaaacagcattattgattggaattattttttatgtcattggatattcgaacctcacttatcttaatgattttacgttacttatcatatttatgattatagcgacgataggtgaaatggtatattctccaattcttgaagaaaatcgttttaaaatggttccttctcataaaagagggacatattcagcagtgcatgctttaggatttaacctagctgaattacttgcaagatttggaattatattaggagtgtttttaacttcaatggagatggggatctatatgtttgttttattattgctaggtggcatgtcactttacattgcagtgagtcgttttaataatacaaattcacaa

SEQ ID NO: 35025 - DNA, 963 bp, Staphylococcus epidermidis
atgacattaaacctagctcaacgtgtgttaaatcaagagtcattaacaaaagatgaagcaatatctattttcgaaaatgctgaaattgatacatttgatttattaaatgaagcctacacagtgagaaaacattactatggtaaaaaagttaagcttaatatgatattaaatgctaaaagtggtatctgtgcagaagattgtgggtactgtgggcaatctgtaaaaatgaaagaaaagcaacgttatgcacttgttgaacaggaccaaattaaagaaggcgctcaagtggcaactgaaaatcaaatcggtacatactgtattgttatgagtggtagaggtcctagtaacagagaagtcgatcatatttgcgaaacagtagaagatattaaaaagatacacccacaactaaagatttgtgcgtgcttaggattaacgaaagaagaacaggctaaaaaattaaaggctgctggtgtcgatcgttataatcataatttaaatacgagtgagcgttatcacgatgaagtagtaactacacatacatatgaggatagagtgaatacggttgaaatgatgaaagataataatatttctccttgttcaggtgtgatatgtggtatgggagagtcgaatgaggacattattgatatggcatttgctttaagagccatcgatgctgatagcattcctattaattttttacatcctattaaaggaactaaatttggtggattagatttattgtcaccaatgaaatgtttaagaattatagcgatgtttaggttaatcaatccaacaaaagaaattcgaattgcaggtggacgggaggtaaatctacgttcattacaaccactcgcattgaaagcggctaattcaatttttgtaggagattacttaattacaggcggtcaaccgaatgaggaagattatcgcatgattgaagatttagggtttgaaatcgacagt

SEQ ID NO: 35026 - DNA, 426 bp, Staphylococcus epidermidis
atggaaataacaaatgttaatcatatttgtttttcagtgagtgatttaaatacctctatacaattttataaagatattttacatggtgacttattagtatcaggtagaacgacagcatatttaactattggtcatacttggattgcactgaatcaagaaaaaaatataccaaggaatgaaataagtcattcctatacgcacgttgctttctccatagatgaagaagattttcaacagtggattcaatggcttaaagagaatcaagtaaatattttaaaagggcgaccaagagacattaaagacaaaaaatcgatatattttacagatctggatgggcataaaattgaattacatactggaacattaaaagatagaatggaatattataaatgtgagaagacgcatatgcaattttacgatgagttt

SEQ ID NO: 35027 - DNA, 939 bp, Staphylococcus epidermidis
atgagaaatgtagaaaaattaaatcccggcgactcagtggatcattttttcttgatccatcgtgcaactcaaggtgttacagctcagggtaaagattacatgacactatttctgcaagataaaagtggtgatattgaagctaaattatggactgctacgaaagatgatatgcaaactttaaaaccagaaacaatagttcatgtcaaaggtgatatcatcaattatcgtggacgcaaacagatgaaaatacatcaaatacgtcttgcacaagctgaagacaaagtgtcaactaaagactttgttgacggtgcgccaatgtcacctacagaaatacaagaggaattatcgcattttatgttagatattgaaaatgctaacttacaacgcattactagacatttaattaaaaagtatcaagatcgttttttcacttatccagcagctagttctcatcatcataatttcgcgagtggattgagttatcatgttttaacaatgttgcgtatagcaaaatctgtatgtgatatttatcctctgttgaatagaagtctattatatagtgctatcattttgcatgatttaggtaaagtaagagaattgagtggtccagtggcgacgacctatactgttgaaggaaatttacttggtcatatctctatagcaagtgatgaagttgctgaaacagccaaagagttaggcattgatggagaagaggttatgttacttagacatatgattttagcgcatcatggtaaaatggagtttggatcgcctaaattgcctcatttaaaggaagctgaaatactttactttatagataatattgatgctaaaatgaacatgtttgataaagctttcaaaaaaacagaaaaaggtcaatttacagaaagaatttttggtttagaaaatagacaattttataatccaacaacacttgat

SEQ ID NO: 35028 - DNA, 999 bp, Staphylococcus epidermidis
atgaaaaatttacgtaacagaagctttttaactttattagacttttcacgacaagaggtagaatttttattaacactctccgaagatttgaagcgtgccaaatatatcggcactgaaaagcctatgctaaaaaataaaaatatcgcgcttctttttgaaaaagattccactagaacacgttgcgcattcgaagttgccgcacatgatcaaggtgcacacgtcacttatcttggacctacaggttctcaaatgggtaaaaaagaaactgctaaagatacagcacgtgtacttggtggtatgtatgatggtattgagtaccgaggtttctctcaacgtaccgtagaaacattagcgcaatattcaggtgttccggtatggaatggattaaccgatgaagatcaccctacacaagtgcttgctgactttttaactgctaaagaagtattgaaaaaagagtatgctgatatcaactttacttatgttggcgatggacgtaacaatgttgctaacgcattaatgcaaggtgctgccattatgggtatgaatttccatcttgtttgtcctaaagaactcaatccgacagaagaattattaaatcgttgcgaacgtattgcgacggaaaatggcggtaacattttaataacagatgatattgataaaggcgtgaaagattctgatgttatttatacagatgtttgggtatcaatgggcgaacctgatgaagtatggcaagaacgccttaaacttttaaaaccatatcaagttaaccaagcactattagaaaaaacaggcaatccaaatgttatttttgaacattgtttaccttctttccacaatgcagaaactaaaattggtcaacaaatttatgaaaaatatggcattagtgaaatggaagtcactgatgatgtcttcgaaagcaaagcttctgtagtattccaagaagctgagaatagaatgcatacaattaaagcggtcatggtagcaactttaggagaattc

SEQ ID NO: 35029 - DNA, 1194 bp, Staphylococcus epidermidis
atggttaaatttatacactgtgctgatttgcatttggacagtcctttcaaatctaaaagttatcttagtccaaatatttttgaagatgtccaaaagagtgcatatgaaagttttaaaaacatagtcgacttagctttaaaacaggaagtcgattttattattatagcaggtgatttatttgatagtgagaatcgtacattgcgtgctgaagtctttttaaatgaacaatttgaaagattaagaaaagaacaaatatttgtttatatttgccatggcaaccacgatcctcttacttctaaaataacaagtcagtggcctaataacgtatccgtattttcaaatcaagtagagacatatcaagctatcactaaatcaggagaaacaatttatattcatggattcagctatcaaaatgatgcgagttatgaaaataaaatagacgcatacccatcaagtcaaggtcagaagggcatacatattggtgtattacatggaacttatagtaaatcttcggtgaaagaccgttatactgaatttaggttagaagacttaaatcaacgtttataccactactgggcattaggacatatacaccaacgtgaacagttaagtgacatgccagtcattaactatccaggtaatatccaaggaagacatttcaatgaattaggagaaaaaggttgtctattggtcgaaggtgatcatcttaaactcactacacaattttatcctactcaatttattaaatttgaagaagctacaattgaaactgatcatacatctaaacaaggactttatgatgttattcaatcttttaaagataaagtaagaactgaagggaaatcattttatagattgaacgtacgcattaatagtgaagacattattgcaccacaagatttaattcaattaaaagaaatgattactgagttcgaagaaaacgaaaatcaatttgtttttattgaagatttaaatcttcaatatgttcaaaatgacgaaatgccaatagttaaagagttttcaccagaattacttgatgatgcgtcactttttgattcggcaatgactgatttatatcttaatccaagggcttctaagtttttagatgactataatgaatttgataaagttgagttagtcaatcatgcagaaagacttttaaaggatgaaatgagaggtgaacaaaatgataat

SEQ ID NO: 35030 - DNA, 930 bp, Staphylococcus epidermidis
atggctaaaattgtagtagctttaggtggaaacgctttaggaaaatcaccacaagaacaacttgaattagtaaaaaatacagctaaatccctagtaggattaattactaaaggtcacgaaattgtgattagtcacggtaatggaccacaagtaggaagtattaaccttggtctgaattatgcagctgaacacgatcaaggtcctgcttttccatttgctgaatgtggcgctatgagtcaagcctacatcggctatcaacttcaagaaagtttacaaaatgaacttcattcaatgggcatagataagcaagttgtcacactagttacccaagtagaagttgatgaaggcgatccagcttttaatagtccaagtaaacccatcggtctgttctacactaaagaagaagcaaatcgtattcaacaggaaaaaggttatcaatttgtagaagatgctggtcgaggttaccgtcgcgttgtaccatcaccacaaccaatatctattatcgaactggaaagtattaaaactctagtagaaaatgacacactcgtcatcgctgcaggtggaggtggtataccagtcattcgcgaacagcatgatagctttaaaggtatagatgccgtcatcgataaagacaaaacaagtgcattattaggtgctgatattcactgtgatcaactcattattttaacagcgattgattatgtttatatcaactatcatactgaccaacaacaagcacttaaaacaacaaatatagatacgcttaaaacatatattgaagaagaacaatttgccaaaggcagcatgctacctaaaatcgaatctgccatctcctttattgaaaataatcctaacggtagcgtgctcatcacatcattaaatcaattagatgcagcactagaaggtaaaattggcacactcattacaaag

SEQ ID NO: 35031 - DNA, 1563 bp, Staphylococcus epidermidis
atgaaaccgttggaacaagcgatcaatgataataaaaagaaaaaacgttttaactttagaatgccaggtgcatttatgattctctttatcctaacagttgtcgcagttatagcaacttggataatccccgcgggtgcatactcaaaactttcatatgaaccttcatcccaagaattaaaaattgtcaatcctcatcatcaagtaaaaaaagttcctggaacacaaaaggagcttgatcgattaggagttaaaatcaaaatagaacaatttaaatctggtgcaattaataaacccgtttcaattcctaatacttacgaacgtctaaaacaacatccagctggtcttgatcaaattaccagtagcatggttaaaggaaccatcgaagccgttgatattatggtctttatacttgttctaggtggattgattggcgttgttcaagcgagtgggtcctttgaatcaggattgttagcacttactcaaaaaacgaaaggccacgaatttatgcttatcgcctttgtctccatacttatgattataggcggaacgctatgtggtattgaagaggaagctgtagcgttctatcctgttctcgttccaatatttattgcgctcggatatgattctattgtctcagtcggtgcaattttcttagcaagctctgtgggcagtacattctcaacaatcaacccattctcagtcgtcattgcttctaatgcagcaggaacaacttttactgatggtctttattggagaataggcgcttgtatcatcggtgccatatttgttattagttatttattctggtattgtaaaaaaattaaaaaagatcctaaatcctcttattcttacgaagacaaagcagcatttgaaaaacaatggtctgtgctccatgatgacggttcttctgagtttacattacgtaaaaagattattcttacgcttttcgtcttaccgttccctattatggtttggggcgtcatgacacaaggatggtggttcccagtcatggcatctgcattcttaatctttaccattgtcatcatgtttattgctggaacaggacaatatggtttaggtgaaaaaggtactgtagatgcattcgttaatggcgcttcaagtttagtaggtgtatctttaatcattggtttagctcgaggaattaacttagtattgaataaaggaatgatttctgacacaatcttgcacttttcatcatctatcgtgcaacatatgagtgggcctttatttatcattgttctgctctttatctttttctgtttaggatttatcgtgccatcatcatcaggattagcagtactatctatgcctatctttgcgccattagctgatacggtaggtataccaagatttgttattgttacaacatatcaattcggtcagtatgcaatgttgttcttagcgcctactggacttgtaatggcaacacttcaaatgttaaacatgcgttactcacactggttacgtttcgtatggcctgttgtcgcgtttgttttaatatttggtggaggcttactaattacacaagttttaatatactca

SEQ ID NO: 35032 - DNA, 2946 bp, Staphylococcus epidermidis
gtgaacaaaatgataattaaatcattagaaatatacggatatggccaatttgttcaacgtaaaattgaatttaatcgtcaatttactgagatatttggtgagaatgaagctggtaaatctactattcaagcatttattcactctattttgttcggatttcctactaaaaagtccaaagaaccacgtttagaaccaagattaggtaatcaatatggtgggaaattatcactcattttcgacgatggcattgaagcagaggttgagagaatcaagggaagtgctcatggagatgtcaaaatttatcttaaagatggtactattcgagatgaagtttggctaaataaaaaacttaattacatttcaaagaaaacatatcaaggtatattctcttttgatgttttaggtcttcaagatattcataaaaatctagatgaagagcaactacaagattatttattagaagcaggtgcacttggatcaactgaatttacaagtatgagagatagaattggacaaaagaaagaagaattatataaaaaatctggaaaaaatccaattattaatcaacaaattgagcaacttaaacaattagaaaatcaaattcgaaatgaagaaagtaaacttgatacatatcatcgacttgtagacgataaagataaatcatcaagaagactagaaaatttgaagcaaaatttaaatcaattatcaaaaatgcatgagcaaaaacaaaaagaggttgctctacacgatcaaacacaagaatggaaaaggttagaacagtcgcttaatatagagcctataaattttcctgaaaaagggatagatagatacgaaactgctaaatctcacaaacaatcacttgaacgagataaaagtttgcgagaagaaagattaagcatattaaataaagaggcggagtccatcaatccagtagaccaaaagtatattgattcgtttaatagcctttatcaacaagagactgaaattaaacaaaaagaatttgagttacgttcaatagagaaagatattgctgataagcaacgtgaactagaagctcttcaatctaatataggttggcaagaagtgttttacgacacagacagtactgaagcgatgaaaagtcatatgagtgatttagtattaggcaagcaagaacaaattgcttatatcaatcagttagaacgtggacttgaagaaaataaaattgaaagaaactctaattctaatgagattaatcaagttgagaatgagcttgttcctgacgaaacctttgaaaagaaaaaggaatatacacaacaagttttagaattacatgaaaaagagaacttgtatgaaaagttaaaagaaacttttgaagaagaacaaacacaaaaaaataaaagacaaaagtttttgagaataggatttattgttttgactattctatcagcagcactttctattttttcttttttcactgcaaatcttatttttggtataatatttgctctattaactgtgatttttgtagtaggtatcattttttctagatctaaagcagtagattatagcacagcaataagtcaggaaattaatgatttagaaaaccaactcacgcaacttgaaaaagaatataatcttgacttcgatttagaatatcaacaacaagttcgtgaacaatggcgtcatgctaaaaaaaataaaaaaatacttgaagaaaaacatcaatatatcaatcaatcattaacgactgcaaatgagcgattagatagtttaaaacatagcattattgaaataaaaaaagagttacgtttatcagaaaaactttctgatgaattagtggttgaaagtatctcaaccattggtcaaattaaagcgcatgataaatacattattgatttaaatcaacaacgcaataatctgctaaaagatatcaatcacttttatgaacgtgcacaatctgtaactgaaccacatttaaaactatttaatcagatgtctttcttccatgatgtgaaacagtggttaaaaaatgcagaagaacaaaatgaggcttggaataaaaatcaaactgaaacgcaattactcaataatgaattaaagcaattgaagtcacgcttaagtgaaacgaatcaaatgattaagcaattatttgattatgttgatgtagataatgaagaagattattatacacatcatcatcattttgaaacatatcaaagtgatttaaatcgatttaatgatttaaatcaatatttagaaaatcaaaattacacttatgaaatgagttcgcaattaagtgagaaaactactgctcaactagaagaagaagatcatagattggctaaacaagttgacgattacaatgatcaatttttagaaatgcaagcagaagttagtgatttaaatgctcagattaatcatatggaaacagatagaactttagcacaattaagacatgaatattatagcttaaaaaatagacttaacgatattgctaaggattgggcaagcttaagttatatgcaagctttagtggaagaacatatcaagcaaataaaagataagcgtctaccacaagtgattaatgaagctgtatctatttttaaaaatttaacaaatggtacttacaatatgattcattatactgaaaatcataaaatacatgtaaagcattctaacggacaagtatttgagccagttgagttgagtcaatctacaaaagaattattatatgtggctttacgtattagtcttattaaagtattaaaaccgtattatccattcccagtgattgtagatgatgcatttgttcattttgataaatatcgtaaagaacgtatgttgaaatatttgagagaactatcagaacattatcaaatactttattttacttgtacaaaagatcatgtcataccggctaaagaagtattaactttaaataaattacaggaaggcgggaaaaaa

SEQ ID NO: 35033 - DNA, 123 bp, Staphylococcus epidermidis
ttgaaattagatataagttattcaagtaagtctattacttttaaaacttttccatcttttaactacggaatttttggtgatcattttacaccttttacagctactgtcagaagtactgttttt

SEQ ID NO: 35034 - DNA, 534 bp, Staphylococcus epidermidis
atgaagatttttaaattgacgtcattgacactagctgctttaacgttagcctttccgttttcacatgtcgcacaagcacatacttacttagaaaagcatcaccaaacaaacgaaaccaaacaatctcatagcttttctttagaaggtgaggctggtgaaaatccaacatttttaactcaacctcaatttattaattccctagataatggtcatttaaatattaatggttatcagattcagcaagatgatactaatgatattgaatacaaaaaggtttatgatcaagaaattagagctacaagcaatcatacagcgataagtgtacgtttcagtattaataatcaatcactatcacttgaaagtatgaaagatgcatacccaaatgagagattgaatcatattccacatacaagcaatgattcacaatatccagaagacggtatatatgtctatcacggtaaaatgattaaattacaatacaaagtgacacatggatttgttacgagcgtgacgataggtgaaggtgtagacgaa

SEQ ID NO: 35035 - DNA, 144 bp, Staphylococcus epidermidis
atgaaaggaaaagagccttctaacaaatattttgataaaatgaagccttacttaatcactttgttatatttagctatttttatagcgctgtatttaatttatggtagtggtgatacacaaaacaacttcatttataatgaattc

SEQ ID NO: 35036 - DNA, 615 bp, Staphylococcus epidermidis
atggaagaaaaatttaataatagccaagaagaaagacagtttcaacaatttcaagaataccaaaaacgtcaagaagaagagaaaaagaaaaaacgcaaaaagggttggcttttcggttgtggtggttgtttagttttattaatattaattattgttggtgtaactgcgtgtactggaacttttgtgaatgaagttgataaagaaataaatgaagaaggtaaacttgacaaagacaaagatacaaaaatcaaatctataggtgagactactgaaatagatggagtgtcattcacattagataatgcttcttatactgaagaaagaaacgaatttgcagatgttcaagccgataaagtcataaaggtagatatgactgttaaaaacaattctaaagaagaaattccagtaggtggagatataaaagtatacgtagatggaaaacaagctaaatcttatcctattgataatcaattaatagattcattatcaccaaacagagaaattagtggatctgaaggttttgcaataaatggtaatccaaaaaaaatcgaattagaatttcaacctttaacatcattctctaacaaacgttatatttataatattaaaccagaa

SEQ ID NO: 35037 - DNA, 906 bp, Staphylococcus epidermidis
atgtctattcccattataattgatactgatcctggtatagatgatgctacagcaattagtatcgcactttcacaccctcaatttgacgttaaaatgatatcaactgtgaatggtaatgtaggtattgagaaaacgacagcaaatgcattaaagctaaaaaggttttttaatagttctgttcctgtacatagaggggcatcccaaccattgattaatgacatctttgaagctacatcaattcatggtgagtctggtatggatggttacgagtttccacaaataaatcaagatgatttaacatcaattcatgcagttgaagcaatgagaaatctattagtaaatactcaagaacctttaaccttgattgccataggtccactaacaaatatcgctattcttttaactagttatcccgaagttcaaccatttattaaggaaattgttttaatgggtggtagtaccggtagaggtaatgtaacgcctttagctgaatttaatatatattgtgatccagaagctgctcaaattgtatttaactctggattacctttgactatgattggtcttgatttggctcgtgaagcattgtttactcaccattttgtaaaagacttcaaagatacaaatgcaacttcaaacatgttatataatttatttcagcactataagagtgaagattttgaaataggatttaaattatacgatgtattcactatattatatttgttggatccagaagcctttaatgtcaaggaggcgtatactcaaatagaattaaatggcaactttacaaggggagccacagtggtagactttaatatggagcatcccaattgtacagttgttttaagtcctgttgaaagacagtatgaggatttattcttaaacgccctttcttattgtaaa

SEQ ID NO: 35038 - DNA, 342 bp, Staphylococcus epidermidis
atgtctgaaaactggtgtacaccaaaaccaaaactaacggaacgtcccttattagatacagagaacgctgaaagtttaagtgagacctttaaaatactttctaatgggacacggcttagaatactgcataccttgcttcgaactccaaatgcatctgttagcgaggtggcagaacagcttgaaatgaaacctcaagccatttctaaccaacttcaacgattggttgataaaggcatcgtttgcagtattcgtgaagccaattttattcggtaccgaattgttgataattgcgtcgttagtctattagatcgaggttggtgtttaaccgaagatttacctaaa

SEQ ID NO: 35039 - DNA, 1263 bp, Staphylococcus epidermidis
atggataaaatagtaataaatggtggaaatcgtttaacaggtgaagttaatgttgaaggagctaaaaatgctgtattacctgtacttacagcgtcattacttgcttctgaaggacacagtaaactagttaatgtcccagagttaagcgatgttgaaacaatcaataatgtattatctacactcaatgcaaatgtagagtatgataaagataaaaatgcagttaaagttgatgcaactaaaactttaaatgaagaagccccttatgaatatgtgagtaaaatgcgagcaagcatcttggttatgggaccactacttgctcgactagggcatgctattgttgctttgccaggaggatgtgcgattggaacacgtcctatagagcagcacattaaaggatttgaagctttaggtgcagacattcatttagaaaatggaaatatttatgcaaatgctaaagatggattaaagggagcacatattcatttagattttccgagtgtaggtgcaactcaaaatattattatggcagcgtccttggcatcaggaaaatctatcattgagaatgtcgctaaagaacctgaaattgttgatttagctaattatattaatgaaatgggcggtaaaattacaggtgcaggtactgataccattacgatacatggtgttgaaaaactttacggtgttgaacatgcaattataccagatagaattgaagctggaacgttacttatcgcaggtgcaataactcgtggtgacatatttgtacgtggtgcaattaaagaacatatggctagtttaatatataagcttgaagagatgggggtagatcttgaatattatgaagaaggtataagagttacagcaaatggagatttaaatccagtagatgtaaaaactttaccacacccaggtttcccaactgatatgcaatctcaaatgatggctttattattaacagcaaatggacacaaagtgattactgagactgtttttgaaaatagatttatgcacgttgcagaatttagaagaatgaatgcgaatataagtgttgaaggaagaagtgctaaaattgaaggaaaaagccatttacaaggtgctcaagttaaagcaacagatttaagagctgctgcagccttaatcttagctggtttagttgcagagggaactacgcaagtgactgagttaaagcatctagatagaggatacgtcaatttacatggaaaactaaaaagtctaggtgcaaacatagaacgtgtaaatcga

SEQ ID NO: 35040 - DNA, 1773 bp, Staphylococcus epidermidis
atgtattatacaaatagtaattatgaagcgtttgctcggcctaaaaaacctgaaaatgttgataataaatcagcctatttgataggggctggattagcttctttagctgcagcatgttttttaattagagatggacaaatgaaaggcgagaatatccatattttagaagagttagatatctcaggaggaagtttagatggcatcaatatggagcatcatggctatgtagtacgtggtggcagagaaatggaaaatcattttgaatgcttatgggatttattcagaagtataccatcacttgagcaaactaatgcttctgtgttagacgagttttattggttaaataaagaagaccctaattattctaaatgtagagcgattgaaagtggaggtaagcgtattgatactgatggtgattttacattaacaaaaaaagcaattaaagaaattttaaatttatgtttgatgaaagaagaagatttagacgatgttaaaatcactgatgtcttttcaagagactttttaaattctaatttttggctttattggaaaacaatgtttgcattcgagccatggcattcagcgatggagatgcgtagatatcttatgcgttttgtgcatcatattggtggtttagcagattttagtgcattaaaatttactaagtataatcaatatgaatctttagtattaccgatgatagaatatctaaaatcacatagcgtgaactttgaatttggagtacaagtgaataatattttagttgatgcaacaccatctactaaaattgctagagaaatcattttaactagagatgataaagaagaatctatcccgttgacagttaatgacttggtatttgttactaatggaagtattaccgaaagttcaacctatggtgataatgaccaccctgctcctataacacattctttaggtggtagttggacattatggaaaaacttagctaatcaaagtcctgaattcggaagacctgagaaattctgtgatcacattccagctaaaagttggttcgtatcagcaacggcaacaacagataataaaaaaataatctcatatatcgaacaattatgtaaaagagatgttttatcaggtcggacagtcacaggcggtatcatttctgtcgctaattcgagttggcaacttagttttacagtgaaccgtcagcaacaatttaagaaacaacctaaaaatcaagttagtgtatggatttacgcattatactctgacgaaaaaggagacttcattaaaaaaccaatcacggaatgtactggtagtgaaatctgtcaagaatggttatatcatatgggtgttccacaagaggaaattgttgaattagctcaatcagaatgtaacacgattcctgtttatatgccatatgtaactgcatatttcatgcctagagcatacaaagatcgaccgttagtagtaccgaatggctctaaaaatttagcatttattggaaactttgcagaaacagcacgggatactgtattcactacagaatattcagttagaacagctatggaagctgtttatcaattattggatgttgatagaggtgtacctgaagtttatgcctctgaatttgatgcacgcgtactgatggatgcattttatgaattaaatgatcgtaaatctttacatgaacttgttaataaaaactttattaaaagatcagtattaaatacagtgctgaagaaaatacgtggtactttcattgaagaattgttacgtaaacataaattacta

SEQ ID NO: 35041 - DNA, 1299 bp, Staphylococcus epidermidis
atgaaacaatttttaaacatcactcaacgtaaatttatcgaatggttgattatcttatccatttttatagttagcattcctaataaatggacattaatgatatctatcgctttatctttattacttcttaaaagaggggcgctaggtgtcgttcaattaatcatactttatatgctcagatcgcaaatatacaccccatatgatacacaagagatggcgcattacatagtaagtatgaaatatatcttgatttatgtaattggagtattttttctatttaaatatgtaaaacattggataagaaatgaaatgatattaagatttatcaagtctactatgattcttatgctactttatatcataatgagtttagtcgtatctaatgatccgatagaatctattcttaaattgcttaacttctttataccgctaattttgattgttatgtatgttagtttaataaaaaagataaagaatctcattaactggattaatcaatttatcacgctagtgattgcctttacttttttatttatagttatagcgccaaaatcatatttaattgatgaggaatcacttagaagtgttttcaaggatgcacattcattcgcagttattcttgctatgggtctagttctatatatggtaacaataatcaaacaacaagattatgatgtattcaatttattattattaaatattggaatgatagagctctatttatcaaattctcgtcatattttcatatctgttattttatgtctaatgcttctattaccgttatctcacataaaaaagagaattaaacatcccataattggtgctatgatactaatggcaattgctataataaatcaaccatatatttatcatctttttattaaactaatcttaaaagggaagaatagccaagaggtctttatgccgagtgatatgaatattaaagctattgattatgcgctaactgagcatccttttttaggaagcggttttggtataccaatgataaaagcgagttcagaaatacaatactttaatgtagcaacgagtaatatcatcttcggtatgattatctttactggaataataggacttactttatgtacgatatacatgcttcatatggtacttttagttacttttccaatgagtattactattttattatttttaatcactatctttgttaatatggattatattattttatttgattccgtggggctaggtatattgtgttatatattttggggaatatatttaaaagaaggtatgtatcaatacaacaacggacaatgg

SEQ ID NO: 35042 - DNA, 111 bp, Staphylococcus epidermidis
atgaaagtaagaccatcagtaaaaccaatatgcgaaaaatgcaaagtcattaaacgtaaaggtaaagtaatggtaatttgtgataatccaaaacacaaacaaagacaaggt

SEQ ID NO: 35043 - DNA, 243 bp, Staphylococcus epidermidis
ttgaggattaaatcacttcagtttcatggaatgatgatgaacgtatatcattatcattctaatgatttaatcatgttagctattccagaacttttttggtccattgagttatccaaagagttagatgcaaatcagctatatgaggaattagtgatgcaattattcaatttgttgactgaagttgaagcagatgcattggcacgtaatataactgatttgattagaaatgaatccaaaggagaa

SEQ ID NO: 35044 - DNA, 1335 bp, Staphylococcus epidermidis
atgaataacaaagaacatactaaatcaattattttagtcctactcgtcttgatgagtatcgttttgacatacatggtctggaacttttctccagacctttcaaatattgataacacggataatagtaaaagtgataagcctaaaccacttactaaaccaatgactgcagaaatggaaggaacaatcacaccatttcaaatcgtgcattctagagatgataaatctcaaggaacagtagcatcaggtgcagtcttagataagatgattcaacctttaaagaatcaagaagttaaatctgtatcacatctgaaaagggaacataaccttgttatccctgaactaagtaacaactttattgtcctagatttcacttatgatttgccactttcaacgtacttaagtcaagtactcgatatcgatgcgaaagtgccgaataactttaattttgatcgcctccttatcgatcaagatcataataaccacgtcgtactatttgcgattagcaaagaccgtcatgaagtagttaaacttaagacaacgatgaaagggaataatgttgataaagcttttaaaagtatcgaacctgacatgcagccctatacggaaatcatcacgaataaagatacaatcgacaaagcaacacacgtgtttgcaccaagcaaaccgaaagacttaaagacgtatcgcatggtcttcaatacgatcagtgttgaacgcatgaactcaatactatttgatgattcaacgattgttcgtagctctcaaagtggtacgacaacatacaacaacaatactggtgtcgccaactacaatgataaagatgaaatgtatcattataagaatttatctgaagacgcaaaaagttcaagcaacatgcaagaaaccatcccaggcacatacgagtttataaatagtcatggtggcttcttaaatgaagattatcgcctatttaagacagataatagaacggggaaactcacatatcaacgattcctcaacggtcacccaacgtttaataaacataacttcaatgaaatccaagtcacatggggggataaaggcgtttacgattatcaacgttcgctacttaagacggacgtcacactgaacagtgaagaatctaaatccgtccctaccgttgagtccgtgcgttctgcattagccaaccatcctgatattgattttgaaaaggtaacgaacattgctattggttatgatatggacgacaaggcaaataacgaagatattgaagttcaacgtaactgtgaattaataccacgttggtttgtagaatacgatggcaattggtatgcctataaagatgggaggcttgaa

SEQ ID NO: 35045 - DNA, 183 bp, Staphylococcus epidermidis
gtggctaaaacttcaatggttgctaagcaacaaaaaaaacaaaaattcgctgtacgtgaatatactcgttgtgaacgctgtggtcgtccacattctgtgtatcgtaaatttaaattatgccgtatttgtttccgtgaattagcttacaaaggtcagattcctggcgtacgtaaagctagctgg

SEQ ID NO: 35046 - DNA, 3681 bp, Staphylococcus epidermidis
atgggaaaatttggattgaatttctttaaaccgacagaaaagtttaatggaaattggtcggtattagagcataaaagtcgagaatgggaaaagatgtatagagaaagatggagccacgacaaagttgtgagaacgacgcatggtgttaactgtactggatcatgttcatggaaagtatttgtcaaaaatggcgtaattacatgggaaaatcaacaaattgattatccaagttgtggacctgatatgccagaatttgagccaagaggttgtccgagaggtgcatcattttcttggtatgagtatagtccgttaagagttaaatatccttatattagaggtaaattattagatttatggaccgaagcgcttgaagaacaaaaaggaaaccgaattgcggcatgggcatccatcgtagaaaatgaagaaaaagccaaacaatataaagaagcaagaggtaaaggtggacacgtcagagcaaattggaaagatgccacagatatcattgcagctcaaattttatacaccataaaaaaagatggaccggatcgtattgctggatttactcctattcctgctatgtcgatgattagttatgcttcaggagcaagatttattaatttgttaggtggagaaatgttaagtttttacgattggtatgctgatttaccacctgcatctccacaaatttggggtgagcaaacagacgtgccagaatccagtgattggtacaacgcctcatacataatgatgtggggatcaaacgttccattaacacgtacacctgacgcacattttatgactgaagttagatataaaggggcgaaagttatttcagtagcacctgattatgctgagaatgttaagttcgccgatcattggcttgcaccacatccggggacagatgcagcggttgcacaagcaatgacacatgttattttacaggaatattatgaaaatcaaccgaatgatatgtttattaactatgctaagcaatattctgatatgccgtttgtcattatgttagatgaagatgagaatggctataaagcaggtagattcttgcgtgcttctgatttagggatgtcaggtgaaaataatgaatggaagccagttattcaagacaaattgagccaacaattacttgttcctaatggcacaatggggcaacgctgggaagaagggaaaaaatggaatttgaaacttgaaacagaggatggtacaccaattgatccaatgttatcaatggttgaaagtgactatcatgttgaaacgattcaatttccatattttgatagcagtggtgatggtatctttgagagacctattgcaacgagaactattcagttagctaacggagaagaagttaaaattgctacggtttatgatttaatgacgagtcaatatggtgttcaacgttttgaacacgaactagaagctacatcttatgatgacgcatcttctaaatatactcccgcttggcaagaacaaattacaggtatcaaaaaagaattagtgacgaaagtggcaaaagaatttgcacaaaatgctattgatactggtggacgctcaatgattattatgggggctggtatcaaccattggtttaactccgatactatttatcgttcaattcttaacttagtactattgtgtggttgtcaaggcgttaacggtggtggttgggcacactatgtaggacaagaaaaatgtcgaccaattgaaggatggaatactattgcattcgctaaagattggcaaggtcctccacgtttacaaaatggtacaagttggttctatttcgctacagatcaatggaagtatgaagaatcaaatgtagataaattaaaatcaccattagctgaaaatattaagcatcaacatccagctgattacaatgtaacagctgctcgtatgggctggttgccttcatatccacagtttaataaaaacagtctattatttggtgaagaggctaaagatgaaggtgatgattcaaatgaagccatcttacaaaaagcgattgaatcagttaaaaataaagatacacaatttgcgatagaagatccagatttaagaaaaaaccatcctaaaacattatttgtatggagatctaatttaatttctagttcagctaaaggacaagaatactttatgaagcacttgttaggtgcgcgctctggtttaatggcagagccaaatgaagatgataaaccagaggaaattaaatggcgcgaggatacagaagggaaacttgatttattagtatcacttgatttcagaatgactgcgacgccattatattcagatatcgttttacctgctgcaacttggtatgaaaaacatgatttatcttctacagacatgcatccatttattcatccatttaacccagcgattgacccattatgggaatcgcgttcggactgggatatttataaaactctaagtaaagctgtttcagaaatggcgaaagattatcttccaggtaaatttaaagatgtcgtaactacaccattaggacatgattcaaaacaagaaatttcaactgaatacggtattgtaaaagattggtctaaaggagaaattgaaggtgtgccaggtaaaacaatgcctaatttttctatcgtagagcgagactatacacaaatttacgataaattcgttactgttggtccaaaactagaaaaagggaaaataggtgctcatggtgtgagttatagcgttagtgaagagtacgaagaacttaaaagtatagttggaacttggaatgatgataatactatttcagttaaaaatgatagaccgagaatagatacagcgagaaaagtagcagatgtcattttgaatatatcctctgctacaaacggcaaattatcacaaaagtcatatgaagatttagaaaatcaaacaggtatggaacttaaagatatttctaaagaacgtgcttctgaaaagatatcattcttaaacattacttctcaaccaagagaagtgattccaactgcagtattccctggctctaataaagatggaagacgctactcaccgtttacaactaatgttgaacgtttagtgccatttagaacactaactggacgtcaaagttattatatagatcatgaggtattccaacagtttggcgaaagtttaccggtatataaacctactttacctccaatggtatttggtgctcgtgataaaaaagttaaaggtggacaagatacattagtgcttcgataccttacacctcatggaaaatggaatattcattcaacttatcaagataatgaacgcatgttgacgttgtttagaggtggaccagttgtatggatttcaaatgaagacgcagctgaccatggtattaatgataacgactggttagaagtatacaacagaaacggagttgttactgccagagctgtaacatctcatcgtatgcctagaggcacaatgtttatgtatcatgcacaagataaacatatagagacacctggttctgaaattactgatactcgtggaggttctcataatgcacctactcgtattcacttgaaacctactcaattagtaggaggatatgcacaaattagttatcactttaactattatggaccaattggaaatcaaagagatgagtatgtagctgttagaaaaatgaaggaggtcaattggcttgaagat

SEQ ID NO: 35047 - DNA, 180 bp, Staphylococcus epidermidis
atggctaaattacaaattaccctcactcgtagtgttattggtcgtcctgaaacacaacgtaaaactgttgaagctttaggtcttaaaaagactaatagttcagtagttgttgaagataaccctgcaattcgtgggcaaatcaacaaagttaagcatttattaacaattgaagaagaaaaa

SEQ ID NO: 35048 - DNA, 7191 bp, Staphylococcus epidermidis
atgggcaaacgtagacaaggtcctattaataaaaaagtggattttttacctaacaaattaaacaagtattctataagaaaattcactgttggtacggcctcaatattacttggttcgacacttatttttggaagtagtagccatgaagcgaaagctgcagaagaaaaacaagttgatccaattacacaagctaatcaaaatgatagtagtgaaagatcacttgaaaacacaaatcaacctactgtaaacaatgaagcaccacagatgtcttctacattgcaagcagaagaaggaagcaatgcagaagcacctcaatctgagccaacgaaggcagaagaaggaggcaatgcagaagcagctcaatctgagccaacgaaggcagaagaaggaggcaatgcagaagcacctcaatctgagccaacgaaggcagaagaaggaggcaatgcagaagcagctcaatctgagccaacgaagacagaagaaggaagcaacgtaaaagcagctcaatctgagccaacgaaggcagaagaaggaagcaatgcagaagcacctcaatctgagccaacgaagacagaagaaggaagcaacgcaaaagcagctcaatctgagccaacgaaggcagaagaaggaggcaatgcagaagcagctcaatctgagccaacgaagacagaagaaggaagcaatgcagaagcacctcaatctgagccaacgaaggcagaagaaggaggcaatgcagaagcacctcaatctgagccaacgaagacagaagaaggaggcaatgcagaagcaccgaatgttccaactatcaaagctaattcagataatgatacacaaacacaattttcagaagcccctacaagaaatgacctagctagaaaagaagatatccctgctgtttctaaaaacgaggaattacaatcatcacaaccaaacactgacagtaaaatagaacctacaacttcagaacctgtgaatttaaattatagttctccgtttatgtccttattaagcatgcctgctgatagttcatccaataacactaaaaatacaatagatataccgccaactacggttaaaggtagagataattacgatttttacggtagagtagatatcgaaagtaatcctacagatttaaatgcgacaaatttaacgagatataattatggacagccacctggtacaacaacagctggtgcagttcaatttaaaaatcaagttagttttgataaagatttcgactttaacattagagtagcaaacaatcgtcaaagtaatacaactggtgcagatggttggggctttatgttcagcaagaaagatggggatgatttcctaaaaaacggtggtatcttacgtgaaaaaggtacacctagtgcagctggtttcagaattgatacaggatattataataacgatccattagataaaatacagaaacaagctggtcaaggctatagagggtatgggacatttgttaaaaatgactcccaaggtaatacttctaaagtaggatcaggtactccatcaacagattttcttaactacgcagataatactactaatgatttagatggtaaattccatggtcaaaaattaaataatgttaatttgaaatataatgcttcaaatcaaacttttacagctacttatgctggtaaaacttggacggctacgttatctgaattaggattgagtccaactgatagttacaattttttagttacatcaagtcaatatggaaatggtaatagtggtacatacgcaagtggcgttatgagagctgatttagatggtgcaacattgacatacactcctaaagcagtcgatggagatccaattatatcaactaaggaaataccatttaataagaaacgtgaatttgatccaaacttagccccaggtacagaaaaagtagtccaaaaaggtgaaccaggaattgaaacaacaacaacaccaacttatgtcaatcctaatacaggagaaaaagttggcgaaggtgaaccaacagaaaaaataacaaaacaaccagtggatgaaatcgttcattatggtggcgaagaaatcaagccaggccataaggatgaatttgatccaaatgcaccgaaaggtagtcaaacaacgcaaccaggtaagccgggggttaaaaatcctgatacaggcgaagtagttactccacctgtggatgatgtgacaaaatatggtccagttgatggagatccgatcacgtcaacggaagaaattccattcgacaagaaacgtgaattcaatcctgatttaaaaccaggtgaagagcgtgttaaacaaaaaggtgaaccaggaacaaaaacaattacaacaccaacaactaagaacccattaacaggggaaaaagttggcgaaggtgaaccaacagaaaaaataacaaaacaaccagtagatgaaatcacagaatatggtggcgaagaaatcaagccaggccataaggatgaatttgatccaaatgcaccgaaaggtagccaagaggacgttccaggtaaaccaggagttaaaaaccctgatacaggcgaagtagtcacaccaccagtggatgatgtgacaaaatatggtccagttgatggagatccgatcacgtcaacggaagaaattccattcgacaagaaacgtgaattcaatcctgatttaaaaccaggtgaagagcgcgttaaacagaaaggtgaaccaggaacaaaaacaattacaacaccaacaactaagaacccattaacaggggaaaaagttggcgaaggtgaaccaacagaaaaagtaacaaaacaaccagtagatgaaatcacagaatatggtggcgaagaaatcaagccaggccataaggatgaatttgatccaaatgcaccgaaaggtagccaagaggacgttccaggtaaaccaggagttaaaaaccctgatacaggcgaagtagttactccaccagtggatgatgtgacaaaatatggtccagttgatggagatccgattacgtcaacggaagaaattccgtttgataaaaaacgcgaatttgatccaaacttagcgccaggtacagagaaagtcgttcaaaaaggtgaaccaggaacaaaaacaattacaacaccaacaactaagaacccattaacaggggaaaaagttggcgaaggtgaaccaacagaaaaagtaacaaaacaaccagtggatgaaatcgttcattatggtggcgaagaaatcaagccaggccataaggatgaatttgatccaaatgcaccgaaaggtagccaagaggacgttccaggtaaaccaggagttaaaaaccctgatacaggcgaagtagtcacaccaccagtggatgatgtgacaaaatatggtccagttgatggagatccgattacgtcaacggaagaaattccgtttgataaaaaacgcgaatttgatccaaacttagcgccaggtacagagaaagtcgttcaaaaaggtgaaccaggaacaaaaacaattacaacaccaacaactaagaacccattaacaggggaaaaagttggcgaaggtgaaccaacagaaaaagtaacaaaacaaccagtggatgaaatcgttcattatggtggcgaagaaatcaagccaggccataaggatgaatttgatccaaatgcaccgaaaggtagccaagaggacgttccaggtaaaccaggagttaaaaatcctgatacaggcgaagtagtcacaccaccagtggatgatgtgacaaaatatggtccagttgatggagatccgattacgtcaacggaagaaattccattcgacaagaaacgtgaattcaatcctgatttaaaaccaggtgaagagcgtgttaaacagaaaggtgaaccaggaacaaaaacaattacaacaccaacaactaagaacccattaacaggggaaaaagttggcgaaggtgaaccaacagaaaaaataacaaaacaaccagtagatgaaatcacagaatatggtggcgaagaaatcaagccaggccataaagatgaatttgatccaaatgcaccgaaaggtagtcaaacaacgcaaccaggtaagccaggagttaaaaatcctgatacaggcgaagtagtcacaccaccagtggatgatgtgacaaaatatggtccagttgatggagatccgattacgtcaacggaagaaattccattcgacaagaaacgtgaattcaatcctgatttaaaaccaggtgaagagcgtgttaaacaaaaaggtgaaccaggaacaaaaacaattacaacaccaacaactaagaacccattaacaggggaaaaagttggcgaaggtgaaccaacagaaaaaataacaaaacaaccagtagatgaaatcacagaatatggtggcgaagaaatcaagccaggccataaggatgaatttgatccgaacgcaccgaaaggtagccaagaggacgttccaggtaaaccaggagttaaaaatcctgatacaggcgaagtagtcacaccaccagtggatgatgtgacaaaatatggtccagttgatggagatccgattacgtcaacggaagaaattccattcgacaagaaacgtgaattcaatcctgatttaaaaccaggtgaagagcgtgttaaacagaaaggtgaaccaggaacaaaaacaattacaacaccaacaactaagaacccattaacaggggaaaaagttggcgaaggtgaaccaacagaaaaaataacaaaacaaccagtagatgaaatcacagaatatggtggcgaagaaatcaagccaggccataaggatgaatttgatccgaacgcaccgaaaggtagccaagaggacgttccaggtaagccaggagttaaaaatcctgatacaggcgaagtagtcacaccaccagtggatgatgtgacaaaatatggtccagttgatggagatccgattacgtcaacggaagaaattccgtttgataaaaaacgcgaatttgatccaaacttagcgccaggtacagagaaagtcgttcaaaaaggtgaaccaggaacaaaaacaattacaacaccaacaactaagaacccattaacaggggaaaaagttggcgaaggtgaaccaacagaaaaaataacaaaacaaccagtagatgaaatcacagaatatggtggcgaagaaatcaagccaggccataaggatgaatttgatccgaacgcaccgaaaggtagccaagaggacgttccaggtaaaccaggagttaaaaatcctgatacaggcgaagtagtcacaccaccagtggatgatgtgacaaaatatggtccagttgatggagatccgattacgtcaacggaagaaattccgtttgataaaaaacgcgaatttgatccaaacttagcgccaggtacagagaaagtcgttcaaaaaggtgaaccaggaacaaaaacaattacaacaccaacaactaagaacccattaacaggagaaaaagttggcgaaggtgaaccaacagaaaaaataacaaaacaaccagtggatgagatcgttcattatggtggcgaagaaatcaagacaggccataaggatgaatttgatccgaacgcaccgaaaggtagtcaaacaacgcaaccaggtaagccaggagttaaaaatcctgatacaggcgaagtagtcacaccaccagtggatgatgtgacaaaatatggtccagttgatggagatccgattacgtcaacggaagaaattccgtttgataaaaaacgcgaatttgatccaaacttagcgccaggtacagagaaagtcgttcaaaaaggtgaaccaggaacaaaaacaattacaacgccaacaactaagaacccattaacaggggaaaaagttggtgaaggtgaaccaacagaaaaaataacaaaacaaccagtggatgagatcgttcattatggtggcgaagaaatcaagccaggccataaggatgaatttgatccaaacgcaccgaaaggtagccaagaggacgttccaggtaaaccaggagttaaaaatcctgatacaggcgaagtagtcacaccaccagtggatgatgtgacaaaatatggtccagttgatggagattcgattacgtcaacggaagaaattccgtttgataaaaaacgcgaatttgatccaaacttagcgccaggtacagagaaagtcgttcaaaaaggtgaaccaggaacaaaaacaattacaacgccaacaactaagaacccattaacaggagaaaaagttggcgaaggtgaaccaacagaaaaaataacaaaacaaccagtggatgagattgttcattatggtggtgaacaaataccacaaggtcataaagatgaatttgatccaaatgcacctgtagatagtaaaactgaagttccaggtaaaccaggagttaaaaatcctgatacaggtgaagttgttaccccaccagtggatgatgtgacaaaatatggtccagttgatggagattcgattacgtcaacggaagaaattccgtttgataaaaaacgcgaatttgatccaaacttagcgccaggtacagagaaagtcgttcaaaaaggtgaaccaggaacaaaaacaattacaacgccaacaactaagaacccattaacaggagaaaaagttggcgaaggtaaatcaacagaaaaagtcactaaacaacctgttgacgaaattgttgagtatggtccaacaaaagcagaaccaggtaaaccagcggaaccaggtaaaccagcggaaccaggtaaaccagcggaaccaggtacgccagcagaaccaggtaaaccagcggaaccaggtacgccagcagaaccaggtaaaccagcggaaccaggtaaaccagcggaaccaggtaaaccagcggaaccaggtaaaccagcggaaccaggtacgccagcagaaccaggtacgccagcagaaccaggtaaaccagcggaaccaggtacgccagcagaaccaggtaaaccagcggaaccaggtacgccagcagaaccaggtaaaccagcggaatcaggtaaaccagtggaaccaggtacgccagcacaatcaggtgcaccagaacaaccaaatagatcaatgcattcaacagataataaaaatcaattacctgatacaggtgaaaatcgtcaagctaatgagggaactttagtcggatctctattagcaattgtcggatcattgttcatatttggtcgtcgtaaaaaaggtaatgaaaaa

SEQ ID NO: 35049 - DNA, 207 bp, Staphylococcus epidermidis
atgaaagctaaggaaattagagacttaaccacttcagaaatcgaagaacaaatcaaatcttcaaaagaagagctttttaacctacgctttcagttagctacaggtcaattagaagaaacggcacgtattcgcacagtaagaaaaacgattgcacgtctaaaaactgttgctcgtgaaagagaaattgaacaaagcaaggctaatcaa

SEQ ID NO: 35050 - DNA, 594 bp, Staphylococcus epidermidis
atggcagctttacttttaacccttaatttactagtagttttgatatttgtgactgcgtattataatcaattaaaatcaatattttattccaaaaatcttacaggaatatcatctatgttttggtacttagtaagcttttcaactttgtttagcttattaaatgtactacgaactggtaatgctgaatggtatatctatttaggacagtttattaacgctggtgtagcactcattattgtaatttggctcaactttaagagattggaaaagccaattgcgatcatattctcattactatacatactattagcacttgtaatctttagtcatctatcattggaagtaagtcagacagtggcgacagtttcaattgtgttagcctacattgatcaaatcattcactttattagaaagaaaacaagtgaaggagctaacccgttactgtatttattctttgcaataggtttatcattgctagtaactatctttagtttaacaggtgtttctatacatattataattacagaagttgctaatatttgtttattacttacatgttttatattagcaaaagtttactcaaaaaataagaaa

SEQ ID NO: 35051 - DNA, 11076 bp, Staphylococcus epidermidis
atgaatctatttagaaaacagaaatttagtattagaaaatttaatataggtattttttcagcattaatagctacagtcgcatttttagctcatccggggcaagcaacagcatcagaactggaaccttctcaaaataatgacactacagctcaatctgatggagggttagaaaacacatctcagtctaatcctataagtgaggaaaccacaaatacattatctgggcaaacagtaccttcatctactgaaaataagcaaacacaaaatgttcctaatcataacgctcaaccaattgcaataaatactgaagaagctgaatctgctcaaacagcatcttataccaatatcaatgaaaataatgatacgagtgacgatgggttacatgttaatcagccggctaaacatcatattgaagcccaatctgaagatgtaacaaatcacacgaactcaaatcattcaaattcatcgattccagaaaataaagctacaacagaatcatcaagtaaacctaaaaaaagagggaaaagatcattagatacaaataacggaaatgacacgacaagtacaactcaaaatacggatccaaatttaagtaatacaggtccaaatggcattaacactgtaattacatttgatgatttaggaattaagacaagtactaatcgctctcgacctgaggtaaaggtagttgatagtctaaatggctttacaatggttaatggtggtaaggtcggtttattaaatagtgtgttagaacgtacaagcgtgtttgatagtgccgatccgaaaaattatcaagcaatagataatgtcgtagccttaggacgtattaaaggaaatgatccgaatgatcatgatggtttcaacggtatagaaaaagaattttcagtgaaccctaattctgagataatattttcatttaatacaatgactgctaaaaacagaaaaggtggaactcaattagttttaagaaatgcagaaaataatcaagaaattgcttcaactgatattcaaggaggcggcgtatatcgtttattcaagttacctgataacgtacataggttaaaagttcaatttctacctatgaacgaaatacactcagattttaaaagaattcaacagctacatgatgggtatagatactattcttttatagatacaattggtgttaattctggttcacatctatatgtgaaatcaagacaagttaacaaaaatgtaaagaatggtaaagaatttgaagttaatactcgtatagagaataatggtaacttcgctgctgctataggtcaaaatgaacttacttataaagtaacactaccagaaaatttcgaatacgttgataattcaactgaagtttcatttgttaacgggaatgtgcctaattctacggtaaatccgttttcagttaatttcgatagacaaaatcatactttaacgtttagtagtaatggtttaaatttaggaagaagtgctcaggatgttgctagattcttgcccaataaaatactaaatattagatacaagcttagacctgtcaacatctcaacgccacgtgaagtgactttcaatgaagcaattaaatataagacattttctgaatattacattaacactaatgacaatactgttactggtcaacaaacacctttcagtattaatgtcatcatgaataaagacgatttatcagaacaggtcaataaggatatcatcccatcgaactatacacttgcttcttataataaatataataagttgaaagaacgtgctcagactgttctggatgaagaaacaaacaatacaccttttaaccaaagatactctcaaactcaaattgatgatttgttacacgaattacaaacaacactaataaatcgtgtgagtgcttcgagagaaattaatgataaagctcaagaaatgactgatgctgtatatgatagtacagaattaactactgaagaaaaagatacattagttgatcaaattgaaaatcataaaaatgaaatttctaataacattgatgatgaacttacagatgatggtgttgaaagagtcaaagaggctggattacatactctagaaagtgatactccacatccagtaacaaaaccaaatgcacgacaagttgtgaataacagagcagatcaacaaaagacgcttatacgtaacaatcatgaggcaactaccgaagaacaaaatgaagcgattagacaagttgaggcacattcatctgatgctatcgccaaaataggtgaggcagaaacagataccactgtaaatgaagctagagacaatggtacgaaattaatagctacagatgttccaaatccaactaaaaaagcagaagctagagcggcagttaccaacagtgcaaattcaaaaattaaggatatcaacaataatacacaagcaacattagacgagagaaatgatgctatcgcacttgttaatagatcaaaagatgaagcaattcaaaatattaacactgcacaaggtaatgatgatgtcactgaagcacaaaataatggaacgaatacgatacaacaagtaccattaactccagtgaaaagacaaaatgcaatagcaactatcaatgctaaagcggatgaacaaaaacgtttaattcaagcaaacaataatgcaacgactgaagaaaaagctgatgcagagcgtaaagttaatgaagcagtcataactgcaaatcaaaatattaccaatgcaactactaatagagatgttgatcaagcacaaacaactggaagtggtatcatatctgctattagtcctgcaacgaagattaaagaggatgcacgtgcagcagtagaagctaaagctattgcacaaaatcaacaaattaattcaaataatatggcaacaactgaagaaaaggaggatgcattaaatcaagtagaagcacataagcaggccgcaatagcaactatcaatcaagcgcagtcaactcagcaagtttctgaagctaagaataatggcataaatactattaatcaagatcaacctaacgcagttaagaaaaataatacaaaaataatattagaacaaaaaggaaacgagaaaaagtcagcaatagctcaaacacctgatgctaccactgaagagaaacaagaagctgtcagtgctgtttcgcaagctgttaccaatggcattacccatatcaaccaagcaaattctaatgatgatgttgatcaagaacttagtaatgcagaacaaattattactcaaactaatgtcaatgttcaaaaaaaacctcaagccagacaagcattgattgctaaaacaaatgaaaggcagagtacgattaatactgacaatgaaggcactatagaagaaaaacaaaaagcaattcaaagtttgaatgatgctaaaaatttagctgatgaacaaattacacaggctgcttctaatcaaaatgtcgacaacgccttaaatataggtataagtaatatcagtaaaatacagactaatttcactaaaaagcaacaagctagagaccaagtaaatcaaaagttccaagaaaaagaagctgagttaaattcaacacctcatgcaactcaagatgaaaaacaagatgcgttaactagattaacacaagcaaaggaaactgcactcaacgacataaatcaagcacaaacaaatcaaaatgtggatacagcacttactagtggaattcaaaatattcaaaatacacaagttaatgttaggaaaaagcaagaagccaaaactacgattaatgatattgttcaacaacataaacaaactatacaaaataatgatgatgctacaactgaagagaaggaagtcgcaaataatttagttaatgcatcacagcaaaatgtaattagtaagattgataatgctacaacgaataatcaaattgatggtattgtgagtgatggtagacaaagcataaatgcaattacacctgatacatcaattaaaagaaatgctaaaaatgatattgatattaaagcagctgataagaaaataaaaattcaaagaataaatgatgctacagatgaagaaattcaagaagcgaatcgtaaaattgaagaagctaagattgaagcaaaagataatattcaacgcaatagtactagagatcaagtaaatgaagcgaaaactaatggaataaataaaatagaaaatataacaccagcaactactgtgaaatctgaagctagacaagcagtacagaataaagcaaatgaacagattaatcatattcaaaacacgcctgatgcaactaatgaagaaaaacaagaggcaataaatagagtaagtgctgaattagcaagagttcaagcacaaataaatgcagaacatacaacccaaggtgtcaaaactatcaaagacgacgcgataacttctttatctcgaattaatgcacaagttgttgagaaagagtctgcaagaaatgcaatcgaacaaaaggcaacacaacaaacgcaatttattaataataatgataatgctacagatgaagaaaaagaggtcgccaacaatttagttatcgctacaaaacaaaaatcattagataatattaactccttatcttcaaataatgatgttgaaaatgctaaagtagcaggaataaatgaaatagctaacgttttaccagcaaccgctgttaagtcaaaagcaaaaaaagatattgatcaaaaactcgcgcaacagattaatcaaattcaaacgcatcaaactgctacaactgaggaaaaagaagcggctattcaattggcaaatcaaaaatcaaatgaagcaagaacagcaattcaaaatgaacatagtaacaatggtgtcgcacaagctaaatctaacggcattcatgaaattgaattagttatgccagatgcgcacaaaaaatctgatgctaaacaaagtatcgataataaatataatgagcaaagtaatactatcaacactacaccagatgcaacagatgaagaaaagcaaaaagcattagataaattaaaaatagctaaagatgcaggatacaacaaagttgatcaagcgcaaacaaaccaacaagtatctgatgcaaaaactgaggctatagatacgataactaatattcaagcaaatgttgcaaaaaaaccatccgctcgagtggaattagattcaaagtttgaggatttaaagcgtcaaatcaatgcaacgcccaatgctacagaagaagaaaaacaagatgcaattcaaagattgaatggtaaaagagatgaagttaagaatctaataaatcaagatagacgtgacaatgaagttgaacagcacaaaaatattggacttcaagaattagaaacgattcatgctaatccaactagaaaatctgatgcgctccaagagttacaaactaaatttatttcacaaacagagttaattaataataacaaagatgcaactaatgaagaaaaagatgaagccaaacgacttcttgagattagtaaaaataaaactataacaaatatcaatcaagcgcaaactaataatcaagttgataatgctaaagataacggcatgaatgagattgctaccataataccagcaacaacaattaaaacagatgcaaaaacggctattgataaaaaagctgagcaacaagttacaatcatcaatggtaacaacgatgcaacagatgaagaaaaagcagaggctagaaagctggttgaaaaagcgaaaattgaagccaaatctaatattacaaatagtgatactgaaagggaagtcaatggtgctaaaaccaatgggttagaaaaaataaacaatattcaaccatcaactcaaactaaaacaaatgctaagcaagaaataaatgacaaagctcaagaacaattaatccaaattaataacacgcctgatgcaaccgaagaagaaaagcaagaggcaacaaatagagtcaatgctggattagcacaagcaatacaaaatattaataatgcacatagtactcaagaagtaaatgaatctaaaacaaatagtattgctacaatcaagagtgtacaacccaatgtgatcaaaaaaccgactgctataaatagtttgactcaagaagctaataatcaaaagacgttaataggtaatgatggtaatgctactgatgatgaaaaagaggctgcaaagcaattagtgacccaaaaattaaatgaacaaattcaaaaaattcatgaaagtacacaagataatcaagttgataacgtaaaagcacaagctatcactgcaattaaattgattaatgcaaatgcacataaaagacaagatgccattaatattttgactaatctagctgaaagtaaaaaatcagatataagagccaatcaagatgcaactactgaagagaaaaatacggcaatacaatctatagatgatacgttagcacaagcacgtaacaatattaatggtgcaaatacaaatgcgttagtggatgagaatttagaagatggtaagcaaaagttacaacgtattgtgttgtcaactcaaactaaaacacaagctaaagcagacattgctcaagcaataggtcaacaaaggtcgacaatagaccagaatcaaaatgctacaacagaagaaaaacaagaagcccttgagagacttaatcaagaaacaaatggagtcaatgatagaatacaagcagctttagcaaatcaaaatgttacagacgaaaaaaataatatattagaaacaataagaaatgttgaacctattgtaattgtaaaaccaaaggctaatgaaataattagaaaaaaagctgcggaacaaacgactttaataaatcaaaatcaagatgcgacactagaagaaaaacaaatagcacttggcaaattagaagaagtaaagaatgaagcgttaaatcaagtatcacaggcacactcaaataatgatgtgaaaattgtggaaaataatggaattgctaaaatttctgaggtccatcctgagactataattaaacgtaatgctaaacaagaaattgaacaagatgcgcaaagtcaaattgatactatcaatgcaaataataaatcaactaatgaagaaaaatcagccgctatagatagagttaatgtagctaaaattgatgctattaacaatattactaatgctacaactacacaattagttaatgatgctaaaaatagtggtaacacgagtattagccaaatattaccaagtacagcagtcaaaactaatgcattagcagctctagctagcgaagctaaaaataaaaacgctataatagatcaaacaccaaatgcgacagcagaagaaaaagaagaagcaaataataaagttgatcgtcttcaagaagaagcagatgctaatatcctaaaagcacacactactgatgaagttaataatattaaaaatcaagctgttcaaaatattaacgctgttcaagttgaagttatcaagaaacaaaacgctaaaaaccaattaaatcaattcattgataatcaaaagaaaattattgaaaatacgcctgatgcaacactagaagaaaaagctgaagctaatagattgcttcaaaatgtactaacttccacatcagatgaaattgctaatgtagatcataacaacgaggttgatcaagctttagataaagctagaccaaaaatcgaggcaattgtaccacaagttagtaagaaacgagatgctttaaatgcaatccaagaagcatttaattcacaaactcaagaaatacaagagaaccaagaagctacgaatgaagaaaaaactgaagcattaaataaaataaaccaattacttaatcaggctaaagtaaatattgatcaagcacagtcaaataaagatgtagatagtgcgaaaacacgtagtattcaagatatagagcaaattcaaccacatccacaaacaaaagcaaccgggcgtcacagattaaatgaaaaagctaaccaacaacaaagtactattgcaactcatcctaattcaacaattgaagaaagacaggaagcaagtgcaaaactacaagaagttcttaaaaaagccatagctaaaatagataaaggtcaaaccaatgatgatgtagaaaagactgtagtaaacggaatagctgaaattgaaaatatattacctgctactacagttaaagataaagctaaagctgatgtaaatgctgaaaaagaggagaaaaacctacaaattaatagtaatgatgaagcaacgactgaagaaaaattagttgctagtgacaatttaaatcacgttgtcgagacaacaaatcaagctattgaggatgcaccagataccaaccaagtgaatgtagaaaagaacaaaggtataggtacaattagagatattcaaccacttgtagttaaaaaacctactgccaaatctaaaattgaaagcgcagtagaaaaaaagaaaactgaaattaatcaaacacaaaatgcaactcatgatgaagtaagagagggtttaaatcagttaaatcaaattcatgaaaaagccaaaaatgatgtaaatcaatctcaaactaatcagcaagttgaaaatgctgagcaaaatagtttagatcaaatcaataacttcagaccagattttagtaaaaaacgtaatgcagtagctgaaattgttaaagcgcaacaaaacaaaattgatgaaatagagcaagaatttagtgctacacaagaggaaaaagacaatgctttacaacatttagatgaacaggttaaagaaatcattaattctataaatcaagctaatacagataatgaagtagataatgctaaaacttctgggttgaataacataactgaatacagaccagaatataataaaaagaaaaatgctatattaaaattatatgatgtttcagatactcaagaagctataattaatggttatcctgatgcaactgaagatgaacttcaagaagctaatagtaagttaaataaaatacttttagatgcaaaaaaacaaattggtcttgcgcacacaaataatgaagttgatgatatttataatgaagtttcccaaaaaatgaaaactattttaccacgtgtagatacaaaagcggtagcacgttctgtacttaatgcacttgctaaacaattgattaaaacttttgaaaatactgcagatgttactcacgaggaacgtaatgatgcgattaatcatgtaaaagaacaattatctttagtattcaatgccattgaaaaagaccgaaaagatatacaagttgcgcaagatgaattatttggattaaatgaattaaatagtatatttatcaacataactcaaaagccaactgccagaaaagcaattagtggtatggcgagtcaattaaacaactctatcaataatacgccatatgctacagaagaagaacgacaaattgcactgaataaagttaaggcgattgttgatgatgcaaatgaaaaaatacgagaagctaacactgatagcgaagtacttggaacaaaatcaaacgcaataacattgttacaagcaatcagtgcggatgtacaagttaaaccacaagcatttgaagaaatcaatgcacaagctgaaattcaaagagaacgaattaatggaaatagtgatgcgacaagagaagaaaaagaagaagctttaaaacaagttgatacattagtaaatcattcatttattacaattaataatgttaataaaaatcaagaagtttatgatactaaagacaaaacgattgaagctattcataaaatcaaaccaatatcaactatcaaaccacaagcattaaatgaaatcactattcaactagacactcaacgtgatttaataaagaataataaagagtctacagttgaagaaaaagcctcggctatcgataaattaattaaaactgcagcaagaatagccgaatcaatagataaagctcaaacaaatgaagaagttaaaaatattaaaaaacaaagtattgatgaaatttctaaaatactacctgttattgaaattaaatcagctgcaagaaatgaaattcatcaaaaagcagaagttattcgcggattaattaatgataatgaagaagcgactaaagaagaaaaagatatcgcattaaatcaattagacacaactctaacacaagcaaatgtttcaattgaccaagcattaacaaatgaagctgttaatagagctaaagaaatagcaaattctgaaattaataaaatttctgtcattgccattaaaaagcctgaagctatagcagaaattcaagaactagcagataaaaaattaaataaatttaaacaaagtcaagaagctactattgaagaaaagcaatcagctatcaatgaattagaacaagctttaaaatcagctattaatcatattcatcaatctcaaaataatgaatcagtgagcgctgcattaaaagaaagtatatctttaatagactcgattgaaattcaagcacataaaaaattagaagctaaagcatacattgatggatatagtgacgataaaattaatgacatatcttctagagcgactaacgaagaaaaacaaatatttgtaagtaaacttaaagcattaatcaatcgtacacataaacagattgacgaagctgaaacatttgtttcagttgaaacaattgtccgaaactttaaagttgaagcggataaattaaactcaattgtacgtaaaaaagctaaagcatcgaaggaaattgaattagaagcagaccatgtaaagcaaatgataaatgcaaatttaagtgctagtactagagtgaaacaaaatgctcgtacattgataaatgaaattgttagtaacgctttaagtcaacttaataaagtaaccacaaataaagaagttgatgaaatagttaacgaaacgattgaaaaacttaagtcaatacaaataagagaagataaaatattgagtagtcaacgttcatcaacatctatgacggaaaaatctaatcaatgttatagttccgagaataatacaattaaatctctaccagaggcaggaaatgctgataaatcactaccattagcaggagttactttaatatctggtttagcaatcatgtcctcacgtaaaaagaaaaaagataaaaaagtaaatgac

SEQ ID NO: 35052 - DNA, 537 bp, Staphylococcus epidermidis
atgggggaaaggataagaagtgttcaaataactgaggtagagcaactacaactaattgctaaaagaacattttttacaacgtttagagaatcttatagtgatgaggacttcaagcaattttttagtgatgcatatgatatagatgtgttgagaaaagaattggaacaaagtaattcttttcattatttttatgaagttgatcaaaatatagtaggtttcttgaaattgaacattaatgatgctcagactgaaaacaaaggtcatgcatatttggaaatacaacgcatttactttgatgaagcatttcaagggagtggaagaggacaattatttatcaatctagctattgatcaagctatcaaatttgggaaatcgaaaatatggcttggtgtttgggagcataatcctaaagcgcttagcttttataaaaacagaggatttagagttacagggtcgcatcaattttatactggaagtgtagtagataatgatttgattatggagttggatcttacaacaaactataaacaaagttta

SEQ ID NO: 35053 - DNA, 174 bp, Staphylococcus epidermidis
atgtctaaaacagtagtacgtaaaaatgaatcactagaagatgctttacgtagatttaaacgttcagtatcaaaaagtggaactattcaagaagtacgtaaacgtgaattttacgaaaaaccaagcgtaaaacgtaaaaagaaatctgaagctgcacgtaaacgtaagttcaaa

SEQ ID NO: 35054 - DNA, 258 bp, Staphylococcus epidermidis
gtgacagtaatgccaaatattaaatctgcaatcaaacgtgtaagaacaactgaaacagctgaagaaagaaatatttctaagaaaaacgctatgcgtacagctgtgaaacgagctaaaacagctatctctactgatgctgaaaacaaagatgaattattaagatttgctatcaaacaagttgacaaagcatctcaaagtaatttaatccattctaataaagctgaccgtattaaatctaaacttatgtcagctaataaa

SEQ ID NO: 35055 - DNA, 141 bp, Staphylococcus epidermidis
atgagttttatggataaagctaaagaagctgctgaaaaatttaaagatagtgataacgaacaagttaacaaagtaaaagataaaataaatgaatatacaggtggcgaagacaacaaagataaaaaggacaaaaaggataaa

SEQ ID NO: 35056 - DNA, 399 bp, Staphylococcus epidermidis
atggagaaaaggagtattaatatgaaaaaagtatttatgatcataagtatacttaccataactgttactttaagtgcatgtggaggttctggaaaacaaaaagagccatctaaggaaagtcaaaaatctgataaatatgattatgtttattatgaaatattaaatgatggagattctgaaacgccaaatgttgagattaaatataaagataaaaaaggtaaatcacatatagaaaaagctgatttagatcacgtgtatgaacatatactaggtgatggtaataaaaaaccatatattgtaaaggatgggaagaaaattcatgtatatcgaccaccatatatgatttatggtgatgatgatgttgaaggcaaagccgtttcgaaagatgaagttacgaag

SEQ ID NO: 35057 - DNA, 456 bp, Staphylococcus epidermidis
atgacagactcaaatgctaaagaaataagaactggacgtttaattgcgataagttcattagtgttttgtattttacttatcatacaccactttattgtattagatgaatcaacagctaaatcaattttatctttagctggtcaaaaaacatcagatacagcagtgaaaaacattttaaatagtgaccgatacactggaattatgtatattttagcttacttagcaggtactgttgctttctggaatcgccatccatatttatggtggtttatgtttgccgtatatatttctaatgcactatttacactcgtaaatctttacttatttattcaaggtattttagatgtaaaaaatgtacttgcagttttaccaattttaattgtagtgattggatctataattctagcaatttatatgctagttgtttctattacacgtaaaagtactttcaataga

SEQ ID NO: 35058 - DNA, 189 bp, Staphylococcus epidermidis
atggctgaagataaatttgaacaagctaaaggtaatattaaagaaacagtaggtaatgctactgataataaagaattagaaaaagatggtaaaggtgacaaagcttctggtaaagcgaaagaagctgtagaaaacgttaaagaaaaagcaaatgacgttattgataaatttaaaggtaataaaggtgac

SEQ ID NO: 35059 - DNA, 1071 bp, Staphylococcus epidermidis
ttgaatgacttagaccacccacaactcatttttgaatctacaggtatctattcaagaggtatggaacgattttgttgtgtaaatcaaattaactatattcaaatgaatccgttagaagccaaatttaaaacgagcgctctaagatcatggaaaactgatcaggcagatgctcataagcttgcttgtttaggaccgacgcttaaacaaacagacaacttacctatacatgagttaatattctttgaattaagagaacgcgtccgttttcatctagaaatcgagaatgaacaaaatcgacttaaatttcagatccttgaattactccatcaaacattccctggtttagaaagattatttagtagtcgatattcaatcattgcactcaacatcgcagaaatctttactcatccagacatggttcttgatatcgacaaggaggtactgattacacatatattcaattctacagataagggaatgtcaatggataaagctacaaaatatgcacttcaattaagggtgattgctcaagaaagctatcctaatgtcgatagacattcctttctagtcgaaaaattacgcttacttattcaacaattaaaacaatctattcatcatatcaaacaattagatgatgccatgattcaattagcacaacaactcgattattttgaaaatattcattcgatacctggtattggtaagctaagcacagctatgattattgggaagattggtgatattaagcgatttaaatcaaataaacaactcaatgcttttgttggcattgatatcaaacgatatcaatcaggtcatacacactgtagagataccatcaacaagcgtggtaataaaaaagcgagaaaacttttattttgggtgattatgaatataataagagggcagcatcattatgacaatcatgtcgtcgattattactacaaactaagaaagcagcctaatgagaaacctcataagactgccatcattgcttgtataaatcgattattaaaaacaattcattatcttgtaatgaatcataaattgtacgattatcaaatgtcaccacat

SEQ ID NO: 35060 - DNA, 444 bp, Staphylococcus epidermidis
atgttaattagcgatacaaataaaacatatataatagaagaaactagtaattcattcacaattgaaaggaataatgatcagcagcactacgaagtattagaatcaatcaatagtttatctaatgattcattttgtgtgttaaatcacttattcgtcaatggaggaaatgaagaggtttttgagtcacgttttttaaagagaaatcaatatcttcaagatgtatctggatttaaagcgttaaggtttcttagacctttagtcaaagggagacattacattatcatcacgctatggaacagtagacaagctttctatgattggcaaaattcacaagcatatgcgcaaactcataaaaagcgtgggactcaaaaaggtgtcgatcatcgtatagtcaatagagatttatcctataatataagaatagagttagaaagtcttaataac

SEQ ID NO: 35061 - DNA, 168 bp, Staphylococcus epidermidis
atgacggatttaaaaattaatgatagggatatagctgaaataaatggcttttgggtatatcacaatactaaaaacaaacaatttacagttaacggtaaaaaattcaaagtaattgattcttacgatgatgcatccacatcaaattctatagtagcagttggtgctaac

SEQ ID NO: 35062 - DNA, 231 bp, Staphylococcus epidermidis
atggaacgaacaattcattttacattagttgatcaagtgagtactttgaacagaattactagcgccttcgttcgcttacaatgtaatattgatgaacttcatgttaaacattcagacaaagaaggaatttctaatatgaaacttaaagtcaatattaaagatgatgatacttttaaaattgttcttaaaaaactatcacaacaagtaaatgtactaagtgttaaaagtgaa

SEQ ID NO: 35063 - DNA, 435 bp, Staphylococcus epidermidis
atggaaacgatttttgattataatcaaattaaacaaattatcccacatagacaaccttttttactaatagataaaattgtagagtatgaagaaggtaaaaggtgtgtaggactaaagcaagtatcaggtaatgaaccatttttccagggacatttccctaattacgctgtgatgcctggtgttcttattacagaagctttagcgcaaactggtgcagtagctatgttaaatagtgaagaaaataaagggaaaatagcattgtttgcaggcattgataagtgtcgcttcaaaaaacaagtcgtacctggagatacattaatgttggaagttgaaataactaaaataaaaggtcctattggtaagggttcggctaaagcgactgttgatggccaacttgcttgtagctgtgaacttacttttgctattcaagatgct

SEQ ID NO: 35064 - DNA, 210 bp, Staphylococcus epidermidis
atgaatttaatcgcagcggcaatcgcaattggtttatcagcattaggtgcaggtattggtaacggtcttatcgtatctagaacagttgaaggtgtagcacgtcaaccagaagcacgtgggcaattaatgggtatcatgttcattggtgttggtttagttgaggcattaccaatcatcggtgttgtaattgcattcatgacatttgctgga

SEQ ID NO: 35065 - DNA, 156 bp, Staphylococcus epidermidis
gtgtttaacgtgcgcgtaaatattacattagcttgcacagagtgtggcgatcgtaactatattactactaaaaataaacgtaataatcctgaacgcattgaaatgaaaaaatattgtccaagattaaataaatatacgttacatcgtgaaacaaaa

SEQ ID NO: 35066 - DNA, 255 bp, Staphylococcus epidermidis
atgaaacaaggaattcatcctgaataccacaaagttatctttttagatacaacaacaaactttaaattcttaagtggttctacaaaaacatcttcagaaactatggaatgggaagatggaaatgaatacccagttattcgtttagatgtatcatcagattctcatccattctatactggacgtcaaaaattcgcagcagcggatggtcgtgtggaacgtttcaacaaaaagtttggactcaaatcaaacaacaac

SEQ ID NO: 35067 - DNA, 534 bp, Staphylococcus epidermidis
ttgaatgacttagaccacccacaactcatttttgaatctacaggtatctattcaagaggtatggaacgattttgttgtgtaaatcaaattaactatattcaaatgaatccgttagaagccaaatttaaaacgagcgctctaagatcatggaaaactgatcaggcagatgctcataagcttgcttgtttaggaccgacgcttaaacaaacagacagcttacctatacatgagttaatattctttgaattaagagaacgcgtccgttttcatctagaaatcgagaatgaacaaaatcgacttaaatttcagatccttgaattactccatcaaacattccctggtttagaaagattgtttagtagtcgatattcaatcattgcactcaacatcgcagaaatctttactcatccagacatggttctacatcttatcaagagtaaattacaaaagaatcatttaaatcaatactttcactttgaatacatgtatttgaagtggaaggtacttatttcaaaaatagtaaaacctgtatct

SEQ ID NO: 35068 - DNA, 879 bp, Staphylococcus haemolyticus
atggcaaagaagtcaatgaatgaattaattaatcaaattaatagcgctcttgacggtgtaatcgaaacttcaccactaaatacgaatctagaagaaagtatgcaatattctctcaatgcgggtggtaaaagaataagaccacttcttgtatttttaacattagatgtattaaatcaagattataaaaaaggtaaaaaaactgcattggcattggaaatgattcacacgtattctttaattcatgatgatcttcctgcgatggataatgatgattaccgtcgtggtaaacttaccaatcacaaagtctatggtgaatggaaagctattttagcaggtgatgcactactaactaaggcatttgaaatcattgctgatgatgaattattagaatctgacgttaaagttaaaatactttccagattagcgcataatagtggtcacttaggcatggtcggaggacaaacattagacatgcaaagtgaagataaacctgttgatttggatacgcttgaacagatacataaagctaaaacaggagcattacttcaattcgcagtattaagtgcagctgatattgctaaagtagataagtctacatcacaagctcttgaagattttagtaatcatatgggtttgatgttccaaattaaagatgatttgctcgacgtatatggtgatgaatctaaattaggaaaaaaagttggtagtgacatcgaaaatcacaaaagtacgtatgtttctttattaggtaaagatggagctgaagataaattaaatttccataaagatgctgccataaaatcaatagaacaactttcttcacactatgatattaaacctctattagatatcgttgagcttttctacacacgtgatcat

SEQ ID NO: 35069 - DNA, 837 bp, Staphylococcus haemolyticus
atgaaagaattggtatggacacgtattcttgaccaacgttctatttcattaaacagacaaggacgtttaggtttctatgcgcctacagctggacaagaagcttctcaattagcttcacaatatgctttagaaaaagaggacttcatcttacctggttaccgtgatgtgccacaaatcatttggcatggtttaccattaactgaagctttcttattctcaagaggacacttcaaaggaaatcaattccctgaaggtgttaatgcattcagtccacaaatcattatcggtgctcaatacattcaaactgctggtgtagcattcggtattaaaaaacgtggtaaaaaagcagttgctatcacatacactggtgacggcggttcttcacaaggtgacttctatgaaggtatcaactttgcttctgcttataaagcgccagcaatttttgttatccaaaacaataactatgctatttctacaccacgtagtaaacaaacagcagcaacttcattagctcaaaaagctattgcagtaggtatcccaggtatccaagttgatggtatggatgcattagctgtatatcaagctactaaagaagctcgcgatcgtgctattaatggtgaaggtccaacattaattgaaactatgacttaccgttatggtccacatacaatggctggagatgacccaactcgttatagaacttcagatgaagatgcagattgggagaaaaaagacccattagttcgtttcagaaaattccttgaaaacaaaggattatggaacgaagaaaaagaaaatgaagttattgaacgtgctaaagacgacatcaagaaagct

SEQ ID NO: 35070 - DNA, 887 bp, Staphylococcus haemolyticus
tttggaccgaaaacatttaaattacctgttgttccagcgaatatgcaaactgttatgagtgaagaattagctcattggttcgcaaaaaatgattatttttatattatgcatcgatttgacgaagcagctcgtattccatttattcaaaaaatgcaaaaagacggattgtttgcttctatttctgtaggtgttaaagcaaatgaatttaagtttatagaagaatttgctgacaaacaattagttcctgaatatattacgattgatatagctcatggtcattcagattcagttattaaaatgattaaacacataaaaaaatatattccaaaaacatttgtaattgctggaaatgttggtacgccagaaggtgttagagaacttgaaaatgcaggtgcagatgcaactaaagttggtatcggaccaggtagagtttgtatcacaaaaataaaaactggttttggcactggtggttggcaattagcagcattaaatatttgtagtaaagcagcgcgtaaacctataatcgctgatggtggcttaagaacacatggcgatattgctaaatcaattcgattctgtgcaagcatggtaatgataggatctctatttgcggctcacgaagaatcgccaggtgaaacagttgaattagacggcaaacgttataaagagtattttggtagtgcatctgaattccaaaaaggtgaacacaagaatgttgaaggtaaaaaaatgtttgttgaacataaaggatcattaaaagatactttagttgaaatgcaacaagacttacaaagctcgatttcatatgcaggtggaaaagatttaaaatcattaacaactgtcgattatgttatagtgcgaattcaatttttaatgggggcaggatt

SEQ ID NO: 35071 - DNA, 318 bp, Staphylococcus haemolyticus
atgattactattgacatcactattaatgatagtggaaaagtaacagacgttattatggatggtcatgctaatcatggtgaatatggacatgacattgtttgtgcaggtgcttcagcggttttatttggaagcgttaatgcaattctaggtttaacttctgagaaaccagacattgactatgaggatgatggaggtcattttcatattagaagtgtagatacaaacaatgaacaagcgcaattaattcttcaagcaatgttagtttctttacaaacgattgaagatgaatataatgaaaatatcagattaaattacaag

SEQ ID NO: 35072 - DNA, 297 bp, Staphylococcus haemolyticus
gtgaggtgtatcccgatgttaaaattaaacttacagttcttcgcatctaaaaaaggggtaagttctactaaaaacggtcgtgactcagaatcaaaacgtttaggtgctaaacgtgctgatggtcaatacgttacaggcggttctattttataccgtcaacgtggtacaaaaatttatcctggtgaaaatgtaggtcgtggtggcgatgatacattattcgctaaaatcgacggcgttgttcgtttcgaacgtaaaggtcgcgacaaaaaacaagtttctgtatacgcagtagctgaa

SEQ ID NO: 35073 - DNA, 303 bp, Staphylococcus haemolyticus
atgagagaagaagttaaagctttagaaaatgggattgaacttgaagatggttttacgcaaccagctcaagtcaaagtaaaaaagcaagataaagataaaaatattacacttgtagaaatcactattagtgaaggacgaaatcgacaagttcgtcgtatgttcgagcattttggacatcaagttgataaattaacaagaattgagttcggcaacttgaaccttaaaggattaaatgcaggtgagggcagagtactgacacctcatgaagttaaagtactaagacatatggcagaaaatggaaaa

SEQ ID NO: 35074 - DNA, 333 bp, Staphylococcus haemolyticus
atgccttggacaatgaatgattatccgaatacttggaagaacttcgatgaattagaacgtaagaaagcaattgatattggtaatgctatgttaaaagatggctataaagaaggcgatgttataccgattgctacacagcaagctaaagattggtataaagatgcgacgaaagatgagctagatgaattgaaacacaaacacattacccaacaccaaaaagatcaatccgcaaacccaaaactaaatgacgaaaatgtacatgtctatttcgaagatgatgaatggaaagtgaaaacagaaggtgcgaaacaagcgtctgatacgtttgagaag

SEQ ID NO: 35075 - DNA, 147 bp, Staphylococcus haemolyticus
atgcgcgttaatgtaacattagcttgcacagaatgtggcgatcgtaattatattactactaaaaataaacgtaataatcctgagcgtattgaaatgaaaaaatattgcccaagattaaataaatacacgctacaccgtgaaactaaa

SEQ ID NO: 35076 - DNA, 267 bp, Staphylococcus haemolyticus
atggcaaaaaaatctaaaattgctaaagaaatgaaaagagaaaaattagttaatcaatattatgaattacgtaaagaattaaaagctaaaggagattatgaagcattacgtaagttgccacgtgattcttcaccaacgcgtttaactcgaagatgtaaagtaacaggacgtccaagaggtgtattaagaaaatttgaaatgtctagaattgcttttagagaacatgcacacaaaggacaaatacctggtgtcaaaaaatcaagttgg

SEQ ID NO: 35077 - DNA, 336 bp, Staphylococcus haemolyticus
gcatctatcttacgcggtaaaaataaagtaacttatacaccacacgttgacactggtgattatgtaatcatcattaacgctgctaaaatcgaattaactggtaaaaaagaatcagataaaatttattatcgtcactcaaaccacccaggcggtatcaaatcagttacagctggtgagttaaaacgtaacaatccagaacgtttacttgaaacttcaatcaaaggtatgttaccaagttcacgtttaggtgaaaaacaaggtaaaaaattatttgtatatggtggcgctgaacatccacacgctgcacaacaaccagaaaactacgagttacgtggt

SEQ ID NO: 35078 - DNA, 390 bp, Staphylococcus haemolyticus
ttggcacaagttgaatatagaggcacaggccgtcgtaaaaactcagtagcacgtgtacgtttagtaccaggtgaaggtaatatcacagttaacgaacgtgacgtacgtgagtacttaccattcgaatcattaatcttagacttaaaccaaccatttgatgttacagaaactaaaggtaactatgatgtattagttaacgtacacggtggtggtttcactggacaagcacaagctatccgtcacggaatcgcacgtgcattattagaagcagatcctgaatacagaggttctttaaaacgcgcaggtctattaactcgtgacccacgtatgaaagaacgtaaaaaaccaggtcttaaaaaagcacgtcgttctccacaattctcaaaacgt

SEQ ID NO: 35079 - DNA, 288 bp, Staphylococcus haemolyticus
atggatgtaaaacaaaatttaagaaatattgaaagtgaaatacagtcacactttaaaaatagtgaagcgtctaccttgccaaacgtgattgcagtaacaaaatatgttacaatagaccgtgctaaagaagcttatgatgttggacttagacattttggtgaaaatagattagaaggctttttagaaaagaaatctgctttgcctaacgatgttactatgcactttataggttctttacaatctagaaaagtaaaagaagtcattaacgaaattgattacctacatgca

SEQ ID NO: 35080 - DNA, 951 bp, Staphylococcus haemolyticus
  misc_feature (40)..(40): n=g, a, t or c
atcgaatttaatgactcgcatcgtactagtcagatacttntagctgatctaggaccaggtttacttgtagcggttggtgatatggatccaggaaattggattacatcaatgcaaggtggcgcacaatttggttacactttatgattcgtaattttaatcatctagcttatcagcaatgttgttacagagtatgactgttcgtttaggtatcgctactgataaagatttagcacaaatgactcgtcactatttaaacaaaccaactgcaattatattttgggtgattgctgaacttgcaatcattgccactgatattgctgaagtaatcggaagcgcgattgctttggatttactttttaatattcctttaatcataggtgctttaataacagtttttgacgtatttttattactttttataatgaaatttggttttagaaagattgaagcaatcgtcggtactttaatctttactgtactaatgatttttgtatttgaagtttacatttcatctccaaatttaattgaaatacttaacggatttgttccacattatcaaattattgctaatcatagtatcttgtatattgcattaggcattattggcgctacaattatgcctcataatttatatttgcactcatcaatcgtgcaatcacgtaagtataatcgccatagctttactgaaaaagctcaagcgattaaattcgcaacaattgattctaatattcaattaagtatcgcatttattgtaaattgcttactacttgttctaggggcagctttattttatggcgtcaattcaaataacataggtggtttctatgatttatatcaagcatttaagaacacaacctgtgtttgggtgttgtaatgggatggtatatgtgtactctattcgctatagcattattagcagctggtcataagtcaacaatcacttggttcacg

SEQ ID NO: 35081 - DNA, 321 bp, Staphylococcus haemolyticus
ttaaataatatggtacaaggtgtttctcaaggtttcgaaaaaacacttgagcttgttggtgtaggttaccgtgctcaaatgcaaggtagtgacttagtattaaacgttggttactctcaccctgttgaaattaaagctgaagatggcattactttcgcagtagagaaaaacacaactgttagagtatctggtgtatctaaagaacaagttggagcaattgcttctaacatccgttcagtaagacctccagaaccttacaaaggaaaaggtatccgttaccaaggtgaatatgttcgccgtaaagaaggtaaaacaggtaaa

SEQ ID NO: 35082 - DNA, 362 bp, Staphylococcus haemolyticus
atgatcagtaaaattgataaaaacaaagtgcgtttgaaaagacatgctcgtgtgcgtactaaattatcaggtacagctgaaaaaccacgtttaaatgtatatcgttcaaacaaacacatttatgcacaaattatcgatgatgttaaaggcgaaactttagttcaagcttcatcaaaagataaagatatcgcaagtgattcaacttctaaagtagatttagctactaaagtaggcgaacaattgctaaaaaagcatcagacaaaggtattaaagaaatcgtatttgatcgtggcggttacttataccatggtcgtgtaaaagctttagcagaagctgctagagaaagcggattagaattttaa

SEQ ID NO: 35083 - DNA, 723 bp, Staphylococcus haemolyticus
atggatcacaaaaacccgctcgtgagttggaatgtgtttggttttgatctcgttttcaatttagcaagcatcatgatgttagttattacagcaatcattgtttttcttatagctattatttgtacacgtaatttaaagaaaagaccatcaggtaaacagaattttatcgaatggatctttgactttgtgagaagcatcattgagagtaatatggcttggaaaaaaggtggtcagtttcacttcttagctgtaacattgatattatttatctttgttgcaaacatgttagggttaccatttgctatagtgactaaagatcattatctatggtggaaatctccaacagcagatgcaacagtcacattgacattgtcaactatgatgatattacttacacactattatggtgtgaaaatgcgtggtactaaggcatacataggtaattacttcaaaccattctggcctttagcaattatcaatgtttttgaagaattctcttcaacactaacacttggactacgtttatatggtaatatttttgccggtgaattattactttcattattagccggtttagttgtaagtagtgcttggggttggattataggtattccaggtttaatcgtatggcaaggattctcaatctttgttggctcaatccaggcatatatatttatcatgctttcaatggtttacatgtcccacaaagtagcggacacacat

SEQ ID NO: 35084 - DNA, 210 bp, Staphylococcus haemolyticus
atgggtttaatcgcagcagcaattgcaattggtttatcagcactaggcgcaggtatcggtaacggtcttatcgtttcaagaacagtagaaggtgtagctcgtcaaccagaagcacgtggacaattaatgagtatcatgttcatcggtattggtttagttgaggcattacctatcatcggtgttgtaatcgcattcatgactcttttccaa

SEQ ID NO: 35085 - DNA, 1031 bp, Staphylococcus haemolyticus
atgactattagatctactgatagtcaatctgctttagacaaagcaaataagaggcgcactacactcacatttattgtgagtgggtgctttctttttatttttgcatattttaatttagcgattggctcgtctgaaattcatgctaaacatatttttgaatacttttttacatctataaataataaacaaacatttcttattcataatgtaagaatgccaagaatgattggtgggttattgattggcggtgcgctagccttagctggcctcttaatgcaagcgattactaggaatccattagcatctccacaaatatttggtgttaattcaggtgcatcatttgtaatagtattagtgacgatattaataccttcactaggtaactatgcaacatatctggcatttttaggggcatttattggaggattaactgtctatgtattatccggatctacgaaaaaaataacaccaattaaattggcccttgcaggaatggcaatgcatttatttttcagtagtttaacgcaaggtatcatcattttaaatgaagattctaatactaccgttatggtctggttagtaggttcattaaatggattgaaatggactgcagtcttgtcagttatgcctttgctcatattagcgcttatcataacgatgtattaggccgtcaattaaccataatggaattaggagacgatatagcgaaaggattaggccagaagactcagcttatcagaattatagttggcctacttgtcatcgtactagcaggtgcatctgtttcaatagttggaccgattggattcattggtttaatcgtccctcatatagttaaacgttatataagtaaagattacttcttaatggtgcctttaacttttttgataggtgccgatttattattactatcagatatgttaagtagacttattacatttccttacgaatctccagttggtattgtcacttcatttgttggggcaatttacttcctattaataactttaaaaggggtgaaacgaatatga

SEQ ID NO: 35086 - DNA, 432 bp, Staphylococcus haemolyticus
atggatcgcacagaacattcattaaaagcatttattggtctaaatagagcattagatacattagaaaaaatcgtgcaacaagatgtgaagaattacggactcaatgtgacggattttgcggtgttagagttactctatagtaaaggtccacaacctattcaacgtattagagatagggtgctcatcgcgagtagtagtatttcatacgttgtgagccaattagaagacaaaggttggattacacgtgataaagatccatcagataagcgtgtatataacgcaacacttactgacaaaggtcaacaatttatggcagatatatttccacaacatgcctcaacgttggaacaagccttctcagttctatcagaagaagaattgataacgattcaacaagcattcaaaaaattaagtgcacaatctactgaagtg

SEQ ID NO: 35087 - DNA, 694 bp, Staphylococcus haemolyticus
gctattctaatccttttcggtggtggcgtttgtgctaacgtcaatttaaagcgaagtgctggacaggattctgattggatagtaattgcagcaggttggggattagccgtgtcaatgggcgcatacgcagttggtaagttttcaggcgcacatttaaatccagcggtttcaattgctttagcgatggatggaagttttagttgggctcaagtacctggctatattatctgtcaaatgcttggaggtatctttggcggtgtattagtttggttaatgtatttaccacattggaaggcaactgaagatcagggggcaaagttaggtgtattctctacagcacctgcaattaagaattattttgcaaactttttaagtgagattattgggacagcaatcttatgtttaggtatcttatttattggcgtaaataaaattgcggatggaatgaatccacttattgttggtggtttaatcgtagctattggattgagtttaggtggtccgactggatatgcaattaatccagcacgtgatttaggaccaagaatcgctcatgcaatattaccaattgcaggcaaaggtggttctaattggggatacgcgatcgtacctgtattaggacctattgctggaggtatgctcggagcagttatatataaagtcttttataaaggacaatttgatttaatttgtg

SEQ ID NO: 35088 - DNA, 489 bp, Staphylococcus haemolyticus
gtggaattacaagaggcaattgcttcaagaagaagtataaagaaattcaaacatgatatgacaatagatgatgataagctttatcaagcgattgaaaaagctgcagatgctccaaaccatggcatgcgagaaccatggagaattatccatatagccaaagatagattaggtgaaatgagcagggatgtaacgcattttgcatttccaaatcatcctgagaaacaagaagatcattataataatgtgactaatcttggtggtatgttagtgttagtacttaaaactgacccaagacaacgacaaaatcgtgaaaacttttttgcgatgggtgcgtatgctcaaaacttaatgcttctattacatgaacaagggattggtacatgttggaagacaccaccttacatttttgaaccaaaagttcgtaaggtatttggcgttcatggagatgaagtcattgcaggtttcctttacctaacagatttagaagaa

SEQ ID NO: 35089 - DNA, 593 bp, Staphylococcus haemolyticus
atgtttaattcatcatcattaaacgtttattttatttgcggtacgcaagatgttccagaaggaaaagatattagagaaatactaaaacaagctttagaagctggaattaccctttttcaattccgtgaaaaggggccaacatcattagatggtgttgagaaagaacatttagcaattgatttattaaaactatgtcatgactatcaagtaccatttattgtaaatgacgacgttgatttagctgagaaaataaatgcagacggtattcatgtagggcaagatgatgaaaatgtgaagtcttttgctgaacgcttcaaagataaaatcattgggcttagcattggaaatgagaaagaatattatcattcggatttggaacatgttgattatattggagttggacctatgtttgcaacaatctctaaaaatgatgtaacgcaccagtaggtccatcaatgattgctacattaaagaacatcaatccttcgttaccaatggtagcaattggaggcataacagaagacaatattgaacctattgctcaaaatggtgcagatggtgtttcagttatttcagcgattgcacgtagtcat

SEQ ID NO: 35090 - DNA, 198 bp, Staphylococcus haemolyticus
atgccaaaaatgaaaactcaccgtggagcagctaaacgtgttaaaagaactggttcaggtcaattaaaacgttcaagagctttcacatcacacttatttgcaaataaaaacactaaacaaaaacgtaaattacgtaaagctaaattagtttctaaaagcgatatgaaacgagtaaaacaattattagcttataaaaaa

SEQ ID NO: 35091 - DNA, 354 bp, Staphylococcus haemolyticus
atgccacgagttaaaggtggaacagtaacaagagcacgtcgtaaaaaaacgattaaattagctaaaggttacttcggtgctaaacacacattatataaagtagcaaaacaacaagtaatgaaatcaggtcaatacgctttccgtgaccgtcgtcaacgtaaacgtgatttccgtaaattatggattacacgtattaacgcagctgcacgtcaacatgacatgagctattcaagattaatgaacggcttgaaaaaagctgacatcaatattaaccgtaaaatgctttctgaagttgctatttcagatgaaaaagctttcgcagagttagtttcaaaagctaaagaagctttaaaa

SEQ ID NO: 35092 - DNA, 174 bp, Staphylococcus haemolyticus
tttgctggtattgataaatgtagatttaaaaagcaagtaactcctggtgatactttaatgttagaagtagaaattactaaaattaaaggtccgattggaaaaggtacagctaaagcaactgttgatggacaattagcttgcagttgtgaactaactttcgcaattcaaaatgct

SEQ ID NO: 35093 - DNA, 186 bp, Staphylococcus haemolyticus
atgggtaaacaatgttacgtaacaggtcgtaaagcatcgactggtaataatcgttcacacgctttaaatgcgaataaacgcagatttaatgctaaccttcaaaaagttagaattttagttgacggaaaacctaaaaaagtttgggtttctgctcgtgctttaaaatctggtaaagttactagagtt

SEQ ID NO: 35094 - DNA, 946 bp, Staphylococcus haemolyticus
gaggttgagtttttactaaatctatcagaggatttaaaacgcgcgaaatacgccggtatagaacagcaaaaacttaaaggtaaaaacatcgcattaatttttgaaaaagattctactcgtacacgttgtgcgtttgaaactgcagcatatgatcaaggcgctcacgtgacatatcttggaccaactggaagccaaatgggtaaaaaagaatctgcgaaagatactgctcgtgtattaggtggtatgtatgatggaatcgaataccgtggcttctcacaacgtactgttgaagaattagcgaaatattcaggtgtgcctgtgtggaacggcttaacagatgaagatcatccaactcaagtacttgctgacttcttaacagcaaaagaagtattgaaaaaaccataccacgaaatcaacttcacatatgttggagatggacgtaacaatgtagcaaatgcattaatgcaaggtgcagctatcatgggaatgactttccacttagtttgccctaaagaattaaatccaacagatgagttattaaaccgttgtaaagaaatcgcagctaaaaatggtggcgaaatcttagtgactgatgacatcgatgaaggtgttaaaggttcagacgttatctacacagacgtttgggtatcaatgggtgaacctgacgaagtttgggaaaaacgtatcaaattattagaaccatatcgtgtaactaaagaaatgatggaaaaaactggtaacccacgtgccatctttgaacactgcttaccatcattccacgatactgaaactaaaattggtaaagaaatccaagaaaaatatggcttaactgaaatggaagttgctgacgaagtctttgaaagtgaacaatctgttgtcttcagaagctgaaaacagagcacacactattaaagctgtaatggttgcaactttaggagaataattg

SEQ ID NO: 35095 - DNA, 498 bp, Staphylococcus haemolyticus
atggctcgtagagaagaagaaacgaaagaatttgaagaacgcgttgtaacaatcaaccgtgttgctaaagttgttaaaggtggtcgtcgtttccgtttcactgcattagtagtagttggagacaaaaatggtcgtgtaggtttcggtactggtaaagctcaagaggtacctgaagctatcaaaaaagctgttgaagcagctaaaaaagatttagtagttgttccacgtgttgaaggaactactcctcacactatcactggccgttatggttcaggcagcgtattcatgaaaccagctgcacctggtacaggagttatcgctggtggtccagttcgtgccgtattagaattagcaggtatcactgatatcttaagtaaatcattaggatctaacacaccaattaatatggttcgtgctacaatcaatggtttacaaaaccttaaaaatgctgaagatgttgctaaattacgcggcaaatcagtagaagaattatataat

SEQ ID NO: 35096 - DNA, 177 bp, Staphylococcus haemolyticus
atggctaaattacaaattaccctcactcgtagtgttattggtcgtcctgaaacacaacgtaaaactgttgaagctttaggtcttaaaaagactaatagttcagtagtagttgaagataaccctgctatccgtgggcaaatcaacaaagttagacacttattgacagtagaagaaaaa

SEQ ID NO: 35097 - DNA, 256 bp, Staphylococcus haemolyticus
  misc_feature (242)..(242): n=g, a, t or c
atgaaattacatgagttaaaagcagctgaaggttcacgtcgtgtacgtaaccgcgttggccgtggtgctggttctggtaacggtaaaactagtggtcgcggacaaaaaggtcaaaaagcacgttcaggtggtggcgtaagacctggatttgaaggtggacaattacctttattccgtcgttctcaaaacgtggtttcactaacattaatcgtaaagaatatgctattgttacttagaccacnttaataaattgaag

SEQ ID NO: 35098 - DNA, 720 bp, Staphylococcus haemolyticus
gaagttgcaggacgtatgtctgctcaagttggttcacaattcctacaaaaatttaacggtggaatgggtattttacttggaggcgttcctggagtaccaaaaggtaaagtatctatcatcggtggcggtcaagctggtacaaatgcggctaaaatcgcactaggtttaggtgctaatgttacaatcttagatgtaaaccctaaacgattagctgaattagatgatttatttgatggccgtgtgaacacaattatgtctaacccattaaatattgaaaatgcagtaaaagaaagtgatttagttattggtgccgtattaatccctggtgcaaaagcacctagcttggtaactgaagatatgattaaacaaatgacagatggttcagtgattgttgatatcgctattgaccaaggtggtatttttgaaactacagataaaattacgacacacgatgatccaacatatgtaaaacatggtgttgttcactatgcagttgcgaatatgccaggtgcagtacctcgtacatctacaattgcattaaataatgcaacattaccttatgcgcaattattagcaagtaagggttaccgtgaagcattcaaagcaaaccacgcattatctttaggtttaaatacgtacaaaggtcatgtaactcataaaggtgtagctgaagcgttcggtttagaatacacatctgttgaagatgcattaaaagaagat

SEQ ID NO: 35099 - DNA, 681 bp, Staphylococcus haemolyticus
atgattgaattatatgaagcatacgctgattaccacgatatcatggatttaactgaatctatggtaagacatatcgctcaagaagtatttggttctgcaaaagttcaatacaatgaagaggaaattgacctagagtctgcctggacacgccttcatattgtagatgcagtgaaagaagctacaggtgtagacttctatcaaattaaatctgatgaagaagcaatcgctgcagctaaagaacatggtattgaaattactaataatatgaaatatggtcatatcttaaatgaattctttgaacaaaaagttgaagaaacgttaattcaaccaacatttatttatggacatccaattgaaatctcgcctttagcgaagaaaaatccagaagatcctagatttacagaccgtttcgagttgtttatcgtaggtagagaacatgcgaatgcattcactgaattaaatgatccaattgatcaacgtgaacgtttcgaagcacaacttgttgaaaaagcacaaggtaatgatgaagcgcatgaaatggatgaagattatattgaagctttggaatatggtatgcctccaacaggtggtttaggtatcggtatcgatcgcttagttatgttgttaactgactctccatctattagagacgtattattattcccttacatgagacaaaaa

SEQ ID NO: 35100 - DNA, 918 bp, Staphylococcus haemolyticus
gtgtattctgcttctgaaattgctagatctgagtttcctaattttcaagttgaagaacgaagtgctgtttcaataggaagacgagttcaagacccattaagtgaattagttaaaatagatcctaaatctattggtgtgggtcaatatcaacatgatgtaaatcagaaagaacttgaaagtgcattaacatttgttgttgaaacagccgtaaaccaagttggtgtagatgtaaatacagcatcaaaatctctattacagtatgtttctggtctatctagcgcaatagctcaaaacattattgattaccgtgaagaaaatggagcaatcaagcacaataaagaaataagtaaagtgaaacgattaggtgccaaaacatttgaacaaagtataggatttttgcgtattgtagatggctctgaaccacttgataatacgtcaattcaccctgagagttatgatgtgacatatgaattattgactgttttaaattttgatatcaatgatttaggaactgacaagttaaaaactgaattatccaacataaacacaaatcaaatagctgaacaattaaatgttggagtaccaactttagaggatattataaaatctctaatggcacctaatcgagatccgcgtgatgagtttgaaacgcctatccttaaatctgatgtactatctattgaagatttaaaagaaggtatgaaattaagtggaacagtaagaaatgttgttgatttcggagcatttgtagatataggtgtgaaacaagacggattagtgcacgtatctaaattatcaaaaaaattcgtcaaaaatcctatggatgtagttagtgttggagatatagtagaagtttggattcttgatatcgataaaaataaaggaaaagtttctctaacaatgattgatccacatgaa

SEQ ID NO: 35101 - DNA, 819 bp, Staphylococcus haemolyticus
atgactaatttacaagatattgtagtcaatgaaatgaaagtgaagaaacatattgatagtgaacaagagtcacgtgaaattattcaatttattaaaagctatgtgcaatcacattcatttattaaatctttagtgttaggtatttctggtggtcaagattctactttgactggtaaattagctcagctagcagttgaagaattacgtaatgaagggcgagattgtcaatttattgctgtgaaattaccatatggtgtgcagaaagatgcagaagaagttgaagatgcattaaactttattcatcccgatgaaatcattactgtcaatattaaacctgctgttgatcaaagtgttaaatctttaaacgaggctggtattgaattaacagattttcaacgtggtaacgaaaaagcacgtgaacgtatgaaggttcaattttcaatcgcatcaaatcgtagtggtattgttattggtacggatcattctgcagagaatattacaggattttatactaagtacggtgatggtgctgctgatatcgcacctatctttggtctaaataaaagacaaggaagacagctacttaaatatttgaacgcaccaaagcatttatacgaaaaagttcccacagcagatttagaggatgataaaccacaattacctgatgaagaagctttgggtgttacttatgatcaaattgatgactatttagaaggtaaacatatatctagtgaagcccgtgatacgattgaaaatcactatgtcaaaaatgcacataaacgtgaattagcctatacgcgttatacttggcctaaaaat

SEQ ID NO: 35102 - DNA, 573 bp, Staphylococcus haemolyticus
atgaatattccaaatcaaattacggttttcagagtaatattaattccgcttttcatattatttgctctagtaaactttggatttggcaatgtatctattttaggtggatttgaaatccgtattgaacaacttattgctgctatcattttcattgtagcttctttaagtgatttcctagatgggtacttagctagaaaatggcaacttgtaactaatatgggtaaattcttagatcccctagctgacaaattattagtttccagtgcattaattgttatggttcaattaggacttacaaattcagtagtagcaatcattataattgcacgtgaatttgctgttacaggattacgtctattacagattgaacaagggtttgttagtgctgctggtcaattaggtaaaattaaaactgctgtaactatggttgcaattatttggattttattaggtgatttgttagcaacatggataggcattcaaattggacaagtattactttatattggtgttttattcacgattttatctggtattgaatacttttataaaggtagagatgttttcaaacat

SEQ ID NO: 35103 - DNA, 477 bp, Staphylococcus haemolyticus
atggtacaagcgtatttaggtttaggaagcaatattggtgatagggaacagcaattacaagaagctattaaaataattgacagtattgaaggcattactgtgactaaaatctctccaatatatgaaactgcaccagtagggtataccgagcagcctaattttttaaatttgtgtttagaaattgatacagaattggagcctaaagaacttcttaaatattgcttagaaaccgaacaacgattacaccgagttagagacattcgttggggtccaagaacattagatgtcgatattttattatatggagataaggttatagaagaagatgaccttgaagttccccatccgcgaatgagtgaacgtgcttttgtgctaataccattaaatgatattgcaccaacacaaattgaacctcgttcaaaaactcgtatctctgatttagtcataccagatgacacagtgaagaaatataaaggt

SEQ ID NO: 35104 - DNA, 553 bp, Staphylococcus haemolyticus
atgtcagaagaaatgaatgaccaaatgcaggtccgtcgtcaaaaactacaagaattaattgatttaggaatcgacccatttggaaaacgttttgagcgctcagctactgctagtgaactaaaatcacaatgggatgaattctctaaagaagaattacatgataaagaagatgaaagtcatgtttcgattgccggacgtttgatgactaaacgtggtaaaggtaaagctggtttcgcacatgtccaagatttgactggtcagattcaaatttacgtgcgtaaggaccaaattggcgaagaagatttcgacaatttatggaaaggtgcagacctaggcgatattgttggtattgaaggtgtaatgttcaaaacaaatactggcgagctatcagtaaaaagctaagacattcactttattatctaaagcgcttagacctttacctgataagttccatggtttacaagatattgaacaacgttatcgtcaacgttatatagacttgattacgaatcaagatagtactcaaacatttattaaccgtagtaaaattatc

SEQ ID NO: 35105 - DNA, 734 bp, Staphylococcus haemolyticus
aaagtggatattttaggtgtcgaatttaataatgtaaccatgttagatatgattgaacatgtcaaaacatttttcacacaagagactgaggataatttgtttatcgtgacagctaatccagaaatcgttgattatgcgtcagagcatagtacttataaccagttaattaatagtgcggattttgttgtcccggatggcacaggtgttattaaagcatcaaatcgtttgggaacaccgttaaaacgacgtgtgcctggcattgaattaatggaacattgtttaaagattgcccatacaaattatcaaaaagtatatttacttggtgccaaaaatgaagtagtcacactagcacataaaaatttacaacacaaataccctcaggcgcaattcgattaccatcatggttatatagatttaaatgatgagacggtaatcaagcgcataaaacgttttgatcctgattatatatttgtagggatgggtttccctaaacaagaagagtggattcaaaaacatcgacacacctttaaaagaactgtaatgatgggtgtgggcggctcatttgaaatatatagtggcacaaaaaaacgcgcacctaaactatttattaaattaaatattgaatgggtatatcgtttattaatcgattggaaacgtattggacgtatgcgtacattcctaagtttatgtttaaagtttttaaagtacaacgaaaaatgaaaaagaaaaaataa

SEQ ID NO: 35106 - DNA, 792 bp, Staphylococcus haemolyticus
atgagcgtatctgtaaatataaataatgtgacaaaagaatatcgcatttatcgtaataataaagaacgcattaaagatgccttaatccctaaaaataagaataatacatttttcgctttagatgatgtctctataacagctcacgaaggtgatgtcataggtttagtcggcattaacggctcaggtaaatctacattgagtaatatgattggtggttctatttccccaacttctggaaatattgaacgtaatggtgagtcatgtgtcatagcaatcaatgcaggtctgaatggtcgtttaactggtgtagaaaatatcgaatttaaaatgttatgcatgggattcaaaagaaaagaaatcaaacaacttatgtctcaagttatagaatttagtgaactcggcgaatttatccatcaacctgttaaaaattattcaagtggtatgcgtgctaaattaggattctcgattaacgttacaattaatcctgatatcttagtcattgacgaagcattatcagttggtgaccaaactttcactcaaaaatgcttagacaaaatttatgaattcaaagaagcgaataaaacgattttcttcgtaagtcataatattcgtcaagttcgtgaattttgtactaaaattgcctggattgaaggcggaaagctcaaagaatacggagatttagaagaggttcttcctaaatatgagcaattcttaaaggacttcaagaaaaaatcaaaagctgatcaaaaagcatttcgcaaaggtttagatgaaaaacgctttattgttaaa

SEQ ID NO: 35107 - DNA, 525 bp, Staphylococcus haemolyticus
atgaaaggctttaagtttgcaggtatagtcgcattattatttgcattagttttagttactgcttgtggtaatgttagcaataatggatcaggtgattcaggtaataaatcgtcatcgaaagattctattaaaattaaacacgaattaggcacaactaaagttcctaaagatgctaaacgtgtcgtagcgttggaattttcatttgtagatgctttagcggcactaaatgttaaacctgttggggttgctgatgacaacaaaccaaatcgtattattaaaccattaaaagaaaaaattggagattataaatctgttggtgctcgtaaacaacccaacttagaagaaatcagtaaattaaaaccagatttaattattgcagatagtaacagacacaaaggtatttacaaagaattaagtaaaattgctccaacaattgaattaaaaagttttgatggagattataatgataatatagatgcttttaaaacaattgccaaagctttaaataaagatgatgtaggtcag

SEQ ID NO: 35108 - DNA, 747 bp, Staphylococcus haemolyticus
atgaacaaagtagatgcatggttatctaaacatgaccttaaaaatctaacaacattgatagttgtaggtgcttttatattatttttaatattattatttatgttaatgaatcatagtgatcaagggagtaatagaattacagtttcagagaatgctgagttacgaactggtccaaatgctgcttatcctgtgatttaccaagtcgaaaaaggtgatacgtttactagattgagtaaatcaggtaaatggatagaagttgaaagcagagatggttctgaaaaaggttggatagctggatggcacacaagcttaaatattgaagcgggtgcgaataaaaaagtaaaccctttgaaaaataaggtcattgtcttagatcctggccatggaggcaatgaccagggtgcatccagtaatacttcaaaaaagagtttggagaagaactatactttaaaaacagctaaagaactgagacgtgctcttgaaaaagcgggggcaacagttaaattaacacgttctgatgatacatatgttagcttagatgatagacaacttaatggtgatgcatacattagtatacataatgattctcttgatagtcctaatgctaatggtgcactgtttattggtataaaaataatcaagaagctttagctgaaacgttaaatacaaacatacaaaagaaagccatgttgtttaatagaggactcgacaagagacttccaagtactcagacaaaccataagccag

SEQ ID NO: 35109 - DNA, 357 bp, Staphylococcus haemolyticus
atgattttacgttatgctgcaaacttaaaacttgctaaagaattatatagctctgctaaaccaaaattaaaaggtgatcaaggtatgatcgatacattccaaaatgtattcggtttaccagaaagctcagttaaattagctggtactgtagaagctgctgccgctgctttttatgctgctagtttcttaaacaaaaacttatctcgtttaggttcaattgctactttcggtgtattaggcgttgctgcttacaaacactttgaagctggacatggtaaagaaggcgctcaacacgctttagacttattaggtttagctgcattaagctttgctgatactttcgattgcgataacaaa

SEQ ID NO: 35110 - DNA, 888 bp, Staphylococcus haemolyticus
gttctaatcatcgttttagctgcatgtggtaataatggtggttcaggtaaatccgattcaaaagaagaaacaaaatcatataaattagatagtggtaaaactataaaaatccctaaagatcctaaacgtattgcggtagttgcacctacgtttgcgggtggtttacataaattaggcgcaaatattgttgctgtaaataatcaagttgatcaaagtccaattttaaaagaaaaatttaaagacacgactaaaattggtgaagctgacgttgagaaagttgctaagaaaaaacctgatttaattattgtttattctactgataaaaacattaaaaaatatcaaaaaattgccccaacaattgtagttgattatggcaaacataaatatcttgaacaacaagaaatgctaggtaagattatgggtaaagaagacgaagttaaaaaatgggaagacaaatggaagaaacaaactgaaaaagatggcaaagaaatcaaagatgcaattggtaaagattcaacagtttctatcttagatgaatttgacaagaaagtttacacttacggcgacaactggggtcgtggtggagaagtattatatcaagcatttggtttgaatatgcctaaaggacaacaagatttagttaaaaaagaaggttgggctgaagtaagccaagaaaaaattgaagacgtagctggtgattatatcgtatcaactggtgaaggtaaatctaaaccaagttatgaaacaactaatatatggaaaaatctacctgcagtgaaaaataataacgttattgaagttaaagctgaaacatactggtataatgacccatatacgcttgactttatgagaaaagatttaaaagacaagttacttaaagctagtaaa

SEQ ID NO: 35111 - DNA, 144 bp, Staphylococcus haemolyticus
gatttgggctacacacgtgctacaatggacaatacaaagggcagcgaaaccgcgaggtcaagcaaatcccataaagttgttctcagttcggattgtagtctgcaactcgactacatgaagctggaatcgctagtaatcgtagat

SEQ ID NO: 35112 - DNA, 135 bp, Staphylococcus haemolyticus
atggtaaaacgtacttatcaaccaaataaacgtaaacatagtaaagttcatggtttcagaaaacgcatgagcactaaaaatggccgtaaagttttagcacgtcgtcgtcgtaaaggccgtaaagttttatcagca

SEQ ID NO: 35113 - DNA, 342 bp, Staphylococcus haemolyticus
gtggagaaagcttaccgtataaaaaagaatactgattttcaaacgatttataaaagagggaaatcggtagcaaatagacagtttgttgtttatacctataatagtaataaaaatcattttcgattaggtattagtgtatctaaaaaattgggcaatgcagtgactcgaaatagaattaaacgtgcgataagggagaatttcaaaattcataaagaagatattattgcacgtgatattatcgttattgctaggcaaccagctaaggatatgactacacttgaaatccagggtagcttagaacatgtattaaaaattgctaaggtctttaataaaaagattaaa

SEQ ID NO: 35114 - DNA, 600 bp, Staphylococcus haemolyticus
atggctcgattcagaggttcaaactggaaaaaatctcgtcgtttaggtatctcattaagcggtactggtaaagaattagaaaaacgtccttacgcaccaggacaacacggtccaaaccaacgtaaaaaattatcagaatatggtttacaattacgtgaaaaacaaaaattacgttatttatatggaatgactgaaagacaattccgtaacacatttgacatcgctggtaaacaacatggtgtacatggtgaaaacttcatgattttattagctagtcgtttagacgcagttgtttattcattaggtttagctcgcactcgtcgtcaagcacgtcaattagttggtcacggtcacgttgaagttgatggtcgtcgtgttgatattccatcatattcattaaaacctagtcaagttatcactgtacgtgaaaaatcacaaaacttagacatcatcaaagaatctgttgaaattaataatttcgtaccagaatacttagactttgatgcagatagcttaaaaggtactttcgtacgcttccctgaacgtagcgaattaccagctgaaattaatgaacaattaatcgttgagtactactcaaga

SEQ ID NO: 35115 - DNA, 642 bp, Staphylococcus haemolyticus
atgcaacatgttgatatgttagaaatagatgtacatttcagtaaagacaatcatttggttgttatacatgatgacactattaatcgaacttcgaatggtgaaggaaaagtaaaagactatacacttgaagaattgttaaaatttgattttggagtaaaacatgataaatcctttcaaaatactaagatttcgacatttgaagaggtgttatccttaattaaaaatttttcaaaaaagttacttattgagattaaagttccacatcaatatccaggaattgaagaagctgtattgaatgctttagaaatatataaagttcctaaatacaaagcaatcattcaatcttttgatgaagattgtgtgaaacgtttaaactcattggatagtgagtatcaattagggctgcttattagtagaaagaaatattggtataaatctccaaattttgaagaaatatctgattatgcaaattttattaatcctaattacaaattagttaattctagatttataaaaaatgcacatagtcaatcattgaaggttattccatatactgtgaataaaccgaaagacgctaaaaaacttatcaaccttggcgtagatggcattatttctgatttaccagaggatatctttagatta

SEQ ID NO: 35116 - DNA, 1356 bp, Staphylococcus haemolyticus
gtgcaatttatgcctgaaaaagtacgtacatctccacagtatgagtcgtttcatgaattgtataaaaattacacaacgaaagaattaacacaaaaagcaaaaacattaaaacttactaattatagtaaattgaataagagtgaattagttttagctatcatggaagcccaaatggaaaaagatggtaactattacatggagggtgtcttagatgatatccagcctgatggttatgggttcctaagaacagtcaactattcaaaaggtgaaaaagatatttatatatctgcaagtcaaatacgacgtttcgaaattaaacgtggtgataaagtaaccggaaaagttcgtaaacctaaagataatgaaaaatattatggtttattgcaagttgactttgttaatgatgagaatgctgaagttgtaaaaaaacgccctcactttcaagctttaacgcctctctatcctgaggaaagaatcgttttagaaacagatccccaaaattattcaacacgtataatggatttagttacgcctattggtctaggtcaacgtggacttattgttgcacctcctaaagcgggtaaaacgtctttattaaaagaaattgcaaatgcgattagtaaaaataaacctgatgcaaaattatttattttattagttggggaacgtccggaagaagtaactgatattgaaagatctgttgaatctgctgaagtagtgcactcgacttttgatgagccaccagaacaccatgttaaagtagctgaattattattagaacgtgctaaacgattagttgagattggtcaagatgttattattctgatggactcaattactcgattggcaagagcgtataacttagttataccgccaagtggaagaacattatcaggtggtcttgatcctgcttcattacacaaacctaaagcattctttggtgctgcacgtaacattgaagcaggaggaagtttaacgatattagccactgcattagttgaaactggatcacgcatggacgatatgatttatgaagaattcaaaggaacgggaaatatggaacttcatcttgatcgtaaattatctgaacgtcgaattttccctgcgattgatattggaagaagttctacgcgtaaagaagaattactaattagtaaatctgaacttgattcactatggcagttaagaaacatgttcacagactctacagatttcacagaaagatttattagaaaattaaaacgctctaaaagtaataaagaatttttccaacagttgcaaaaggctgctgaagaaagtacaaaaacaggaaaccgattatttaacgaatgtcagtttgagggttgcgttttaagc

SEQ ID NO: 35117 - DNA, 789 bp, Staphylococcus haemolyticus
atgttttcagatttagaaggtaaagtcgtaattataactggtgctgggagtggtattggtaaatcctttgcagaaaactttggtaaatcaaaagcaaaagtagttttaaattatcgctctgaccgtcatttagatgaaattgaagaaattaagcatatgattagtaatgctggtggtgaagcaattgccgtacaagctgatgtggctgtcgaggaagatgtaaaacgattagttcaatctgctgttaaagaatttggcacgctagatattatgataaataatgcaggatttgaaaaacctatcccaacccataaaatgtcagttgatgaatggcaaaaagtgatagatattaatttaactggtgcattcgtaggttctagagaagcagttaatcaatttttaaaagaagataaaaaaggaataatcatcaatacatcaagtgtacatgatacgattccatggcctaattatgtcaattatgctgctagtaagggtggcttaaagttaatgatggaaacaatgtctatggaatacgcacaatatggtatacgcataaacaacatttctccaggtgcgatagtcactgagcatactaaggagaaattctctgatccagaaactcgtgctgagacattggaaatgattccagctaaagaaattggtgaagctcaagatgtagctaatgtggcattattcttagcttcagatttagcgaactatattcacggtactacaatttacgttgatggtggtatgactaactaccctgcctttatgggtggtaaaggt

SEQ ID NO: 35118 - DNA, 528 bp, Staphylococcus haemolyticus
atgaataaagtagttaaaactattgcctcaacaacattagcatttggaacacttttaggagtgagtagcgcggtattaccagtacaagatactgcccatgcagcaacgcaaactaaagggtattactactcttataatggttacgtggataaagacgctaaattcttaacagacaagaactttattaacgcaatcaaacatgacaacattaaatttaatggtatcaaacttgctaaaacaaatagcacaactgtaaaagaaaagtataatcagaaatttactggcgtaacaagcaatggcaaaaaagcgaataaattacaatttatagttaaaggcgatttaacgtacagtcaacttaaaaaagcttatggtaaagatttgaaaaaagtaaaaggcaacaataatgttaaaggtagcggtatttacgtttataaaccaaataaagatggtttagcaacatcatttgttcttaataacaataaagttgtagaagtagatattagttacgtaggctttacaacaagtaaa

SEQ ID NO: 35119 - DNA, 835 bp, Staphylococcus haemolyticus
atgtttaacgagaaagatcaactagcgattgatacgattagagctttaagtattgatgcaatcgaagaagctaattcaggtcaccctggattacctatgggagcagcaccaatggcttatactttatggacacgccacttaaattttaatcctcaatctaaagactattttaatagagaccgcttcgtattgtcggctggacatggctctgcgctattatacagcttgttacatgtttcaggcagtcttgaattagaagaattaaagcaatttagacaatggggttctaaaacacctggacacccagaatttagacatactgatggtgttgaagttactactggcccacttggacaaggctttgctatgtctgtaggtatggctttagctgaagaccatttagctggtaaatttaataaagatgatttcaatatagttgaccactatacttatgtgctagcttctgatggtgatttaatggaaggtatttctcatgaagctgcttcatttgctggccataaccaattagataaactaattgttttatatgattcaaacgatatttcattagatggcgaattaaataaagccttctctgaagatgttaagaaacgatttgaaagttacggttggaatcacatattagtaaaagatggtaatgatttagacgctatcgataaagcaataactaaagctaaatctcaaaatggtccaactatgattgaagttaaaacaattatcggttatggtgctccaaacgtgagtggtactaatggtgttcatggtgcaccactaggttcagatgagagaaaattaacttttgaagcatatggtt

SEQ ID NO: 35120 - DNA, 600 bp, Staphylococcus haemolyticus
gtgagccccgtggctattaaagatttatttaataatttttttctaatggatgatgaagaagaagtagaaagccctgaagagcgacaacgtcgtgtagttcagaatgaagaaaatgaaacaaacaatgttcaacagaatcaaccgcaacaatcagaacgttcatatagtaatcaaagtaaattgaaaacagtaccacaaaagaaaacaacaagaaattataactcagaagaaaggaatgtgcgtatgaatcaacccccatcaaagtcaaacggcaaaaatgttgttacaatgaatcaaacgtcgcaaagttatagtggttatgaaagttcaaaaatgtgcttattcgagccacgagtattttcagatacacaagatatcgcggatgaattaaaaaaccgccgtgctactttagagaatttacaacggattgataaaatttcagctaaacgcattattgatttcttaagtggaacagtttatgcgattggtggagatattcaacgcgtaggtactgacatattcctttgtacacctgataatgtagaagttgcgggaagtattacagatcatattgaacaaatggaatcgcaacactacgaa

SEQ ID NO: 35121 - DNA, 692 bp, Staphylococcus haemolyticus
agtacgacaacggaagatcaaacaggagaagttattgataaaatagatgtacaagcaaacgcaataaatataaacgaatagacgctgttttaaaacaatttgaaggaattatagaacaagttccacctatgtattcatctgttaaagtaaatggtaaaaagttatatgagtatgcacgtaaaggtgaaactgttgaacgaccaattcgtaaagtaaatatagattcgatagcacgcacctctgaacttcaattcgaagatgggaaatgtcattttaatattgaggttaagtgtggtaaaggtacatatattcgcacattagcaacggatattggtaaacaattagggtatccagctcacatgtcgctattgacacgaataaattcaggtgggtttgacattaaagatagtataacattagatcaaatctctcaattacatgagcaagacacattacaaccacacttatttcctttagaatatggtttgaaaagtttgccgaaaatttatgtttctgatgaaaatataaaaactagaatattaaatggacaaaagtttaataaaaaacaatttaatcaaacgattgaacaacaacttgtctttattgattctgagacggagaaagtaatggcaatttatattcaacatccggaaaaaaatcatgaaataaaacctaaaaaagtatttaattaa

SEQ ID NO: 35122 - DNA, 969 bp, Staphylococcus haemolyticus
atgaaagtgatagaagtaacccatccaattcaagaagatcaattgataaaagaagacgttgcgatggcatttggcttttttgatggcatgcatcgtggtcatcataaagtgtttgaagcattggatgaacgtgctgcagcgcaaaatctaaaaaaggcagtaacaacattcgatcctcatccttctgttgtgttaaatcctgaacgtaaacgcacggattatttaacaccactttcagataaacttgaaatgattgaacagcacgacgtggattattgtattgttattaatttttcttcacgatttgcgagtgtaacagcagaagagtttgttcaagactatattattaataatcgtgttaaagaagtaattgctggttttgactttacttacggtaaattcggaaaaggtaacatgtccgtattaaatgaaatggatgaatttagtactacaatagttggtaaacaagaaatggaaactgaaaaaatctctactactgcaattagggaagctttgaaagaagggaatttaaaaaaggtaaatgaacagttaggttatctctatcgaattaaaggcactgtagttcaaggagagaaacgtggacgtacaattggctttcctacggcaaatgttcaacctagtgatgattatgttttacctaaaaaaggggtttatgctgttagtatggcaataggtgctgaaaataaaatctatcgtggtgtagctaatgttggtgttaaacctacttttcacgatccttctaaagctgaagtagtgattgaagttaatatctttgattttaatgacaatatatatggtgaacgtgttattgtttattggcatcattacttaagaccagaagttaaatttgatggtattgatccattagttgaacaaatgaataatgataaagaaaaagcgaaatacttactttcagttgatttcggtgatgatgtatcgtataatatt

SEQ ID NO: 35123 - DNA, 269 bp, Staphylococcus haemolyticus
atggcaatcactcaagaacgtaaaaatgaaattatcaaagaatatcgcgtgcacgaaactgacactggttcaccagaagtacaaatcgctgttttaacagcagaaatcgctgcgttaaacgaacacttacgtgaacacaaaaaagaccaccattcacgtcgtggattattaaaaatggtaggtcgtcgtcgtcacttattaaactacttacgtggtaaagatattcaacgttaccgagaattattaaatcattaggtatacgacgttaa

SEQ ID NO: 35124 - DNA, 990 bp, Staphylococcus haemolyticus
gaggaaatagccgaaaaattgcaaaatttcgatatggaatctgatcaaatggatgatttctttgaccaattaaatgataatgatattagtttagtaaatgagaaagatagctcagatactgatgaaaaattaaacccaaatgatttaagtgcccctccaggtgtcaaaattaatgaccctgtaagaatgtacttaaaagaaattggccgagttaatctactaagtgctcaagaagaaattgaattagctaaacgaattgagcaaggtgatgagattgctaagtctcgtttagcagaagctaacctacgacttgttgtaagtattgcaaaaagatatgtaggtcgtggcatgttattcctagatttaattcaggaaggtaacatgggattaataaaagctgttgagaaatttgattttagtaaaggatttaaattctccacttatgcaacttggtggattcgacaagcaattacaagagcgattgccgaccaagcacgtacaattagaattccagttcacatggttgaaacaattaataagttaatacgtgttcaaagacaattattacaagatttaggtcgtgatcctgcacctgaagaaatcggagaagagatggatttacctccagaaaaagtacgtgaaattcttaaaattgctcaagaaccagtatcattagaaacgccaataggtgaggaagatgatagtcatttaggtgacttcattgaagaccaagaggcgcaaagtccatctgatcatgcagcttacgaacttttaaaagaacaattagaagatgttttagatacgcttactgaccgtgaagaaaatgttttacgcttaagatttggtttagatgatggtcgaacaagaacacttgaagaagttggtaaagtctttggtgttacgcgtgaaagaattcgtcaaattgaagctaaagctttaagaaagcttagacatccaagtcgtagcaagcgactaaaagactttatggat

SEQ ID NO: 35125 - DNA, 738 bp, Staphylococcus haemolyticus
atggaacaaattacgtcagcgcaaaacagtaagataaaaaatgcgaataaattaaagaaaaagcgagatcgtgataaaactggacaagcattgattgaaggtattcatttaatcgaagaagcttaccaaagcggcattgccattaagcaactatttgtaattgaaccaaatagaacagatgaagcgcttaaggattatgctgaagagacatttgaaattaatatgaaagttgcagaatcattatcaggtacgataacacctcaaggcttttttgctgtaattgaaaagcctaaatatgatgttaagcaagcaaaacaagtattattaatcgatcggattcaagatccgggtaatctagggacattaattcgtacttctgatgcagcgggaatagatttgattgtaatggaaaaaggtacagccgatccatatcaagacaaggttttacgagcaagtcaaggtagtgtatttcatattccggttattaccgcagatttgaaaacatttatcgcaggttttaatggaccagtttatggtactgcgcttgagaatgcacaaccatataaggaggtagcatctcaagatatatttgccttattactaggtaatgaaggtgaaggtgtgaacaaagcattattaaatgaaacatcacaaaatttaacaataccaatttacggcaaggcggaaagcttaaacgtagctattgctggaagtattttactttatcatttgaaaggt

SEQ ID NO: 35126 - DNA, 1118 bp, Staphylococcus haemolyticus
ggtggcggacattaaagaacttttcaatatttgctatgggcatcatgccctacatcaccgcatctatcgtaatgcaattactacaaatggatattgttccgaaattctctgaatgggcgaaacaaggtgaagtaggtaaaagaaagcttagcaatgtaacacgttatttcgctatcattttggcttttatacagtcaattggtatggcattccaatttaataactatttaggtggtaaattaattattcaccaatctattatgagttatttattgattgccgttgttttaacagcaggaactgcatttctaatttggcttggtgatcaaatcactcaattcggagttggtaatggtatttctatcattatctttgcaggtattttatcaactttgccttcatcaattattcaattcgtgcaacaagcattcgttggtaatgatgatactacgttggcatggttaaaagttattggtttaattgtaggattagttttacttacaattggtgctatttatgtactagaagcgaaacgtaaaattcctatccaatatgctaaaaaacagtctgcacaaagattaggatcacaagcaacttatctacctttaaaagttaactctgcaggggtaattccagtaatctttgcgatggcatttttcctattgccaagaacattaacattgttcttccctaaagctgattgggcgcaaactatatctgaatatgctaacccttcaaacacttacggcatgattgtttatgtagtattaattattgcatttacgtatttctatgcctttgttcaagttaatcctgaaaaaatggctgataacttgaagaaacaaggtagttacgttccaggtataagacctggtgaacaaactaaaaaatatattactaaagtactttatcgcttaacttttgtcggctctattttcttagcagtcattgcgatattaccaatattagcgactaagttcatgagtttacctcaatcaatacaaattggtggtacaagtttattaatcgtaattggtgttgcaattgaaactatgaaatcacttgaagctcaagtgagtcaaaaagaatataaaggctttggtggtagataatttgta

SEQ ID NO: 35127 - DNA, 648 bp, Staphylococcus haemolyticus
atgaatatcattttaatgggtttacctggcgcaggtaaaggaactcaagcgagtgaaaatgttaagaaattcccaataccacatatatctactggtgacatgttcagaaaagcgattaaagatgaaacagatttaggaaaagaagctaaatcttacatggatcgtggagaattagtccctgatgaagttactgtaggtatcgttaaagaaagaatatctgaagacgatgcaaaaaaaggattcttattagatggcttcccaagaacaatcgatcaagctgaggcgttaaatgatattatgtctgagcttggtagaaacatcgatgctgtcattaacatcgaagttcctgaggaagaattgatgaatcgtcttacaggtcgtcgtatctgtgaaaaatgtggtacgacttatcatcttgtatttaatcctccaaaggttgatggtatttgtgatatcgatggtggaaagctttatcaacgcgaggatgataatcctgaaacagtatctaatcgcttaaacgttaatgttaaacagtcaaaacctattttagagtactataatgaaaaaggtgtgctaaaaaacattgatggtgcgaaagatattgacgatgtaaccaaagatgtcattgatatcttagatcaattaaaa

SEQ ID NO: 35128 - DNA, 787 bp, Staphylococcus haemolyticus
acaccaggtaaaggtggacaagttgttgaaggtgtacctgtatataatactgttgctgaagctaaagaagaaacaggtgctaacgtatctgtagtttatgttccggcgccattcgcagcagattctattttggaagcagcagatgcagatttagataatggttatttgtatcactgaacatattcctgttgttgacatggttaaagttaagcgttacttagaaggaagaaaaacacgtttagttggaccaaactgcccaggtgttattactgctgatgaatgtaaaattggtatcatgccaggatatatccataaaaaaggtcatgtaggtgttgtatcacgttctggtacgttaacttacgaagcggttcatcaattaactgaagaaggcattggtcaaactacagctgtaggtattggtggcgaccctgtcaacggtactaactttatcgatgtacttaaagcgtttaatgaagatgaagatactaaagctgttgtaatgattggtgaaatcggtggtactgctgaagaagaagcggcggaatggattaaagctaatatgactaaaccggttattggcttcattggaggtcaaacagcccctccaggtaaacgtatgggtcacgctggtgcgattatttctggcggtaaaggtactgcagatgaaaaaattaaaacattaaatgaatgtggtgttaaaactgcggacacaccttcagaaattggtactacattaatcgaagcagctaaagaagctggcatttacgaagaattattaacaattaag

SEQ ID NO: 35129 - DNA, 939 bp, Staphylococcus haemolyticus
atgagaaatgtagaaaagttaaatccaggagactcggttgaaaatttcttcttaattcatagagctacacaaggtgttactgctcaaggaaaagactatatgactttattcttacaagataaaagtggtgatattgaagccaaactatggactgttagtaaagaagatatgcagattcttaaacctgagacaattgtttgggttaaaggtgacgtgattaattatcgaggtcgtaaacagatgaaagtcaatcagtttagattagctaaaccagaagacggatttaagactcaagatttcgttgctggtgcacctttatctccggatgaaatccaagaaaacatttcacactatatattagatattgaaaatgctaatttacaacgtataacacgtcatttattgaaaaaatatcaagataaattctttacgtatcctgcagcaagttcacaccatcataattttgcaagtggactaagttatcacgtgcttacaatgctagaaatagctaagtcattatgcaacatttatccattgttaaaccgtagtttgttgtatagttcaattattttgcatgatttaggtaaagtaagggaattaagtggtccagtggctacaacatatacagttgaaggtaatttgttaggacatatatcaattgcaagtgatgaagttgcggaagcggcgaaagagttaggaattgatggtgaagaagtgatgttacttcgtcatatgattttagcacatcacggaaaaatggaatttggatcacctaaattgccacatttaaaagaagcggaaatattattctttatcgacaatattgatgcaaaaatgaatatgtttgaaaaagcatttaagaaaacagataaaggtcaatttactgaaagaatttttggtatggaaaatcgacaattctacaaaccggaaaaattagac

SEQ ID NO: 35130 - DNA, 967 bp, Staphylococcus haemolyticus
gtgttgaaagttaatacgtcactatggaacaatactgaacatattgtgattgctgtttcgacaggtgtagatagtatgtcactcttccacaatttactttcacaatcatctcgtacttataaacaattgacctgtcttcatgttaatcatggcttacgagaagcatcacataaggaagaagcgtttatagaagcattttgtaaacaatatgagataacttgctatgtaaagcatttgaatttaacggatgtagtagcgcaagggaagagtatacaagctgatgctcgacaattgcgttatgagtggtttgacgaaatgatgaaaaggttagatgcagatgtattacttacagcacatcatttagatgaccagctagaaacaatcttctatagactatttactggacgttctacacgaagtactctagggatagatgttcaatcaattcgtaatcattacacaatatgtcggccattacttgaagtttcaaaagaagacatacgcgactatcagcacaaatatcaagttccttattatgaagatagctcaaacagtgacaataaatatgttaggaatgacattcgcaatcgactattaccagcgattaatcaaaatgcagatcttgatagtacgcatttactaaaattgaaacgttggcatgatattcaattacaggagagtcgaaaaaaagcccaatcctttatagagaatgattgtctaattaataaaaatggaactcaaatacaattttcacgaaatgcatttaatcaacttgatgatatagctaaaatgatattgttagatcagctcttcgaacaactgcagttgaataaggcattttcagagaaacaatatcatgaatggtttcatcagattagtaatcaaatcgcacaatttgagatatccctcactgaaaaatgggtaattcaaatagcatatgataaatttattatatgggcgaaaatga

SEQ ID NO: 35131 - DNA, 738 bp, Staphylococcus haemolyticus
atggcgcacaatgtcaaaaaagcaattattgcttggggtgatgatgatcatctaagacaacttaaagctgatgttccaatttattactatggattaaataaaaatgatgatatttacgcagataacattcaaatcacggataaaggcactcaatttgatgtttatgttaatggtgaatattatgatcaatttttatcacctcagtacggtgatcataatatccaaaatgcattagctgttatcgcaattagttacctagaaaagatggacgttaacaacattaaagaggcattagaaacatttggtggtgtaaaacgtcgctttaatgaaacaaatgttgctaatcaagtattagtagacgattatgctcaccatccaagagaaattagtgctacaattgaaacagcacgtaaaaaatatccaaataaagatattgtggcagttttccaaccacatactttctcaagaacacaagccttcttagatgaatttgcaacatcattaagtaaagcggaccatgtttatttatgtgaaatatttggttccattcgtgaaaatactggcgatttaacgattcaagatttgataaatcgtattgacggatctgcgcttatcgaagaaaataatattgacgtattagatcaatttgataatgcagtcatcttattcatgggtgctggtgacattcaaaagttacaacgtgcatatgaagaacatgtcggcatgacaaatgaattt

SEQ ID NO: 35132 - DNA, 971 bp, Staphylococcus haemolyticus
gaagaaaatttttggagtgaattaccacgtcctttttttattttagcacctatggaggacgttactgatatcgtttttcgacatgttgtaagtgaggctgctagacctgatgtttttttcactgaatttacaaacactgagagttattgccatcggaaggtattcatagcgtccgtggaagattaacattcagcgaagatgaacagcctatggtagcacatatatggggcgataaacccgagcagtttagagaaatgagttttggtttagctgaaatgggttttaaaggtatagatttaaatatgggatgtccagtagctaatgttgcaaaaaaaggtaaaggttccggtttaatattgagacctgaaacagctgctgagattattcaagctactaaagctggtggattacctgttagtgttaaaacccgtttaggttattatgatattgaagagtggagagattggttaaaacacgtttttaaacaagatatcgcaaatttatctatacatcttcgaacacgcaaagagatgagtaaagtagatgcgcattgggaattaatcgcagcaattaaacaattaagagatgatatcgcacctaatacattactaacgattaatggagatattccagatagaaaaactggacatgaacttgcgatgaaatatggtgttgacggcgtgatgataggtagagggatctttaataatccgtttgcttttgaaaaagaaccccgtgaacatactagtaaagaactattgaatttgtttagattgcatttatcattgtttgagaaatattcaagtgatgaaagtcaacaattcaaaagattaagaaggttttttaagatttatgtgaaggggattaaaggagctagtcaattacgtcatcaattaatgagtacagaatcggttgatgaagcacgcgatttattagatgaatttgagtctaaaattgaagaggatgtaaat

SEQ ID NO: 35133 - DNA, 2436 bp, Staphylococcus haemolyticus
gtggatttaatccagcggataccaattaattggaaaaattatccttctgtacaaggggataatattcaatatggacagtatataggagctaaagcaaatgaattattaaataaagctgaatcatatatgaaagaatatgaagatgaatatatttcaatggaacacgtccttcgtgctgcgatggatattgatgatactactaaacaatttgttggaaataaagaagaagtagtgaaagaaataataactaaagtaagagggggaaatcatgtgacttcacaaaatccagaagtaaattatgaagctttagaaaaatatggtcgtgacttagtagaagaagtacgtcaaggtaaaatggaccctgttattggcagggatgaagaaattcgtaacacaattcgaatcttaagtcgtaaaacaaaaaacaatccagtattaatcggggaacctggtgtaggtaaaactgcaattgttgaaggtttagcgcaacgaattgtacgaaaagatgtgcctgaatcattactcgataaaacaatttttgaattagatttaagcgcattggttgctggtgcaaaatttagaggtgaatttgaagagcgacttaaagcagtacttaaagaagtaaaagagtcagatggacgcattattttatttattgatgaaattcatatgttggttggtgcaggaaaaacagatggtgcaatggacgctggtaacatgttgaaaccgatgttagcacgtggtgaattgcattgtattggtgcaactactttaaatgaatatagagaatatattgagaaagattctgcattagaacgtcgtttccaaaaagtaggcgtaagtgaatcagatgtagaagatacaatttcaattttacgtggattaaaagaacgctatgaagtttatcatggtgtacgtattcaagaccgtgctttagttgcagcagctgaattatcagatcgatatattactgatagatttttacctgacaaagcaatcgatttagttgaccaagcatgtgcaactattcgaacagaaatgggttcaaatccaactgaattagaccaagttaatcgtcgagttatgcaattagaaattgaagaaagtgctttgaaaaatgaatctgacaacgcaagtaaacatcgtttagaagaattacaagaagaactttcaaatgaaaaagaaaaacaagcgtctttacaatctcgtgttgaacaagagaaagaaataattgcgaaagtacaagaaaaacgtgctgaattagatcgcagtcgtcaagctctagaagatgcacaaaccgagggtaatttagaaaaagcagcagaattacaatatggtacaatacctcaattagaaaaagaattaaaagaatttgaagaagcttatcaagatgaacaaggtgacagcgaacgcatgattcgtgaagttgtttctgatgaagaaattggagacatcgtaagtcaatggactggtattccagtatcaaaattagttgaaactgaaagagaaaaattattaaatctaagtgatatcttacacgaacgtgttgtgggtcaagataaagcagtagatttagtatctgatgctgttgtaagagcacgtgcaggtattaaagatcctaatagaccgattggtagtttcttattcttaggaccaactggtgtaggtaaaactgaattagcaaaatcattagctgcatcattgtttgattctgagaaacacatgattcgaatcgacatgagtgagtatatggagaaacattcagtttctagattgattggtgcccctcctggttatgtaggtcatgatgaaggaggacaattaacagaagcggttagacgtaatccatattcagtcattttattagatgaagttgaaaaagcacatagtgatgtattcaacgttttacttcaaatattagacgaaggtcgtttaactgattctaaaggacgcagtgttgactttaaaaacactatcattattatgacaagtaacatcggttcacaagtattacttgagaatgttaaagatactggtgacattactgaagaaactgaaaaagctgtaatggatagcttacatgcattctttaaaccagaaatcttaaaccgtatggatgatatagtattatttaaaccattatctattaatgatatgagtatgattgttgataaaatcttaactcaattaaatatacgcttaatggatcaacgtatttctattgaagtttctgatgacgcgaaaaaatcgttaggcgaagaagcgtacgaaccacaatttggtgcaagaccattgaaacgttttgttcaacgacaaattgaaacaccattagcacgtatgatgattaaagaaagcatgcctgaaggtactgtggtaaaagttgatataaatgatgatcatgaattaacatttgatgtacaaaagcctgaaaatgaa

SEQ ID NO: 35134 - DNA, 1271 bp, Staphylococcus haemolyticus
cgttgtttaatagcaaatagaggagaaattgcagtccgtatcattagagctgtcgtgaaatgggcatagagactgttgcgatatatgctaaaggagatgagcaaagtttacatgttagcttagctgatcaagcagtttgtattggagaagccaatcctttagatagttatttaaatattgaacgtatcattggtgcagctgaaataacaggtgcgaatgcgatccatccagggtatggatttttatcagaaagtacaacttttgctgaaaaagtagaagaaaataatattcaattcattggtccaagtaagaaaacaatggaactaatgggtgataaaataactgctcgacaaactgtagatgatgcaggtgttcctgtaattccagggtctaaaggtgcagttaattcagttgatgaaataaaggaactagctgaagaaattggctatcctgttgttttaaaagcagcaagtggtggtggaggtaaaggcatccgtatagtaaaagagccagaacaacttgaaaaatcccttaaagaagcgaaaagcgaaggtcaaaaatactttaacgatgacagagtttatgttgaagcatttatacctgtagcgaaacacgtggaagtacaaattattggtgacggtaaaggtaattatgtacatttaggcgaaagagattgctcggttcaacgtaaaaaccaaaaattaatagaggaatgtccttgtgccgctttaactgaagagagacgccaacagatatgcgcagatgcagttgcagtcgctaaagcatcaaattatcgaagtgcaggtacaattgaatttttagtaactaaggatgcacactactttattgaaatgaacgcacgtattcaagtggaacatactgttacagagatgcgcgctgatagagatttattacaagcccaattatacttaatgcaacatgataaattaccattctctcaagatgatattgtgtttaatggacatgtaattgaagcgcgtatcaatgctgaaaatccagaaaagaaatttcaacctacccctggtaaagttaaaaagttacatttacctcaaggtttcaacatacgtgtcgattctctgctttatcctgggtatcaagtatcaccttattatgattcgctagttgctaaagttatagtaaaagatactaatcgaaaaacagctataaacaaattaaaagtagcacttgatgaaatggttatagatggatttacaacaactgcaaactttttatatgcagttttaagttac

SEQ ID NO: 35135 - DNA, 750 bp, Staphylococcus haemolyticus
atgcgcatagacttaaattgtgacttaggtgaagcgtttggaaattactcattcggtggagataatcaaatcattccattaattacatcagctaatattgcttgtggcttccatgctggcgatgaaaatgtcatgtatgacacaattaaacttgttaaggataatggtgtaggtattggagctcatcctggattaccagatttaaaaggatttggtcgtcgcaacatggatattacaccaaaagaaatctataatttagttgtttatcaacttggtgcgttagatggattttgtaaggtacatcaaacacgtattaatcatgttaaacctcacggtgctctctacaatatgggtgcaaaagataaaaacattgcacatgcaattgctcaagctgtatatgattttgattcttcactaatcttagtagggttatcaaatacattattaataactgaagctgaatcattaggattacgtactgcatctgaagtgtttgctgacagacgatatgaagacaatggtcaactcgttagtcgtaaagaggcagatgcagtaatcactaatactgaagaagccttagatcaagttttaaaaatggtaattgaaaacaaagttgttagtaaaaacggaaaagaaattgatttaaaagctgatacgatttgtgtgcatggagatggggctcatgctctagaatttgtatcacaaattagagaaaaattaacgaaggaaggcattgatattcaatcctta

SEQ ID NO: 35136 - DNA, 363 bp, Staphylococcus haemolyticus
atgtctaaaacgccatacgatattataggtgaaacagcactttataatatgattgatcatttctatgctctagttgagaaagatgacagaatcaatcatttgttccctggggattttgccgaaacgagtagaaaacaaaagcaatttctcactcaatttctaggtggaccaaacctatatactgaagaacatggacatccgatgttaaaaaagagacatatggaatttaaaattacaacttatgaaagagatgcatggttagaaaatatgcatactgcaataaccgaagcacagtttccagctggtgttggagagtatttatatgaacgtttacgtctaaccgctaaccacatggtaaattcc

SEQ ID NO: 35137 - DNA, 795 bp, Staphylococcus haemolyticus
atggctgaagaactaaaaattgtagacaatagaagtcgtgaagatgctaatctgtcacctgtaaataaaattgaaatttattcattttttgatccatttaatacagattgctttaaattatcagcgattatttctaaattaagaattgaatataatcaatatatccgtatcagacatattctaaacccttcattgaaagtacttactaagtgccaagcgcaaagtacatctgattttgataatatcgccttagcttataaagcggctgaattacaaggtcgtttaagagcggaacgtttcatccatttaatgcaaaatgaaattattcctaagaaggatattattacggaagaaatgatttgtgactgcatcattaatgcaggtttagattacaatgaattcaaagaagatttacaaaaaagcaaattaaccgaaagtttaaaaatagatttacacattgctcgagaaatggaaattgagcaagcaccttcactcgtatttttcagtgaagatgttcatgaggaaggcctgaaagtagaaggattatatccatatcacatttacacatatattattaatgaattaatgggtacgcctattgaaaaaaatcttccacctaaaattgagcattatattcaaaagaaacaactcgttactatggaagaactattgaccatatatgagtggcccgaaaagttaatgacaaaagaacttaagaaattagcgttacaacaaaaagtagaaaaacttcaatatcctgaaggagatttttggcaatcaaaaatgcctagaata

SEQ ID NO: 35138 - DNA, 564 bp, Staphylococcus haemolyticus
atgaagcgaattgcagtatattgcggtgctagtaaaggtaaagaccccatttatgttaaagaagcatacgaacttggtaaatatatggctgagcaaggctatgaattagtttttggtgcaggttctgtaggtattatgggtgcaattcaagatggtgtattagatcacggtggacatgctattggtgtaatgcctaagatgttagatgaaaaagaaatcactagtcaaaaagtgagcgaacttattcttgtagattcaatgcatgaacgcaaacaaaaaatggcggaacttgcagatgcttttgtaatgacccctggtggcgctggatctcttgaggaatttttcgagacttatagttgggcgcaaattggcattcatgaaaaaccaattgccgtttataatttaaatggattcttcaatccacttcaacaacttataaatagtatgattgaagaaggatttattgatgaaaaatataaacatttagcacctttatataattctaaagaagatttaattaatgggttacttaattttaaacccctaggtatacgtacatacgat

SEQ ID NO: 35139 - DNA, 246 bp, Staphylococcus haemolyticus
ttggcaaagtatacaatcgttgatatggatacatgtattgcttgtggagcatgtggtgctgccgcacctgacatttacgattatgacgacgaaggtattgctttcgtaatccttgatgataatcaaggtactgcagaagtaccagaagaattatatgaagatatggaagatgcacttgaaggttgtccaactgattcaattaagattgaagaagaaccatttgatggtgatgctcttaaatttgaa

SEQ ID NO: 35140 - DNA, 1590 bp, Staphylococcus haemolyticus
atgtcagtagatacatacggcgaaacacctaaaattaaaaaattattggaaaaagaaagctctctttttcagctttcaacaactcaactttattacaaaattatggataataatgaaggagaattaactgaacttggtgctatcaatgcgagcacaggtaaatacactggacgttcacctaaagataaattcattgttacagaaccttcttataaagataatattcattggggagatatcaaccaacctatcgatgaagaaactttcttaaatctctactctaaagttttagactatcttgataaaaaagacgaactttacgtttttaatggttatgcaggtagtgacaaagacacacaattgaaacttacagttatcaatgaacttgcatggcacaacctttttgctcaaaacatgtttatccgcccagattctaaagaagaagctagtaatataaaacctaacttcacaattgtttcagcacctcactttaaagctgatcctgaagttgatggaactaaatctgaaacttttgttatcatttcattcaaacataaaaccattttaattggtggtacagagtatgctggtgagatgaaaaaaggtatcttctcagtaatgaactatttgcttccaatgcaagatattatgagtatgcattgttctgcgaatgttggagataaaggagacgtagccttattcttcggattatcaggtacaggtaaaacaactttatcagcagcacctgatagaaaattgattggtgatgatgaacacggttggaataaaaacggtattttcaatattgaaggtggttgttacgcaaaagcaatcaacctttctaaagaaaaagaacctcaaatttataacgcgattcaatacggtactatattagagaatactgtggttaacgagcgtggtgttgttgatttcgatgataattcatatactgaaaatacacgtgctgcttatccaattcatcacattgataatattgtattaccatctaaagcagcacatcctaatacaataattttcttaactgctgacgcatttggtgtacttccacctattgctaaattaactaaatctcaagcgatgtaccatttcttaagtggtttcacttctaaattagctggaactgagcgtggcgttactgaaccagaaccatcattctcaacttgttttggtgcacctttcttaccacttaatcctattaaatatgcagatttattaggtgagctaatagataaacatgaggttgatgtatatttagttaacactggctggactggtggtaaatacggcgtaggtagacgtattagtctacattacactcgttatatggtagatcaagcaattaaaggtaaattgaaaaatgcagagttcacaaaagatgagaaatttggtttaagtattcctactgaaatggaagatgttccaaaaacaatactgaatccaattaatgcttggagtgattctgataaatatcgcgctcaagcggatgacttaattaaacgttttgaagaaaacttcaagaaattcggtccagaagttgaagaaattgctaacactggtggctttaacaaa

SEQ ID NO: 35141 - DNA, 837 bp, Staphylococcus haemolyticus
atgtggaaaatgggaaactgaaccacgatgctaaaaggtgtcgtggttatagtacataacattttagaacacactggcagatatgcatacgttattacgatgttaagacgtaatggttatcacgttataatgggtgatttacctggacaaggtcaaacatctagagcaaacaagggacaacttgagcattttgatatataccatgaaacactaatagaatgggttagaattgctaatgaatacaagattcctacttttgtcatgggtgttggactaggtggattaattttattaaatgtacttgaaaaaacagaattgcctatcgagggtatgttactcctttctccattgttagaatttaaaagaaataataagacacgtaaaaatatgttaatttcaaatgtaggtaaaggatctaaggacgcacgattcaaattaggtattgaaactaaagatttaacgcgaaatgatgaagttattgaagaaactaaacaagatggattaatgctaagaaaagtaacctacaagtggtataacattttgttggaaacaatgaaagatacagttcaacatttcaaggatatacaatctatgccaacgttactaatgtatggaactgaagataaattattggaattacgttcattcaatgaacttaaaaataatttaaacactaatgaattttattttaaagtatgggaaggcttctatcatgaaattcataatgaacctgaacgtgatcaagtgatgcgttacgtgttgacatttttaaataatagtgtgaatacaatggggtttattgtaaatgaagaagaaatcgaagaagtttaaaaatta

SEQ ID NO: 35142 - DNA, 987 bp, Staphylococcus haemolyticus
atggagacattattttcaggaattcaacctagtggaatacccacaattggtaattatattggggcattaaaacaatttgctgatgtacaaaatgattatgattgttatttttgcatcgtcgaccaacatgctattacagtgcctcaagataaaatcaaattacgtaaacaaatccgtcaacttgcggctatttatttagcatctggcataaacccagaaaaagctaccttatttatacaatctgaagtaccagcacacgtgcaagcaggttggatgctcacaacaatttcaagtgttggagaacttgaacgtatgactcaatataaagataaagctcaaaaacgtactgacggtattccagcaggattactaacttacccaccattaatggctgcagatattgtgatatacaatactaatattgttccagttggtgaagaccaaaaacaacatatggaattaacacgtaacttagtcgaacgttttaatagtcgttataatgacattttggttaaaccagaaattcgtatgcctaaagtaggtggtcgcgtcatgagtttacaagacccaacgaagaaaatgagtaaaagtgatgataatcagaaaaactttatttcattactagacgagcctaatgtggcagcaaagaaaattaaaagtgctgtaacagattcagatggaattattaaatttgatcgtgataataaaccaggtatttcaaatttattaacaatatactctagcttaacaaatgaatctattaaagatttagaagctaagtacgaaaatgaaggatacggtaagttcaaaacagatttatcagaaatcgtcaaagatttcttaattaacttccaagaaaaatataatgaattttacaattcagataaattagatgacatcctagatcatggtcgcgataaagctcaaaaagcgtcattcaaaacattgaaaaaaatggaacgtgctatgggactgggacgtaaaaga

SEQ ID NO: 35143 - DNA, 363 bp, Staphylococcus haemolyticus
atgccaaacggtggtagtattgttgcaacaacataccttggtggtgaatttgccgttcaaaactataatgtgatgggtgtagctaaagcaagtttagaagctaatgttaaatatttagcttatgatttaggcccggacaacattcgagtaaatgctatttctgctggtccaattcgtacgttaagtgctaaaggtgttggtggtttcaacacaatccttaaagaaattgaagaacgtgcaccattaagacgaaatgtggatcaagaagaagtaggtaaaacagctgcttacttattgagtgatttctcaagtggcgtaactggtgagaatatccatgtagatagtggtttccacgcaataaaa

SEQ ID NO: 35144 - DNA, 698 bp, Staphylococcus haemolyticus
  misc_feature (661)..(661): n=g, a, t or c
atgaaagtaaataaaggaggagttttaatgattacaaatgaatctatcgttgcagaaattgttactgatatcccactaagtgctgatattttcagaaaatatggcatcgacttttgttgtggtggcaatatatctataaatgaggcagttaaaaataaaaaagttgatgcagaaactttaatagatgaaattaatgaacttccaaaccatgatcaaggaaacattaatgtgaaatatctagatgcgccgtcattaattcaatatatacaatctcgctatcacgaaacaatgcgtgaagaatttaagaatctatccccttatgttacaaaagtggctaaagttcatggaccaaaccatccatttctaattcagttacaagatttatatcgccaatatcgagatggtatgcttgagcatatggctcaagaagatgaacatgatttcccagcgttaattaaactttctcgtggtgaacaagtagatcattcatctgatatcattcaaagcttagttgacgaccacactcaaacaggacaattacttgaagatatgcgtgaattaactagccaatatcaacctcctagtgaagcttgccaaacttggagattagtatatcatcgtctaatgaatttagaacgtgaaactcatgaacatgtacatnttagaaatcacgtactctttacaaattcagttagaca

SEQ ID NO: 35145 - DNA, 1467 bp, Staphylococcus haemolyticus
ttggaattaatagacgctatacctgaagatgaaagtgttactttgtattcgcaaggtgaatttactgatttatgtcgtggtgtacacgttccttcaacttcaaaaatcaaagaatttaaattactttcaactgccggtgcatattggcgtggtgacagcaataacaaaatgttacagcgtatttatggtacagcattctttgataaaaaagatttgaaagcacatttagagatgcttgaagagcgtcgtgagcgtgatcaccgtcgaattggtaaagatttagagctattcactaataatcaattagtaggtgcaggtcttccattatggttgcctaatggtgctacaattcgtagagaaattgaacgttatatagttgataaagaggtaagtatgggttatgaccacgtatatactccagtgttagcaaatgttgagttatacaaaacttctggacactgggatcattatagagatgatatgttcccaccaatgaaattagatgaaacagaagaaatggtattacgacctatgaattgtccacatcatatgatggtctataataatcgtcctcattcttatcgtgaactacctatccgtattgcagaattaggaactatgcacagatatgaagctagtggtgctgtatcaggattacaacgtgtacgtggaatgacattaaacgattcacacatatttgttagacctgatcaaattaaagatgaatttaaacgtgttgttaacatgattcaagaagtatatagtgactttggctttgaagattacacattcagattaagttacagagatccagaagataaagagaagtatatggatgatgatgaaatgtggaacaaagctgaaactatgttaaaagaagcagtcgatgaaatgggattaccatatgttgaagcaattggtgaagcggcattctatggtccaaaactagatgttcaagttaagactgctatgggtaaagaagaaactttatcaactgctcaaattgatttcttattgccagaacgttttgaactaacatacatcggtagcgatggtgaaaatcatcgtccagtagttattcatcgtggcgtagtttcaactatggaacgatttgtagcgttcttaactgaagaaactaagggtgcattcccaacttggttagcacctaaacaagttgaaataatacctgttaatgttgacttacattatgactatgctagaaatttacaagatgaattaaaatcacaaggtgtacgtgtagaaattgatgaccgtaatgaaaaaatggggtacaaaattcgtgaagcacaaatgcaaaaaataccttatcaaatagttgttggtgataaagaagttgaaaacaatcaagtcaatgtacgtaaatacggctctcaagatcaagaaacagttgaaaaagatgaatttatttggaatttagtagatgaaattcgtttgaaaaaacataga

SEQ ID NO: 35146 - DNA, 1755 bp, Staphylococcus haemolyticus
atgacgaaccgactaaatagtgtggtaataaaactgtggttaactatactttttatagtaacgacagttttaattttattaagtgcggcattaattacttttatacaatactactacacacaacaaactgaaaatgctataagagaagatgcgtctagaatcagccacttagttgaacaagctgataataaaactttagccatagaacacagccaacaattaatagatggatcaggtggcgttattataatggctaataagtcttcaagtattaaaagttcaaatagcaatactaaagacaaaatgcttgaagagatacacaagaattcgcaattccaacgcgtcttttctcaaggaaagtctaccactcaaaatataacaataagtaataatggtaattcccattcttatattttgttaggctatcctatgaaagctcaagaaaatgcaaattcaaaatatagtgcagtattcatttatcaagatttaaagtctattgaagatactaataatgcaattaccattatcattttaatcaccgccattatatttatcgctgtttcaacagtatttgcattctttttatcaaatagaattactaaacctttacgacaacttagaactcaagctattaatatttctaaaggtgattattcaaaacagacaagtgtctcaactaaagatgagataggcgaattatcacatacgtttaataatatgagttctgaaatacaagagaatatagaggcactttcaactcaaaaaaatataagagatagtttgattaattctatgattgaaggtgtattgggtctaaatgataagagggaagttattctttcaaataaaatggctgacgatattattaaatcaatagacaaaactgtatataaagaaattgaaaagcaaattgaagctacatttgtttcaaaagacaccgaattccaagaatatgagattaacaataaatattacgtcattatcatgagttatgtagagagaattcaacaagatggccgtagtggaattgtagtcattataagagatatgactaatgaacataatttagatcagatgaagaaagatttcattgccaatgtttcacatgaattacgtacacctatttcgttattacaaggttacactgaatcaattgtagatggtattgtcactgaaccagaagaaattcgagattctttatcaattgtattagatgaaacgaaacgtttaaatcgattagtaaatgaattattaaatgtggctcgcatggatgcagagggtttaactgttaataaagaaaaacaacctattaaacctttactatctaaaatgcaaatgaaatatagacaacaggctgaggatttagaattgaatatgtcattagaaccaaacatcgatgatgaattgtgggaatacgatgccgatcgcatagaccaagttctaacaaatttaattgacaatgccacacgttatactcaaccaggtgattcaatatcaattacaacaactacggatgattcctatcaaacgttgtacattaaagatactggtagtggcatatctccagagcatcttgaactcgtattcgacagattttataaagtagaggcttcaagaactagaggtaaacagggaactggtttaggactatttatctgtaaaatgataatcgaagaacatggtggtactattaaagttgaaagtaaagtaaacaaaggtacaacattcataattaagttaccaaagcctaaaaat

SEQ ID NO: 35147 - DNA, 942 bp, Staphylococcus haemolyticus
gtgatacggaacaatgcgaaaattagtgagtcaacttcaaataaagtcaaagcagctatgtccaaattaggatacatacctaatcaagctgcaagaacattaataacaaataaaacattgaccattggattaatacagaaaagttccgcccctgaaatacgtcaaaatccatttaatagtgatgttcttaatggtattaatcaggcatgtaatgtaagaggctattcaactagaatgactgtgtcggaaaatagcggggacttatatcatgaagtaaaaacaatgattcaatctaaaagtgtggatggatttattcttttatattcactgaaagatgatcctattgagcacctacttaatgagtttaaagttccttatcttatagttgggaaatctttgaactacgaaaatataatacatattgataatgataatatcgatgcagcttatcaattaacacaatatttatatcatttaggacaccgacatatattatttttacaagaatctggacattatgcagttacagaagacagatcagtaggatttaaacaatactgcgacgacgttaaaatttcaaatgactgtgtcgtaataaagtccatgaatgatttacgtgattttataaagcaatattgtattgatgctagtcatatgccttcagtgattataacgtctgatgttatgttaaatatgcaattattaaatgtgctttatgaatatcaactacgcattccagaggatatacaaactgccacgtttaatacatcttttctcactgaaaatgcaacaccatctcaaacaagcgtaaacattaacccagatgtattaggcttcacagcagggaatacaatcattgatgtattaagaaatgaaactatttcttttagagaaaaattgatttcaacacaaatagttgaaagggtatcaactacaaaaata

SEQ ID NO: 35148 - DNA, 1840 bp, Staphylococcus haemolyticus
tgttcaaatcgtatagagaaagtattaaataaagcaccaggtgttaaagatgcgacagttaatttaacaactgaacaagcaatggtaacgtattatcctggacaaacggatttagataccttaattggacgaatcagaaacttaggttacgacgcacagcctaaacaatccgaagaagatcaagcaacacgtaaacaacaagaacttaagcataagcgaaataaattaatgatctctactattctgtcattacctctattaatgacaatgctcgtccatctctttaatatgcatttaccagatatcttaatgaatccttggttccaatttatccttgcgacaccaatccaatttatcattggttggcaattttatgttggcgcttataagaacttgcgcaacggtggctttaatatggatgtgctcgttgcattaggtactagtgctgcatacttttacagtatttatgaaatgatcaaatggttttctggtgccacaaacatgcctcacctttactttgagacaagcgctgtacttatcacattaattcttttcggaaaatatttagaagcacgtgctaaatcacaaacgacgaatgcattaagtgaattacttaacttacaagcaaaagaggcacgcctaattgatgataatggtatggagaaaatggtaccgctcaatcaagttaatgtagatgatatcttgttaattaaacccggtgaaaagatacctgtcgatggtcaaattattaagggtgaaactgctattgatgaatcaatgctaacaggtgaatccatgccagttgataaacacgttgatgatgtagtaataggctcaactatgaatacgaatggtgttattacaattatggcaactaaagttggcaaagatactgccctatccaatattattaaagtggttgaggaagctcaaagttctaaagcacctatccaacgtttagctgatattatatcaggttatttcgttccaattgttattgcgattgctttactgacattcttaatttggattacacttgtacatcctggtcaatttgaagatgcacttgttgctgcgatatcagttctagtgattgcttgtccatgtgcacttggtttagctacaccaacttcaataatggttggaactggtcgcgctgctgaaaatggtattttgtttaaaggtggcgaatatgtcgaacgtacaaatcaagttgatacagttgtgtttgacaagacaggaacacttacacacggcaaaccagaagtaacttattttgaaggtgacaaagataccttaactttagttgcttcagctgaaaataactctgaacacccacttgctactgcaattgttaactacgccaaacaacacaaagttaacttggtaaatgtcacaaattatcaaacattaccaggtcacggaatacaagccattatagatgattctatgttatttgtaggtaatcaaaagttaatgttagatcatcaaatcaatatacaaagcattaaacagaagatgaaacagatggaagccgagggacacactgttatgctaatagcttatgatggcgaactaagaggtatgattgctgtagctgacactgatacagcatctgctggagtagctatccggcaattatcatctgtgattatcagatcggtcatgctaactggtgatgctgagcgaactgcgaaagctgttgctaaagaagtcggcattgatcaagtcactgccggcgtcctacctgatgataaggcacatcatataactcaattactagaacagcgacagtatgtcgctatggtcggtgacggtatcaatgatgcgcctgacctcg

SEQ ID NO: 35149 - DNA, 663 bp, Staphylococcus haemolyticus
atggcttcattaaagtcaatcatccgtcaaggtaaacaaacacgttctgaccttaaaaaattacgtaatacaggtaaagtacctgcagtagtttatggttatggtactaaaaatacttcagttaaagttgatgaagttgaattcatcaaagttatccgtgaagtaggacgtaacggtgttatcgatttaggcgttggttctaaatcaatcaaagttatggtgtcagattatcaattcgacccacttaaaaaccaaattacacacatcgacttcttagcaatcaacatgactgaagaacgtactgttgatgtaccagttcacttagtaggtgaagctgctggtgctaaagaaggtggcgtagttgaacaaccattattcgacttacaagttacagcaactccagaaaatatccctgaatcaattgaagttgacattactgaattagaagttaatgacagctactcagtttcagatattaaagtttctggcgatttcacaattgaaaacgacccagaagaatctgttgtaacagtagttcctccaactgatgaacctactgaagaagaagttgaagctatggaaggtgaagcagcaactgaagaacctgaagtagttggtgaagaaaaagaagaagatagcgaagaagaaaataaagacgaagaa

SEQ ID NO: 35150 - DNA, 966 bp, Staphylococcus haemolyticus
atgaagaaaattgcggttttaactagtggtggagattcaccaagcatgaatgctgctgttagagcagttgtgcgtaaggcgatttataacaacattgaagtttatggaatttatcaaggttatcaaggattacttgatgacaatattcataaacttgaattgggttcagtaggggatacaattcaacgtggaggaactttcctttactctgcaagatgtccacaattcaaagaggcgagtgtaagacaaaaaggtttagagaatttacacaaacgtggtattgagggactagtagtagttgggggagatggtagttaccgaggtgcccaacgtattagtgaagaaacgaaagatatcaaaacaataggaattccaggtactattgataatgatattaatggtactgacttcactattgggtttgacacagcgttgaacacgattattgatagtgtagacaagattagagacactgcttcaagtcatgctagaacttttattgtagaagttatgggtcgtgattgtggtgatttagcactttgggctggattatcagtaggtgctgaaacaatattagttccagaagctaatacagacattaaagatatcgctgaaaagatagaaagtggtatcaagcgtggtaagaaacactcaatcgtgatggtagctgaaggaagtatgagtggtcaagaatgtgcggatcaattgatgaaatatattaatgttgatgcacgtgtatctgtattaggtcacattcaacgtggcggtagcccatcaggtgccgatagagtattagcatcacgtttaggtggttatgctgttgaactattaatgcaaggtcgttctggacaaggtgttggtatcatgaataataaattgactgctacaccatttgatgaaatcttcaatggcaacgaccataaatttaatacagatatttatgaattagcgaaagagttatctatt

SEQ ID NO: 35151 - DNA, 1372 bp, Staphylococcus haemolyticus
atgagaaagactaaaattgtatgtacaattggacctgcatcagagtctgaagaaatgttagaaaaattaatgaaagctggtatgaacgtagcgcgtttgaacttctctcatggtagtcatgaagaacataaagcacgtattgatacgattcgtaaagtagcagacagattaggtaaaacaataggtatcttattagatacaaaaggacctgaaattcgtactcatgacatgaaagatggcttaattatgcttgaaaaaggcaaagaagtaatcgtaagtatgtcacaaattgaaggtacacctgaaaaattctcagtaacttatgaagacttaattaatgatgtgcaagtagggtcatacatcttacttgatgatggtttagttgaattacaagttaaagacatcgataaaactaaaggcgaagttaaatgtgatatcttaaacactggtgaattaaaaaataaaaaaggtgttaacttacctggcgtaaaagttaatttacctggtattactgataaagatgctgacgatatcttatttggtatcaaagaagatgttgattatatcgcagcaagctttgtacgtcgtcctagtgatgttttagatattcgtgaaattttagaaagagaaaataatcataacattactattttccctaaaattgaaaaccaagaaggtattgataatatcgaagaaatattagaagtatctgacggtttaatggtagctcgtggtgacatgggagttgaaataccacctgaatcagtaccaatcgtacaaaaagatttaattagaaaatgtaataaattaggtaaaccagttattactgcaacacaaatgttagattcaatgcaacgtaatccacgtgcaactagagcagaagcaagtgacgttgccaatgcaatctatgatggtactgacgctgtgatgctttcaggtgaaaccgctgcaggtttatatcctgaagaagctgttaaaacaatgagaaatattgctgtttctgctgaagctgctcaagattacaaaaaattattatcagaccgtactaaattagtagaaacttcattagttaacgctattggtgtatcagttgcacatactgcattaaacttaaatgttaaagcgattgttgcggcaactgaaagtggttctacagctgtaacgatttcaaaatatcgtccacattctgatattattgcggttactcctagcgagcacactgcacgtcaacttgctttagtttggggtgcctatcctgtaattaaaaaagggcgtaaaactactgatgacctattaaataatgcagttgctacagcagtagaaactgggaagagttactaatggtgatttaattattattactgcgggtgta

SEQ ID NO: 35152 - DNA, 1455 bp, Staphylococcus haemolyticus
atgacagatatcataaatttaataaatgacttcggtcaaagtgatcctgaacgtgtagcagttagacataaagatgaagaattaacatatcaacaattaatggatgaatctagtaaattagcgcatctattacaagataatcataagccgttaatcgtttatggacatatgtcaccttacatgttagtgggaatgataggtgctatcaaagcaggttgtggctatgtacctattgacacttcagtaccaagtgaacgtgtgaatatgattataaataaagtacaaccggacattatatttaacacaacagatacacaattaaattattccaatatacaagaacttacaattcaaagtatccaaggttctgataatccaacactatttgacagtcaaatgggattaacggatgttgtatatactatttttacatctggttcaacaggtgagcctaaaggtgttcagatcgaatatgcaaatttaatagaatttgcagaatggatggtatcgcttaatgaatcagaaggttcacaagagtggttaaatcaagcaccattctcgttcgatttatcagtcatggcaatttatccttgtttaacatcaggtggcacacttaatttagtagataaagaaatgatcaataaacctaaattactcaatgaaatgttagttaatacaccaatcaatgcatgggtatctacaccatcatttatggaaatgtgcttgctattacctaaccttaacgaattaagttacacaagcttgaatcatttcttcttctgtggagaaatcttacctcatagaactgcgaaagcacttttagatagatatccaagtgcagtggtttataacacgtatggacctacggaagcgacagtagctgttacaggtattaaattgacacctgaaattattgaagcttataacccgctacctgttggtgtttcaagacctaacacatcattgtttacaacagacgaaggtgaacttgttattaaaggtaatagtgttagtcttgggtatttagataacaaagaaaaaaccgatgcggtatttaactttgaagatggacttcgtatatatcatacgggtgataaagccatcgagaaagatggacaatggttcattcaaggaagaattgatttccaaattaaacttaacggttaccgaatggaattggaagaaattgaaacgcaacttagacaatcagagtttgttagagacactgttgtcgttccagtatatacaactaatagagtaatacatttaatcggtgctgtcgttccgactgaagaagttaaagatgatttagaaatgacaagacaaattaaatctgaactaaaatctcgcttacctgaatatatgattccgagaaaatttgtttggatgaaacagttaccattaacgtcaaacggaaagcttgatcgtaaacaagtcgcagaggatattaacgca

SEQ ID NO: 35153 - DNA, 2162 bp, Staphylococcus haemolyticus
atgaataaagagcaaagtgaagcggtaagaactacagaaggtccattactaattatggccggcgctggttcaggtaaaacgagagtattaacacatcgtatagcctatttattagatgaaaaagacgtttctccttacaatatattagcaattacttttacaaataaagcagctaaagaaatgaaagaacgtgttgaacaattagtaggtgaagaagcacaagtgatttggatgtctacattccattctatgtgcgtaagaatattaagacgtgatgcagatagaataggcattgaacgtaattttactattattgatcctactgaccaaaaatccgtcataaaagacgttctaaaaaatgaaaatattgacagtaaacgctttgaaccaagaatgtttattggggcgattagtaacttaaaaaatgaacttaaaacaccagatgatgcaattaatgaggctaatgacttccattcgcaaatggtagctactgtttatagtggatatcaacgtcaattgactcgaaatgaagcacttgattttgatgatttaattatgaaaacaattcagttgttcgaacgcattccagatgcacttgaatattatcaaaacaaattccaatatattcacgtagacgaatatcaagatacaaataaagcacaatatacattagtaaagttgttagctagtaaatttaaaaatctttgtgtggttggtgactcagatcagtcaatttatggttggaggggtgcagatatacaaaatatcctatcttttgaagaagattaccctgatgctaaaacgatatttttagaacaaaattatcgttctacaaagaccatcctaactgctgcaaatgaagtcattaaacataactcagaaagaaagcctaaaggcctgtggactgcaaatacaggtggtgaaaaaattaaatattacgaagcaatgactgagcgtgatgaagctgagtatgtggttagagaaataatgaaacaccgtaaagctggaaaagattatagtgatatggcaatactttatagaaccaatgcacagtcacgtgttttagaagaaacatttatgaaatctaatcttccttatacgatggttggaggccaaaaattctatgacagaaaagaaattaaagacttattaagttatttgagagtagtagctaatagtaatgatgaaattagtttacaacgcataatcaatgttccaaaacgagggataggaccttcatcagttgagaaaattcaacgctatgcgaatgataacaatataagtatgtttgacgcattggcagaagtagattttattggtctttcaaaaaaagtaactcaagagtgcattaaattttatgaactaattcaaaacttaattaaagaacaggaatttttagaggtaagtgaaattgttgttgaaatattagataaatctgggtatagagatatgcttgaacgtgaacaaacactggaatcacgtagtagacttgaaaatatagatgaatttatgtctgtgcctaaagattatgaagagaatacaccattagaagaacaatccttgattaactttttaacggatttatcactagtagcagacatcgatgaagctcaaattgaaagtgggtaacccttatgacaatgcactcggcgaaaggtttagaatttccaattgtgttccttatgggaatggaagaatcgctatttccacatatacgtgcaattaagagtgatgatgaccacgaaatggaagaagaacgtcggatttgttatgtagcaataacaagagctgaagaagttctatatattacgcacgcaacgtctagaatgttatatggacgctcacaatctaatatgccttctagatttttacgtgaaatcccggaagatctattagaaacaccatctaagcagcagcgtcaaacgattaccccaaaaacttcaaccaaacaacctaagcgtggatttagcaaacgtacaacgtcttctaaaaaacaagtttctgcttctgattggaaaataggagataaagttacgcataaatcatggggtgaaggcatggtaagtaacgttaatgagaaaaatggctcagttgaattagatattatatttaaatcagaaggaccaaagcgcctgttagctcaatttgctccaatcgagaaa

SEQ ID NO: 35154 - DNA, 1958 bp, Staphylococcus haemolyticus
  misc_feature (746)..(746): n=g, a, t or c
atcaaaagtcgtgtgaatgaattacatgatttattaaatcaatatggttatgaatattatgtacaagataatccttcagtgccagatagtgaatacgataaattattaagagaattaatagatatagaagaggcacatcctgaatttaagtcacctgattctcctactgtacgtgtaggaggagaggtgcaatcttctttcgaaaaagtcaaccatgatacaccaatgttaagtttaggtaatgctttcaatgaacaagaattacgtcgttttgatcaacgtattcgtgaacaagtcggtagtgttgaatatatgtgtgaattgaaaattgatggattagctgtgtctcttaaatatgtagaaggtcgcttcgttcaaggtttaactcgaggtgatggtactacaggtgaagatatcactgaaaatttacgcaccattcatgctattccattaaagattaatgaaccattaagttttgaagtgcgtggcgaacttacatgcctcgtagttcttttataagactaaatgaagaaaaagaaaagaatgaagaacaaccattcgctaatccacgaaacgcagcagcgggatcgttaaggcaacttgatcccaaattggcagctaaacgtaaattaagtgtattcttatatagtgttaatgattttacagattttgatgcaactactcagagtggtgcgttggatgaattagatcgtttaggatttaagacaaatcatgagcgtatgcgngtgggtgatattgaaggtgtattagaatatattgagaaatggacaaaacaacgtgaacaattatcctatgatattgatggcatcgttataaaagtgaatgacattgaacaacaagatgaaatgggatacacgcagaaatctccaagatgggcgattgcatataagttccctgccgaagaagtggtaacaacattacaagatattgagttaagtattggtagaacaggtgttgtaacaccaactgcgattcttgatcctgtaagagttgctgggacaactgtatctagagcatctttacataatgaagatttaatacatgagagagatatcagaattggggatagtgtagtagttaaaaaagctggcgatattataccagaagtagtgaaaagtattacggaacgccgacctgaaggtacattaccgtattcaatgccaacacattgtccgagttgtgaccatgagttggtaagaattgaaggggaggttgcattacgttgtataaatccaaagtgtcaggctcaacttgtagaggggttgattcactttgtatcacgtcaagccatgaatattgatggcttaggaactaaaattatacaacaactctatcatcacaatgtgattaatgatgtggccgacatcttctacctaactgaagacgatttattacctttagagcgtatgggttccaaaaaagttgaaaatctactaaaagcgattgaagatgctaaagccaattctctagagtatctattatttggtttaggaatacgtcatctaggagttaaagcaagtcaagttctagctgaaaaatacgaaacaatggatagactacttgaagtaactgaagaagaacttattagtattcatgatattggagataagttagctcaatctgttgtaacatatttagaaaatgaagatattaaagcattaattgaaaaattaaaatataaaaatgtcaatatggtttataatggaattaaaacttctgatatagaaggtcaccctgattttaaaaataaaacaattgttttaacaggtaaattacaacaactgacacgaaaagaagcatctgcctggttagaattacaaggcgcaaaagttacaagtagtgtaactaaaaaaacagatttagtaattgctggtgaagatgcaggttctaaattaactaaggcagaaaagtttggtactgaaatttggacagaagag

SEQ ID NO: 35155 - DNA, 372 bp, Staphylococcus haemolyticus
atgaaagaacgtggctatattgaaaagttatggagagaagaaaaatataatgtcttgtaccatagtcaacagcattataattatattcgtgaattacttaagcaatctccaactttaaatgaagttcaactcactattaatgaagcactccaaacgactccatccaatggttcaataatcaatgcatacgatcatatgtggggttactttaaacacaaagctaatgaaatagaaaaaaacaaatcagctcaattaaaagctgacttcaaacaagataatgttcaaagtaaagaattgctgatttttataaaatacttagccgacaaatatgaagtttcttaccttcaaaaaagtaccctgcttaatttccaa

SEQ ID NO: 35156 - DNA, 1202 bp, Staphylococcus haemolyticus
aaaaaaggtacagatttacctggacaagttgcccgcaaagtggatcaaaatatattaagaaaattagctgcacaagtagatgacatcgtttttattagtgggactaatggtaaaacgacgacatctaatcttataggacatacattaaaagcaaatcatattgatattatacataataatgaaggtgctaatatggcagcaggcatcacatctgcctttatcatgcaaagcactaaaaatactaaagtagcggttattgaaatcgatgaaggatctattcctcgagttttaaaagaagtcactccatcaatgatgatatttactaatttctccgtgatcaaatggatcgctttggcgaaatagatataatggtaaataacatagctaagtcaattagtaataaaggaattaaattgttactcaatgcggatgatccttttgtaagtcgacttaaaatagctagtgactctatcgtttattatggtatgaaagcacacgcgcatgagtttgaacaaagtactatgaatgagagtaagtattgcccaaattgtggcaaattattagtatacgattacattcattataatcaaatcggtcattaccattgttcatgtggattcaaacgtgaattacctaaatatgaagtttcatcattcacagtatctccgttcttagcattaaatataaatgaaacaacatttaacatgaaaattgccggagacttcaacgcttataatgcattagctgcctatactgtgttgagagaattaggactcaatgatgagtctattcgaattggtttcgaatcatatacttcagataatggtcgtatgcaatatttcaaacttgatcataaagaagccatgattaatttagctaagaatcctgcaggtatgaatgctagtttattagtaggagaacagttagtaggtaaaaaagtatatgtcattagtctaaatgataatgcagctgatggtcgtgatacttcttggatttatgatgccgatttcgagaaattaagcgaacaaaatattgaaacgattattgttacagggactcgagctgaagaattacaattacgtctgaaattagccgaagtaaatgttccaattatacttgtaaaagatatttataaagcaactgcgatgacaatgaattatgaaggtttcacggtagctattcctaactacacatctttatct

SEQ ID NO: 35157 - DNA, 478 bp, Staphylococcus haemolyticus
atgaatgaattaaccgtttatcattttatgtcagataaattaaatttatatagtgatataggaaatattattgcactcaaacaaagagcaaagaaacgtggtattcaattaaatgtagtagaagttaaccaaactgaaggtgtgacgcttgataattgtgatatattctttatcggcggtggcagtgatagagaacaaagtattgctactaaggaattaagcaagataaagactacacttaaagatgctattgaagatggtatgccaggattaacgatttgtggtggttatcaatttttaggaacaaaatatattacgcctgatggaactgaacttgaaggtttaggtatcttagatttctatactgagtcacgaactgaacgattaactggtgatatagtaatcgagagtgacacatttggaacgatagtcggcttcgagaatcacggtgggtcgtacacatcataattttgggtac

SEQ ID NO: 35158 - DNA, 711 bp, Staphylococcus haemolyticus
atgtggaggtggttaagcatggataaatcttatggtgatatttttaaagagatgattacaatgcctaacgtccaatggcctgaagtatggcaagccatttatgaaacattatatatgactatagtttcaactattttcgcatttatttttggattgattttaggagtattattattcttatcagctaagagtaattctaaaggtgctagagtcttttatagcatcgtttcatttattgttaacttattccgagcgattccatttatcattttaatcttgttattaattccatttacaagtgtgatccttggaacaataagtggtccaactggtgccttaccagctctagttattggtgcagcaccattctatgcaagattagtagaaattgccttcaaagaaatagataaaggtgttatcgaagcggcttggtcaatgggagctagtacttggacagttgtccgaaaagtattactacctgaggcaatgccagcactagtttcaggtattactgtaacagcaatcgcattagttggttctactgcaattgcaggtgtaattggtgcaggtggtttaggtaacttagcttacttaacaggtttcactcgtaaccaaaacgatgtcattttagtttcaactgtatttattttaattatcgtatttataattcaatttattggggattggattacaaataaaattgacaaacgc

SEQ ID NO: 35159 - DNA, 813 bp, Staphylococcus haemolyticus
atgaaaaaacttttaagcttatttttagtattaacattaacagtcgttttagcagcttgtggtaatggtagtggggataaagataaaaaaattgttgtaggcgcatctccagcacctcacgctgaaattcttgaaaaggctaaacctttacttaaaaagaaaggctatgacttagaaattaaaacaattaatgattacactacgccaaacaaattattagataaaggtgaattggatgctaactatttccaacatgtaccttatttaaaaactgaaagtaaagaaaaaggatacaaaattgaagacgcaggtaaagttcacttagaaccaatggctgtttactctaaaaaatataaaagtttaaaagaccttcctaaaggtgcaacagtttatgtatcaaataacccagctgaacaaggacgtttcttaaaattctttgttgatgaaggattaattaaaattaaaaaaggtgtaaaaatcgaagatgctaaattcgaagatatcactgaaaacaaaaaagacattaaattcaacagtaaacaatcagcagaatatcttccaaaaatctatcaaaatgaagatgtagatgctgcaatcatcaactctaactatgcgattgatcaaggtttaagccctcaaaaagattcaattgctattgaaaaaccaaataacaacccttatgctaacttaatcgcagttcaaaaaggacataaagatgatgaaaaaattaaagctttaattgaagtgttacaatctaaagaaatccaagatttcattaaagacaaatataaaggtgcagttgtaccagcgaaa

SEQ ID NO: 35160 - DNA, 1170 bp, Staphylococcus haemolyticus
cagattgacattcggcacccctttaaatctagaagtcatttggcgccatcaatttttgaagatgttcaaaacagtgcttatgaaagctttaagaagattgtcgatacagcattaaaagaagaagttgattttgttctcatcgttggagatttatttgatagtgagaatcgtacgttgcgtgctgaagtattcttgaaagaacaatttatgcgattagaaaaagaacaaattttcgtttacataagtcatggtaatcatgatccacttactgaaaaaattactaatgattggccagataatgtttcggtcttctcaaatagagtagaaacatatcaagctatcactaaagatggagagacaatttttgtacatggttttagttatcaacatgatacaagttatgaaaataaaattgatgagtatccatctagccaaggtaaaaaaggtattcatattggaatgttacacggtacttatagtaaatcttcaactaaaaatcgctatactgaatttattttagaagatttgaatcaaaaactatatcattattgggcacttggccatattcatgaaagacaagaattaagtgatatgcctccaatttactatcctggaaacattcaaggacgtcattttggtgagcaaggacctaagggatgtttattggtagaaggcgaccatttacgattaaacgctacttttattccaacgcaacaaattagatttgaagaagctactatcaaaactgacaaacttacaaaacaaggtatctatgaagcaattcaatccttcaaagaaagtgtacgttctgatggaaaggctttttatagattaactgtaaatgttgacagtgatagacccatttcttcacaagacattagtcaaattaaagaaatgattgatgactatgaagaaaatgaacatcatttcgtaatcatagaaacgctcacatttaattatatgcaaatggatgaagtacctcttgtaagagaattttcagctgatttaatcaaagataataaagtgtttgaagaggcgatgactgaattatatttaaaccctagagcatccaaatatttagaagattatactgagtttgatactgttgaacttgttaatcgcgctgagaaaattttaaaggcagacatgagaggtgaaagtgatgatcat

SEQ ID NO: 35161 - DNA, 860 bp, Staphylococcus haemolyticus
atgaaaattaagtttaatgatgttacctacacctatcaacagggtacaccatatgagtataaagcgttagaccacattaatttactattgagcagggtaaatactatgcaattgttggacaaactggaagtggaaaatcaactttaattcagcatttcaatgggttattaaaccctactaatggcaatattgagcatgatgaacttacgattcattctaaaactaaagataaatttattagaccaatcagacaaaaagttggactagtatttcaatttcctgaatcacaattatttgaagataatattgaaagagaaattgagtttggacctaagaattttggaatgaatgttgaagaagtgaaagaaagagcttttgatttattgttagagttaggttttccaagaaatgttatgtctttgtcaccattccaaatgtctggcggccaaatgcgtaaaattgcaattgtttcaatcttagctatgaacccggatgtcattgttttagatgaacctactgctggattagacccaaagagccgtcaacaagtaatggagctatttaaagaaatacaactaaaacaaaataaaacaatcatacttgtatctcatgatatgaatgaagttgcgaaatatgctgaagaaattatcgtgatgaatgatggaaatattatcgagcaagacacaccaaaagagttgtttagacaaggtagtaaacttgaagagtggcatatagacttaccagatattgttcagttacaacgtgatattgaaattaaacatggtatcaaatttaagacaatcgcacttactgagaaggaatttgtaagtatgtaccaggagtggcaacatcatgaagaa

SEQ ID NO: 35162 - DNA, 799 bp, Staphylococcus haemolyticus
aaattaattataggtagatatttacctaataactctgtaattcatcagctagatccacgagctaaagttttatttgtatttatgtttattattttaatattttttgctcatttcttttgcaacgtttgggtggattattttattaattttaatgtttatgtttttagcgaagattaaattatggtttttaattaaaggattaacaccaatatttatttttactatattcacattcttcatgcatatcttcttcacacacggtggtacaagattagttgattttggaattattaaaattgatagtgctggtattttagaaggtatctttatttcattacgtctcatcacaattgttatggttgcaacaataatgacgctatcaacgagcccaatcgatttaacagatgcttttgaaaaattgctaacgccattaaaatggtttaaattgcctgtgcatcaattaagcatgattatgtcaatcgctttaagattcattccaactttaatggatgaattagataaaatcatactagctcaaaaatcacgaggttctgagttaagttcgggtggcttaatgacacgtataaaagcatttcttcctttaatgattccattatttatctcagcttttcaaagagcagaggaattagcaattgctatggaagtacgtggttatgatgctaatgtagaacgaacaagttatagaaagctacaatggcatattggggacacgatgtgcttaataagtatcatcccaatagccatagtattattagtattaaaatatattggagtgtaa

SEQ ID NO: 35163 - DNA, 334 bp, Staphylococcus haemolyticus
gtgcgtatacttgttaatatttcttatcaaggaagtcaatttctagggtttcaaattcaacagcaaggaagaactgtgcaacaacaatttgaaaagatattgaagcgtatgcatcggagacatgttcgcattcatccttctagtcgtacagacagaggtgtacatgcgtatgaacaattttttcattttgatacagacttaaatattgaaccaaagcaatggaagtatgcgatgaatagtgctttacctgatgatatttacgtcaaagaagttcaacaagtcgatgatcattttcattgtcgttatgactgtctaggtaagcgatatcgttata

SEQ ID NO: 35164 - DNA, 734 bp, Staphylococcus haemolyticus
atgtataagacaaaaggtggctttcaacttaccttacaaacgttaagtcttgtagtgggtttcatggcatggagtattatatctccgttaatgccatatatctctcaagatgttaaagttaatcctggacagttatctattatattggcaattccagtaatattaggttcaattttacgtgtgccattcggttatttaactaatattattggtgcgaaatgggtattcttttgtagttttgttatattattatttcctatcttctttttagggcaagcacaaacaccaggaatgttaatgttatctggattctttttaggtgttggaggtgcgatattctctgtaggtgtgacatctgtacctaaatatttttcaaaagataaagtagggcttgctaatggaatttatggtatgggtaacatcggtacggcagtatcttcatttttagcaccacctattgcaggtattataggttggcaaacgacggtaagaagttatttaattatcattgctattttcgcaattttaatgttcatttttggtgataaaaatgaaccaaaagtgaaagtacctttagcatctcagtttaaaaaattatcatcaaattataagttatattacttaagtctttggtattttattacgtttggtgcttttgtagcatttggattattctacctaactacttagtaaataactttggcattgataaagttgatgcaggtattcggtca

SEQ ID NO: 35165 - DNA, 1077 bp, Staphylococcus haemolyticus
aaatcagtgaagcaatttttacagttaatattaggtgcaattgtcgttggattaatatgcttaggtataagtcactggtttaaatcgcaggataatactggtactggtgaaaagatatacgtgtataattggggagaatatatagaccccgctttaattaaacaatttgagaaagaaactggtattcaagttatatatgaaacgtttgattctaatgaggccatggaagctaaaattcgaaatggtggaacccattatgatgtggcatttcctagtgaatataccgttcagaaattgaagcgtgaaaatttattggaaccactagatcatagtaaaattccaaatataaaaaatttagattctgattacatgaacatgtcatatgatagacataataagtattcactaccttatttctttggtactgtaggcatcttatataataaaaaggtttacccaaatgaagactttagtagttggcaagcattatatcagcctaaatataaaaatgacattttattagttgatggtgcacgagaaattatgggattagctttgaacaaattaggatatagtttaaatgatacaaatccaagtcatttaaaagaagcagagaaagatttgaatcaccttacaccacaagttcgtggcgttgttggagacgaagtcacaatgatgcttgaacaaaatgagggaaatattgcagtagtatggagtggtgttgcagctcctttagtgcaagatagtaataaatataattatgttattccaaaagaaggatctaacctatggtttgataatatggttattcctaaaaccgcccagaataaagaaggggcttataaatttatgaatttccttcttgatgctaaaaataataaacaaaatacagaatgggtcggatatgctacaccaaataaagcggctcgtcagttattacctaaagaagttagagatgatcatcgtttttatcctacccaaaaagagcaatcacgattagaagtctacaaagatttaggtcctaaaactttgggagaatataacgaaagtttcttaaactttaaaatgtctttaaaa

SEQ ID NO: 35166 - DNA, 3290 bp, Staphylococcus haemolyticus
catttaaatcttcatacaacatatgatttattaaattctagtttgagaatcaatgatgtagttaaaaaagcacaaaataatcattatgatacattagcgattactgatactaatgtcttatatggcttccctaaattttatgatgcttgtattaaagccaatattaaaccaatttttggaatgacagttaacgttacggatggtttgtatacaattgagactgtggttttagctataaataatgatggcttaagatcactatttcaactctcttctgcaattaaaatgaagcaaaaagaggttatatcagttgagtggttaaaaaagtattcaacaaattttgcaatcatatttaaacaagcaaatcaacctcattattctatagttgaacaatttcaaaaccatcaaaatatatttataaatcattcaagcgacttagcattttataataatataagagtagtttggtttaaaaatgcacgatacttaaatcaagaagatgttgagacgattccagcacttgaagcaattaaaaataatactaagatagatctggttaatgatactgaagatattggggaacattttcctaaacaaaatgaattagaaacattaaatatagatagagaggtatggaataatacacttgaactagctagtttatgtaatgcaagcttagaatatcatcaaaatttactacctaaattcgatgcaccatcaggtaattcttcaaaagagtatttatggtcacaactccaatcaagtttaaaaaagatggaattaaatcatgatgaacgctatacaaaaagattagaacatgaatatcgcgttataactgaaatgggttttgaagactactttttaattgtgagtgatttaattcactacgctaaaacacatgatgttatggttggtcctgggcgggggtcctcagctggttcattagttagcttcctgctcgacattactacaatagatccaattagatttaatttattatttgaacgttttttaaatcctgaacgtgtaacaatgcctgatatagatattgattttgaagacacgcgtagggaaagagtcattcaatacgttcaagacaaatatggaaaacatcgtgtttcgggtattgtcacatttggacatttattgactagggctgttgcaagagatgtaggtcgcataattggatttgatgataaaactttaaatgaaatttctaagttaatacctcatcaacttggtataactttagatgaggcatatgaggatgagcaatttaagcaatttgtacatagaaatcatcgacatgaaaagtggtttgaattaagtaagaaattagaaggcttacctagacatacttcaacacatgcagcaggtattattattaacgatcaacctctatataattatgcaccactaacattgggcgatactggtttattgacgcaatggacgatgacagaagcagagcgaattggtttacttaagattgactttttggggttaagaaatttatctatcatacatcaaattatcactcaagtaaaaaaagatttaaatatttctttagagattgaagagataccgtttaatgatgtagacgtatttaagttattatctagaggagatacaactggaatcttccaacttgaatctgaaggtgtaagaaaagtattaaaacgacttcagcctgaacattttgaagatatcgttgcggttacgtctttatatagaccaggacctatggaggaaattccgacttatatttcacgacgacacaacgaaagtgaaattaaatacttacaccctgatttagaacccatacttaaaaatacgtatggtgtaataatttatcaagaacaaattatgcaaatcgctagtcaatttgctagctttagttatggacaagcagatattctacgtcgtgccatgagtaaaaagaatagagcagtattagaaagtgaaagacaacattttgttgaaggtgcgataaaaaataaatatgatgagaagataagtaaacaaatatttgatttaattcttaagtttgctgattatggatttcctagagcacatgcggtaagttattcaaaaattgcatatatcatggcatatttgaaggttcactatcctaattatttttatgctaatattttaagtaatgtcgttggtaatgaatctaaaacagcggccataattgatgaagctaaaaatcaaaaattgaaaattttgcctcctaatattaatgaaagccattggtattatagagcaactaactcaaatatatatctatccttaggtgctattaaaggtgttggttatcagagcgttaaatcaattgttgatgaaaggtatcaaaatggtaagtataaagatttctttgattttactagacgaataccaaatcgcataaagactagaaaattacttgaatcattaatattggtaggcgcttttgatacttttggaaaaacacgttcaactttattaagttctattgatcaagttttagatgaagtgtcaaatgtagaacaaaacgatttattattggatattttaacacctaaacaatcctacgctgataaagatgaatttagtgatcaaatgattagtagttacgaaatggaatacttgggattttatgtttctaatcatccagtcgaaaagcaatttaataaaaagcaatatttaggtatctatacactaagtaatgttgtaaatcacaaacctattttggttcaagtagatcaaatcaaacaaataaggaccaagaatggtcaaaatatggcatttttagttctaaatgatggacgacatacgatggatgcagttttatttccagataaattcaaacgttatgaaactcaattaaatgagagagaaatgtatgttgtttggggaaaatttgaaaagagaaaacaacaattgcagctcattttaaatcaaatggattcagttgaacattttgaagtaactaaaataaatgaggcatctcaaattattttaagaaacattcaaaacttagatgaaattaaacaaattcttaatgatcataaaaacaaccatatgattaaagtgaatatatataatgaacaaactggagaacttgattatttgggtagtatggataaaacatcgaatgaaattaaaaactttgttgaggcttttgatccaaaagatataagaattttataacttttatgtataaaaaaattatgatatagtaaactgatgatttataaaataaagtcatcagtttattttatcttaaaaaattttaaatgcagaga

SEQ ID NO: 35167 - DNA, 759 bp, Staphylococcus haemolyticus
gtgaataatttgcaaagatactttatcgatcaaaacgctgatgaaagtcagcgtttttttataacaaataaagaagatatacatcatattactaatgtgatgagaaatacaattggtaatcagattattataacatttaaagataaaatagtttttaaatcggaaattattactattgaaaatgaatcaattgaaattaaactaatagagcagattgatatcaattcagagttaccagtacaagttactatatgtagtggattaattaaagccgataaatatgaatggctaattcaaaaagctactgaattaggtgctgatagttttatagttgtagaaatggacagatctgtagtaaaacttaccccaaataaagttcaaaaaaaattagaacgctggcaaaagattattaaagaggctgctgaacaaagttatcgcttaattattcctaatataatttttaagtcgaatttaaatgagatttatgatactattaatcattatgactatatcttgttagcatacgaagatgaagcaaaacgtggtgaagttagtctttttaaagaaaccttgaaaaagtttaaaactaacgatcgtattttattaatatttggtcctgaaggcggcttttcagaaaaagaaatcactttattaaatgaaacgagtttcaatgttggtttaggacctcgaattttacgggcagaaacggcgccactttacgctttaagtgctatcagttatgaaaatgaattaatgggg

SEQ ID NO: 35168 - DNA, 915 bp, Staphylococcus haemolyticus
atgaaaaaattattagccattacattagcactcgtcctatttttagcagcgtgttccttagaatcaccattgaaaaatgataaaaatggcaaaaccaataagaaaaaatcagaaattacaataggcgtaagtatttcaactttaaataatccattcttcgttaaaattaaaaatggaattgaaaaagatgctaaagctcaaggaatgaaagttaaagttgtagatgctcgagacgattcagctaagcaaacgaatgacattgaagatttaattcaacaacaagttgattacttaattgttaatccaacagattcaagtgcgatttcaagtgctgtggagtcagcgaacaatgagggtattcctgtaatcacattagatagatcagtggataaaggagacgttgcttcatttatcgcatccgataacgttgaaggcggtaaaatggctggtaagtatttagttgataaagtaggtaaaaatgcaaaagtaggagaacttgaaggagttccaggcgcaagtgcgacgagagaaagaggaaaaggcttccatgagattgctgataaacagttaaaagtaattgccaaacaaagtgcgaagtttgatagagcagaaggattaaacgtaacgcaaaatatgctagaagcgcatccaaatatcaaagcaatctttgctcaaaatgatgaaatggcacttggtgccattgaagctattggggacaaggatattcaagtcattggatttgatggcaacgaggatgcaatgaaatcaataaaaaatggcaaactagatgcgacaatagctcaacaacctgaacttatgggtaaagaagcaattaaagtggttaatggcctaatgaaaggcgattctgtaaataaacaaattaaagtgcctttaaaattaaaacaaagtaagaac

SEQ ID NO: 35169 - DNA, 513 bp, Staphylococcus haemolyticus
atgagtgaatatataacaatgattgaaaatatggatgtgagtgacttacgacaaatttctgagacaacgttttatgacacgtttgaaggagaatattcagatgatgattttaatcaatttttcaaagaaagctataatgaaaaagtactgttaaatgaattaaataatcctaattcatttcattatttttacaaggtgaatgatcaaattgcagggtatttaaaacttaatgtcggtaatgctcaaactgaacctaaaggtgaagattatttggagattcaaagaatttatttctacaagacttatcaaggtgggggaagaggacaaaagtttattcaattggctcttgataaagcgaaagaactaaataaaaataaagtttggttaggtgtatgggaacataatcaacaggcattatcattctataagaagcacggctttgaagtcacaggacaacatgaatttattacaggtgaagtagtcgatatagatttaataatggaaagagaaatt

SEQ ID NO: 35170 - DNA, 1743 bp, Staphylococcus haemolyticus
gaagataaagtcattgaagtgagtaatgattttaacaccataaattttaaagaattaaaagaagctgtgattcacatcgaagtagatggtaccaattacttacaggatacaattttaaaatttggattttatgatggagtggaccatgttgtaatagcttccgatcaactaaaggaatatcctgaattgattaaatggctagagaatgagactacagaaaaaattgtttatgatgctaaaaaaacatacgttgttgcgcatagattagatatagatataaaaaatattgtatttgatgttatgttagcaagttatattatcgatccatcaagaacgatagatgatgtaaactctgtagtaagtaattataatcaaaattttgtccaagatgatatttcaatttatggaaaagggaaaaagagacatgtcccagaagacacaatattaaataagcatattgcttcaatcacagaggcaatttatgcctgcaaacctgaaatggttgctgaattagaatcgcaccaacaaattgatctattgttgaatttagaacttccacttgcacgtatcttaagtgaaatggaagaaacaggaatttatacggatattaatgacttaagacaaatgcagtcagaaatccaaggaaaattagatttactaataagtaatattcacgaagcggctggggaagaatttaacattaactctcctaaacaattaggtgtagtattatttgaaacgctagaactaccagtcattaaaaaaacaaaaactggatattctactgcagttgatgtgttggagcaattacaaggtcaacacccaataattgactatatacttgaatatcgtcaattatcaaaattacaatccacttatgtagagggattacaaaaagtcataagtaaagataacagaattcatactcgcttcaatcaaacattagcgcaaactggtcgtttatcaagtgtagatcctaatttacaaaatataccagtccgtcttgaagaaggacgtaagattagaaaagcttttaagcctacttcaaatgatagtgtgatattatcagctgactactctcaaattgaattacgtgtactcgctcatattacccaagatgaaagtatgaaagaagcatttatcaatgaaaaagatgttcatactgctactgcgatgaaagtatttgatgtagaagcgaatgaagttaacgctttaatgcgaagacaggctaaagctgttaactttggaatagtgtatggtattagtgattatggtttgagccagagcttaaacattactcgaaaaaaagcaaaagcatttatagatgattatttggcaagttttccaggtgtaaaacaatacatgtctgatattgttaaagatgcgaaagcagatggatatgttgaaacattattgcaccgtcgcagatatataccagatattaatagtaggaactttaatttgagaggttttgctgaacgtacggcaatgaatactccaatacagggtagtgcagcagatattattaaattagcaatggtagaatttgatagacaaattaaacaaacgtcttatcatgctcagttattactacaagtacatgatgaattaattttcgaagtacctgccaatgaagttgaagattttagtttatttgttgaggaaattatggaacacgcattacaattagatgtgccgttaaaagtagattctaactatggatctacatggtatgatgcaaaa

SEQ ID NO: 35171 - DNA, 870 bp, Staphylococcus haemolyticus
atgccagaattaccagaggttgaacacgttaaaaggggtatagagccttatatattgaatgcaactattaaaagtgtgacattttcaaacaaagttattgagggcaaacaacaaggaaaagagacaattattaaaggaattaatttggatggtttcagattgaatagtgaaagttttaaaataaaatccattgatagaagaagtaaatatattgtcttcactattgaaaaaaataacaaccagcgtattatattaagtcatttaggtatggcaggcggattttttattgtcgataaattatcagatattagtacacctaattatcgaaaacattggcatgtcgtgtttcatttagataatggtaaacaactcgtttattctgatattagacgatttggtgaactaagaaatctggctacttataatgattatccagcttttcttgaaattgcgcctgaaccgtttgatgacaatgcattaaactattttttagaccggattaaacttaagaaataccaaaacaaacctattaaacaaatgttgcttgatcataaaatgatagcaggttgtggaaatatttatgcatgtgaagcgttatttagagcaggcgttttacctgagaggaaagtaaaagatgtatctaatcaagaacgacaaatgttattttattatgttcaagaagtattaaatgagggtataaataatggcggtactagcatttctgattatcgtcatgctgatggcaagacaggagaaatgcaattacacttaaatgtatataaacaaaagacatgtaaaatatgtggtcatgacattgagcaaaaagtcattgcatcgcgaaatagtcatttttgtccacattgtcagaaa

SEQ ID NO: 35172 - DNA, 1293 bp, Staphylococcus haemolyticus
atgattgatcgttattcaagagaagaaatggcaaatatttggactgatcaaaatagatatgaagcttggttagaggttgaaatcttggcctgtgaagcttggagtgaattaggccacattcctaaagaagatgtaaaaaaaataagacagaacgctaaagtagatgtgaaacgtgctcaagaaatcgaacaagaaacaagacacgatgttgtggcatttactagacaagtatcggaaacgttaggtgacgaacgtaaatgggttcattatggcttaacttctacagatgtagttgatacagcgctaagttatgttataaagcaggccaacgaaattattgagaaagatattgaacgtttcataaaagttttagaagagaaagctaaaaattataaatacacattgatgatggggcgtacacatggtgtacatgctgaaccgactacatttggtgttaaaatggcattatggtatacagaaatgaaacgtaatctaaagcgtttcaaagaggtacgtaaagaaatagaagttggtaaaatgagtggtgcagttggtacatttgctaacattcctcctgaaatagaacaatatgtatgtgaccatttaggcattgatactgcacccgtttctactcaaacattacaacgtgaccgtcatgcatactatatcgctacactagcactagtagctacatctcttgaaaaatttgcggtagagatacgtaatttacaaaaaacagaaacacgtgaagttgaagaagcatttgcaaaaggtcaaaaagggtcatcagctatgcctcataaaagaaatcctattggttcagaaaatataacaggtatttcaagagtgattcgaggttacattacaacggcttatgaaaatgtgcctttatggcacgaacgtgatatttctcactcttcagctgaacgtatcatgttaccagatgttacaattgctttagattatgctttaaatagattcactaatattgttgatagactaactgtttttgaagacaacatgagaaataatatcgataaaacatttggactaatcttctcacaacgtgtattactagcgttaattaataaaggcatggttcgtgaagaagcatatgatagagtgcagcctaaagcaatggaatcttgggaaactaaaacaccattccgtcaattaatagaaaaggatgagtctatcactaatgtgctttctaaagaagaattagatgaatgtttcaaccctgaacatcatttaaatcaagttgatacaatctttaaacgtgcaggtttagag

SEQ ID NO: 35173 - DNA, 603 bp, Staphylococcus haemolyticus
gtgcctccacaaggtggacgtaaacatccaaaccaagaattaatacaaattgatacaacaaatatcttattcattctaggtggtgcgtttgatggcatcgatgaagtaattaaacgtcgcttaggagaaaaagtgattggatttgcaagtaatgaagcggataaatacgatgaagaagcattgttagaacaaattcgcccagaagacttacaatcatatggtttaatacctgagtttattggtcgtgtgccaatagttgctaacttagaaacattagatgtagaagcgcttaaaaacattttaacgcaacctaagaacgctttagtaaaacaatatactaaaatgttagaacttgataatgttgagttagaatttaccgaagaagcattagctgcggtaagtgagaaagctattgagcgtaaaacaggagcacgtggattacgttctatcattgaagaagcattaatcgatatcatgtatgatgttccttcatcagaagacgtaactaaagttgttattactgataaaacaattaatgatgaagttgacccagaattatacgattctgaaggtaacatattaaatgatagtaaaacatcagca

SEQ ID NO: 35174 - DNA, 1344 bp, Staphylococcus haemolyticus
atgcattttattgctataagtataaatcatcgcactgccgatgtagcacttagagagcaagtagcttttagagatgatgccttacgattagcccatgaagatttgttcgaaactaaatctattttagagaacgtcattttatctacatgtaatcgtactgaagtatatgctattgttgatcaaattcacacaggtcgttactatattcaaagatttttagcgcgttcatttggatttgatgtagatgatataaaaaatatgtcagaagttaaagtgggggacgaagcagttgaacatttactgcgtgtcacttctggcttggattcaattgtattaggtgaaactcagattcttggacaaatgagagatgcattctttttagctcaagacattcaaacaactggtacaatttttaatcatttatttaaacaggctattactttcgctaaaaaggcgcataatgagactgacatagcagataatgctgtgagtgtttcatatgcagcagttgaattagctaaaaaggtatttggtaaactaaaaggtaaacaaactattattataggtgcaggggaaatgagtgaattatcactcttaaatttattaggttctggtattgatgatattactgtcgttaatagaactgaaactaatgcgtataaattagcaacgaagcacggcgtaaattataatacacttgagtcattaccaactcttttgactaatgctgatattgttatcagttcaacaagttcgccagattttattgttacaaaatctatgattgagtcggtcaatcttaagagaaaagcttcttcattattgttaatagacattgcggttcctagagatattgaaccaaatgttaatatcagcgaaaatatttttagctatgacgtggatgatcttaaaggtttagttgatgctaacttgcgagaacgtcagatggctgctgactttatagcaagtcagattcctgatgaagtccaggctcataatgattgggtaaatatgttaggtgttgtacctgtaattagagcattgcgtgaaaaagcaatgacaatccagtcagaaacaatggatagtattgatagaaagctacctgatcttagtgatagagaacgtacaatcatttcgaaacatactaaaagtattattaatcaaatgttgaaagatccaataaaacaggccaaagaattgagtaatgataagagaagtaatgaaaaattagagctatttcaaaacatatttgatattgatactgcagacccttacgaggatattaaagctcgtaaagcacaaaaagaaaaagaagtttctatccgtcacatctttagttttgaa

SEQ ID NO: 35175 - DNA, 1497 bp, Staphylococcus haemolyticus
atggaaaaatacatcatgtcgattgaccaaggaacaacaagttcaagagccattctatttgataaagaaggcgatattaaaggtgttgcacaaagagaatttaagcaatatttccctaaatcaggttgggtagagcacgatgctaatgaaatttggacttcggtattagcagttatgactgaagtattaaatgaaaatgaaattaacgctgaccaaattgagggtattggaattaccaaccaacgtgaaacgacagtcatttgggataaaaatactggacgtccaatataccatgcaattgtttggcaatcccgtcaaacacaatcaatttgtcatgaattgaaggaacaaggtcatgaagaaacattccgtaataaaactggattattgttagatccttacttcgctggtacaaaagttaaatggattcttgataatgttgatggagctagagaaaaagctgaaaatggtgatttattattcggtacaattgatacatggctagtttggaagttatctggtggagaagcacatattacagattattcaaatgctagtcgtactttaatgtataatatttacgatttacaatgggatgatgagctacttgatttattaaatgtacctaaacaattattaccggaagttaaagaatctagtgaaatttacgctcacactaaagattatcatttctttggtcaagaggtaccgatttcaggtatcgctggtgaccaacaagctgcactatttggacaagcttgtttcgaacgtggagatgttaaaaatacttacggtacaggcggctttatgttaatgaatactggtgaagaaccagttaaatctgaaagtggattgttaactactattgcatacggcttagacggtaaagtcaattatgcacttgagggttctatctttgtttcaggttcagcaattcaatggttacgtgatggactaagaattataaattctgcacctcaatcagagaattatgctacacgtgttgattctacagataatgtttacttcgtaccagcatttgtaggattaggtacaccttattgggattcagaggccagaggtgctatatttggtctaagtcgcggtactgaaaaagaacactttattcgtgcgactttagaatctttatgctaccaaactcgtgatgttatggaagctatgtctaaggactctaagattgaagtgaacaatttacgtgttgacggtggcgcagttaaaaataactttatcatgcaattccaagctgatattgtaaatactgctgtagaacgccctgaaatacaagaaacaacagcattaggtgcagcttatttagcaggattagctgtcggtttctgggatagtaaagatgaaatagcaaatagatggcaattagaaacagaatttacaccacagatgtctgaagaagacagaactaagttatataaaggttggaaaaaagcagttgaagctactcaggtctttaaattggaagat

SEQ ID NO: 35176 - DNA, 621 bp, Staphylococcus haemolyticus
atgaatcgtacaaaacgtattactttgctaatcgttttcaccttaatatttggtatcattgcatccttccatgagtctagactgggtaaatggattgatactgaagtatatgaatttatttattcatctgaaagtttcatcactacttctatccttttgggtgccactaagttaggagaagtatgggcaatggtctgtctatctctaatgttagtcgcatatttaatgttaaaacgctttaaaatcgaagcgctattctttgtgattgttatgtctctttcaagtatattaaatccattactgaagaatatttttgaccgagagcgcccaacattattacgattaattgatatatctggatttagctttcctagtggccatgctatggggtcaacatcattctttggtagtgcgatgttcatagccaatagaaaagcatcaggtcataataaaggaattattataggattatgcgcattatttattcttctgatttctatttcaagagtatatttaggtgtgcattatcctacagatgtcattgctggtataattggcggtgctttctgtattgttctttcaactttaatacttaaaaatcatttatatccaacagctacg

SEQ ID NO: 35177 - DNA, 556 bp, Staphylococcus haemolyticus
ttatctacggctgtagcatctaaagaacctcgtgatggtgactttttcccattaacagttaactatgaagaaaaaatgtatgctgctggtaaaattccaggaggatttaaaaaacgtgaaggtcgtccaggcgtttttgcgatgatataccgccaagtcataggttatcctgagcatattcgcccaggtattacgtttgcatcgaaacgtttattgaaatttgcgattatcttatatgggttaaaattaaatatgggagatattctaggtaaaggctggaaattactacttattgatattatcgtaattatcttttcaataagtttaactttaattttgaatcaaattattaaaggaaatcaagatatctctatgctacttggtattggttctcgcgtctacagctagcagttgccggccataaagacgctgtaaacatggtagaggctggtgcaagtgaaataactgagaaagatatgttagaagctattttcttcggacatgatgaaatcaacggttagtagcattccagaagaagtggtaactcacattcagc

SEQ ID NO: 35178 - DNA, 804 bp, Staphylococcus haemolyticus
tcacgtaaattaaaacctgaagatacaattgttaaatttgacaacggtggcattattggcgatgggaataaatcatttgtattcggtccttgttcggtagaatctcaagaacaggtggatgcagttgcaaaagatttgcaagctaggggagaaaaatttattcgtggtggcgcatttaaacctcgtacatcaccttatgatttccaaggtttaggcattgaaggacttaaaattttaaaaaatgttaaagataaattcggtctaaatgttgttagtgaaattgtaaatcctgctgattttgaagttgctgatgaatacctagatgtatttcaaattggcgcgcgtaacatgcaaaactttgaattactgaaagaagctggcagaaccaataaacctatcctattaaaaagaggattgtctgccactattgaggaatttacttttgcagctgaatatattgcatcacaagggaataaaaatattatcctgtgtgaaagaggcatccgtacttatgaaaaagcaacacgtaatactctagatatatctgctgttccaattttaaaacaaggaacgcatttacctgtaatggtagatgtaacgcatagcacaggacgcaaagatattatgttaccaactgcaaaagctgctttagctgttggtgcagatggtgtaatggcagaagttcatccagacccatctgttgcactaagtgatagtggtcaacaaatggatttaaatgaatttgatcaattttacaatgaattaaaaccattagctgaattatataattcaaaaaaattaaaa

SEQ ID NO: 35179 - DNA, 1327 bp, Staphylococcus haemolyticus
atggatataaaaatgccaaaactaggcgaaagtgttcatgaaggtactattgagcaatggcttatttcagttggtgactatgttgatgaatatgaacccttatgtgaggtaattactgataaagtaactgctgaagtaccttcaactgtatctggtactatcactgaaattttagtttcagaaggtgaaacagttcaaatagatcatgttatttgtaaaattgaaacttctgaaacagataattctaccaacactaaaaataccgatattgaaaccgttaaggattcaacagatttaaatataaatggtaatgatactttaacagtcgaaacgtcagcatcagcttcaaaaaatacttctgataaagaagtaagtcattctgttaaatcaaatgcacatacacaagcatcattacttaataacggtcgatattcaccagtagtttttaaaattgcatctgaaaatgatattgatttatcatcagttcctggcacgggtttcgaaggacgtgtgactaaaaaagatattgaaaattatattaattcaagtcatcagaaaccgaaaataaataacaattcacaatctaattttgaacatacgaaatccaacgtgtattctactcagagtcagattggtcaatctataccagtcaggtgttcgtaaagcaatagctcaaaacatggtgacaagtgtaactgaaatccctcatggttggatgatgcttgaagtagatgcaactaacttagtaaaaactagaaatcatcataaaaattcgttcaaagagaacgaaggttataatttaactttctttgcattctttgtaaaagctgttgctgaagcattaaaatcaaacccactattaaatagtagttgggatggagaagaaattattcttcataaagatattaatatttcaattgctgtagcagatgaagataaattatatgtgcctgttattaaacacgctgatgaaaaatcaatcaaagggattgctcgagagataaatgaactagcacttaaagcaagaaataaacaattatcacaagaagatatgtctggtggaacatttactgttaataataccggtacatttgggtccgtttcatcaatgggaattataaatcatccacaagcagcgattttacaagtagaatctattgtaaaaaaaccagtcgttattgatgatatgattgcaattagaagcatggttaatttgtgtatttcgattgatcatagaatacttgatggtgttcaaacagggcgcttcatgtctcaagttaaagaacgtattgaacaattcacaatagaaaatacaagtatttactag

SEQ ID NO: 35180 - DNA, 435 bp, Staphylococcus haemolyticus
atggatttaaattttgatttatatatgaatggcgtggttgaacaagctcgtaatgaaattgaaaatgcgggatatgaacagttaacaactgcagatgaagttgacaaagtattacaacaaaatggaacttcattagtaatggttaattcagtttgtggatgtgcgggaggaattgcacgtccagcagcatcacatgcgttacactatgataaactacctgatagacttgttacagtatttgctggacaagataaagaggctacgcaacaggctagagactattttgagggttatgcaccttcaagtccatcatttgcattaattaaagatggtaaaatcactgaaatgattgaacgtcatcaaattgaaggccatgatgtaatggatgttattaatcagttacaaggcctatttgataaatattgcgacgaaaga

SEQ ID NO: 35181 - DNA, 975 bp, Staphylococcus haemolyticus
  misc_feature (899)..(899): n=g, a, t or c
atgttaaagttaaatccttataagattggatttagaacgcttaaaacagcagtaggtatcacattaggtgttattttagctaaatggatagggcttgataattatgcatcaagtgctatcctcattgtattatgtattaaacatactaaagttcactcagtacaagctatcgtatcaagatttgtatcttgtatactaattctactgtttggttcattggtttttagcttattaggtcagaatgcgcttgttttgggattgattgtattattatttattccgataactgttatgttgaaagttcaagagggtgttgtaactagttgtgttatattattacatgttttcaatgcaacaacgattaatttacatttaatcattaatgaattactcttattaactattggattaggaatcgcattcattatgaatttaattatgccaagtttagacaaaacattagtttcttttaagaaagatatagaaaaaggctttaaagaaatctttatgacatatagcgaagcttgctcaaattataataatgattttactttatctttcgaaaaacttcaattagacattcgaaaggccaaatctatcgcatttagagatgttaaaaatcattttattagaaatgaaaattcatattatcactattttgatatgagacaagaacaacttgaattattgcgtagaattaaaccgttattaaatcaagtcactgtcgatgacccattattgactgatgtatctcatttaatgtcagaaattggtaataacgtaaatagtaatgattatactgctttacgattacattcactgtatgaaatccgtttatcactagacgaattaccacttcctaaatctcatcaatctttaaaatcacgttcaagtatgantgcaatattaaatgaactagaagagtatttaaacattaaatctcaatttggatcactacgattacacaatgaaata

SEQ ID NO: 35182 - DNA, 300 bp, Staphylococcus haemolyticus
atgactaaagttacacgtgaagaggttgaacatatagcacatttagcaagacttcaaatttctgaagaagaaactgaagaaatggctaatacacttgaaagtatcttagattttgctaaacaaaatgacacagcagatacagaaggtattgaaccaacttatcatgtattagatttgcaaaatgtgttacgtgatgatgaagcaatcgagggcattcctcaagaacttgcattaaaaaatgctaaagagacagaaaatggtcaatttaaagtaccagctatcatgaatgaggaggaagct

SEQ ID NO: 35183 - DNA, 1152 bp, Staphylococcus haemolyticus
atgaggaggaagcttaagatgagtattcgttatgaatcagttgaaaaattatcagaaatgattaaaaacaatgagattaagccttcagaaattgtcaaagacatctatgatgcaattgaagaaacggatcctactattaaatcatttttagcactagataaagataatgctattaaaaaagcgaaagaattagatgaattacaagcaaaaggtcaaatggaaggtaaattgtttggtattcctatgggaattaaggacaacatcattactaaagatgtggaaacaacatgtgctagtaagatgttagaaggatttgttccaatctatgaatctactgtaatgaacaaactacatgatgaaaatgcgattctaatcggtaaactgaacatggatgaatttgctatgggtggttcaactgaaacatcatatttcaaacaaactgttaacccattcgatcatacagctgtaccaggtggttcgtcaggtggttcagcagcagcagttgcagcaggtttagtaccatttagtctaggttcagatactggtggttcaattcgacaaccagcagcatattgtggtgtagttggtatgaaaccaacttacggacgtgtatcacgtttcggtttagttgcttttgcatcttcattagaccaaattggtccaattacaagaaatgttaaagataacgctatcgttctagagacaatttcaggcgttgataaaaatgattctacaagtgcaccagttgaagacgttgactttacttcagaaattggtaaagacattaaaggcttaaaagttgctttaccaaaagaatatttaggtgaaggtatcaatgaagatgttaaagaagctgttaagaatgcagttgaaacacttaaatctctaggtgcagaagttgatgaagtatcacttccaaatacgaaatatggtattccatcatattatgttatcgcgtcatcagaagcatcagcgaacttagctcgctttgatggtatacgctatggctaccattcaaaagaagcccaatcattagaagaattatataaaatgtctagatctgaaggatttggtgctgaagttaagcgtcgtatcttcctaggtacatttgcattaagttctggttattatgatgcttactataaaaaatca

SEQ ID NO: 35184 - DNA, 495 bp, Staphylococcus haemolyticus
atgtatataaaagaaggagaaataaagatggagaatcaacttaatcaacctagtcaaagagaacgcaatgcaggtaaattaataggctacagttctttaattttatgtattttattgatcatccataactttattgcattagatacgttaacagctaagacactattatcacaggcaggacagaaagcaagtgatagtgcagtagctaatatattaaatagctttagatatactggcattatgtatatattggcatatttagcaggtgtcattgcattatggaatcgacataaatatctgtggtggtttatgtttgcagtctatgtttcaaatgtattatttacattagtaaacgtaactatggttattaatgcgataataacagctaaatcagtgttgtttattattcctattataatcgtaattgtgggctctacagtattagcattatacatgctagttatttcaatcatccgtaagagtacgtttaatcga

SEQ ID NO: 35185 - DNA, 531 bp, Staphylococcus haemolyticus
atgtcaaattctcaaggtattcgtaaatcaatgtctgaatcaaaaagttataaagctaaacaagtatttcctcaagacaccaatcatcaccacacaatgtttggtggttcattgatggctaacatagatgaaattgcagccattactgcaatgaaacatgctaatgcccaagtagttacagcatcaactgattctgtagattttttaagaccaattaaaacaggtgatattacttcttatgaagcgatggttagttatgctggtacaagttcaatggaagtttgtgttcaaataattattgaggatgtattaaataaagaaagacatttagcagccttaagtttcttaacttttgttgcattagatgataatggtaagccagtccaagtaccagatgtctatccggaatcaaaagttgaaaaatggttctatgaaagtgcgcctaagcgtgtacaacgtagaaaagatagaagagaagaaagtaaaaatacgattgaatttttatcaaatgcacaacatattgaagaatta

SEQ ID NO: 35186 - DNA, 1368 bp, Staphylococcus haemolyticus
atgaaactaatattagatttagtcgttaaccatacatctgatgagcatccctggtttattgaatcaaaatctagtaaagataacccaaaaagagactggtacatatgggcagaccctaaggatgatggttctgaaccaaataattgggagagcatttttaatggttcaacatggcaatttgatgaaaccactaatcaatattacttccatttatttagtaaaaaacaaccagatttaaattgggataatcctgaagtacgtgaatcagtatttaacatgatgaattggtggtttgaaaagggtattgatggattccgtgtcgatgctataacccatattaagaaaacatttgaagctggtgacctacctgcaccagaaggaaaaaaatatgctccagcctttgatgtagatatgaatcaacctggtattcagaattggctacaagaaatgaaagatgagtcactaagccaatatgatattatgactgttggagaagcgaatggtgtaaatccagataatgcagaagagtgggttggagaagataaaggtaaattcaatatgatcttccaatttgaacatttaggtttatggagtacaggtgattctcaatttgacgttaaatcatataaagaggtgttaaaccgctggcaaaagagactagaaggaattggttggaatgcacttttcatagaaaaccatgatcaacctcgtcgtgtatcaacttggggtaacgataaagattactggtttgaatctgctacaagccacgccgttgtgtatttcttacagcaaggtacaccgtttatctatcaaggacaagaaattggtatgaccaattatccttttgaaagtattgaaacgtttaatgatgttgcggttagaaatgaatatcaaattgtaaaagaacaaggtggagacgttgatcaattattagataagtatagaatggaaaatcgtgataattctcgtacacctatgcaatggaataattctacaaatggtggcttcacagagggaaaaccttggttcccagttaatccaaattataaagatattaatgtagctcatcaattagaagacgagcattctgtacttaatttttacaaaaaattgattcaattaaaaaaatcgcatgatatatatatgtatggacagtttgatttaattgatgcagaaaatgaaaatgtgtttgcttatactagacaattagaaggcaaaactgtagtggttgcaggtaatttaactgataaacaaagttcattaacattaccttttgatatcgaagaggatgcaatcaaattacataactacaatagtcaattagatgcaacatcacttaagccattcgaagcatttgtagcagaaata

SEQ ID NO: 35187 - DNA, 510 bp, Staphylococcus haemolyticus
atggaagaaaaaggttataaatttgtagaagactctggacgaggttatcgtcgtgttgtaccttctccaatgccaatcaacattgtagaactagatagcattgaaacattaattaaacacggtacattagttattgcagctggtggtggcggtatcccagttgtcaaagaagaaggtaactataaaggcgtcgatgctgttatcgataaagataaaacaagtgctttactagcagcacacttaaaatcagatcaattaatcatcttaacagcagtagattatgtttatattaattacggtaaagataatcaagaagctttaggtgaagtaacagtggatgaaatgaatcaacatattgctgacggtcaattcgcaaaaggtagtatgttacctaaagtagaagcagcattacaatttatcgagaaaaatccagaaggtagtgtattaatcacatctcttgaagatttaggagatgccctagatggtaagattggtacattaattaaaaaa

SEQ ID NO: 35188 - DNA, 947 bp, Staphylococcus haemolyticus
atgagtgaagaacaaacaatcatggaaaagctttttaaaacattagatgaaaaagctaaagttttaaatgaacaaaacggtcaaagttttattgagaatttaggattagcaatggaagatgtttatagtaataaacgtgaattactagaacaagccacattacaagatcgtagaaaagcatttcagttcgcttatttaagtttaatgcaagaagaaacaattcaagccaatcaccaaataacacccgattctataggtttaattctcggatttttagttcaaaaatttactgaaaacaacgaagaattacatgttgtagatatcgctagtggtgcaggccatttaagtgcatctgttaatgaagtgcttaaggatactacaataatgcatcatcttattgaagttgatccggtactttcaagagttagtgtacatttagcaaatttcttggagataccgttgatgtttatcctcaggatgcaattatgccgttacctttagaagaagcggatattgttattggtgatttaccgataggatattatcctctagatgaacgaagtcatgaaatgcaattaggttttaaagaagggaatagctattcacattatttactaattgaacaagcaattactgccttaaaacaatctggtttcgcatttttagtagttccaagtaatatttttgagaatgacaatgtaaaacagttagaaaatttcattgctacagaaacagaaatgcaagcatttttaaatttacctaagacgttatttaagaacgaaaatgcgcgtaaatcaatattgattttacaaaagaaaaaatcgaatgagactaagccagttgaagtgttattagcaaatattcctgattttaaaaatcctaatcaattccaaggatttattggtgaattaaatacttggatgaaagacaatcatcctcaaaaataa

SEQ ID NO: 35189 - DNA, 966 bp, Staphylococcus haemolyticus
atgtcaatggttcaagcgattaataatgcgcttaaaactgaattgcaaaatgacgaaaacgtattagttttcggtgaagacgttggtgttaacggcggtgtattccgtgtaactgaaggtttacaaaaagaattcggtgaagaccgtgtattcgatacaccattagctgaatcaggtatcggtggtttagctcttggtttaactgttgaaggtttccgtcctgtaatggaaatccaattccttggtttcgtatttgaagtatttgacgaagttgctggtcaaattgctcgtacacgtttccgttcaggtggttcaaaagtagcacctgttacaatccgtgcgccattcggtggtggtgttcatactcctgaacttcacgctgataacttagaaggtattttagctcaatcacctggtattaaagtagttattccttcaggtccatatgatgctaaaggtttattactttcatcaatcagatctaatgacccagttgtatatttagaacatatgaaattatatcgttcattccgtgaagaagttcctgaagaagaatatacaattgacatcggtaaagctaatgtgaaaaaagaaggtaacgacatcacattaatcgcttacggtgcaatggttcaagaatctgaaaaagctgctgaagaattagaaaaggaaggttactcagttgaagttattgacttacgtactgtacaacctatcgatatcgatactttagttgcatcagttgaaaaaactggccgtgctgtagtagttcaagaagctcaacgtcaagctggtgttggtgctactgtagctgctgaattagctgaacgtgctattctttcattagaagcaccaatcgctcgtgtggctgctgctgatacagtatatccatttacacaagctgaaaatgtttggttaccaaacaaaaacgacatcattgaaaaagctaaagcaactttagaattt

SEQ ID NO: 35190 - DNA, 1011 bp, Staphylococcus haemolyticus
gtggcatttgaatttagattacccgacattggtgaaggtatccacgaaggtgaaattgtaaaatggtttgttaaagccggagatacaattgaagaagatgatgtattagcagaggttcaaaatgacaaatctgtagttgaaatcccatctcctgttagcggtactgttgaagaagttgtagttgacgaaggtactgtagcagttgtaggtgatgttattgtcaaaatcgatgcacctgatgcagaagatatgcaatttaaaggtggtcacgatgacgatgcttcatctgaagaagcaccagctcaagaagaagctaaaactgaagaagcaccagcagcatcagcttcacaagatgaagaagtagatgaaaatagacaaatcaaagctatgccatctgttcgtaaatatgcacgtgaaaaaggcgttaacatcaaagcagtagctggttcaggtaaaaatggtcgtattactaaagaagatatcgataaccacttaaatggtggcggtgctcaagcagcaacagcttcaaatgaaagtgcagctgcttcaacatcagaggatacttctgcagttcaaactcaatcagtacctgaaggagacttccctgaaactactgaaaaaatcccagcaatgcgtagagcaattgcgaaagcaatggttaactcaaaacacactgctcctcacgtaacattaatggatgaaattgatgttcaagatttatgggatcaccgtaaaaaattcaaagaagttgcagctgaacaaggtactaaattaactttcttaccttatgttgttaaagcattagtttctgcacttaaaaaatacccagcacttaacacttcattcaatgaagaagctggcgaaattgtacacaaacattactggaatattggtattgctgctgatactgacagaggcttattagttcctgtagttaaaaatgcagaccgtaaatcaatcttccaaatttcagatgaaatcaacgaattagcagttaaagctcgtgatggg

SEQ ID NO: 35191 - DNA, 1056 bp, Staphylococcus haemolyticus
atgactcaaaacgattcaatggcagaattaaaacaacaagcacttgttgatattaatgaagctcaaaatgaacgcgaattacaagatgttaaagttaaatacttaggtaaaaaaggctcagtaagtggattaatgaaaaatatgaaagatttacctaatgaagaaaagccagcatatggtcaaaaagtaaatgaactacgtcaaacaattcaaaaagaattagatgagaagcaagaattgttaaaaaacgaaaaattaaatcaacaattagcagaagaaacaatcgatgtaacattgccaagtcgacaaattagtataggttctaaacatcctttaacacgaacagttgaagaaattgaagatttattcttaggtctaggttacgaaattgttgatggctatgaagtagaacaagattattataactttgaagctttaaatttacctaaatcccatcctgcacgtgatatgcaagatagtttttatattactgatgaaatcttaatgcgtacacacacatctccagtacaagcacgcacaatggaaaaacgcaatggacaaggaccagttaaaattatttgtcctggtaaagtttatcgccgtgattcagatgatgcgacacatagtcaccagttcacacaaattgaaggactagttgttgataaaaatattaaaatgagtgatttaaaaggaacattagaattagtggcgaaaaaattattcggtgcagaccgtgaaattcgattacgtcctagttacttcccgttcactgaaccttctgtagaagtggacgtatcatgtttcaaatgtaaaggtaaaggctgtaacgtatgtaaacatacaggatggattgaaattttaggtgcgggtatggtacacccgaatgtacttgaaatggccggattcgattctaatgagtattctggtttcgcatttggtatgggtcctgaccgtatcgcgatgttgaaatatggtattgaagatattcgttatttctatacaaatgatgttcgattccttgaacaatttaaagctgttgaagatagaggtgaagca

SEQ ID NO: 35192 - DNA, 1587 bp, Staphylococcus haemolyticus
atgttgatttctaatgaatggttaaaagattacgtagatgcaggggttaaggttgaagatttagcagaacgtattacccgtacaggtattgaagtagataacatgattgattattcaaaagatattaaaaatctagtggtcggctatattcaatcaaaagaaaagcatcctgatgcagataaattaaatatatgccaagtagacattggtgaggaagaacctgttcaaatcgtttgcggtgcaccaaatgtagatgctggtcaacacgtcattgttgcgaaagttggtggtcgcttaccaggaggcattaaaattaaacgtgctaaattacgcggtgagcgttcggaaggtatgatttgttcattacaagaaattggtatttcaagtaatgtggtacctaaagcatatgagaatggcatttttgtcttcccaactgaagttgagccgggaacggatgctttaacagcactatatttaaatgatcaagttatggaatttgatttaacacctaaccgtgccgatgcattaagtatggtaggtactgcatatgaagtggcagcattatatcaaactgaaatgacaaaaccagaaactcaaagtaacgaaacttcagaatctgcaactaatgaattatcagtaacaatcgataatcctgaaaaggtcccatattatagtgcgcgtgttgttaaaaacgtaagcatagaaccatctccaatatgggtgcaagcacgtttaataaaagcaggcatacgacctattaataatgttgtagatatttcaaactatgttttattagaatatggtcaaccgttacacatgtttgatcaagatcatatcggctctaaagaaattgttgtacgacaagcgaaagatgaagagacaatgactacattagacaataatgagcgcaagctagtagacactgatatcgttatttctaatggtcaagaacctattgcattagctggcgtaatgggtggcgacttttcagaagtaactgaacaaactactaatgtggtaatagaaggtgcaatatttgacccagtatcaattcgtcacacttcacgtcgtttaaacttacgtagtgaagcctctagtcgttttgaaaaaggtatcgcaacagaatttgttgacgaagcggttgacagagcatgttacttattacaagagttagcttctggtgaagtactacaagatagagtatcttcaggagatttaggatcatttgtgacaccaatcgatattacagctgaaaaagtaaacaaaacaatcggttttaatttgtctaatgacgaaattcaatctatctttagacaattaggcttcgaaacaacattaaaaggcgaaacattaacggtcaatgtgccttcacgtcgtaaagatattactattaaagaagacttaattgaagaagtcgcacgtatttatggttacgatgaaatcccttcatcactacccgtatttggcgaagtaacatgtggagagttaacggctcggaacgtgacacttattaccggaaggaatcgcgtgagggtccgatggtatactaaaaattttaatatacattccattcttagaagcaggcta

SEQ ID NO: 35193 - DNA, 279 bp, Staphylococcus haemolyticus
atcaaacctcatgcaacagtcatcactttagatatccaaggtaaaatgttgtcttcagaaggattagctgaagaaatgcaacgacgcatgacacaaggtcaaagtgatttcgtctttgttattggtggatcaaatggattgcatgaggacgtcttacaacgcagcaactacgcactttcattcagtaaaatgacattcccacatcaaatgatgcgcgttgtcttaatcgagcaagtatacagagcatttaaaatcatgcgaggcgaagcgtaccataaa

SEQ ID NO: 35194 - DNA, 771 bp, Staphylococcus haemolyticus
gaaaaaacgacttctaatgctctgaaattaaaagctttcttcaatagtgacgtacctgttcacagaggttctgcaaaaccgttaattaataaagcaatagatgcaagccaagttcatggagaaagtggtatggatggatacgacttcccatctatatcaaatgaccaattagcttctactaactcaatatctgcaatgagggagatacttttacattcagacacccctattacgcttatagcgttaggtccacttacgaatattgctctattgataagtacgtttcctgaagttaaagatcatattagagaaattgtcttaatgggaggaagttcaggacgaggtaatgtaacgccacttgcagagtttaatatctatagtgatcctgaatcagcacatattgtatttgagagtgaccttcccattactatgattggacttgatttagcacgacaatcgctgttaactcatgactatttagcatcatttgagcatttgagtagaacaagtgcaatgctctatcaaatctttcaacattatagagagaatgacttcgctaaagggttaaaattatatgatgtcttcactgtattatatttacttgatcctgaaagctatgaaacgatactagctagtgtacgaattgaattacatgggacattgaccaagggagctacagttgttgattacgactcccactatccaaattgtaaaattgttacttcaagtataaataagaactactgttcaatatttaaagacacaattaaa

SEQ ID NO: 35195 - DNA, 1173 bp, Staphylococcus haemolyticus
atgaaaaataacaaattaaaaattatagcttttattttagtattaattgttttaatacttctcattatattattcgtcattaaagttactaactatagtatcaaggacagtgaatataacaatgttaatgataataaggcttatatagaacatcgtgataaaaaccacaaaacagtcgataagctcaaaacggttcaagcaaaagatgataatattgaacaaattaatacgtatttaaaaaatgtccatttcaatggatcaattacagttttaaaagatggaaaattaatgcttgataaaggttatggttatcaaaatattagcagtaagaaaaaaagcaatgcaaatacgatgtatttaattggatcagctcaaaaattcactactggcttaatactcaagcacttagaattatcaaacaaaattaatattaatgaccctgttactaagtatttgccttggtttaagacaaataaaactattaccttgaaagatttaatgttacatagaagtggtttatataaatttagtgctaatcctaatacaaagagtttagatggggcagttcatgatattcaaagaagagggattaatagtaaatattatcataagcatttatataacgatgctaactatctagttcttgcgcaagttatagaagcagtaacgcatcattcttatgtggaaaattattataaattcttagcagaaccctatcatttagagcatagtgctttctttaatgaaaagccttataaaaagaatatggctactggatataaagtgaaaaatgagaaactaaaaacgatgaaacctaatacattagatcaatattatggtgcaggaaatttatttatgtctacacatgatatggctagattagttaatgatttacagcaaaataatattttcaatcaagcagttacaacatctttactccaagaaattggaagcactaaatatccagaatcttatagatatggattctattcgactcctcaagtcaatcgaattaatggtgtgtttttcggtcaaatattcacggtatattttaatgaagattatattattgtactggctacgaataaagttgattattctaaagtgtcaaatgagtcaattatttctcatatttattatcaattactcggtcaaaatatttatgaaaccaaa

SEQ ID NO: 35196 - DNA, 1287 bp, Staphylococcus haemolyticus
atgagggaaacatactatgaactgattgatgaacgtgtttttgaacatgaattaactaatggtttacgtttatttgttatccccaaaaatggattccaaaagacatttgtaacgtatactactcaatttggctctcttgataatactttcaaacctcataatcaaaatgattttgtgaccgtaccagacggtgtcgctcactttttagagcataagttatttgagaaagatgatactgaagatttattcactgcatttgccaatgacaatgctcaagtaaacgcatttactagttttgatcgcactagctatctgttcagtgcaacagataatgttgaaaggaatattttaagattactagaaatggttgaaacgcctttcttttctaaggaaacggtagataaagaaaaaggtattattgctgaagaaataaagatgtatcaggagcaacctggttataaaattatgtttaatactttacgtgctatgtatcaaaagcaccctattaaagttgatatagcaggaagcgttgaaagcatttataacattactaaagatgatttatatttatgttatgaaacattttatcatccatcaaatatggtgttatttgtcgtcggagatgtcaatcctgaaaacatacgtgacatagttgaaactcatgaaaataaaagggataagacgaaccagcctagcattgaacgagcaactgttgatgaaccaacaaatgttataacaccttttgtttcagaagaaatgaaattacaatctcctagattaatgttaggttttaaaaatgaaccaactgaagcgtcaccacatgaatatgtacaacatgatttagaaatgacactatttttcgaattaatatttggtgaggaaactgaattttatcagactttattaaatgaagatttgatagacgaaacttttggatatcaatttgtactcgaacctacatattgtttttcaattattacaagtgcaacgcaatatccagataagttaaaagaagtgttgttaagtgagctaaacaagtattgtggtaatcttgatgatcaagaagcatttgaattgttgaaaaaacaatttattggggaatttatttcaagtttgaattcacctgaatatattgcaaaccaatattctaaattatactttgagggcgtcagtgtattcgatatgttagatattatagataatataacattagatagtattaacgaaactgccactaaatttttaaatatcaataatatggttgatagtcgattggagcctaaagct

SEQ ID NO: 35197 - DNA, 702 bp, Staphylococcus haemolyticus
atgagagcgttagtacttggtgggtcaggcactattggaacagcaattgtagagcgtttattagaagaaggtaatgaagtaattattcaatattttcaatcagatttaaaagcattacaagataagtacaaaggggaagcagtcgaatttatacaagctgatttgacgcaaaatattgatttggaaactacctttgctcatatcaaatatttagattgtttgatatacagtagtggtacagctttgtatggcttattgcaagatatgtcagatatagatattgatcttagttataacattcatgttaagcagttaattagatgttgtcgttattttatagacttaatacgtcaaagtgagtttggtcgaattattgttatttcatccatttggggtgaaacaggtgcgagtatggaaacaatttactcggcaatgaaaagtgcacaaatcggtttcgtcaaagcgttaagtcaagaattagcgatgactaatgtcactgttaatgctatcacgcctggttttgtaagtgggaatatgtcacaagtttttaattcagatgaattgaaagctatattagaagaattacctcagcaaagaatgatcaatccttgtgaaattgcgcatacgtgtgcttatctatggaatcctttggcgaaaagtattactggaactgttcaaaaagtaaacggcgcttggtacatt

SEQ ID NO: 35198 - DNA, 207 bp, Staphylococcus haemolyticus
gtgaagacaattggtgaaacattaaaaggtagacgtgaaaggctaggaatgacgttagcagaattagaagagcgcactcaaattaaacgtgatacgttgaaattaatcgaacaaaatcagtttgataaattagctaaagttgattacgcagagggttttattcgacgttatgcgagtgtggtaaatattgattcacaacaactgatt

SEQ ID NO: 35199 - DNA, 804 bp, Staphylococcus haemolyticus
atgaataaaccaattggtgttatagattcaggtgttggtgggttgacagttgctaaagaaatcatgcgtcaattacccaacgaaacaatttactatctaggggatattgcaagatgtccttatggtccaagacctggtgatgaagttaaacaatttactactcaacttgctaataaattaatgcaatttgatattaaaatgcttgtaatagcttgtaatacagctaccgctgtagcattagaacatttgcaacaaatgttgcctattccagttattggagttattgagccagggtcaagaacagctattatgactactaaaaatcaaaatgttttaattttagggactgaaggaactattaaatctgaggcgtatagacatcatattaagcacattaatccaaacgtccatgtttatggtgtagcttgcccagggtttgttccactagttgaacaaatgcgctacgatgatcctacaattacaagtattgtcattcatcaaacgttaaagcagtggagaaatactgatgcagatacgataattttaggttgcacacactatccattgttatataagcctataaatgattattttggaggagagaaaaaggttatttcctctggattagaaacagcacgtgaagttagtgctttattaacttttagtaatgaacatgcgagctatacacaacatccagagcatagattctttgctactggagatacagtacatattaaaaatatcattttacaatggttaaaattagatgttgaagttgaacgcatcagtgtagatgaataatca

SEQ ID NO: 35200 - DNA, 579 bp, Staphylococcus haemolyticus
atggcagacatcgtaattgctacaaataataaaggtaaaattaatgattttaaatcaatttttcccaatgacaatgtgataggtatatcagaactaataaaagactttgatgtagaggaaacgggaacaacttttgaagagaatgcacgattaaagtctgaagaagctgcaaaagtattgaataaacgtgtgatagcagatgatagtggattagaggtatttgctctaaatggcgaacctggcgtttattcagctagatatgcaggattagataagagtgatgatgctaatattgataaattattaaaaaatttagatggtatcgaaaatcgagatgcacgatttgtttgcgtcattagtatgagtgcacctaatgaaactactcaaactttcaaaggtactgtttctggagtgattactactgaaagacagggtgaacatggttttggttatgatcctattttctatgtgcctgaaaaaggtaaaactatggctcaacttactacaacagaaaagagtgaaatcagtcatagaggtaatgcaattaagaaattgaatgcttatttggagagtgagaag

SEQ ID NO: 35201 - DNA, 667 bp, Staphylococcus haemolyticus
atgctagagagtaaatggggtctcagatttattgctttactattggcaatctttttctatttatcagttaataatgtatttggaaatatttttagtaatgataatttatcacaaaattcatctaaaacaattgaagatgtacctgttgagataatttataattccaaagatttacatgtaactaaagctcctgagactgttaatgtaactgtttcaggtccacaatctaaattattaaaaatcgaaaacaccgatgatatcaaagttgcagtggatttatccaacgctaaagccggaaaatacaaagaagactatatcgttaaaggcttaagtaatgatatcaattacaatgttaaacctaagcaagcttatgttactttggaaaataaagaaactaaaacgatgcatgttcaagcagatatagggaaagatgatatagacccaaactataaagtgaaagacagttctgttgagcctaattcagtcaaagtaactggaggacgagaacaacttaagaaaatcgcatatttaaaagctacttataaagaagctaacaaattaagtcaagatacttctgatgtagcagatgtcactgcttttgataaatcattaaataaattagatgttaatatacagcctaatcaagtcaaattaaatgttaaacttt

SEQ ID NO: 35202 - DNA, 162 bp, Staphylococcus haemolyticus
atgcaatatttcaacgaatggtggaaacaattatttggtgaatcagaaggtaaagactttaaaggtatttatccttcaagtgctaactacactactgatttacattcattaggacaatacgttcaagaaggtcgtcgtttcttatttgaaacagttgtaaaa

SEQ ID NO: 35203 - DNA, 684 bp, Staphylococcus haemolyticus
ttgagaattaaaagtatggcaaagtctgaattacctagagagcgtcttattcacaatggagcaaaaagtttatccaatagtgagttattagcaattcttataaatacaggaagacacggattttcaagtttagatattgctaatgaattactgattagctttaatggtttgaaagaactaaaacatttatcaattaatgatttaacaacaattaaaggaattggactctataaagcagtcatccttaaagctgcttttgaattaggtgaaagaatgtatgctagagattttaatgaaaaaattaaaataacatcaccaagtgatgtatctaatattatgatgtcaaaaatgaaagatttgactcaagaacattttgtagtacttctattaaactctaaaaatattgtgataaaagaagaaacgatttacaaagggacattgaattcttcagtaatacatccacgcgaagttttcaaagcagctattagagcatctagtaatgcgattatagttttgcataatcatccttctggcgatgtcacaccttctaaagaagatatagaaacaacaattaggttaaaggaatgtggtgaattactaggaattcaagtccttgatcatataattattggtgatcaaaaatatgctagtttagtagaagaaggttactttgacttgagaaat

SEQ ID NO: 35204 - DNA, 513 bp, Staphylococcus haemolyticus
atggctaacttaaatttagacccagcacattcaggagttaacttttctattcaacacttagttgtatcaaatgttaaaggacgttttaacgaatttgacgctaacatttcaggtgatttcaatgatttaagttcattacaaggtacttttactgttaaagcaaattcaattgatactaaagtagcagatcgtgataatcatcttaaaagcgcagatttcttagacgctgaaaactacccagaaattaaatttgaaattactaacgtagatgataaatcagttactggtaacttaactatgaaagatcaaacacatgaagaaacttttgatttagattataaaggtactagtttaaatccattaaacggtaaaaacactgctggtttagtaattactggtagccttaaccgtgaaaaatatggtattacgtttaaccaacaacttgaaactggtggtttcttattaggaaaagacttaaatgttgaatttgatttagaatttccacttgaagac

SEQ ID NO: 35205 - DNA, 1670 bp, Staphylococcus haemolyticus
atgaagcaattacatgctaacgaagtaggtgtatatgctttaggtggcttaggtgaagtcggtaaaaacacttatgctatcgaatataaaaatgaaattgttatcattgatgccggaataaaattccctgatgataatttattagggattgattatgttattcctgattacacttacctcgaacaaaatcaagacaaaattgtcggtctattcattacacatggacatgaagaccatataggtggtgtgccctacctattaaaacaaattaatgtacctatctatggcggtccattagcattaggattaattcgcaacaagttagacgaacacaatttattacgtaacgcttcactaaatgagattacagaagatagtgttattaagtctaaacactttgaaatatcattttacttaactacacatagtattcctgaagcttatggtgtaataattgatacacctgaaggtaaaattgttcatacaggtgactttaaatttgatttcactcctgtaggcgaacctgcgaatattgctaaaatggcagaattgggtaaagaaggcgtattatgtctattatctgactcaacaaatgcattagtacctgatttcacattaagtgaacgtgaagtaggtcaaaacgtagataaaattttccgtaactgtaaaggacgtatcatatttgctacatttgcttctaacatttaccgtgtacaacaagcggttgaggctgctattaaatataatcgtaaaatagtaacatttggtcgttccatggaaaataatattaaaatcggtatggaattaggctatattaaagcaccgccagaaacttttgttgaaccaaataagattaacaacattccaaaacatgaattactaattttatgtacaggatctcaaggtgaaccgatggcggctttatcacgaattgcaaatggaactcataagcaaattaaaattatacctgatgatactgttgtatttagttcatcacctatcccagggaacactaaaagtatcaatcgcacgattaatgcattatacaaagctggtgctgatgttatccatagtaaaatttcaaatatccatacatcaggtcacggttctcaaggcgatcaacaacttatgttcgcttgattcaaccgaaatatttcttaccaattcacggtgaatatcgtatgcttaaagcgcatggacaaacgggtgtggactgtggtgttaaagaagagaacgtctttatctttgatatcggtgatgtactcgcattgacacatgactctgctcgtaaagccggtcgcataccttctggtaatgtgttagtagatggtagtggaattggtgatataggtaacgttgttattcgtgatcgtaaattattatctgaagaaggattagtcattgtagtggttagtattgatttcaacactaataaattactttcaggtccagatatcatttctcgtggttttgtgtacatgcgtgaatcaggtcaattaatttatgacgctcaacgcaaaattaaaaccgacgtaatttctaaattaaatgctaatccaaatattcaatggcatcaaattaaatcttcaatcattgagacattacaaccttatctatacgataaaactgctcgtcgcccaatgattttacctgtaattatgaaagtaaac

SEQ ID NO: 35206 - DNA, 878 bp, Staphylococcus haemolyticus
aaagaaatcgtagatattacaggtaaggatcactttatttttatgatgcagctgctccaattattgaaaaagaatcgattgatatggataaagtgtatctaaaatcacgttacgataaaggtgaagccgcctatcttaattgtcctatgacagaagaagaatttaatcgcttttatgatgcagtacttgaagcagaagttgcaccaacaaatgaatttgaaaaagaaaaatatttcgaaggatgcatgccttttgaagtaatggctgaacgtggacgcaaaacactattatttggtcctatgaaacctgttggccttgaagatccaaaaacaggtaaacgtccatttgctgtcgttcaattacgacaagatgatgcagctggaacgctatataatattgttggtttccaaactcatttaaaatggggcgctcaaaaagaagtcattcgccttatccctggtttagaaaatgtagatatcgttcgatatggtgtcatgcatcgaaatacttttattaactctcctgacgtgttaaatgaaaagtatgaattgattaaagaagatcgaattcaatttgcaggtcaaatgactggtgttgaaggatatgttgaaagtgcagcaagtggacttgttgctgggattaacctagctcacaaattacttgataaaggtgaagtaatattcccaagagaaacaatgataggtagtatggcatattacatctcacatgctaaaaatgaaaagaacttccaacctatgaatgctaactttggtttattaccttcacttgaaaagcgtattaaagataaaaaagagcgttacgaggcacaagctaacagagcgctcgaatatttagagaattataagaaaacactttaa

SEQ ID NO: 35207 - DNA, 891 bp, Staphylococcus haemolyticus
gtggaagaaatccaggttacattcttaaatatgctcaaagttgagagaaatttctccgcccatacattaaaatcatatcatgatgatttagtacaatttaatcattttttagaacaagaattacttaatctaagaacatttgaatataaagatgctagaaattatttaagctatttatattcacaaaatttgaaacgtactactgtatcaaggaagatttctactttaagaactttctatgagttttggatgacacaagacgagacaatcataaatcctttcgtacaactcgttcatcctaagaaggagaactacttgccacagtttttttatgaagaagagatggaagcattattcgaaactgtagcaaaagatactaaaaaaggattacgggatcgcgttattctagaattattatatgcaacgggtatacgtgtttctgaactagtaaatatccaactcaaagatattgatatgtctttacctggtgtgaaagtactaggaaagggaaataaagaacgttttgttccgtttggagaattttgtcgtcaaagcattgaacaatacttaagagaatttaagcctatacaacataccaaacattcatttttattagttaacatgaatggcgcccctataacagagagaggcgttaggtatgttttaaatgatgttgttaaacgtacagcaggggttacggaaattcacccccacaaactaagacatacgtttgcaacacatttactcaatcaaggtgcggatttaagaacggtacaatctttgttaggacatgttaatctttcgacaactggaagatatacacatgtttctaaccaacaattacgtaaagtgtatttaaatgcacatcctcgagcgaaaaaggagagtaaa

SEQ ID NO: 35208 - DNA, 543 bp, Staphylococcus haemolyticus
atgagtaaaacatcattacatgcaacaactatttatgccgttagacacaacggtgaagcagcgatggctggtgatggacaagttacactaggtgagcaagttattatgaagcaaacagcgcgcaaggtccgcagattatatgaaggaaaagtgttagctggatttgctggtagtgtagctgatgccttcactttgttcgaaaagtttgaaacaaaattacaacaatttagtggtaatttggaacgtgcagctgttgagctagctcaagagtggcgtggtgataaacaattacgtcaattggaagctatgttaattgtaatggacaaagatgcaatattagtggtcagcgggactggagaagtcattgcacctgatgatgatttaattgcgattggctcaggaggcaactatgctttaagtgctggaagagcattgaagcgtcatgcaagccaattatctgctaaagaaatggcttacgaaagtttaaaagttgcatctgacatttgtgtgttcacaaatgataatattatagtggaaacactt

SEQ ID NO: 35209 - DNA, 219 bp, Staphylococcus haemolyticus
tcaatggcgaaacaagatgtaattgaattagaaggtacagtattagatactttaccaaatgctatgtttaaagtagaattagaaaatggtcatgagattttagctcacgtaagtggtaaaattagaatgaattatattcgtattctacctggcgacaaagtaactgtagaaatgtctccgtatgatttatcacgcggtagaattacttatcgttataaa

SEQ ID NO: 35210 - DNA, 111 bp, Staphylococcus haemolyticus
atgaaagtaagaccatcagttaaaccaatttgcgaaaaatgtaaagtcattaaacgtaaaggtaaagtaatggtaatttgtgacaatcctaagcacaaacaaagacaaggt

SEQ ID NO: 35211 - DNA, 363 bp, Staphylococcus haemolyticus
atggcacgtattgcaggagtagatatcccacgtgaaaaacgcattgttatctcattaacatatgtatatggtattggtacttcaacagctaaaaaaatcgttgaagaagctaacgtatcagcagacacacgtgtaaaagatttaacagatgacgaattaggtcgtattcgtgaagttgttgacagttataaagttgaaggtgacttacgtcgtgaacaaaacttaaacattaaacgtttaatggaaatttcttcataccgtggtatccgtcaccgtcgtggtttaccagttcgcggtcaaaaaacaaaaaacaacgctcgtactcgtaaaggcccagttaaaactgtagctaacaagaaaaaa

SEQ ID NO: 35212 - DNA, 387 bp, Staphylococcus haemolyticus
atggcacgtaaacaagtatctcgtaaacgtagagttaaaaagaatattgaaaatggtgtggctcacatccgttcaacattcaacaatacaatcgtaactatcactgatgaatttggtaatgctttatcttggtcatcagctggtgcattaggtttcaaaggatctaaaaaatcaacaccattcgcagctcaaatggcttctgaaactgcttcaaaatctgcaatggaacatggtttaaaaactgttgaagtaacagtaaaaggacctggaccaggtcgtgaatcagctatccgtgcattacaatcagctggtttagaagtaactgcaatcagagacgttactccagtacctcataacggttgtcgtccaccaaaacgtcgtcgcgtc

SEQ ID NO: 35213 - DNA, 942 bp, Staphylococcus haemolyticus
atgatagaaattgaaaaacctagaattgagacaattgaaattagtgaagatgctaaattcggtaagttcgttgttgaaccactagaacgtggctacggtactacactaggaaactccttacgtcgtatcctactatcttcattaccaggtgcagccgttaagtacattgaaatcgaaggtgttttacacgaattctcagctatagataatgttgttgaagatgtttctacaattattatgaacatcaaaaaattagcacttaaaatctattctgaagaagataaaacattagaaatcgatgttcgagatgaaggcgaagttactgcaagtgacattactcacgatagtgatgtagaagttctaaatccagaacttaaaatcgcaacagtgtctaaaggtggacatttaaaaattcgtctagttgctaacaagggtagaggttacgcattagcagatcaaaataatactagtgatttaccaatcggtgtaattcctgttgattcactatactcaccagttgaacgtgttaactatacagttgaaaacacacgtgtcggtcaaagtagtgattttgataaattaactttagatgtttggactaatggttcaatcactccacaagagtcagtatcattagctgctaagattttgactgaacatttaaatatttttgtaggtcttacagatgaagctcaaaatgctgaaatcatgattgaaaaagaagaagatcaaaaagaaaaagtacttgaaatgtctattgaagaattagacttatcagtacgttcatacaactgtttaaaacgtgcaggaatcaattcagttcaagagttagctgataaatctgaagctgatatgatgaaagttcgtaatttaggtcgtaaatctctagaagaagttaaatataaattagaagatttaggattaggattaagaaaagaagat

SEQ ID NO: 35214 - DNA, 369 bp, Staphylococcus haemolyticus
atgggttacagaaaattaggtcgtacttctgatcaacgtaaagctatgttacgtgacttagctacttcacttatcgttagtgagcgcattgaaactacagaagctcgtgcaaaagaagttcgtagtgttgttgagaaattaatcactttaggtaaaaaaggagatttagcttctcgtcgtaatgctgcaaaaacattacgtaatgttgaaatcttaaatgaagatgaaactacacaaactgcacttcaaaaattattcggtgaaattgctgaacgttacacagaacgtcaaggtggttacactcgtattcttaaagtaggtcctcgtcgcggagacggtgctgaatcagttatcatcgaattagtagat

SEQ ID NO: 35215 - DNA, 894 bp, Staphylococcus haemolyticus
atgtttgattcaattagagaaactatagactacgcagtcgaaaataaaatgtcttttgcagatataatgattcaagaagagatggaactttcaggtaagacgcgtgacgaagttagagaaacaatgaaacaaaatttagatgtcatgagagatgccgtaattaaaggatcaactggcgaaggtgtaaaaagtgtaacaggttatactggccaagatgccattaaacttgctaaatataacgagaataatcatgccttgtcaggacatgaaatggttgaagcagttaaaggtgcggttgctactaatgaagtaaacgcagctatgggtatcatttgtgcaactccaacagctggatcctccggaacgattccgggcgtattatttaaattagaaaaaacacatgacctaacagaagaacaaatgattgatttcttattcgtttcatcattatttggtcgcgttgttgctaacaatgcaagtgttgcaggtgctacaggaggttgccaagcagaagtaggttcagcttcagcaatggcagcagctgctgcagtatcaatctttggtggcgaaccggaagcatctggtcacgctatggcattagcgattagtaatttacttggtctagtttgtgacccagtagcaggtttagtagagattccatgtgtaatgcgtaatgcaattggttctggtaacgcattaatttctgcagacttagcattagctggtgttgaaagtagaattccagtagatgaagttatcgaagctatggataaagtaggacgtggattaccagctgaattaagagaaacaggacttggtggtttagcaggtacaccaacaggtgaagcaatcaaacgtaaaatctttggtgaagctgaagtaaatagcttttca

SEQ ID NO: 35216 - DNA, 558 bp, Staphylococcus haemolyticus
atgtctaaaatagcatttaccggtggcggtactgttggacatgtatcggtcaatttaagtttaattccaacagctactgataaagggcacgacgcattttatattggttctaaaacaggtatagaacgtgaaatgattgaatcacaattacctaacattgaatattatccaatatctagtggtaaattacgtcgatatctatcagttgataatgcgaaagacgtatttaaagttttaaaaggtgttattgatgcacgcaaagtattaaaaagagaaaaaccagacctattattttctaagggaggatttgtttcagtacccgtagtaatagctgcacgctcactaaacattccaacaattatacatgaatcggatttaacaccaggcttagctaataaaatttcactgaaatttgctaaaaaaatctatacaacatttgaagatacattaaaatatttacctaaagataaagcagacttcgttggcgctaccattcgacaagacttaaaagaaggtaatcaatcacgtggataccagttaacaggtttcgacgcctca

SEQ ID NO: 35217 - DNA, 2172 bp, Staphylococcus haemolyticus
atgaatattgtaaggagtgattatatgagtaaaaaaagaatttacgaatatgcgaaagaattaaatgttaagagtaaagagattatagacgagttgaaaaatatgaatgtagaagtttcaaaccatatgcaagcgttagaggacgatcaaattaaaacgcttgataaaaagtttagacaacaagaaagtaacaataatacaaaacaaaacactcaaaataatcaccaaaaacaacaaaacaaaaacaacaataaaaataataacaaacaaagcaacaaaggtaacgcgaatcaaaaaggcaataataataacaaaaataatgccaaaaataataaaaataacaaaaacaataagaacaataaaaataataaaaacaacaaaggtaacaaaaataacaaaccggcagctgaaccaaaagaaatgccttctaaaatcacatatgaggaaggcattacagttggcgagttagctgataaattaaatattgaatcatcaggaattattaaaaaattattcttattaggcatcgttgctaatattaaccaagcacttgatgaagaaacactagaattgattgcggatgattatggtgttgaacttgaaaaagaagtggtggtaaatgaagaagatttatcaatttactttgatgaagaagaagctgatccagatgcaattgaacgcccagcggtagttacaattatgggacacgttgaccatggtaaaacaacattacttgattcaattcgtcatactaaagttacagctggagaagcaggcggtatcacgcaacatattggtgcttatcaaattgaaaatgctggtaaaaaaattacattccttgatacacctggacacgcagcatttactacaatgcgtgcacgtggtgctcaagtaacggacatcacaattttagtagtcgcagctgatgatggtgtaatgccacaaacaattgaggcaattaaccatgcaaaagaggctaacgttcctactatagtagctgtaaataaaattgataaacctactgcaaacccagaccgtgttatgcaagaattaactgagtacggtttgatccctgaagattggggcggtgaaacaatttttgttccactttcagcattaagtggtgaaggtattgatgatttattagaaatgattggcttagtagctgaagtccaagaattaaaagctaatcctgataaacaagctgtaggtactgtgattgaagcggagttagataaatcacgtggtccagctgcttcattattagttcaaaacggaacattgaatgttggtgactcaatagttgtaggtaacacatatggacgaattagagcgatggttaatgatttaggtcaaagaattaaatcagcaggcccttctacacctgtagaaattacaggtatcaatgatgtgccattagctggtgatcgcttcgttatcttcaaagacgaaaaacaagcacgtcgcattggtgaagcgcgtcatgaagcaagcgttatccaacaacgtcaagaaagtaaaaatgtttcattagacaacttatttgaacaaatgaaacaaggtgaaatgaaagatcttaacgtgattatcaaaggtgacgttcaaggttctgttgaagcacttgcagcttctcttatgaaaatcgatgtagaaggcgttaatgtacgtattattcacactgctgttggggctattaatgaatcagatgttacattagctaatgcgtcaaatggtattattatcggtttcaatgtgcgtccagacgcaggtgctaaacgtgctgcagaagctgaaaacgttgatatgagactacatcgcgttatttataatgttattgaagaaattgaatcagctatgaaaggtttacttgatcctgaattcgaagaacaagttatcggacaagctgaagtacgtcaaacattcaaagtgtctaaagttggcacaattgctggtagttatgttactgaaggtaagattactcgtaatgcgggtgttcgtattattagagacggaattgttctatttgaaggtgaattagatacattgaaacgtttcaaagatgatgcgaaagaagtagctcaaggttatgaatgtggtattacaattgaaaaattcaatgatattaaagaaggcgacattatcgaagcattcgaaatggttgaaatcgaaaga

SEQ ID NO: 35218 - DNA, 462 bp, Staphylococcus haemolyticus
atggtagatgtagcatttgtatgtctaggaaacatatgtcgctctcctatggctgaagcaatcatgcgtcaacgtttgatagatagaaacatttcaggcgttaacgtttactcaaaaggaacaggtaaatggaaccttggagaacctccccatgaagggactcaagatattcttaatcgccataatataccttttgatggtatgattagtgagttatttgaatcaagtgatgattttgattatattattgctatggatcaaagcaatgttgataatatccaaaacatcaatcctaatataaaaggaaaattgttcaaattgctcgaatttagtaacatggaagagagtgatgtgccagatccttattacactaataattttgaaggtgtatatgaaatggtacaatcatcttgtgacaatctaattgatttcatcgtcaaagatgcaaatttgaaagagggg

SEQ ID NO: 35219 - DNA, 879 bp, Staphylococcus haemolyticus
atgggtgcacaagatccaagaacaaaatttaaaacatctgattatgaaaaacaagaacaagaactacctggacttcaatctgaactaacaccacaacctgactgtggtgaaacatcgtatgaaggtcataaccgattgttagattataaaatgcttgtaacaggaggagactcagcaataggacgtgcagcagcgattgcatatgccaaagaaggggcagacgttgcaattaactatcttccaagtgaagaacaagatgctcaagaagttaaagctgtcattgaaaaggcaggacgtaaagctgtattaatacctggagatattcgtgatgaacaatttaactatgatttagttgaacaagcgtataaagaattaggtggtttagacaatgtaacattagtagcaggccatcaacagtatcacgataaattagaagagttcgatacacaatcttttaaagaaacgtttgaaacaaacgtatatccagtattctggacaattcaaaaagcattggactatttacaacctggtgcatcaatcactacaacatcatccgttcaaggttataatccaaatccattgattcatgattatgcagcatcaaaagcagcgattatttcattaacaaaaagtttctctgagcaattaggggaacagggtattcgcgttaattgtgttgcacctggtccattttggtctccacttcaaataacaggtggtcaaccacaattagcgattccccaatttggtcaagatacgccattaggtagagctggacaacctgtagagctttcaggcacatatgtattacttgcttcagaggaatcaagttatacgactggtcaagtttttggcgtcacaggtggcatccaaatcaat

SEQ ID NO: 35220 - DNA, 1833 bp, Staphylococcus haemolyticus
atgagtaaagtaatcggtattgacttaggaacaacaaattcatgtgtagctgttttagaaggcgatgaacctaaagtaattcaaaacccagaaggtgctagaacaactccatcagttgtggcattcaaaaatggtgaaacacaagtcggtgaagtagcaaaacgacaagctatcactaacccaaatactgtacaatcaataaaacgtcatatgggtactgactataaagtagatattgaaggtaaatcttataaacctcaagaaatttcagctatggtattacaaaaccttaaaaacactgctgaaagttatttaggtgacaaagtagataaagctgttattacagttcctgcatatttcaatgatgctgaacgtcaagcaactaaagatgctggtaaaattgctggtttagaagttgagcgtattatcaacgaacctactgcagctgcattagcatacggtttagataaaactgatcaagatcaaaaagtattagtatttgacttaggtggcggtacttttgacgtatcaattcttgaattaggtgacggtgtattcgaagtactatcaactgcaggtgacaacaaacttggtggtgatgactttgaccaagtaattattgactacttagtatcagaattcaaaaaagaaaatggcgtagatttatctcaagataaaatggcgttacaacgtttaaaagacgctgcagaaaaagctaaaaaagacttatctggcgtttcacaaactcaaatttcattaccatttatttcagctggtgaaagtggtccattacacttagaaattagtcttactcgttctaaatttgaagaattagctgattcattaatcagaagaactatggaaccaactcgtcaagcattaaaagacgctggtttatcaacttctgaaattgacgaagttattcttgtaggtggttcaacacgtatcccagcagttcaagaagctgttaaaaaagaaattggtaaagatcctcataaaggtgtaaacccagacgaagtagtagcaatgggtgctgcaattcaaggtggcgttatcactggtgatgttaaagatgttgtgttattagacgtaacaccattatcattaggtattgaaattatgggtggacgtatgaatacgttgatcgaacgtaatactacaatcccaacttcaaaatctcaagtttattcaactgcagctgacaatcaaccagcagtggatattcacgtattgcaaggtgaacgtccaatggcatctgataacaaaactttaggaagattccaattaactgacattccaccggctccacgtggtgtgccacaaatcgaagtaacatttgatattgataaaaatggtatcgtaaatgttactgcgaaagacttaggtactaataaagaacaaaatattactattcaatcaagctctgcgctttctgatgaagaaatcgatcgtatggttaaagatgccgaagaaaacgctgaagcagataaaaaacgtcgtgaagaagtagatttaagaaatgaagcagatagcttagtattccaagttgaaaaaacaattactgaccttggcgacaatattagtgaagaagataaatctaatgcggaaagcaaaaaagatgctttaaaatctgcgcttgaaggacaagacatcgaagatattaaagcgaaaaaagaagaacttgaaaaagtaattcaagatttatcagcaaaagtatatcaacaagctcaacaagctcagcaacaagcacaagacggtgctcaacaaactcaaaacgatagcaatgttgaagatgctgaatttaaagaagttaatgatgatgaagataaaaaa

SEQ ID NO: 35221 - DNA, 2181 bp, Staphylococcus haemolyticus
atgcaaaaagcttttcgcaatgtgcttgttatcgcaattattggcgttattatattcggcgtattttcttacataaatgggaatggcaatacaccgaaacaactttcctattcacagtttgtagagaaattggataaaggtgatttaaagaccttagaaatccaacctgagcaaaatgtgtacttggtaagtggtaaaacaaaaaatgatgaagattactcttcaacgattttatacaataacgaaaaagacttacaaaaaattacaaatgaagcaaaaagccaaaaaggactagattttaaagttaaagaagaagagaaacaaagtgtcttcgtaagtatgttgacaacattaattcctgtattaattattgctttcctattcattttcttccttagccaagcacaaggcggcggcggtggcggtcgtatgatgaactttggtaaatccaaagctaaaatgtacgataaccaaaaacgtcgtgtacgattctcagatgtcgctggtgcagatgaagaaaaacaagaattaattgaaatagtagatttcttaaaagataataagaaattcaaacaaatgggttcaagaatacctaaaggtgtattacttgtaggccctcctggtacaggtaaaacattactagcacgtgccgtagctggtgaagcgggtgcaccattcttctcaatcagtggttcagactttgttgaaatgttcgttggtgtcggtgcaagccgtgtgcgtgacttattcgaaaatgcgaaaaagaatgcaccatgtattatctttatcgatgaaattgatgcagtaggacgtcaacgtggtgcaggtgttggtggcggtcacgatgaacgtgaacaaacgcttaaccaattactagttgaaatggatggtttcggtgaaaacgaaggtattatcatgattgctgcaactaaccgtcctgatatcttagacccagcgttactacgccctggtcgtttcgatagacaaattcaagttggccgtccagatgttaaaggtcgtgaggctattcttcatgtacactctaaaaacaaaccacttgatgaaactgtcgacttaaaagctatttcacaaagaacacctggcttctcaggggcagatttagagaatttattaaatgaagcatctttaattgctgcacgtgaaggtaaaaacaaaattgacatgcgtgatatcgaagaagctacagaccgtgttattgctggtccagctaaaaaatcacgtgtcatttcagataaagaacgtaatattgtagctcaccatgaagcgggtcatacagttatcggtatggtactcgatgaagcagaagttgttcataaagtaacaattgttcctcgtggacaagctggtggttacgcaatgatgttacctaaacaagatcgtttcttaatgacagaacctgaattattagataaaatttgtggtttattaggtggtcgtgtatccgaagatatcaatttccatgaagtatcaactggtgcatcaaatgacttcgaaagagcaactcaaatcgcacgttctatggttactgagtatggtatgagtaaaaaacttggaccattacaattctcatctagcggcggtggacaagtattcttaggtaaagatatgcaaggtgaacctaactattctggtcaaatcgcttatgaaattgataaagaagttcaacgtattattaaagaacaatatgaacgttgtaaacaaatcttattagaccatgaaaaagaacttaaacttatcgctaaaacattgttaacagaagaaacattagtagctgaacaaatccgttcattattctatgatggtgtattacctgaagtagattatgatgctgctcgtgttgttaaagatgaagattctgactatagcgaaggtaaatatggtaaatcttacgacgatatccgcgaagaacaactagaagaaggaaaagaagacatgcgagaagatcgtaaagaagataatgacatgaatcgcgaacgtagacatcgtcaaagagatgatagagataatcaaacaggacatgatcaattacgtgacggttcaaatggagacaatgatcaacatcgtggacattcaaataatgaagaagacacaggtcatgaacaatctccaaatattgacaaaccatataatccaaacgatccaaacaaccctagcaataga

SEQ ID NO: 35222 - DNA, 927 bp, Staphylococcus haemolyticus
atggcaaaaacttatatttttggacatcaaaatccagacacagatgcaatagcatcagctatcatcatggctgattttgaacaattaactggtaactctgaagcgacgccatatcgtttaggagatattaatcctgaaactaaatttgctttagatcattttgaagttaaagcaccagaattattaagtgataatttagatggtcaagaagtaatcttagtcgatcacaatgagttccaacaaagtgctgaaacaatttctgacgcagagattaaacacgttgtggatcatcatagaatcgctaatttcgaaactgcttcaccgctttggtaccgcgcagaaccagttggttgtactgctactattctttacaaaatgtacaaagaacgtggctttgaaattaaaccgcatatcgcaggtttgatgatttcagcaattatttctgatagcttattattcaaatctcctacttgtactgatgaggatgtaaatgctgctaaagatttaaaagatttagcaaatgttgatttagatgaatatggcttagaaatgttaaaagctggtgcatcaactactgataaatctgcagaggaattattagacatggatgctaaatcatttaatatgggcgactatgttacacgcattgcccaagtaaatactgtcgacattgatgaagtattaaatcgtaaagaagatcttgaaaaagcaatgttagaaacaagtgctaatgaaaagtatgatttatttgtattagtagttactgacattattaatagtgattctaaaatcttagtagtaggtgctgaaaaagataaagtcggcgaggcatttaaagttcaattagatgatggcatggcattcttatcaggcgttgtatcacgtaaaaaacaagtggtacctcaaatcacagatgctctaattaaa

SEQ ID NO: 35223 - DNA, 1842 bp, Staphylococcus haemolyticus
atgactaatagaagagaagatgtacgtaatattgcaatcattgcgcacgttgaccatggtaaaactactttagtagatgaattactaaaacaatctggaattttcagagagaacgaacatgttgacgaaagagcaatggactctaatgacttagaaagagaacgtggtattacaattcttgctaaaaatactgctattgactataaaggtacaagaattaacatcttagacacacctggacatgctgactttggtggcgaagttgaacgtattatgaaaatggttgacggtgttgtacttgttgtagatgcttacgagggaacaatgcctcaaacacgtttcgtactaaaaaaagcattagaacaagatttaaaacccgttgtagtagtaaataaaattgacaaaccatcagctagacctgaaggggtagtagatgaagttttagatttatttatcgaattagaagcgaatgatgaacaattagacttcccagtagtatatgcatcagctgtcaatggtactgctagtcttgattcagagaaacaagatgaaaacatgcaatcattatatgaaacaatcatagattatgttccagcgccattagataatcatgatgaaccattacaattccaagtagcattattagactataatgattatgtaggacgtattggtgtaggacgcgtatttagaggtaaaatgcgtgtcggtgataacgtgtcacttattaaattagacggtacagttaagaatttccgtgtgactaagatcttcggttattttggattgaaacgtgaagagatcgaagaagcacaagctggtgatttaattgcggtttcaggaatggaagatattaacgtaggtgaaacagttacacctacagaccaccaagaagctctccctgtattacgtattgatgaaccaactcttgaaatgacattcaaagtaaataattcaccatttgcaggacgtgagggtgattatgtcactgcacgtcaaatccaagaacgtctagatcaacaacttgaaacagacgtttcattaaaagttacgccaactgattctcctgatacatgggtagttgcaggtcgtggtgagttacatttatctatcttaattgagaatatgagacgtgaaggttttgaacttcaagtatctaagccacaagttattttacgtgaaattgacggtgttctaagtgaacctttcgaacgtgttcaatgtgaagtgccttctgaaaatgcaggttcagtaattgaatcattaggtgcacgtaaaggtgaaatgttagacatgtcgactactgataacggattaacgcgtttaatctttatggtacctgcacgtggtatgattggatacacaactgaatttatgtctatgactcgtggatatggtattatcaaccatacattcgaagagttcagacctcgtgttaaagcacaaattggaggtagacgtaatggtgcgcttatctcaatggaccaaggtcaagcaactgcatacgctatcatcaatttagaagatcgtggtgttaacttcatggagccaggtactgaagtgtacgaaggtatgattgttggtgaacataatcgtgaaaatgatttaactgttaatattactaaagcgaaacatcaaacaaacgtacgttcagcaactaaagatcaaacacaaactatgaaccgaccaagaattcttacgcttgaagaagctttagaatatattaatgatgatgaactagtagaggttactcctcaaagtattcgtttaagaaagaaaatcttaaataaatcattacgtgaaaaagaagctaaacgtgttaaacaaatgatgcaagatgag

SEQ ID NO: 35224 - DNA, 526 bp, Staphylococcus haemolyticus
gtgttctgtttgaaaaataaacaaaataaatattcgattagaaagtttacagtaaggacagcatctatattggttggcgcagcattgatttttggcagtgcaaatgatgaagcaaaagcagctgagaaggatcaagtttctacaactactaatagtaatgaagaacaaaatgtaaaagctaaaggtaatgtacaaacatcagagagcactacactatcacaggttaatccagaacaagttgatgtaacaaaacaaaatgttgaaacagatgtagataataattcatctgaaaatgcatctaacaacgaaatttcaaatgaaactagtaaacaagaaagtacagaaaattcatcaaatcaagatgtaagttctcaagaagttacaaatgaaaataatagcattgaaactagtaaaaattcaaattctacagagacattaagttcagaagaaccatcacaaaataattctgcagaaaaatcaattagtgaaaaaacaacaaaaaaagcatctacagaggaaagtcggg

SEQ ID NO: 35225 - DNA, 309 bp, Staphylococcus haemolyticus
tatttaattgttgctttatcttcagatgaattcaatcaaattaagaataaaaagtcatattatgattatgaacaacgtaaaatgatgttagaatcaattcgttatgttgatttagttattcctgagaatgattggggtcaaaaagaaatcgacgtggatcgctttgaggtagatgtctttgtaatgggacatgactgggaaggtgaattcgacttcttaaaagataaatgtgaagtcgtatacttaaaacgtactgaaggtatttcaacaactaagattaaacaagaattatatggcaaagactctaaa

SEQ ID NO: 35226 - DNA, 903 bp, Staphylococcus haemolyticus
ggtaagatgcaccacaattctttaattgaaacaatttggtttgtggtacctatcattatcgtaattgctttatctattccaacagttaaaactttatacgattatgagaaaccaccagaaagtaaagaagatccaatggttgtatacgcagtaagtgctggatacaaatggttcttcgcttatccagaacaaaaagttgaaactgttaatactttaactattcctaaaaatcgtcctgtagtattcaaattacaagctatggatacgatgacaagtttctggattcctcaattaggtggtcaaaaatatgccatgactggcatgacaatgaattggactttacaagccgatgaaacaggtactttcagaggacgtaactcaaactttaatggtgaaggtttctctcgccaaacgtttaaagttcactctgtagaccaaagtgaattcgattcttgggttaaagatgctaagagcaagaaaacacttagccaagatgagtttgataaacaactcttaccaagtacacctaataaagaattgacattcagtggtacgcatatggcattcgttgaccctgcagctgatccagagtacatcttctacgcttacaaacgttacaactatgttcaaaaagatcctaactttgtagctgagaaagacttgtacaaagatgttactgataaaccacaaaaaccagctcgtaaggttcaaatcactaacgctaactataagcgtcatggtatgaaacctatgattcttggtaacaatgatccttatgataatgaattcaagaaagaagaagatcataactctaaggaaatggaaaaaatcagtaaaagtgcaaaagacgaaaatgcgtctaaatttggtagcaaagcagacaatgatcatggaggtggacat

SEQ ID NO: 35227 - DNA, 1948 bp, Staphylococcus haemolyticus
aggtggacattaatgaattttccatgggatcaattgctcgttaaaggtaactggatgattacaatggcacaaattggtgcgccattcctagttattggtttaatcgcagtaattacttacttcaagttatggaaatatctttacaaagaatggttcacatccgtagaccataaaaaaatcggtttaatgtacttaatttgtgccgtacttatgttcgttcgtggtggtattgatgcattactattacgtactcaattaacaattccagataatactttcttggaatcaaatcactataacgaaatattcagtacgcacggcgttatcatgattatctttatggctatgccattcgtatttggtttatggaacgtagtcgttccactacaaattggggctcgtgatgtggcgttcccagttatgaataacattagtttctggttattcttcgttggtatgattttattcaacctttcattcattattggtggttcaccagcagctggttggacaaactatgcaccattagctggtgaatttagtccaggcccaggtgttaactattacctagtcgcaattcagatttcaggtattggtactttaatgactggtattaacttcttcgtaacaatacttagatgtaaaacaccaacaatgaaattcatgcaaatgccaatgtttactgtaacaacatttattacgactttaatcgtaattcttgcgttcccagtattcacagttgtacttgcattaatgacttttgaccgtgtatttggaactgcattctttacagttgccgatggcggtatgccaatgttatgggcaaacttcttctgggtatgggggcaccctgaggtttatatcgttatcttgcctgcatttggtatttattcagaaattattccaacatttgctcgtaaacgtttattcggacaccaaagtatggtgtgggcaactgctggtatcgcattcttaagtttcttagtttgggttcaccatttcttcacaatgggtaatggtgctttaatcaactcattcttctcaatctcaacaatgttaatcggtgtaccaaccggagttaaattatttaactggttattaacattatataaaggacgtattacgttcgagtcacctatgctattctcattagccttcatccctaacttcttattaggtggggttacaggtgtaatgttagcgatggcatcagctgactatcaataccataatacttatttcttagtagctcacttccactatacattggttactggtgttgtatttgcctgcctagctggtttaatcttctggtatcctaagatgatgggttacaaattaaacgaaaaattaaacgcatggtgcttctggttattcatgattggatttaacgtatgtttcttaccacaattcattcttggattagacggaatgcctcgtcgtttatacacttatatgccttctgatggttgtggttattaaacgtaatctctactattggtgcattattaatggctgttggtttcctattcttagtagtaagcattgtatacagtcatatcaaagctccacgtgaagctactggagataactgggatggtcttggacgtatttagagtggtctactgcttctgcaattccacctaaatacaactttgctatcactccagattggaatgactatgatacatttgttgatatgaaagaacatggtcgtcattatttagataaccataattataaagacattcatatgccaaacaatacacacacaggtgtaattatgggtatattcatgttattaggtggtttcttcttaatcttcgaaactgtaatccctgctgcaatctgcttagtaggtattcttggttcattagtttaccaaagtttcgtacaagatcatggttatcatatccctgcttctgaagttgctgaaaatgaagctcgc

SEQ ID NO: 35228 - DNA, 1422 bp, Staphylococcus haemolyticus
atgagagaggtaagtaatatgactcaacaaataggtgtagtaggtttagcagtaatgggtaaaaacctcgcttggaatattgaatcacgcggttatagcgtttctgtatataaccgttcaagcgaaaaaacagatgaaatggttaatgaatctaaaggtaaacaaatccacccaacatattctttggaagaatttgttaattcattagaaaaaccacgtaaaattttattaatggttaaagcaggtcctgcaacagatgcaacaattgacagtttacttccattgttagacgatgatgacattttaattgatggtggtaacactaattatcaagatactatccgtcgtaataaagccttagctgaaagtggtattaactttattggcatgggtgtatctggtggtgaagtaggtgcccttactggtccttcattaatgccaggtggtcaagaagcagcttataataaagtgagcgatatattagatgcaattgctgctaaagcaaaagatggtgcatcatgtgtagaatatattggaccaaatggtgctggacattacgttaaaatggttcataatggcattgaatatgcagatatgcaacttattgcagagagctatgcgatgatgaaagatttattaggtatgtcacatgaagacatttctaagacatttaaagaatggaatgctggtgagttagaaagttatttaattgaaatcactggtgatatctttactaaattagatgatgacaatgaagcacttgtcgaaaagattttagacactgcgggtcaaaaaggtacaggtaaatggacttctatcaatgccttagaattaggtattcctttaacgattattactgaatcagtatttgctcgtttcatttcatcaattaaacaagaacgtgtgaatgcttctaaggaattaaacggtcctaaagcagaatttactggtaataaagaggaattcttagaaaaaatccgtaaagctttatatatgagtaaaatttgttcatacgcacaaggatttgcgcaaatgcgtaaagctagtgaagaaaatgaatggaatttaaaattaggcgatttagcaatgatatggcgtgaaggttgtattattcgtgctcaattcttacaaaaaattaaagacgcttatgataacaactcagaattacaaaaccttttattagatccttatttcaaaggtattgttacagaatatcaagatgcattgagagatgtagtagcaacaggtgtacgtaacggcgtaccaacacctggattctctgccagcgtaaactactatgatagttaccgctctgaaaatttaccagcgaacttaattcaagcacaacgtgactatttcggtgcacatacgtatgaacgtaaagataaagaaggtatcttccatactcaatgggttgaagag

SEQ ID NO: 35229 - DNA, 5764 bp, Staphylococcus haemolyticus
atgagtaaaagaaaacaaggaccaattaataaaaaagtagattttttatccaacaaattaaacaaatactcaattagaaaatttactgtaggaacagcatctatattagtaggggctacgctgatttttggtgccgatcatgaagcgcaggctgctgaaaatactgcagactctacaaatgaaactgtagatagcaattcagctaataaatttgactcagcagaaacatcaacaacagaacaaccttcaacgcaacaagactctaaaacagatgaagcaacgacacaaagtacaaaagaacaactaaaagaagagtcatcttcaacaacagaacaatcttcaacgcaacaagactctaaaacagatgaagcaacgacacaaagtacaaaagaacaactaaaagaagagtcatcttcaacaacagaacaatcttcaacgcaacaagactctaaaacagatgaagcaacgacacaaagtacaaaagaacaaccaaaagaagagtcatcttcaacaacagaacaaccttcaacgcaacaagactctaaaacagatgaagcaacgacacaaagtacaaaagaacaactaaaagaagagtcatctacaacaacagaacaatcttcaacgcaacaagactctaaaacagatgaagcaacgacacaaagtacaaaagaacaaccaaaagaagagtcatcttcaacaacagaacaaccttcaacgcaacaagactctaaaacagatgaagcaacgacacaaagtacaaaagaacaactaaaagaagagtcatcttcaactacttcttcaaaaaataatacaactcaagatacaacatctaataaattagatagctcagaagcaagcccatcagatgcaaccaaacaatcaaataatttaactgatacaactggcaagtcatctactacagatgccctatctattacttcagatagttcagttgcaaataaacaagcatacacaaatgatatggtagataatttaaatgcaggtacaagtaataataaagacgcaatcgttgatgcagtaagtaatgatgtgaatttagaaacagcaacacaagatcaaattgataatgcagttgtagctgaaacaattaaaacagacttttcaaatccggattatggattagctagtccgtttatgacattagtagccgtagcgccaatgtcaacagcatcaacagatagtacaccaactacttttgccttaaatagcactgatactacatcaagtacaggtggatctttagtaaatgataaaattcatattacaaatgctagtttgacacttaataagaaaaataatcaacatgataacaatacggtttggccaacaagcaatgagcaattaaaattatctgctgattatgaattggataacagtattaaagaaggagatacttttactataaagtacggtgattacattagacctggtgctttagaacttccggctaaaaatacacaattacgtagtaaggaaggctcaattgtagcaaatggtgtttatgatgaaacaacaaatacaactacatacacttttactaattatgtagatcaatatcaaaacattacaggtagctttaatcttttagcgacaccaaaaagagagacagtaactacagataaacaaacttatcctatgaatgttactatcgctaatcaggaagttagtgaaaacttcgtagtagattatggtaataaagaaaatgatattacaaatgcagcagtagcaaatgttgataatgtaaataatcaacataatgaagttgtttatttaaatcaatctggcgatagaatttatgatgcaaaatacttttcaatagttcaaaatggtacttttatacctaatgaggtaaaagtatatgaagtgttagatagtaatgttttagtagatagctttaatccagatttaaatggatctgcagttaaggatgtgactagtaaatttacacctcaatatagtcttaataatactagagtagacatagatctgaaccgtagtaatttgaacaaaggagcacgttatattattactcaagcggttaaaccgtcaggtactggtaatgttagtacaaattatgagttaacacgttacggtaatgaagcctcaagatatccaacaggtactaaaagtacaaccgtcagttatattaatggctcttcaacagcacaaggagataacccaacatataatcttggggactatgtatggttagataaaaataaagacggtatccaaaatgatgacgaaaaaggtattccaggtgtttacgtcattcttaaagatagtaataacaaagaattacaacgtgcaacaacagatgacacaggacgttatcagtttaataacttacaaaatggaacatataatgttgaatttgttattcctaataattatactccgtcaccatcaaatacaattgggaatgataaaattgattcggatggtcaaaaagatggagattacaatgtagtggtagcaaaaggtatcattgataatgctgacaatatgactgttgatacaggattttatgaaacaccaaaatataatttaggcgactatgtgtgggaagatactaataaagacggaatccaagattctgatgaaaaagggatcgcaggcgtaactgttacattgaaagatgataatggtaacgtattaaaaacaacaacaacagatgaaagtggtaaatatcaatttactggtttagaaaatggaacgtatacagtagattttgaaacgccaaaagactataaaccaacatctgttaattctggtaatgataatgaaaaagattctgatggcacaacaacaactgccattattaaagatgcagataatgaaacgatagattcaggattttataaaccaacatataatttaggtgactatgtatgggaagatactaacaaagatggtattcaagattctgatgaaaaaggaatcgcaggtgtgactgttacactaaaagatagtgatggtaatacaattggtacaacaacaacagatgaaagtggtaaatatcaattcactgatttagaagatggaacgtatgaagtttctttcacaacacctgaggactatacacctacaacagtaaatgctggaaatgacgaaaaagattctgatggtttaacaactacaggtgtcattaatggtgctgataactggacattggatagtggattctataaaacaccaaaatataatttaggcgactatgtatgggaagatactaataaagacggaatccaagattctgatgaaaaagggatcgcaggcgtaactgttacattgaaagatgataatggtaacgtattaaaaacaacaacaacagatgaaagtggtaaatatcaatttactggtttagaaaatggaacgtatacagtagattttgaaacgccaaaagactataaaccaacatctgttaattctggtaatgataatgaaaaagattctgatggcacaacaacaactgccattattaaagatgcagataatgaaacgatagattcaggattttataaaccaacatataatttaggtgactatgtatgggaagatactaacaaagatggtattcaagattctgatgaaaaaggaatcgcaggtgtgactgttacactaaaagatagtgatggtaatacaattggtacaacaacaacagatgaaagtggtaaatatcaattcactgatttagaagatggaacgtatgaagtttctttcacaacacctgaggactatacacctacaacagtaaatgctggaaataatgacgaaaaagattctgatggtttaacaactacaggtgtcattaatggtgctgataactggacattggatagtggattctataaaacaccaaaatataatttaggcgactatgtatgggaagatactaataaagacggaatccaagattctgatgaaaaagggatcgcaggcgtaactgttacattgaaagatgataatggtaacgtattaaaaacaacaacaacagatgaaagtggtaaatatcaatttactggtttagatagtggtgactatattgtacattttgataaacctgaaggcttaactcaaactattacaaactcaggcagtgatgatgaaaaagatgctgatggtgaagaagtacatgtaactattactgatcatgatgacttcagcattgataacggatactttgatgaagacagcgattcagatagcgacagtgattcagactcagacagcgactctgattcagacagcgatagcgactcagactctgactcagacagcgacagcgactctgattcagatagcgacagcgattcagatagcgacagcgattcagatagcgacagtgattcagactcagacagcgactctgattcagacagcgatagcgactcagactctgactcagacagcgacagcgactctgattcagatagcgacagcgattcagatagcgacagcgattcagatagcgacagtgattcagactcagacagcgactctgattcagacagcgatagcgactcagactctgactcagacagcgacagcgactctgattcagatagcgacagcgattcagatagcgacagtgattcagattcagacagcgatagcgactctgactcagatagcgactcagactcagatagcgactcagactcagatagcgatagcgactctgattcagatagcgacagcgattcagacagcgatagcgattcagatagcgactctgattcagatagcgactctgattcagactcagacagcgactctgattcagacagcgatagcgactctgactcagacagcgatagcgactctgactcagacagcgatagcgattcagactcagactcagatagcgatacgactctgattcagacagcgataggaattcagactcagatagcgatagcgactcagactcagactcagacagcgacacagactctgattcagatagcgacacggtctcagacagcgatagcagttcagatagcgactctgattcagatagcgacagtgattcagactcagacagcgatacgagttcagactcagactcagatagcgactcagactcagatagcgacacgattcagactcagatagcgatacggactcagactcagacagcgacagcagatctgattcagatagcgacagtgattcagactcagacagcgactctgattcagatagcgacagcgattcagatagcgacagtgattcagactcagacagcgactctgattcagacagcgatagcgattcagactctgattcagatagcgactctgattcagacagcgatagcgattcagactctgattcagatagcgacagtgattcagactcagacagcgattcagactcagacgcagatagcgatagcgactctgattcagatagcgacagcgactctgattcagacagcgatagcgactcagactctgactcagacagcgacagcgattcagactcagacagcgactctgattcagatagcgactctgattcagatagcgacagtgattcagactcagacagcgacagcgattcagactcagataaagatcataatgacaaaacagataaatcaaataataaagaattaccagatactggtaatgatgttccaaataatggcacattatttggctcactattcgctacacttggtggattattcttaattggcagacgtcgtaaaaacaaaaataatgaagaaaaataa

SEQ ID NO: 35230 - DNA, 1275 bp, Staphylococcus haemolyticus
atgtctgaatttaatcaagagaatcaatcaatttataacaactatcagcaacctcaacctggaaaacctaaattcccatggtttaaaacaattatcgttgcattgattgctggtgtgataggtgctttacttgtcttaggtgctagtaaaataatgggtttagttggaatagataatggtggtgcccaagttcaagaagccaataatagtaaaggtggaaatgtattagacggaaaaagtgataaatataaatctgttaatgcaatgattaaagatgtatcacctgcgatagtaggtgtcattaatatgcaaaaagctaatggcttagaagattttttacaaggtaaatcatcatccgaatctgaagaagcaggtattggttctggtgtcatctatcaaatcaataataattctgcttatattgtgacaaacacccatgtgataagtggtgcttctgaaattaaagtccaattacatagtggtaaacaagttaaagcgaagttaattgggaaggatactgtatcagatatagctgtcttgaaaatagataatactaagggtatcaaatcaattaaatttgctaattcttctaaagtgcaaacaggagatagtgtattcgctatgggtaatcctctaggtttggaatttgctaattcagttacttctggaattatttcagcgaatgagcgtacaattgagtcaaatactacttctggtggtactaaagttaacgtcttgcaaactgatgctgcaataaaccctggtaactctggtggtgcattagtagatattaatggtaacttggttggtatcaactctatgaagatagccgctgagcaagtagaaggtattggttttgctattccaagtaatgaagttaaagtaactattgaacaacttgttaaaaacggtaaaattgaacgcccttctataggaattggtttactaaatttaagtgatattcctgattcttataaaaaagaattaaacacagatcgtgatgatggtatttatgttgctaaagtaagtcgctcaagtgaattaaaaacaggagatatcattactaaaatagatgataaaactgtaaaagaagatactgatttaagaacttatctgtatcaaaataagaagcctggtgagactgctaaactaactgtcatacgtgatggaaaaacgctaacagttaatgttaatctaaaaagccagtccgatatatcatctaatcaatcatctgactctgaatcagacaatagtcgaaacagtcaatttatacaa

SEQ ID NO: 35231 - DNA, 621 bp, Staphylococcus haemolyticus
atgtatcaatttataagtagactattagatttgatattagtcaaaatggctaaatcattgtatgttattggaaaggagaatatacctaaagataacaaatacgtagtaacatgtactcatgaaagttataatgaagtgattatgttaggtatggcattagttcctaatgaaattcattacatggctaaaaaggaattatttaataacaagtggtttggacaatttttaacttcattgaatgcttttcctgttgaccgtgaaaatccaggaccaagtacattgaaaagaccagttaatttgttaaaagaaaataaaactgttggtatcttcccaacgggacatcgtacatcagctgaaggggctccattaaaaagaggcgcttcaactattgcaatgttaggcaaagcgccaattttaccagcagcctatgttggacctaaaaaattacatggcttaattactggtcaggcacttattaaatttggtgagccaatttatcaatcagatattcctaaagatttaaaaagaaatgaaaaaatagattatttaacacatgaaattgaaagacgtacagcacaattacaaaaagaactacacttaattcaagatagtttagaaaaa

SEQ ID NO: 35232 - DNA, 1461 bp, Staphylococcus haemolyticus
atgtttaagttttttcaaaatttaggtagatctttaatgctaccagtagctgttttgcccgctggcgcaattatcgtaggtataggtaatttgcttaaagcattaaatttattaccaacagtgtcgttgttcttcactactgtggggacagcaatactaggtcaactagggcttatctttgcaattggtgtagcaataggcatggctaagaaaaacgatggtgcagtggctttagcaggtgcattaggatatgcactggttgtaaaagttttatctccagagtttatagcaccattatttaatataaaagaaagcgctgtgaacgatggatttagtaagatggataattcaaatgtgtttatagggattattattggattaatcgcggcttattgttataacaaattcagtgatgttgaattaccaacagcgttatcattctttagtggtaagcgattagttccaatcatgactgttttctattgtacgttcttaattgcgattttattatttgcttggccatttatatattcagcaattgtagcttttggtaaatggctaattggttttggaccattcggtgcattcctatacggcttctttaaccgactattaattcctactgggcttcaccatgcattaaatgctgtgttctggtttgatacagcaggaattaacgatatcggtaaattccaaactggacaagatgcaatcaaaggtattactggtcgatatcaagcagggttcttcccaattatgatgtttggtatgccagctgcagcgttggcgatgtatcacaccgctgaatctgctcagaaaaaacaagtatatggttggtttatagcaagttccatttctgcatttatggttggtgtaactgaaccgattgaatttgcatttatgtttgttgcaccggtattatttgtaatccatgcattattaaccggtttgtcattatttatagctgcactattccattggacagcaggattctcatttagtgcaggtttaattgattacgcattatcactaatcaatccagtggctaatcatccgttaatgattttagttcaaggcattgtattcttcgctttatattactttatctttagatttgtcattaaaatctttaacctcaacacaattggtcgtggtgacaatttattagctgatccaactgttaatacgactgagaaagatggggcagaaactacaagtaaaagcaaatatcatcacacagcaagtcaaatcttagaaggattaggtggtagtgaaaatattactacattaaccaattgtgctactagattaagaatggaattaaaggataattctattattgacgaacaaaaaattagaaatgcaggagcggtaggcgtaaccaaaaatggtcaacactcagcacaagttataattggcactcatgtacagcaagtcgcagatgaaattgaaaagcaaatg

SEQ ID NO: 35233 - DNA, 1158 bp, Staphylococcus haemolyticus
atgaattattatgaaccacttttattaacaccaggacctactccagttccaaaggaaatcaatcatgctttaggtttacctatggttggtcaccgttcaccagattttgaatctatagctaaaaaagcatttaacaatttaaaacccatttttggtacagaaaatgaagttatgattttaacatcaagtggcactagtgtcttagaagcaagtatgttaaatatagttaatcccgatgatcattttgtcgttatagtgtcaggcgcatttggcaatcgctttaaacaaattgctgagacatactataaaaatgtacacatatataatgtggaatggggacaatccattgatgttaaagaattcataacatatcttaacaatttaaatcatcaaatcagtgctgtatttactcaattctgcgaaacgtcaacagctgtcctacatcctgtaggtgaacttggtaaagcattgaaaacattcaatcaagatatctactttgttgtagatggtgtgagttgtattggtgctgtagatgttaatttagagcgtgactacatagatgtgttagtttctgggagtcaaaaagcaattatgttgccacctggtctagcattcgtagcttataatgatcgtgcattgaaacgtttcaaagaagtgactacaccacgcttttacttaaatttaaataaatactttgactcacttcaacaagattctactccttttacaccaaatgtcgggttatttagagctgtaaacgcttatgctgaattaattcattctgaaggatttgaaaataccattaaacgtcactatattattagagacggtctaagattagctttaaatgcattagatttggaacttttagtagaagatgatttcgcttcccctacggtaacatcatttataccaacatccaaagatgaattaactcatattaaatcaactttaaaaacaagatttaatattacaattgctggtggtcaaggtaaattgaaaggaaagattttacgtatcggacatatgggtaaagtctcacctttcgatatgctttcagtgataagtactttagagattatacttacagattaccgtcaaacgaattatattggtaaaggcttaacaaaattttcagaggtgattcatagtgaagca

SEQ ID NO: 35234 - DNA, 1128 bp, Staphylococcus haemolyticus
atggataaagttggtaatgatggtgttattaccattgaagaatcaaatggactagatacagaattagaagttgttgaaggtatgcaatttgatagagggtatcaatcaccatacatggttacagattcagataaaatgattgctgagttagaaagaccatatattttagtaacagataaaaaaatctcttcattccaagatatcttacctttattagaacaagttgttcaatctagtcgtccaatcttaattgtagcagacgaagttgaaggagacgctttaacaaatatcgtattaaaccgtatgcgtggaacatttactgcagttgcagtaaaagcacctggattcggtgatagacgtaaagcaatgttagaagacttagctattttaactggagctacagttattacagatgatttaggtttagaattaaaagatgcttcaattgatatgttaggtagtgctaataaagttgaagtaacaaaagataatactacagttgtcgatggtgatggagatgacaatagtattgatgcacgtgtgagtcaaattaaagctcaaattgaagaaactgattctgattttgacagagagaaattacaagaacgtttagctaaattagctggtggcgttgcagtcattaaagtaggtgctgcatctgaaactgaattgaaagaacgtaaattacgtattgaagatgccttaaactctacacgtgctgcagttgaagaaggtatagttgctggcggtggtactgcattagtaaatatttataataaagtagatgaaatcgaagctgaaggtgacgttgcaacaggtgttaacatcgtactaaaagctttatctgctcctgtacgtcaaatcgctgaaaatgctgggctagaaggttcagttattgttgaaagattaaaacatgcagatgcaggtgttggatttaacgctgcgacaaatgaatgggtaaacatgcttgaagaaggtattgtagacccaactaaagttacacgttcagctttacaacatgcggcaagtgttgctgcgatgttcttaactacagaagcagtagttgcaactatccctgaaccagataataatgataatccaggtatgggtggcatgccaggcatgatg

SEQ ID NO: 35235 - DNA, 810 bp, Staphylococcus haemolyticus
atgcaagagaccctgtttattagatttcatgaaataatattaattatatatttaattagtattctctgttattttatagatttcgttaaaaagagtcataaaattagagaattaggaatttatacattagggattgtttggatattgcaaacaatctctttatctgtttatatcacttcgcataatgaaattccgttgagttcattatttgatgtatttttctttttatcatggataactatatgtatagcactggttttaaatgtagttaaagtattaagtttttcagtattctttctcaatgttattggatttatattattgatgatgaatacttttcaacctgagcattactcaacaaatgtgcaacgcattgcagttataaatgaattgttattagtgcatataggcttagcggtattaagttatgctctttttgcactagcttttgtaaattcattactttatattattcaataccgcaatttaagggaaaagaattttgatcaaaaatactttagaattggtagcgtagccacacttgaaacggttgttttttattcatctttaagtggtttcattatattaattttgagtgttattttaggcgcacagtggggtgtctatgcaattggacatagtatttttgctgaccctaaagtagtactatcttctattattacaattttttacgctatttatttactaagtcgtattaatcgatggtttaaaacaatttatttaatttactttaatattatgttattttgcttatgcatgattaatctattttttacaacacatttcact

SEQ ID NO: 35236 - DNA, 930 bp, Staphylococcus haemolyticus
atgcgcaaattggttgtaggctcacgtagaagtaagcttgccttaactcagagtcaacaatttatagataagttaaaagcggtggatccaacacttgaaatagaaattaaggagattgtcactaaaggtgaccgcatcgtaaataaacaattatctaaagtgggcggtaaaggactatttgttaaagaaatccaacaagaactttttgacaaagaaattgacatggcaatacactcacttaaagatgtaccaagtatcattcctgaaggtttaacactaggttgcatacctgatagagaagttccatttgatgcttatatttctaaaaatcatatacctttaaatgaattaccggatggtagtattattggtacgagttcattaagacgtggtgctcaaattttatctaaatatccaaacttagaaattaaatggataagaggaaatattgacactcgacttaaaaaattagaaatagaagattatgatgcaattattttagctgctgcaggacttagacgtatgggttggtcagatgatattgtaacgacttatctggacaaagatattttattaccagctattggacaaggtgcattaggtatagagtgtcgtagtgatgatgtcgaactattggaattattaagtaaagttcataatcaagcagtagcgaattgtgttacagctgaaagaacattcctttcagctatggatggtagttgtcaagtacctattggagggtatgcaactaataaggaaaatggtgaaattgaatttactgggttaattatgactccagacggtacaaagagatatgagcacacagaagttggtaaaaatcctgttgatttaggtgaagcagtcagccgtgttttaaaagaacagggtgcttatgaaataatcaaaaaactaaatgaagagcaagcgcat

SEQ ID NO: 35237 - DNA, 678 bp, Staphylococcus haemolyticus
atgaaaccagttgtagttatgacgcaatcgagtgaatttaatagtgatttagtggaaataatgcataagccatttatagaaattcaatcacttgaatttgatactcaagttttgcatcataaatatgactggattattttttcttctaaaaatgcggttcgcatattttataaatatttaaatcaattagatgttaaatatgtggctgtcattggacagaaaactgccgaactttgtgaagcgcttaaaattaatgttgattttatacctaatgactactctcaagaaggatttttgaatcagtttaaaaaggatcaacaaagcattctcataccgagtagtgctgaagcgcgtcccaaactccaacatacattagcacaaaacaatatagtgactaaaatcgatttatataaacctattcctaatgataggaatattagagaagtcattcaattgatagaacatcacaaagttcatgcgttaacattttcaagttcttctgcagtaaatgcatatataaagcatgacgttccttgtggttttgataagtatgttgctattggggcccaaactgctaacacattacgaaagaacggtctcaagccattaatagctgataaacaaacttcggaatcacttataaataaaattattgaaagttggtataataatgaaatt

SEQ ID NO: 35238 - DNA, 1209 bp, Staphylococcus haemolyticus
  misc_feature (471)..(472): n=g, a, t or c
  misc_feature (475)..(475): n=g, a, t or c
  misc_feature (480)..(480): n=g, a, t or c
atgttagatcaaaatcaattaaagaaatataatcaagaacatttgagtgaatatgaaaagttaatgagcagtaatgaaaaagaaaaattagaatcgaaagtgaatgaattagatttagaaagtattcaacaattatttcaagatttatatgttaatcgtcaatcaatttctgatgtgtcatctgtttcagaagtaaaatatcaacgcaagactgaattgactgatcaagaaggtgcaaaatatgaacaaaaaggcatagaagcaatacgaaacggtgaatttgcagttttattaatggctggtggtcaagggacgcgtttaggttataaagggccaaaaggttcatttgaaattaaaggagttagtttgtttgaattacaagcacgacaattacttaaacttaaaaaggaaactggtcatttaatcaattggtatatcatgactagtgatatttccccccttaaagaagtnnccnacagnataggaaaccgttcatcgtactttgaacaacatgattattttggttataaccctgataatgtacatttctttaaacaagaaaacatggtcgcattatgtgaaactgggcaattggtacttaatgaacaaggttatataatggagacgccaaatggaaatggtggtgtatttaaatcattagaaaaaaatggttacttagataaaatggcatctgatggtgtgaaatttattttcttaaataacattgataacgtattagttaaagtattagatccattatttgctgggtttacagtggtaaatgattgcgacgtaacttctaaatcaattcaacctaaagatggtgaaagtgtcggacgattagtaaatcaaaatagtaaggacacagttcttgagtattctgaattggatgaagcggtcgctaatacgtttgataatgcaaatattggaattcatgcctttaaaattgcatttattaaacaagcagtaaataatgatttaccatatcacttagcagtgaaaaaattaaagcaattagatgaagattttggagttgttgaaaaaccaacattaaaatttgaattgttttactttgatatttttagatatgcaacaagttttgtaacgttgcaagttaatagagaagatgaattttctccacttaaaaataaagaaggtaaagatagtgttgaaactgctacatcagatttagaacgtttgaatttaatt

SEQ ID NO: 35239 - DNA, 681 bp, Staphylococcus haemolyticus
atgtctaactcaactaagaatgcaaaaggtactgttgtcgaatcatttaaagacatcattcctctatctttcggtgaagaaattggtaactcagtttcacatggtgtagctgctttacttacactttttttactaccatatgctgcagttcatagttatatagcacatggaacgttaagctcagttagtatttctatatttgtaattagtatttttatgatgtttatctcttcaactatatatcatgcaatgaaaaataatactgctcacaaatatattttaagaattattgatcatagtatgatttatgttgctatttcaggaacttatacgccagttttattaactgtcgtaggaggatggattggttggtttgtattcatattactttggggtactacaatttggggaattttgtataagtccatttctgttaatgtgaatcctaaattaagtttgattgtctatttggtaatgggatgggttggtattatttttctacctattatcattatgcgtacatcttggttatttatcttattcattgtactaggaggcttatcttacactattggtgcttggttttatgcccaaaaaaaccgtccatactttcatatgatttggcatatttttatcgtaatcgcttcaatgtttcatttaatagcaatactttattttatt

SEQ ID NO: 35240 - DNA, 597 bp, Staphylococcus haemolyticus
atgtatgaaacttaccattccggttggattgaatgcattactggaagtatgtttagcggtaagtcagaagaactaattcgtagactaagaagagggatatacgctaaacaaaaagtagtagtgtttaaaccagcgattgatgatcgttatcataaagaaaaagttgtttctcatgacggtaatgaattagaagcaattaatatttctacttcaagagatatattattacaggatttgtctcatgttgatgtcattggtattgatgagattcaatttttcgataaagaaattgtaaatatagtggagaagcttgctgaaaatggccatcgagtagtggttgcaggcttagatatggatttcagaggggaaccattcgaacccatgccacaaatcatggcggtaagtgaacaagttactaaattacaggctgtatgtgcagtatgtggttcatcatcaagtagaacacaacgcttaatcgatggacagccagctaaagtagatgatcctatcattttagttggggcgaatgaaagttatgaaccgagatgtcgtgcacatcatatcgtagcaccaagtacaagtgacgaggaggaaatg

SEQ ID NO: 35241 - DNA, 1074 bp, Staphylococcus haemolyticus
gtgtttgatcaattagatatcgttgaagaaagatatgaacaactcaatgaaatgttaagtgaccctgagattgttaatgattcagataagttacgtaaatattcaaaagaacaagctgatttacaaaaaacagttgatgtatatagagattataaaagtaaaaaagaagaaattgctgaaattgatgaaatgttaaatgaaacagaagataaagaagaaattgaaatgttgaaagaggaaagtgctagtttgaaaagtgcgattcctgagttggaagaacaacttaaatttttattaattccaaaagaccctaatgatgagaaagacgttatcgttgaaatcagagcagcagcaggtggagatgaagcggcaatcttcgctggcgatttactaagaatgtatagtaagtatgcagaatctcaaaactttaaaactgaaattgttgaagcggctgaaagtgaccatggtggttataaagaaattagtttctcagtttcaggtagcggtgcttatagtaaattaaaatttgaaaatggtgcacaccgagttcaacgtgtacctgaaacagaatcaggtggacgaattcatacttcaacagcgacagttgctgttcttcctgaagttgaagatgttgagattgaaatccgtaatgaagatttgaaaatagacacatatcgctcaagtggtgctggtggtcagcacgttaatacaactgactcagctgttcgtatcactcacttacctactggtgttattgcaacttcttctgaaaaatctcaaattcaaaaccgtgaaaaagcgttgaaagttttaaaagcacgtttatatgatatgaaattacaggaagaacaacaaaaatatgcagcacaacgtaaatcagcagtgggtacaggagatagatctgaaagagttagaacatataactatcctcaaagccgtgtaactgaccatagaataggattaactttacaaaagttagatcaaattatggaaggtaaattagatgaaattattgatgcattaactttatctgaacaaactgagaagttgaaagaactaaacaatggtgaactt

SEQ ID NO: 35242 - DNA, 834 bp, Staphylococcus haemolyticus
atggtgaactttaaagaacaattagattatgcgattaaacaagctgtagataagggttatgaacaatcgagagcagaatggttgatgcttgatttatttgggtggtcaagaactgattatttaattcacatgtatgatgacatgtcaaaagcagaagaaatcaagttttcactcgcgactgaacggatgcttttaggtgaacctatacaatatattgttggttttcaatctttctatggctatcaatttcaagttaatgaacattgtttaattccacgtcctgaaacggaggaagtgatgttgcattttcttgaaaattgtaaatcaagtgctacaatcgctgatattggaactggcagtggtgttttagctattactttaaaaaagttgaataaagatttcactgtttatgcaacagacattgttcaagagaccttagaagttgcatcagataatgcacattatcatgaggtagctgtaacttttttaaaaggcaatgcattgaaacctttcatacaaaataatataaaattggatggtattgtttctaatccaccatatatcgatgtcgatgagatggaaatgatggagaacacagttgttaagtatgaacctcataaagcattgtttgcagagaataagggtttcgctatttatgaattaatccttaatgatttgcctaaagttttaaataaagatgcttatgtcaccttcgaaattggttataaccaaggtgaaaggttaaaaaatattattttagaaaagtatccaaaacttgatgttaaagttattaaagatataaacggtaatgaaagaatagtgtcatttaaatgg

SEQ ID NO: 35243 - DNA, 366 bp, Staphylococcus haemolyticus
ttgtatagaggatttattaaacgaagtgaaatttcagatgtaatggaaattactaaggataattgtacagatccatttgaagaaccttatattttagttacgggaacaattggatttggtgaagtgcctaaagaagtacaatcgtttttagaaattaatcatcataatttacgcgctgttgcagcaagtggtaaccgtaactggggacaaaactttgcgaaagcgggtagaacaatttccgaagaatatcatgtacctttattaatgaaatttgaagtacaaggttctaataaagatgttattgaatttaaaaataaggtggggcatttcaatgaaaattatgaacgagaaaaagtacaatcatat

SEQ ID NO: 35244 - DNA, 1975 bp, Staphylococcus haemolyticus
atgttattgaatttaaaaataaggtggggcatttcaatgaaaattatgaacgagaaaaagtacaatcatattgaactaaataatgaagttacgaaacgtaaagacaatggtttctttaacttggagaaagatcaagaagcattagcggtttatctagaagaaatccatgacaaaacaatttattttgacagtgagattgaacgtttacactatctagtagataataatttttattttaatgtctttgacaaatatagcgaagaagatttagttgaaatcactgaattcgccaaatctatcaactttgaatttgcaagctatatgtctgctagtaagttttataaagattatgcgctaaaaactaatgataaatcacaatatctagaggattataatcaacatgtcgcaatcgttgcactatatttagcggatggtaataagcagcaagcgaaacaatttatcttagcaatggtcgaacaacgttatcaacctgcaacaccaactttcttgaatgctggtcgcgcacgtcgtggtgaattagtatcatgtttcttactagaggtagatgatagtttgaactctatcaatttcattgattctactgccaagcaattaagtaaaattggtggtggtgtagcaataaatctttctaaattacgtgctcgtggtgaagctatcaaaggtattaaaggtgtagccaaaggtgtgctaccagttgccaaagcattagaaggcggatttagctatgctgatcaactaggccaacgtccaggtgcaggtgcagtatatttgaatatcttccattatgatgtagaagagttcttagacactaaaaaggtaaatgctgatgaagacttacgtttatcaacaatttctactggtcttatagtgccatctaaattctttgatttagcaaaagaaggcaaagatttctatatgtttgcaccacatacggttaaacaagaatatggtgtaacattagatgatattgatttagaaaagtactatgacgacatggttgcaaacccaaatatcgttaagaagaaaaaagacgcaagagaaatgttgaatatgattgcgcaaacacaattacaatcaggttacccatacttaatgtttaaagataatgctaacaaagttcatgccaattcaaatattggtcaaattaaaatgagtaatttatgtacagaaatcttccaattacaagagacatcagtgattaatgattatggtattgaagacgaaattaaacgcgacatatcatgtaatttaggttcattaaacattgtaaatgtgatggaaacaggtaaaattaaagattctgttcacacaggtatggatgcattaacagtagttagtgatgaagcaaatattcaaaatgcaccaggcgtgagaaaagctaacagtgagttacactctgtcggtcttggcgtaatgaacttacacggctatttagctaaaaataaaataggatatgaatcagaggaagctaaagactttgcaaatactttcttcatgatgatgaactattattcaatagaacgttcaatggaaattgcgaaagaacgtggggaagtataccaagactttgaacaatcagattatgctagtggtaaatactttgagttttatacttctcaagaatttgaacctaaatttgagaaagtgaaacgactatttgatcatattgatattccaactgctaaagattggaaagcattacaagaacaagttcaacaacatggtttatatcatgcatatagacttgcaattgcacctacacaaagtatttcatatgtacaaaatgcaacaagttcagttatgccaattgttgatcaaattgaacgtcgtacttatggtaatgctgaaacattttatccaatgccattcttgtctcctgaaacaatgtggtattataaatcagcattcaatactgaccaaatgaaattaatagatttaatcgctacgattcaaa

SEQ ID NO: 35245 - DNA, 1108 bp, Staphylococcus haemolyticus
atggcagagaaaaaaattattgttgtcggtggaggacttgccggtctgatgtcaacaattaaagctgcagaacaaggtgcacatgtagatttattctcaattgtacctgttaaacgttcgcactctgtttgtgcccaaggtggtattaacggtgcggtaaataccaaaggtgaaggggattctccttggattcactttgatgatactgtttatggtggggacttcttagcaaaccaaccacctgttaaagctatggctgaagctgctccatcaatcattcatttattggaccgtatgggcgttatgtttagtagaactaaagaaggtctattagactttagacgtttcggtggtacgctttatcacagaactgcttttgcaggtgcaactactggacaacaattattgtacgcgcttgatgagcaagtacgttcatttgaagtagatggattagtaactaaatatgaaggttgggaattcttaggaattgtcaaagatgaggacaatgctgcaagaggaattgtagctcaaaatatgacaacttctgaaattaaatcatttggttcagatgccgttattatggcaacaggtggacctggtatcatcttcggtaaaacaacaaactcaatgattaatacaggttcagcggcatcaattgtatatcaacaaggtgctaaatatgcaaatggtgaatttattcaaattcacccaacagctattcctggtgatgataaattacgcttaatgagtgaatcagcacgtggtgaaggtggccgtatttggacatacaaagatggtaaaccttggtacttcttagaagagaaatatcctgattatggtaacttagtacctcgtgatattgcaacgcgcgaaatttttgatgtatgtatcaatcagaaattaggtataaatggggaaaacatggtttaccttgatttatctcataaagatccacatgaattagatgttaaacttggtggtattattgaaatttatgagaaatttacgggtgatgacccacgtaaagtaccaatgaaaatcttcccggccgttcactattcaatgggtggcttatacgtagactatgatcaaatgactaatattaaag

SEQ ID NO: 35246 - DNA, 2412 bp, Staphylococcus haemolyticus
ttgggatataatcataaggaaattgagaaaaaatggcaaaattattgggcagacaacaaaacgtttaaaacgagtgataatttaggacaaaagaaattttatgcattagatatgttcccttatccatctggtgcgggtttacatgtagggcacccagaaggttacacagctactgatattgtatctagatataaacgtatgcaaggttataatgtactacatccaatgggatgggatgcttttggattacctgctgaacaatatgcattagatactggtaatgaccctagggaatttactaagcaaaatattcaaacgtttaaacgtcaaattcaagaattaggtttcagttatgattgggatagagaagtagatactacagatcctgaatattacaaatggacacaatggatttttatccaattgtataataaaggcttagcctatgttgatgaagttgctgtaaactggtgtccagcattgggaactgttctatcaaacgaagaggtcgttgatggcgtatctgaacgaggaggacacccagtatatagacgacctatgaagcaatgggtattaaaaattactgaatatgctgaccgattattagaagatttagatgaacttgactggccagaatctattaaagacatgcaacgtaattggattggacgttcagaaggtgcaagtgtatcttttaaagtagataacagtgatgaaagtattgatgtgtttactacaagaccggacacaatttatggtacgactttcctagtattaagtcctgaacattcattagtaaatgaaattacgtctgaagacaaattagaagcggttaaaaaatatcaagaagactcatctaaaaaatctgaccttgagcgtacagatttagctaaagataaatctggtgtgttcacaggtgcttatgctataaatccattaacaggtaagaaattgccaatttggattgcagattatgtactatctagttatggtacaggcgcagtcatggctgtacctgcgcatgacgaacgtgattatgaatttgcatctaaatttaatttaccaattaacgaagtgattgctggtggagatattcaaaaagaagcatacacaggtgttggtgaacatattaattcaggtgaattaaatggattagataatgaaacggcgatctctaaagcaattgaactattagttgctaaaggtgcaggcgaaaagaaagtaaactacaaactaagagattggttattcagcagacaacgttattggggagaaccaataccagttattcactgggaagatggtactatgactacagttccagaagaagagttaccacttttactaccagaaactgatgaaattaaaccttcaggtacaggtgaatcaccattagctaatatcgacgagtttgtaaatgtaattgatgaaaagactggaatgaaaggtcgtcgtgaaactaatactatgccacaatgggctggaagttgttggtattatttaagatatatcgatccacataatagtaatatgttagctgacccagaaaaattaaaacattggttaccagtagatttatatattggtggggtagagcatgccgtactccatctactatatgctagattctggcacaaagtgctttatgatttaggtgtcgtgcctacgaaagaacctttccaaaaattatttaaccaaggcatgatacttggagaaggtaacgagaaaatgagtaagtctaaagggaatgtagttaaccctgatgatattgtagattcacatggtgctgatacattgcgtttatatgaaatgtttatgggaccattagatgcagcaattgcatggagtgaaaatggtcttgatggttcaagacgtttcttagaccgtgtttggagactattcatcaatgaagacggttcattatcaaataaaatagttgaaaataatgataatggattagataaagtgtataaccaaactgttaaaaaagttacagaagacttcaacacattaaactttaatactgcgataagtcaattaatggtatttattaatgattgctataaagcagaaacgatttatcaaccatatgctgaaggctttgtaaaaatgttggctccaattgcgccacatattggtgaagaattatgggaccgcttaggtaatgaagacactattacttatcaaccatggccaacttatgatgaatctttacttgtagattcagaggttgaaattgtagtacaagttaatggtaaagtaagagcaaaattaaatatacctaaagatacttccaaagatgaaatggaagcattagcattaaaagatgaaaatgttaaactatctattgagggtaaagacattaaaaaagtaatcgcagtccctcaaaaacttgttaatatcgttgcaaaa

SEQ ID NO: 35247 - DNA, 635 bp, Staphylococcus haemolyticus
  misc_feature (468)..(468): n=g, a, t or c
aaaaaacaaaaattcagtatacgtaaatttacagttggtacgttctcaacagtgattgctacattatcatttatcacacatacaggacatgcagctgaattggatgagcaaagtcaatctgctcaacaaaaggttactgaaacaagcggtacagatgatactaatcaaaaatcaactgctccagacaatgcatcttcacaagtagaatctaaagaagacacaagctacccatcttctaaagtggaaacgaaagcagataataatcctgcaccaaaacaaaactcagttgatgatacaagtgctaaatcgagcaagtctgaaactttaagtaacaataaaaattcaaacaaagatttagctgagacaaagtccgaagctaataatgttgacactaatcaaccatcaacagaagaaaaaacattatcaaatggaaagagtattaaggccaaacacaaacgagtgaaactngatgcgaatgatacatcttcaaatcctcaaactcaaccagatccaatggcaatcaatgaaacaaactctggacagattgttaatggtaattttactgatacatctaacggtgcggaaattccaacggctgctacagaatctgctatggatgctgcaacacaatacca

SEQ ID NO: 35248 - DNA, 1236 bp, Staphylococcus haemolyticus
atgtcttatatccaaaatcaagataaagctgtctatgaagcgattcaaaatgaatacaatagacaaaataacaacattgaattaatagcatctgaaaattttgtatctgaagcggtaatggaagcacaaggttctgtaatgactaataaatatgctgaaggctatcctggtcgtcgttattatggtggttgtgattatgtagacgttactgaaacaattgctatcgaacgagctaaagcattatttggtgctgaacatgtaaatgtgcaaccacattcaggttctcaagcaaacatggcagtttatcttgtcgctctagagatgggtgatactgttttaggaatgaatttaagtcatggtggtcacttaacacacgggtcaccagttaattttagtggtaaattctataactttgttgactatggtgtagataaggaaactgaaaaaattgactatgaagtggtgcgtcaattagcacatgaacataaaccgaaattaatagttgcaggtacatcagcatattctagacaactggattttaaaaagtttaaagaaatcgctgatgaagttggtgctaaattaatggttgatatggcccatatcgctggtttagtagcagcaggtttacatccaaatcctgttgaacatgcagactttgtcactacaactactcataaaacattacgtggcccacgtggaggcttaattctttgtaaagaagagtataagaaagatatagataaaacaatattccctggaattcaaggtggccctttagagcatgtcattgcagctaaagcagttgcgtttggtgaagcgcttgagcaagattttaaagtttatcaagaacaagtaattaaaaacgctaaagtactttcacaaacattgcaagaagaaggctttagaattgtttcaggagggactgataatcatttactttctgtagatgttaaaaattcagttaatgttactggtaaagaagctgaagcgactttagattctattggaataacatgtaataaaaatacaatcccatttgatcaagaaaaagctttcgtaacaagtggtatacgtttaggtacacctgcagcgactacgagaggctttgatgaggaagcgtttaaagaagtaggtcgtattattagcttagcactaaaaaatcctaataatgatactaaattaaaagaggcaagagaaagagtaagtcgtttaactgctaaatatccgctatatgaa

SEQ ID NO: 35249 - DNA, 629 bp, Staphylococcus haemolyticus
atgagtaaagtacatgtatttgatcacccactaattcaacacaaattaagttacatccgtgatatgaatacgggaactaaagaatttagagaacttgttgatgaagtaggcatgttaatggcgtatgaagttactagagatttagaactacaagatgtagaaattaaaacgccagtaacaacaatgactgcaaaaagattagctggtaaaaaattagctatcgttccaattcttagagctggtttaggtatgacagatggtgtgttaagtctagtaccagcagctagagtaggtcatattggtctatatcgtgatcctaacacattaaaagcagtagaatactttgctaaacttccacaagatattgatgagagacaaatcattgttgtagatccaatgctagcaactggagcatcagcaattgaagccatcaattcattaaagaaacgcggtgcaaaaaatattagatttatgtgtttaattgcagcaccagaagtgtagaaaagatgcaagaggcgcatgatgatgtagatatttatattgcagcattagatgaaaaattaaatgacaaagcatacattacgcctggtttaggtgatgctggggacagattatttggtacaaaatag

SEQ ID NO: 35250 - DNA, 1131 bp, Staphylococcus haemolyticus
atgaaaaaaattatgacagtctttggtactagaccagaagcaattaagatggcacctttagtaaaggcactcgaatatgatgctgagttagaaccaatgattgttgtaactgctcagcatcgtgagatgttagattcagtattacatacttttaacattaagccacattatgatttaaatattatggaggaaggtcaaacactttccgacattacctcaagagctatgacgaaacttgaagatgttataaaaaaagagagaccagatatggtattagttcatggcgacacaactacaacattttctggtgctcttgctgctttttataataaagttgctattggtcatgttgaagcaggtttaagaacgcgacataaatatgcgccatttccagaagaagtgaataggcaaatggttagcaatttagccgatttacattttgcacctactaaaggggcggctaataatctacttcaagaaaacaagagtcctgattcaataattattactggaaatactgctatcgacacactcgaactaacaatacaaaaagaatatacttcagatattataagaaaacatcaaggtaaacgtattatattattaactgtccatagacgagaaaatgtcggacagccaatgattaatatttacaaagcgatgcgcaaaattgtggatgaatatgaagatatcgttattgtgtctccattgcatttaaatcctaaagtaagagaactagcttacgagtatttaggagaacatgaacgtatagaattaattgaaccactcgatgttgtagattttcataactttgcaaataaagcatatttaattttgactgattcaggagggattcaagaagaagccccttcattaaataaacctgttcttgttctaagagatgtaactgaaagaccagaaggtgtaacagcaggtactttaaaggttgtaggtactgattttgataatgtttttaaatcaacaacagaaatcttagaaaatcaaatgatttatgatcaaatggcgctaactcaaaatccttatggtgatggcaatgcatctttgagaatatgtgagagtataaaatattatttcggcttaacttcaaaaatgccaaagtctttcaattca

SEQ ID NO: 35251 - DNA, 1098 bp, Staphylococcus haemolyticus
aaagctaaaaagggcgaaaatgggcaaagtagtaatatgcatggtagaggtgcagacgatttagtgttaaaagtacctcctggtacaataatcaaaagtgtggaaactgatgaagtattagctgaccttgttgaagatggccaacgtgctgtcgtagctcgtggtggacgaggtggacgaggtaattctcgttttgctacacctagaaacccagcaccagactttagtgaaaatggtgagccaggtgaagaattagatgtaacattagagcttaaattattagcagatgttggattagttggattccctagtgttggtaaatcaacattattgtcaatagtttcaaaagctaaacctaagattggtgcgtatcattttactacaattaagccaaatttaggtgtcgtttcaacacccgacaatagaagttttgttatggccgatttaccaggtttaattgaaggcgcttcagatggtgttggattaggacatcagtttttaagacatgttgaacgtacaaaagtgattgttcatatgatagatatgagtgggtcagaaggtagagatccatttgatgattaccaaattataaataaagaattagtaaattataaacaacgattagaggatagacctcaaattgtagtagctaataaaatggatatgcccgatgcacaagataatttaactttatttaaggaacaagtagatgatagcgttacgattattcctgtttctacaattacaagagataatattgaacagttattatacgctatagcagataaattagatgaagttaaagatattgactttagcgttgataacgatgaagaaataggtgttaaccgtgtactttataaacacacgccttctcaagataaattcactatcactagagacgacgatggtgcgtatgtagtaagtggtaatgcaattgagagaatgtttaaaatgacagactttaatagtgacccagcagtaagaaggtttgctagacaaatgcgttcaatgggtattgatgatgcattgagagaacgtggctgtagtaatggagacatcgttagaattttaggtggagaatttgaatttgtagaa

SEQ ID NO: 35252 - DNA, 453 bp, Staphylococcus haemolyticus
gtggacaacaatgattataaaaagttttacttgatacgtgaagatgtcttgcctgaatcagtggtaaaaacattaaaaattaaagatgctttaaaaaataatccggaattgtccatttatgaagctgttaaattatttgatctttcacgtagtgcattttataaatatagagaaacaatcttccctgtagatgaaaaaatgttagatcatcgtgaatttacgcttattctttatgttaatgatattgtagggatgttagcacaagtacttaatacggtttctaaattgcaattatctgttcttactatacatcaaagtgtaccaatggaagagaaagctacgataacattatcacttagcgcaaaagataccaccatttcaattgatgaaattataaaggcactaagaaatattgaacatgtttctaaagttgaattaataagtatgagtatg

SEQ ID NO: 35253 - DNA, 1023 bp, Staphylococcus haemolyticus
atgaatgttgaggaatttgattatgacttgcctgaatcattaattgctcagacccctttaaaagatagagaccaaagtagattgttagtgttaggtagaaacagtggtaatattgaacataaacattttaaagatgtcattaattacttggaaactggtgatacacttgtcttaaatgatacacgtgttatgcctgcacgattatttggtttaaaagaagagactggtgcaaaagttgaaatgctaatgcttactcgaattgagaataatgattgggaagttttacttaaaccagcaaagcgaattaaagtggggaataagttgtctttcggagagggtaagattatagctgaatgtatagaggaattggatcaaggtggacgtatcatgcgtttgcattatgagggaattcttgaggaaagattaaatgaactcggtgaaatgcctttaccaccatatataaaagaacgattagatgatcctgaccgctatcaaactgtctacgctaaagaaagtggttctgcagcagcaccaacagcagggttgcattttacagatgaacttttagatgaaattagagcaaaaggtataaatattgcatttataacattgcatgttggattaggaacatttagacctgtaagtgttgaagatattaatgaccatgaaatgcatagtgaatattatcaaatgacccaagaaacagctaacttattaaatcaaacaaaaaaagaaggtcatagaatcatttctgtaggtacaacctcaacaaggactctagagactattcgtcgtgattacaatgaatttgtagctgttagtggatggactgatatttttatatatccaggatttacatataaagctatagatggtttaattactaatttccatttacctaaatcaactttagttatgcttgtatcagcatttagtagtcgagaaaacattttaaacgcatataaagaagctgttaaactagaatatagatttttcagttttggagatgcgatgttaattatt

SEQ ID NO: 35254 - DNA, 899 bp, Staphylococcus haemolyticus
aaccataaagaaaatgaaatgagtaaaagtgaactattagtagtaacaggtctatccggtgcgggtaaatcagtggtcatacaatgtttagaagatattggttacttctgtgttgataatctaccacctattttactccctaaatttgtagaattaatggaacaaggtaatccttctttgcaaaaagtagctattgctatagatttaagaggtaaagaattatttaaatcattagtagaagaaattgatgcaatcaaaagtagaaacgatgtaattgtagatgtcatgtttttagaggcggaaacagaaaaactaatttctagatacaaagaatctagacgagctcaccctttaaatgaaaatggacaaatgtctttgatggattcaatcttagaagaaaagcaattgcttagcaatattcgtacaatcgctaattatattgtagatacaactcaattgacgacgaaagaacttaaagctagagtgaaagaaaaatttgaagatgagaattttaaatcctttagtatcaatgtatcaagtttcggctttaaacacggtatacaaaaagacgcagatttagtatttgatgtccgtttcctcccaaatccttattatgttgaagacttaagaccgatgacaggagaagatgaaccagtttaccattatgttatgaaatggaaagaaactgaaatatttttcgaaaaattaatggatttactgaaatttatgataccaggttataaaaaagagggtaaatcacaattagtaattgcaataggttgtacaggaggtcaacatcgctctgttgcgttactaaacgcattggtgaagaattaacagaaatatttgattataatgtctatgttcatcacagagatgcacatatcgaaagtggcgtg

SEQ ID NO: 35255 - DNA, 984 bp, Staphylococcus haemolyticus
atgaaacaattaaagattgtactcataggcggtggaacaggcctatcagtattggcgagggggctgagagagtaccccattgatataacggccatcgttactgtagctgatgatggtggcagtactggtaaaatacgtagtgagatggatatacctgctccaggtgatattagaaatgttatcgcagcactaagcgatgctgaaccggtcatagaagaattatttcaatatcgatttaaagaaaatcaaatcgaaggacactcactaggtaatttattactagcagccttaacaaatataaagaatgacttcggtcatgcagttaaagaattaagtaagattttaaatattaaaggtaaagtgattccttcaacgaatactaatgttatgctaaacgcagtgttagaagacggagaaattgtacgaggagaatctcaaataccaaagaaaaacaaatgtattgatcgtgtttttttagaacctgaaaatgttgaacctatggaagaagcaattgacgcattagaagatgcagatttaatcgtgcttggacctggatcactatacacaagtgttatttcgaatttatgtgttaaaggtatgtcagaagctattttacgttctaaagcacctaaattatacatatctaatgttatgactcaaccgggagaaacatcagattacgatgttatggaccatattcaagcgatacataaacatgctggaagtgattttattgattatgtcatctgtagtaatgataaatacgatgataaagtgttagaacgttatagagagcgtaatgctaaaccggttgttatggatgaacataaaattacagatcataatattagaatgattacgtcatctaatttagtcgaaatattagatgatcatttagtacgtcacaatactaaagttttagcaagattgatctatgatttagcacttgaaatgacaagtacgattcaatttagacctaaaaaa

SEQ ID NO: 35256 - DNA, 942 bp, Staphylococcus haemolyticus
atgagttttgcatcagatatgaagaatgaattaacacgcattgatgttgatgaaagcaatgccaaagcagagcttagcgcattaattcgtatgaacggtgcacttagcctatctaatcaacaattcgtaattaatgttcaaacagagaatgctacgaccgctagaagaatttattcattaattaaacgcatatttaatgtagaagtggaaattctagttcgtaaaaaaatgaaattaaagaaaaataatatttatatttgtcgtacaaaagtgcgagctaaagaaattctagatgaacttggtatattaaagaatggtacttttgttcacgatattgatgctagcatgattaaagatgatgaaatgcgtagaagttatttaagaggcgcatttttagctggaggatctgtaaataatccagagacatcatcctaccatttagaaatattttctcaatatgagaatcattctgaaggtttaactaaattaatgaatagttatggattaaatgctaaacatttagaacgaaaaaagggtagtattgcttacttaaaagaagctgaaaaaatttctgattttctaagtttaataggtggataccaagcattattgaagtttgaagatgtgcgaattgttagggatatgagaaattcagtgaatcgtttagtaaattgtgaaactgcaaaccttaataagactgtaagtgccgctatgaaacaagtagaaagtattcagttaattaatcaggaaatcggattagataatttgcctgatcgcttaagagagattgccaaacttcgagttgagcatcaagaaatctctttaaaagaactaggagaaatgatatcgactggtccgatatctaaatctggagtcaaccaccgtttaagaaagttaaatgaacttgcagacaaaattcgaagtggtgaaaaaatagaatta

SEQ ID NO: 35257 - DNA, 1359 bp, Staphylococcus haemolyticus
gcagaaatcgacaaagcagcggaagctaagaaagaagcaatcgaccatacgcctaatgcgacagatgaagagaaggcaacagcaaaagctaaagttgatgaagcagtaacaatagctaagaatgcgatagaccaagcaacaaataacgcaggtgtagacactgcgaaaacaaatggcgtagattcaatcaacaatgtgcaaccaacggttgttaagaaagatgaagcaaaagcggtgatcgataaagcggcggaagctaagaaagcagaaatcgatcaaacgcctaatgcgacagacgaagaaaaggtagcagcaaaagctaaagttgatgaagcagtaacaacagctaagaatgcgatagaccaaacaacaaataacgtaggagtggacgcagcaaaagagagtggagtcgaatcaatcaatcaagtgcaaccagcggttgttaaaaaagatcaagcaaaagcagaaatagacaacgttgcacaagctaagaaagcagaaatcgatcgaaactcaaatgcgacagaagaagaaaaagtagcagcaaaatcaaaagtagatgaagccgcaacaacaataaaacaagcgatagataaagcggttaacaactctgaagtcgataatgcgattgatgtaggtaaaacggccatcaataatattgaagctgataattcagcaaaatcaaaagcaattaagcacttacaggaattagtcaaacaacagatgacaaaaatagattctaatcatttggcaactgaagaagaaaaagccaaagcaaaacaaatgattaaactactttttgaaaaagctaaaattgaaatagaaaaagctaaaacatcttatgaagtgactaaaatagatgcagaatatagcaaattaattactaaaactttacctgaaaataaagctaaattaaatgcaaagaaaaaaattgaaaaaatagctagacaattgaaaaataaattaaataatatgaatggcgtttcaaaagaggaaaaagatagaattaaagtcatcattgaacaaatagttaaaaaatcattcaaagatattgatcttgcttcaagaaataatacaataaataagatagtaaatgatgttaaaattcaatttgcaaatattaaaattaacaagcaaaataataaaaaatcacttatcaataatgaaaatgcatctgtgataataactactgagcaacataaaactaataaagcttatcataaagttagaaatgaaaaaggaagatatcaattaccaaacactggtataaataatgatacatcaagtccattaatttcattcacatttgtaagtggtttattcttaattttaagatcaatgagaagaagagcgtcgaag

SEQ ID NO: 35258 - DNA, 1824 bp, Staphylococcus haemolyticus
atgaaacaagattttgaaaaagggaaacaacgtaagactaaaatgcgttacatgcctggtttagatggactaagagcaattgctgtcttaggtattatcatttaccatttaaacaggaaatggcttacaggtggtttcataggagtagataccttcttcgttatttctggatatttaatcacaagtttacttttaaaggaatacgaagagcgaggtattattagccttaaacaattctggattcgacgagttaaaaggttacttccagcagttgttgcgctattaatcgttgttgggattgctacattaatatttgaaccacaacaaatcgttcgagtaaaacatgatattatcgctgcattattctatgtgtcgaattggtggtatattgccaaagatgttaactacttcgaacaattttcatttatgccattaaaacacttgtggtcacttgcaatagaagaacagttctatttgttcttcccatttgtgttggtcattttactcttaacgattaaaaaatatcgcaatgttactttgatattatggattatttctttagtttctttattagcgatggtcattatttcacaacccaatgttgggtattcgagagtttattttgggacagatactcgcttgcaaacgttattattgggtgtgatattagcatttgtatggccaccatttaaattaaaagccaatccaccaaaagtattgcaacgttctattgatggtataggcatcttagggctaataatacttatctacttattctttacagtgaaagatactagtgcatggatttataatggtggattttatctcatatcaggtatgacattatttattattgctagtgtcgtacacccttctagtatcttagcaaaggtattaggtcatcgtatatttgtttatataggtaaacgctcttatagtttatatttatggcattttcctgtcataagttttatacacattcattttgttgatgggcaacttcctatttatgtgtactttgttgatatcatacttacagttttatttgctgagttatcatatcgttatattgaaacaccatttagacgagaaggtttaaaggcattttcattcaattatttaaagcgacctaaatttattagaacaatagtgtcaattattgctgtgataccgatagtattgttattcttaggtgtctttgatcgttttggaaaagatgaaattgataacaaagcaaattcattcaacacgaatgatcaagataaatatttagtaagaatgatgcctggggaaaatataaaaatcgatggctcgagtagtaatagtaaaagtaaaaaacaagtttatactaatattagtccattacttattggagactcagtgatggtagatattggtgaagaatttaaatctcaagtacctaaagcaactattgatggtaaagttgggcgtcacctacaagaagcgttgtcgatagcaggcaattattcaaattataataaaccatcagataaagtcgttttagaactaggtacaaatggtgattttacagaggaagaattaaatcaattaattaataagtttggtaaagcacaaatttaccttgttaatacacgtgttcctcgagattggcaggataatgtgaataaacaactagctaatgctgctaagaagcataagaatgtaactttagtggattggtaccaacgatctgctggacattctgaatattttgcaccagatggtgtgcatcttgaaaatagtggtgtaaaagctttatccgatgaaataatcaaaactataaagaaaaattcaaaaaacaaa

SEQ ID NO: 35259 - DNA, 822 bp, Staphylococcus haemolyticus
atgaaaccttatttaatttgtttagacttagatgggacattattaaatgataataaagaaattagtgactatactaagcaagtacttacaacattaaaaaagcaaggtcatcgcattatgattgcgactggaagaccataccgtgcaagccaaatttattatcatgaattaaacatggacacacctattgtaaacttcaatggggcttatgttcatcatcctaaatcagatgattttaaaacgacacacgaggttctagatgtagaccttgctagaaacatgatcgaaacacttcaaaaagcaaaagttacaaatattattgctgaggttcgcgatcacgtgtttattaataatcatgaccctagattatttgagggtttttcaatgggtaatcctaaaattgaaacaggtaatttattagaagaattagatgaagcaccaacgtcgttattagtagaagcagaagagatttacatacctagaatcaagcaaatgttaacgcgtttctatgcagagaatattgagcacagacgttggggcgcgcctttcccagtaatcgaaatcgttaaacgcgggattagtaaagcgcgtgggattgatcaagtcaaagactatttaggaattgaaccttcacatattatagccttcggagacgaggataatgatattgaaatgattaaatatgctaaatatggtatcgcaatggacaatggtctagatgaattaaaacatattgcaaaccatattacttattcaaataatgatgatggtatcggccgttatttaaataatttctttaaattaaatataccttataaaggt

SEQ ID NO: 35260 - DNA, 2067 bp, Staphylococcus haemolyticus
ttggcagataatttagtcatagttgagtcgcctgcaaaagcgaaaaccattgaaaaatatttaggtaaaaaatataaagttatagcttctatgggacatgttagagatttaccaagaagtcaaatgggtgtcgatgtagaagataattatgaaccgaaatatattacgatacgcggtaaaggtccagttgttaaagacttaaagaaatatgctaagaaagcaaaaaatgtctttcttgcgagtgaccctgaccgtgaaggtgaagcgattgcttggcatttatcaaaaattttagaacttgatgattcaaaagaaaacagagtagtatttaatgaaattacaaaagatgcggtaaaagaaagttttaagcatcctcgtggcatagaaatggatttagtcgatgcacaacaagcacgccgtatattagatagattagttggatataatatttcaccagtattatggaagaaagtgaaaaaggggctgtctgcagggcgagttcaatctgtagctttaagattagtaatagatagagagaatgagattcgtaactttaagcctgaagagtattggtctatagaaggtgagtttagatataagaaatctaaatttactgctaagtttcttcattataaaaataaaccatttaaattaaaaacaaaaaaagatgttgaaaaagttacagctgaattagatggagacaaatttgaaattacaaatgttaataaaaaagaaaaaactagaaatcctgctaatccatttaccacttcaacattacaacaagaggcagctcgtaaattaaatttcaaagcgcgtaaaactatgatgctcgcgcaacaattatatgaaggtattgatttaaaacgacaaggtacagttggattaatcacatacatgagaactgactctacacgtatatcacaaaccgctaaagacgaagcgaaacaatatattgaagataagtatggtaaagattatctttctaatagaactgctaagggtaaacagggtgaccaagatgcccacgaagcaattcgaccaacaagtactttacgtacaccttatgaaatgaaagcatacttaactagagatcagcatcgattgtataagttaatatgggaaagatttgtagcaagtcaaatggcaccagctattttagacacagttgctttagatgttacccaaaacaacattaaattccgagcgaatggtcaaacaatcaaatttaaaggtttcatgacgctttatgtagaagccaaagacgataaagataatgaaaaagaaaataaattacctaacttaagtaaaggtgatgaagtcactgcaactcaaatagagccagcacaacacttcactcaaccaccaccacgttatactgaagctcgtttagttaaaacgttagaggagttaaaaatcggtagaccgtctacctatgcacctacgattgacacaatacaaaaacgaaattatgtaaaacttgaaagtaaacgattcgtacctactgaattaggtgaaattgtttatgaacaagtaaaagattacttcccagaaataattgatgtagagtttactgtaaatatggaaacactattggataaaattgctgaaggagatattggttggagaaaagtaattgataacttttatggaagtttcaaattagacgttgaacgtgctgaagaagaaatggaaaaagttgaaattaaagatgaacctgccggcgaagattgtgaagtttgtggctctcctatggttattaaaatggggcgatatggtaagtttatggcgtgctcaaacttcccagattgtagaaatacgaaagcaatagtgaaaacaataggcgtgacatgtcctaaatgcaaagatggagatgtcgttgaaagaaaatctaagaaaaatagacttttctatggttgttcaaactatcctgaatgtgactttatttcttgggacaaacctgtaggtcgtgattgtcctaaatgtaatcattatttaatggaacataagaaaggacgtagttcacaagtaatttgctctaactgtgactataaagaagaagttcaaaaa

SEQ ID NO: 35261 - DNA, 1269 bp, Staphylococcus haemolyticus
gtgattagaattcctagaggtacacaagatatcttacctgaagattctagtaaatggcgttacattgaaaatcaacttgataaattaatgaaattatacaattataaagaaatccgcacgccgatatttgaaagtacagatttgtttgcacgtggcgtgggtgactctacagatgtcgtacaaaaagaaatgtacacttttaaagataaaggtgacagaagcataactttaagaccagaaggaactgcagctgttgtacgttcatacattgagaataaaatgcaaggtattccaaatcagcctgttaaattatattataatgggccaatgttcagatatgaacgtaaacaaaaaggacgataccgtcaattcactcaattcggcgttgaagcgattggcgctgaaaatccgagcatggatgctgaagttctagctatggtgatgcatatctatgaatcatttggtcttaaacatttaaaattagttatcaatagtattggtgatgctgattcacgtaaagaatataatgaggcactaatacgtcattttgagccagtgatagatacattttgtgatgattgtaaatcaagattacacacaaatccaatgagaatactagattgcaaaattgatagagataaagaagcggttaaaaatgcgccaagaattactgattacttaaatgacgattcaaaagcttactttaatgaagtgaagactcacttagatgatttaggtatttcatatgttgaagatcctaaccttgtacgtggccttgattattacacacacactgcttttgagttaatgatggataatcctaattatgatggtgcaataactaccttatgtggtggtggtcgatataatggactgcttgaattattagatggaccaaatcaaacgggtattggtttcgctttaagtattgaaagattgttattggcgcttgaagaagaaggaattgaattggacgtcgaggatacgtttgatctttttatcgttactatgggtgaagaagctgaacgatacagcgttaagcttttaaatcaactcagaaaatcgggtataaaagccgacaaagattatttacaacgtaaagttaaaggccaaatgaaacaagctgatcgcttgaatgctcaatatactgttgttatcggtgatcaagagcttgaaaatgaagtgattgatgtcaaagacatgtcaacaggtgaaacagaaactattaacttaaataacttagtaaattattttcaagaaaaaaataat

SEQ ID NO: 35262 - DNA, 1764 bp, Staphylococcus haemolyticus
atgagtaaaagaacaacgtattgtggtttagttacagaagaacttttaaaccagaaagttactttaaaaggttgggttcataatcgtcgtgacttaggtggtttaatctttgtcgatttacgtgacagagaaggtatcgtgcaaatcgtctttaaccctgatttctctgaagaagctttaagtgttgctgaaacagtaagatcagaatatgtagttgaagttgagggaacagtaacaaagagagatcctgatactgtgaattctaaaattaaaactggtcaagtagaagtacaagtttctaatatatcaattatcaataaatcagaaacaccaccattttctattaatgaagaaaatcaaaatgttgatgaaaacatccgtttaaaataccgttatttagatttaagacgtccagagttggcacaaacattcaaaatgagacatcaaacaacacgcgctattcgtgaatatttagataacaatggtttcttcgatattgaaactcctgttttaactaaatctacaccagaaggtgccagagattatttagtaccttctcgagttcatgaaggagaattttatgcattaccacaatcacctcaattatttaaacaattattaatgattagtggttttgacaaatattatcaaattgttaaatgtttccgtgatgaagacttacgtgcagatcgtcaacctgaatttactcaggtcgatattgaaatgagtttcgttgatcaagaagatgtgattcaaatgggtgaagaaatgttacgaaaagttgttaaagatgttaaaggcattgacgtatcaggtcctttccctagaatgacttatgaagaagcgatgagacgctatggttcagataaacctgatactcgttttgaaatggaacttaaagatgtatcacagttaggtcgtgaaatggactttaaagtatttaaagatactgtagaaaataacggcgaagtaaaagccattgtagctaaaggtgcagccgacaattatactcgtaaagacatggacgcattaacagaattcgtaaatatttatggtgctaaaggacttgcatgggtaaaagttgttgatgatggattgagtggtccaatcgctcgtttctttgaagattcaaatgttgcaactttaaaagatcttacacaagctgaatcaggagacttagtaatgtttgtcgctgataaaccaaatgtagtagctcaaagtttaggtgctttacgtattaaaattgccaaagaattaggtttaattgatgaaaataaacttaatttcttatgggtaacagattggccgttattagaatatgatgaagatgctaaacgttatgtagctgcacatcatccatttacttcacctaaacaagaggatattagtaaattagattcagaacctcaaaacgcacaagcgaatgcatatgacatcgttttaaatggttatgaattaggtgggggatcaatcagaattgcagacggtgaattacaagaaaaaatgtttgaagtattaggattcactaaagaacaagctagagaacaatttggattcttattagatgcatttaaatatggtgcaccaccacatggcggtattgcactaggcttagaccgtttagtaatgctactaactaatcgtacaaacttacgtgatacaattgcattccctaaaacagcttctgcgacttgcttgcttacagatgcaccaggtgaagtctcagataaacaattagaagagctttctttacgtattcgtcat

SEQ ID NO: 35263 - DNA, 660 bp, Staphylococcus haemolyticus
ttggctgttttaagtgcttcagttgaaaatgaaattagacatattactctccaagatgctaaagattgtttgcaaaaaggtgctttcgtaagcgataaagatggagatatgcactatgatgttatgagtgcttttcaaaaatcaataagaggtagtgatgtaaatgctgcattacactatttagcaagattaattgaagctggcgatttaccgactattgtaagacgcttattagtcattagttatgaagatgtaggattggcttcacctaatgcgggacaacgtacgcttgcagccattcaatcggcagagcgactggggttcccggaagcgagaatacctcttagtcaagctgtaattgagctttcattatcacctaaatccaactcagcaatcactgcgattgacagtgcacttagtgacatacgtaaaggtaatataggccaaattcctgaccatttacgagatggacattatgctggagctaaagatttaggtcgtgccataggttataagtaccctcataactatgaaaatggacacgtcattcaacaatacttgccagataaactcaaaaataaaatttattatgagcctaaatcaacatcaaaaagtgaacaacaatttaaaactatttatgataatttaagaaacaaaaaa

SEQ ID NO: 35264 - DNA, 1399 bp, Staphylococcus haemolyticus
atggtagttggagatttcccaattgaaacagatactattgtaatcggagcaggtcctggtggatatgttgcagcaattcgcgcaacaattaggacaaaaagttactatcgttgagaaaggtaacttaggtggtgtatgcttaaacgttggttgtattccttcaaaagcattattacacgcttcacaccgctttgtagaagctcaacactctgaaaacctaggtgttatcgctgaaagcgtatcacttaaattcgacaaagttcaagaattcaaaaaatcagttgtaaacaaattaactggtggtgttgaaggcttattaaaaggtaataaagttgagattgtaaaaggtgaagcttatttcgttgataataacagcttacgcgttatggatgaaaaaagtgcacaaacttacaatttcaaacacgctattatcgcaacaggttctagaccaattgaaattcctaactttgaatttggtaaacgtgttatcgattcaacaggtgcattaaacttacaagaagttccaggcaaattagtcgttgtaggtggcggttacattggttcagaacttggtacagcatttgctaactttggttcagacgttacaattttagaaggcgctaaagaaattcttggcggattcgaaaaacaaatggttcaaccagttaaaaaaggcatgaaagaaaaaggcgttgaaatcattactgaagcaatggctaaaaatgctgaagaaactgaaaatggcgttaaagttacttatgaagctaaaggtgaagaaaaaactatcgaagctgattatgtattagtaactgttggtcgtcgtccaaacacagacgaattaggtttagaagagttaggacttaaattcgcagatcgtggattattagaagtagataaacaaagccgtacttctatcgacaatatttatgcaattggtgatatcgttcccggtttaccacttgctcataaagcaagttatgaagctaaagtagctgctgaagctatctctggtcaagcatcagaagtagactacatcggtatgccagctgtatgtttcactgaaccagaattagctcaagtaggttacacagaagcacaagctaaagaagaaggtttagactacaaagcttctaaattcccttatgctggtaacggccgtgctttatcattagatgatacaactggtttcgttaaacttatcacacttaaagaagacgatactgttatcggtgcacaaattgccggtaatggcgcttcagatatcatttctgaattaggtttagctatcgaagctggtatgaatgctgaagatatcgcattaacagtacatgctcacccaacattaggtgaaatgtctatggaagctgctgaaaaagcaattggaatgccaatccacaca

SEQ ID NO: 35265 - DNA, 631 bp, Staphylococcus haemolyticus
atgaatgcatttcacactactgaagcaacacaagttactaatattacattaaacgttgaagacttaaataaaatgtcaaacttttataaaaatatactaggattttcaattaaagaacaagacgacaatcatgtcatctttaatgttggtgctaatggtcatacattaacactacaatatttagaagatggtcgccgtcctgggtttagagaagccggtttatttcatgtcgcttatttacttcctacacgcacagatttagcaaactttttattccacgctagtcgtttaaatgtgcctgtaggtggtggagatcatcttgtaagtgaagcgttatactttaatgatccagaaggtaacggcattgaagtatatcaagatcgtccatatgaaagttggcaatgggatggtaattttgtaaaaatggatacacttgcagtagatgcagatgatttaattgcacaacgtactgaagaaggttggaacggttggcctgctgatggcaaaattggacatttacatcttaaaacacacgatatcgggcaagaacgtgacttttatgtggaacaaataggtttagaacatatttctaatttcccacaagctttgttcatgtctactcaaaaatatc

SEQ ID NO: 35266 - DNA, 675 bp, Staphylococcus haemolyticus
gtgcttaaggatattaatttagagattaaaaaaggtgaagtattagcgattataggaccatcaggaagtggaaaaagcactttattaagatgtatgaatttgttagaaacaccgacaaatggaagggttatattcgaaggtaatgaactctctaatcacaaaaataacttaaataaattacgtcaaaaaatgggcatggtctttcaaaattttaatctatttccacataaaactgtattaaataacatcatattggcacctaagttattaaataaaagcgatttaaatcaattgaaacaagaggcattaactttattagaaaaagttggacttgaagataaggcaaatgtatatccttctcaattatctggaggacaaaaacaaagagttgcgattgcaagggcactggctatgcatccagatattatattgtttgatgaacctacgtctgcattggatccagaggtagtgtatgatgtgctaaaggtaatgaaagatttagctaaagaaggaatgacaatggttgttgttacacacgaaatgggatttgcaaaagatgtgagtgataaagttatatttatggcagatgggtatgttattgaagaaggttcacctcagcaaatatttcaatcaccaacacatcaaagaacgcaaaactttttatcaagagtttta

SEQ ID NO: 35267 - DNA, 468 bp, Staphylococcus haemolyticus
atgacaaaccatattgttttatttcaaccagaaattcctgcaaatactggtaatattgcacgtacctgtgcaggaacgaacacacatttacatttaattaagcctttgggcttcagtactgatgataaaatgttaaaacgtgctggccttgattattgggagcatgtaaatattacttatcatgagagtattgaagactttttcgatgctactcaaggtgagtactacttactaactaaatttggaaaacaaacgtatagtgattttgatttttctaaagaagatacagattattattttatatttggaagagaaacgactggattaccggattgggtaaaagacaaatacgctgacacggcattaagaattcctatgagtgaaaatatcagatcgttaaatttatctaacacagccgctttattaatttatgaagcattgcgacaacaaaatttcccaggcttatcc

SEQ ID NO: 35268 - DNA, 882 bp, Staphylococcus haemolyticus
atgacacatgattatatcgttaaatcactagctttcgatggagaaatacgtgcgtacgctgcgctaacaactgaatcagtgcaagaagcacaaacacgtcattatacttggccaacagcttcagctgctatgggcagaacaatgacagcaactttattaatgggttcgatgcttaaaggtgaacaaaaattaacagtaacagttgatggtaaaggacctattggaagaatcattgcggatgcagatgctgagggtaatgtacgtgcgtatgtggataaaccacaaacgcattttccattaaatgaacaaggtaaattagatgttagacgagcagttggtacagacgggtccatccaagttgtgaaagacgttggtatgaaagattatttctcaggtgcaagtccgattgtatcaggtgaattaggagaagacttcacatactattttgcgacaagtgaacaaacaccttcatcagttggtttaggtgtgttagtaaatcctgacaattctattaaagctgctggaggatttattattcaagtaatgccaggcgctaaagatgaaactgtaacaaaattggaaaatgctataaataatatgcaacccgtttctaagttaattgaacaaggattgacaccagaaggtattttgaatgaaattcttggtgaagataacgttcaaatcttagaaactatgcaagctcaatttgaatgtaactgtagtcatgagaagtttctaaatgcaattaaaggtttaggagaagctgaaatccaagatatgattaaagaggatcatggcgcggaagctatttgtcacttctgtggtaataaatataattattcagaagctgaacttgaagacctattagcttcaatgaatgca

SEQ ID NO: 35269 - DNA, 930 bp, Staphylococcus haemolyticus
atggcacaaaaaccagtagataacattactcaaattattggaaatacaccggtagtaaaattaagaaacgttgtagatgaagatgcagcagatgtatacgtaaaattagaatatcaaaatccaggtggttcagtaaaagaccgtatcgcattagctatgatcgaaaaagctgaaaaagaagggaaaattaaaccaggtgatacgattgtagaaccaacaagtggtaacacaggtatcggtttagctttcgtatgtgcagctaaaggttataaagcagtatttacaatgcctgaaacaatgagttctgaacgtcgtaacttattaaaagcttatggtgcagaattagttttaacaccaggttcagaagctatgaaaggcgctattaaaaaagcaaaagaattaaaagaagagcatggttacttcgaaccacaacaattcgaaaacccagcaaaccctgaaattcatgcgttaactacaggcccagaattagtagaacaatttgaaggtaaacaaattgacgctttcttagcaggtgtaggtacaggcggtactttatctggtgtaggtaaagtcttaaaagaaaaatatcctaatgttgaaatcgttgctatagagcctgaagcatcaccagtattaagtggtggtgagccaggaccacataaattgcaaggtttaggtgcagggttcgtaccggatactttagatacaaatatttatgatagtatcatcaaagtagacaacgatacagctatggaaacatcacgtcgcgttgctaaagaagaaggtatcctagcaggtatttcttctggtgctgcaattcatgccgcaattcaaaaagctaaagaattaggtaaaggtaaaacagttgtaacagtattgccaagtaatggtgaacgttacttatcaacacctttatattcattcgatgat

SEQ ID NO: 35270 - DNA, 783 bp, Staphylococcus haemolyticus
atgactaaaacaaaaattatgggaatattgaatgtaacacctgattcattctctgatggtggtaagtataattcagtggataaagcggtcaaacgtgctaaagagatgatagaagaaggtgtggatatcattgatgtcggtggcatttctacacgaccaggattcacagaaatttcaacggaagaagagattgagcgtgtagttcctgtagtgaaagaacttgcaaaattaaatattcaactttcaatagatacatatcgtagtgaagtagcggaagcgtgcttaaaattgggtgcaacgatgatcaatgatcaatgggcagggttatatgaccctaaaatacttgatgttgtggcttcttacgatgctgaagttgtattaatgcataatggtgacggacatcgcgaacaaccagttgttgaagaaatgctattatcacttattactcaagcgaacaaagcagaaatggccggaattccaaaacataaaatatggctagaccctggaattggatttgccaaaacacgtgatgaagaaaatgaagtaatggcacgtttagatgaacttgtagcaactgagtatcctgttttattagcaacgagtcgaaaacgtttcattaaagaaatgattggtacagaaactaaagcgttagaacgtgatgaggcgacagctgctacaacagcttatggtataatgaaaggcgtcaaagctgtgcgtgtacatagtgtgcaattaaacgctcgattaggtcaaagtatggatttcttaaaggagaatgcaaga

SEQ ID NO: 35271 - DNA, 2141 bp, Staphylococcus haemolyticus
aaatcattaattttggcagagaaaccatccgtagctagagatatagctgaggcgatgaacataaagggaaaacgtaatggatatattgaaaacgaaaagtatgttgtcacatgggcattgggtcatttagtcactaatgcacaaccggaacactatgataaagcgtacaaggaatggaaacttgaagatttacctattattccgaagcgcatgcaaacagtagttattggtaaaacaagtaaacaatttaaaactgttaagtcactgattttagataaaaaagtgaaagaagttattatagcaactgatgctggaagagaaggggaactagttgcacggttaatattggataaagttcataataaaaagccaattaagcgcttgtggattagctccgtaactaaaaaagcaattcaagagggatttaaaaagcttaaagatggacgtgaatttcagcatctttatgaagcagcattagctagaagtgaagcggattggattgtgggtatcaatgcaacacgtgcattaacgacgaaatatgacgctcaattatcattgggtcgagttcaaacaccaacaatccaattagttaatgctaggcaacaagaaatcaatcattttaaagcgaagaaatattatacactatctactgaaataggtggattaactttccaattaagtacaaataaacagcacatgactaaggaagacgcaacgcaaattgctaatgaaataaaacatgtagaaggtaatgttgatagtgttgaaaagaaagttaaaaaaagtcatcctaagcctctgtataacttaactgatttgcaacaagaggcataccaacgatacaaaatggggcctaaggaaacacttaataccattcaaaatttatatgaacgccataaagttcttacctacccacgtacagattctaattatttaacagatgatatggtggatactattaaagaacgactttatgctttattagcaactgactataaatcacaagtcaaatcattgttggggcaatcttattcaagtaaaatgcgaatctttaataatcataaagtatcagatcatcacgcaattattccaacagaagtacgtccagatatgcaaagtttgagtaacagagaaagtaagatatatatgatggtagctgaaaggttcctagaatcattaatggcacctcatgaatatgaagcggttagagttaatgttactgttggccaacatatcttcgcttttaatgaaaaagtcacacgtcaactaggttataaagcacttaaaatgaacaatgataatgtggtaaagaaagttgcttttcaaaaaggagaaaagtatcaccttcaaagtttaaaagtaaatgaacatgaaacgacaccacctgattactttaacgaaggctcattgctaaaagccatggagaaccctcaaaattatatacaacttaaagaaaagaaacatgctaacacactgagacaaactggagggattggcacagttgctacaagagcggatataattgagaaactatttaatcttaatgcaatcgaatctagagatggcaaaatcaaagtaacatctaaaggaaagcaaattctggatttagcgcctcaagaattaacatctccattattaactgccgagtgggaagagaaactattattaatagaaaaaggaagatataattctcgacactttattgacgaaatgaaggcatttactcaatcgattgtaaatactattaaaaatagcgagcaaaagtataagcatgataatttaactactactgaatgtccgacatgcggaaaattcatgattaaagttaaaactaaaaatggacaaatgttagtatgtcaagatcccacatgtaaaactaaaaagaatgtccaacgtaagacaaatgcacgttgtccaaattgtaagaagaaaatgacattattcggacgtggaaaagatgcagtttatcgatgtgtctgtggtcatactgaaacacaagaacagatggataaacgattcaaaaataaatccagtgtaaagtatctaaaaaagaaatgaaaaagtatatgaataatgaggactcacttgagaataatccgtttaaagatgcattaaaaaacttgaaattatagttaaaaatc

SEQ ID NO: 35272 - DNA, 915 bp, Staphylococcus haemolyticus
atgactgaacagttgcacttaaagataccagcgtctactgctaatttaggcgttggtttcgattcgataggtatggctatagataaatatttacatctttatgtgaaacgaattgaagaggaagaatgggaatttacatatttaaattctgaattagattcacttcctaagaacaaagacaattatgtttttaaagtggctcagcaagtcgcatctaaatataatgtaaaattacctagtttaagtgttgaaatgcgaagtgatataccattagctagaggtttaggctcatcggcgtctgcattggtaggcgctttatacattgcaaattattttggcaatattcagctttctaaatatgaattacttcaattagctacagaaatagaaggtcatccagataatgttgcgcctacaatttatggtggcttattagcaggcttttataatccagatacaaaagaaacgaatgtagcacatattgatgtgccagatgttgatataattctaactatacctccatatgaattaaagactgaagattctcgtaacgttttacctgatcaattttctcataagcgcgcggttcaaagtagtgcaataagtaatacgatgctgtgtgcattaattcaacataattatggacttgctgggaaaatgatgtcacaggatggcttccatgagccatatcgccaacatttaatatctgaatttaaagaggttaaagctatagctcaacaatatgatgcatatgcgacagttattagtggtgcaggacctaccatattaacaatgagttctaaggagaagagtggtcaattagttagagcgttaagaaaagccgttacaacatgtcattcagaattagcaacaatcaatgaaattggcgttgttgaagaaattgtgtatccttca

SEQ ID NO: 35273 - DNA, 801 bp, Staphylococcus haemolyticus
atgagtaattataaaatgatcgttatggacatggacgatactttaattaatagtgagaataaagtaagtaaagaaactaaaaattacttgatagatattcaaaaccaaggctataaagtagtgttagcttcaggaagaccaactgaaggtatgctaccaattgcaaaagaattagaattagatgttcatgatagttatatcatcagttacaacggcggtaaaacaatcaaagtagcaacagaagaagtagaagtgagtcaaagtgtatctaagaagaattttgaccttattgtggatttttgtcgtgaacataactttttaatcctgacatatcaagatggtcatattatccatgatggtgatcatgaatatagagatattgaatcagaacttaccgggctacctatgaaacgtgtaaatgatattaaagcttatattaacgatagcgttccaaaagcgatgggcgttgattacgcaacaaatattgctaaagtacgtgatgatatgcatggaagttttaattcagaaattgatgtaacaacaagtaaaccattctttttagaatttatggcaaaggatgtttcaaaaggtaatgcgattaaagcattatgtgaaaaattaaatgtatcattatctgaagtaatttgttttggtgatagtttaaatgatcaatcaatgtttgaagtagtgggttgtgctatcgcgatgggaaatgcaaatgaggaactgaaggctattgcagacaaaataacgttagataacgattctaatggtattcccgcagctttaaaaacacttttg

SEQ ID NO: 35274 - DNA, 624 bp, Staphylococcus haemolyticus
aacttcatcaaacaagtatctgaagatggcggtagagtcttattcgtaggtactaaaaaacaagcacaagagtcagttaaagctgaagcagaacgtgctggacaattctacgttaaccaaagatggttaggcggaattttaactaactacaaaacaatttctaaacgtattaaacgtatttctgaaatcgaaaaaatggaagaagacggtttattcgacgttttacctaaaaaagaagttgttgaacttaaaaaagaatacgaccgtttaatcaaattcttaggcggtattcgtgatatgaaatctatgcctcaagcattattcgtagttgaccctcgtaaagagcgtaacgcgattgctgaagcacgtaaattaaatattccaatcgttggtattgttgacactaactgtgatccagatgaaattgattacgttatcccagcgaacgacgatgctattcgtgccgttaaattattaactggtaaaatggctgacgctgtcttagaaggtcaacaaggtgtttctaacgatgaagtagctgcagagcaaaacatcaatttagatgaaaaagaagaatctcaagaagcagaatcaactgaagaaaatactactgttgaatcaaac

SEQ ID NO: 35275 - DNA, 876 bp, Staphylococcus haemolyticus
atggcaatttcagcaaaacttgttaaagaattacgtgaaagaactggcgctggtatgatggattgtaaaaaagcgctaacagaaactgatggtgacatcgataaagcgattgattacttacgtgaaaaaggtatcgctaaagcagctaaaaaagcagaccgtatcgcagctgaaggtttagtacatgttgaagttaaaggaaatgaagctgctatcgttgaaatcaactctgaaactgacttcgtagctcgtaatgaaggcttccaagaattagttaaagaaattgctaatcaagttcttgatagcaaagctgaaacagtagatgctttattagaaactaaattatcaagtggtaaaacagttgatgaaagaatgaaagaagcaatctcaacaatcggtgaaaaattaagtatccgtcgtttcgaaatcagaacaaaatctgataacgatgcatttggtgcatacttacacatgggtggacgtatcggtgtgttaactgtagttgaaggttctactgatgaagaagctgctaaagatgttgctatgcacatcgcagctatcaatccaaaatatgtttcttcagaacaagttaaagaagaagaaatcaatcacgaaagagaagtattaaaacaacaagcattaaatgaaggtaaacctgaaaacatcgttgaaaaaatggttgaaggtcgtttacgtaaatatcttcaagaaatttgtgcagttgatcaaaacttcgttaaagatccagatcaaacagttgaagctttcttaaaatctaaaggtggtaaacttgttgacttcgttcgctatgaagtaggcgaaggtatggaaaaacgtgaagaaaacttcgcagatgaagttaaaggtcaaatgaaa

SEQ ID NO: 35276 - DNA, 792 bp, Staphylococcus haemolyticus
atgttagaaggcgcgtcagtgtcttctttacttgtatatattacatatttttacaatagagaggaaaaaacaatggcgcaaacttctaaatataaacgtgtagtattaaaacttagtggtgaagcactcgcaggagacaaaggttttggtattaatccaatcattattaaaagcgtggcacagcaagtagctgaagttgctaagatggattgcgaaatcgcagttatcgttggtggtggcaatatttggagaggtaaaactggtagtgatttaggtatggaccgtggtacagcagactacatgggtatgcttgctacagttatgaatgctcttgcactccaagatagcttagaacaattagaatgtgacacacgtgtgttgacatcaattgaaatgaaacaagttgctgaaccatatatccgtcgaagagctattagacatttagagaagaaacgtgttgttatttttgcagcaggaatcggtaatccatacttctctacagatacaactgcagcgttacgtgcagcagaagtcgaagccgatgttattttaatgggtaaaaataatgttgatggagtatattcagcagaccctaaagtagataagaatgcagttaaatatgaacacttgacgcacattcaaatgttacaagaagggttacaagtaatggactcaactgcatcatcattctgtatggataataatattcctttaaatgtattttcaattatggaagaaggcaatattaaacgtgcagttatgggtgaaaaaataggtacgttaataactaaa

SEQ ID NO: 35277 - DNA, 552 bp, Staphylococcus haemolyticus
atgagtgacataattcaagacactaaagctagaatgagcaaatctatcgataatttatcaagagaattagcaaatatcagtgctggaagagcaaattcaaatttattaagtggcgtaactgttgactattatggtgcaccaacaccagttcaacaattagcgagcatcaatgtgcctgaagcacgtttattagttatttctccttatgataaatcttcagtagctgatattgaaaaagcaatttatgcagcaaatttaggtgtaaatcctacaagtgatggtgaagttattcgtatcactgtcccagctttaacagaagaacgtcgtaaagaattagtgaaaaacgttaagaaaattggtgaagatgcgaaagtatctatccgtaacatccgtcgtgatattaatgatcaattgaaaaaagatgaaaaaaatggtgacattactgaagatgatttaagaagtcaaacagaagatgttcaaaaagctacagataattctattaaagaaattgatcaattagtagaggacaaagaaaaagacattatgtctgtt

SEQ ID NO: 35278 - DNA, 780 bp, Staphylococcus haemolyticus
atgaaagttagaactttaaccgcaattatagcattgttaatttttctacccattctattgatgggtggtacaacgttaatgttgtttgcgtacttactagctttaattgcattaaaagaacttttaaatatgaatatgattaaattaatttcagtccctggtattttcagtgctttagcattaataattattatgttacctcaatctgcaggtgactgggttagtgacattcaattaaaaagtttaatcgcaatgagttttattttactaagttacactgtactgtcaaaaaacagatttagttttatggatgctgctttctgtcttatgtcagttgcatatgtcggtattggatttatgtatttctatgcaacacgttcagatggcttacattacatactttatgcattcttagtggtgtggttaacagatacaggtgcttatattttcggtcgactaatgggtaaacataaattatggccagtaattagtccgaataaaactattgaaggttttattggcggattaatttgtagtttaattgtgccaattgttatgttgttcttcgttgatttcaacttaaatatttggttactattattagtaactatcatcttgagtatctttggtcaacttggagatttagttgaatcaggatttaaacgtcattttggtgttaaagattctggtagaattttaccggggcacggtggtatattagaccgatttgatagtttcatgtttgttttaccattactcaacattttattaatacaaatg

SEQ ID NO: 35279 - DNA, 720 bp, Staphylococcus haemolyticus
atgacaagcgaattaaaaaaaacaccattgtatcaaaattatgttgacagtggtgcaaaaatagtagaattcggtggatgggcaatgcctgttcaatttacaagtatcaaagaagaacataatgctgttagatatgaagtaggtatgttcgatgtaagccatatgggagaaatctctataaaaggcaatgatgcaagtaaatttgtccaatacttactttcaaacgatactaacaaccttactgatactaaagctcaatatactgctttatgtaacgaagaaggcggtattattgatgacttagtaacatacaaaattggcgacaatgattatctattaattgttaacgctgcaaatacagataaagattttgcttgggtacaaaaacatgcacctaaatttgatgttgaagtatcaaatgtatctaatcaattcggtcagttagctgttcaaggtcctaaagcaagagatttggtaagcgggttagttgatatagatgtaagtgaaatgaaaccatttgatttccaacaaaacgttactctatttggaaaaaatgttatcttatctcaatctggttatacaggtgaagacggatttgaaatctattgtgaagcaaaagacacagtagacatttggaacggcttcattgaacataatgtagttccatgcggtctcggtgcacgtgatacattaagattagaagctggcctaccattacat

SEQ ID NO: 35280 - DNA, 508 bp, Staphylococcus haemolyticus
tcaaagcgacctgtatctaatacttcgttaatatcaacttcggcgtttgttgttttaattagatgtgcatctggttgtaactttcttaagatattttctaattttgttaattctgcttcggttactaaatctgtcttatttagaatttctgatgcttatggtgcattacatgatccagaaggtttagatatcgattatttattagatcgtcgtgatagtttcggtacagttacaaacttattcgataacacaatttctaacaaagaattgttcgagttagattgtgacattctagtaccagctgcgatttctaaccaaatcactgaagataatgcgcatgatattaaagccgatattattgttgaagcggctaacggacctactacacctgaagctacacgaattttaactgaacgtggtatcttattggtaccagacgtactagcaagtgctggtggtgtaacagtttcatacttcgaatgggtgcaaaataaccaaggttattatt

SEQ ID NO: 35281 - DNA, 924 bp, Staphylococcus haemolyticus
gtggttatggctactaaacatgaagaaatcttacgtaaaccagattggttgaaaattaagcttaacacgaacgataactatattggcctcaagaagatgatgcgtgaaaagaacttacacactgtttgcgaagaagcaaagtgtccaaatatacatgaatgttggggtgctagacgtactgctacatttatgattttaggtgcagtatgtacaagagcatgtcgtttctgtgcagttaaaactggattacctaatgaactagacttaaatgaaccagaacgtgttgcagaatcagttgagttaatgaatttaaaacacgttgttatcactgcagttgcacgtgatgacttaagagatgcaggttctaacgtatatgctgaaacagtacgtaaagtacgtgaacgtaatccattcactacaattgaaatcttaccatcagacatgggtggtgactatgaagcacttgaaacattaatggcttctaaacctgatatcttaaaccataatatcgaaacagtacgtcgtttaacaccaagagttcgtgcacgtgcaacatatgaaagaacattagagttcttacgtcgttctaaagaattgcaaccagatattcctactaaatcaagcttaatggttggtttaggagaaacgattgaagagatttatgaaacaatggatgatcttcgtgcaaatgatgtagacattttaacaattggtcaatatttacaaccatcacgtaagcatttaaaagttgaaaaatactatacaccattagaatttggtaaattaagaaaagtagctatggacaaaggtttcaaacactgtgaagctggcccaatggtacgtagttcttatcatgccgacgaacaagtaaatgaagcggctaaagaaaaacaccgtttaggtgaagaaaaattacaacaaaat

SEQ ID NO: 35282 - DNA, 390 bp, Staphylococcus haemolyticus
atgattaagataggtcaacaatattttgaaatcattgaagaatatagatcatgctttgatgaagaattatttgcatcgagatattcagatatattagataagtatgattttattgtaggggattttggatatgatcaattacgattaaaaggtttctataaggatacgaataaaaaagctgaaatctcgaaacgtttttcgagtattcaagattatatattagaatattgcaatttcggttgtccttattttgttttacgtcatttatctaacaaagaggtacaacaattaaatcatgatgaagaggatgttattttgtctgattctgaagataaattgcatgatgttaaaattaaacctaccattcaggaagttaagcaccaagatgag

SEQ ID NO: 35283 - DNA, 1110 bp, Staphylococcus haemolyticus
gtgtctaataaagatatacgtgtagttgtaggtatgtctggcggtgttgacagttcagtcacagctcatgtgctaaaagaccaagggtatgatgttattggaatattcatgaaaaactgggatgacactgatgagaatggtgtttgtactgcaacagaagactataatgacgttatcgcagtatgtaatcaaattggtattccatactacgccgttaatttcgaacaagaatattgggataaagtctttacttatttcttagatgagtataaaaaaggtcgtacgcctaatccagatgtaatgtgtaataaagaaattaagtttaaagcttttctagagcatgcacttaaattgggcgcagattacgtagcaacaggacattacgcaagaatacgtcgtcatgatgatggccatgtagaaatgttacgaggtgtagataataataaagatcaaacttatttcttaaatcaactatctcaacaacaattgtctaaagttatgtttccaattggagatattgataaaaaagaagttcgtaaaatagcagaagagcaagatttagcaacagctaaaaagaaagactctacaggcatctgttttattggagagcgtaatttcaaaacattcttatcacaatatttaccagctcaatctggagaaatgcgtacgttgaatggcgataaaatgggaatgcatagcggattaatgtattacactattggtcaaagacatggacttggtatcggcggagatggtgatccatggttcgttgtaggtaaaaacttagaagacaatattttatacgttgaacagggtttccatcatgatgctctctatagtgactatttaatagcttccgatttttctttcgtaaatccagttgatttggacaacggatttgaatgtactgctaaatttagatatcgtcaaaaagatactaaggtttttgttcaacgtgaaagtcaaaatgctttacgcgttacatttgatgaaccagtacgtgctatcacacctggacaagccgttgtattttatgatgaggaagtttgtctaggtggagcaactatcgatgatgtatttaaaacaacaggtcagttaagttatgttgtt

SEQ ID NO: 35284 - DNA, 1351 bp, Staphylococcus haemolyticus
atgaaagtggcaaaattcggcggtagttcagtttcaaatgcaacacaaatcaaaaaagtcctagatatcgttaatagcgattcagatcgtaaaattattattgtttctgcaccaggcatatgacacaaagatgatgttaaaacgaccgatcttctagttcgattatatgaaaaagtaatgaataatcttaattatcaagataaaaggaaagaaattattcaacgttatgcagatattttacatgatcttgatatggatgattcattattaaaagtaattgatgacacattagaagagattatttcaactttaaaagataagcctttaagattatacgatgcaattctttcttgtggtgaaaattttaatgcgcaattaattgcatcttataatgattcgcaaggttttaaaacgacatacctttctccaaaagatgcaggtattctagttacagatttaccgcaacaagctcaaatcttggaagaagcttatgagaagattagtaaattaaaagatattgaaggtaaaattattatcccaggattctttggtgtttctaaaaatgattatgtcgttacgttcccaagaggtggttctgacattacaggtgcaatcattgctagaggaattagagcatctttatatgaaaacttcactgatgtatcaggtatttataaggcaaaccctaatataattaacaatccggatcttattgaagaaattacgtatcgtgaaatgcgagaactttcatatgctgggtttagcgtcttccatgatgaagcattgcagccactctataaacacagaattccagtggttattaaaaatactaatcgccctcaagataaaggtacatttatacgccatgatagagatgtaagtgataaaaatgtcattataggtataagttgtgataaaggatttagtgttattaatattaaaaaatatctaatgaatagacaggtcggcttcacacgtaaaattcttgaaatattagaagattacaatatttctttcgaccatatgccttcaggtattgatagtattagtatcatccttcgaacacatcaattaaaaggtaaagaaaaagatgtacttaacgctatacgtaaacgttgcgatgttgatgaattaagtattgaacacgacttagcgattttaatgattgttggtgaaggaatgaataaagcaatcggtactgctaacactattacccatgcgttagcagagtctaatatcaatttgaaaatgatcaaccaaggctcgtctgatatcaatgatgttcggtatttcaattgcagatgcagatcaggctgttttatctacatatgaatattgttatcatggcatt

SEQ ID NO: 35285 - DNA, 330 bp, Staphylococcus haemolyticus
atggtattaggtaactattacctaacattagaacgtaaagatgcaatgaacactggtactatctttaatgatacaaacgaagtgcttaaagcttatgcaaatggctatgttcatttacacactcgtattggtgtacatgcgaaatcatttaacaaccctacattcacagaagctcaaaacaacaaaattttagctacttcagtaggtaaagtgattttcaatgaaatcattcctgattcattcgctggaccccagaagcaggggcaacaaagggaaaaagtcaaacccagaaagatggaggctgggatttggagggcaggaagactgctc

SEQ ID NO: 35286 - DNA, 600 bp, Staphylococcus haemolyticus
atgatttcaatcgtaattgcagaagatcaaaatatgttgcgtaaagcaatgatacaattaattgaatttcacgacgatttaaaagtgatagatgattttgataatggtattgacgcattacaatctattaatagtcaacagcctgacattgctattttagatattgagataccaggaatgacgggtttagaagtattatcgcaattaagagaaaataaaattaatacaaaagtgattattgtcacgacttttaaaaggcctggttattttgaaagagctgttgcaaacgatgttgatgcctatgtgttaaaagaacgatcggtagatgatttagttgcaaccattcataaagttttaaatggcgaaaaagaatatagtacgtctttaatgacatctttgtttaaagaggctaatccattaacgcataaagaacaagtcgtgttacgtgaaataggagaaggattaagtaataaagaagtcgctgataaactctatctttcaaacggtactgtaagaaattacacttctaatataattgataaacttgaagcggagaatcgttttgatgcatggaaaaaagcaaatgaaaaaggttggata

SEQ ID NO: 35287 - DNA, 627 bp, Staphylococcus haemolyticus
atgaatcaatgggatcaatttttaacaccatataaacaagccgttgatgaattaaaggtaaaattaaaaggtttgcgtaagcaatatgaagttggagaagatgcttcacccattgaattcgttactggtcgagtaaaaccaattacgagtattattgataaggcgaataaaaggggtataccgtttgatagactacgtgaagagatgtacgacattgctggtcttagaatgatgtgtcaatttgtggacgatatcgatgtggttgttaatatgctgagacaacgacaagatttcaaagtgattgaggaacgtgactacatcaataacacaaaacaaagtggttatcgttcatatcatgtgattattgaatatccaattgaaacattaaacggtcagaaagccattttagcggaaatacaaatacgaacattagcaatgaatttctgggctacaattgaacatacattaagatataaatatgacggggattatccagcggaaattcagcatcgtcttgagcgtgcagctgaagcggcatatcttctagatgaagagatgtctgagattaaagatgaaattcaagaagcacagaaatattattctcaaaaacgtgcaaaaaaacatgac

SEQ ID NO: 35288 - DNA, 807 bp, Staphylococcus haemolyticus
atgcgttatactatcttgtctaaaggtgattcaaaatccaatgcattaaagcataaaatgataaatcatatgaaagatttccacatggtagaagatgccgttaatccagaaattgttatttcggtaggtggagatggaactttattacaagcctttcatcaatacagccacatgctttctcaagtggcatttgtaggtgtacatacaggacatttaggtttttatgctgattggttacctcatgaagttgagaaattaattattgaaattaataactctgaatttcaagtcattgaatatccattattagaaattattgtcagatacaatgataatggttatgaaacacgttatttagctttaaatgaagcaacaatgaaaacggaaaatggttcaacacttgtagttgatgtgggcattcgtggtaagcaatttgaacgttttagaggtgacggtttatgtatatcaaccccttcaggttcaactgcttataataaggcattaggtggagcactaatacatccctcacttgaagctatgcagattgcagaaatagcctctatcaataatagagtatttagaacagtgggttcaccacttgttttgccaaagcatcatacatgtttaatcacacctgttaatcacgataccattttaacaacaattgatcatgttagtttaaaacataaaaatgtcaatggtattcagtttagagtggctaatgagaaagtgcgttttgctagatttagacctttcccattttggaaaagagtacatgattcattcattgaaagtgaagatggacga

SEQ ID NO: 35289 - DNA, 861 bp, Staphylococcus haemolyticus
atgaaatttgaatatgtgatacagcataatgaaatgcttaagtcttttttgcagcgtcaccaatattctaaaaagacaattagcgccattaaacataatggcgctttaattattaataacagtcatgtaactgtcaggaaaatgatgatggcaggagataagttaactattatgttacctgatgaaacacctagctcatatttgattccatcacgtaatccaattgaaatattgtatgaagatgattatttaatcatcgtgtcaaaaccaaactatttaaatagcactccgtcaagagaacatccgcacgatagtttgatagaacgtgtactttattatttaaatgttggtcagttaatcgatacatcgatcgtaccgcatattgttacacgtttagatcgtaacactaaaggcattgtaatatttgctaagcatgggcatatccatcatttaatgacgacgagtgcaatagataaaaggtatatgtgtgtatgttatggtcaaatgcaattgagtggtgttatagaagaaccgattgctagagatagccagagtattattactaggaaagttgatgcttcaggaaaatacgcaaagacttcatatgaaacagtaatgaccaaacctgaagcgagtttatgtgaaattaaattacatactggaagaacgcatcaaatacgtgttcattttaattatttaggacatcctcttgttggtgatgatttatatggaggaagtcatcctaaaattcatacgcaatctttacaatgttataaagtgacattcatacatccaatttataatagagaaattgagatagaaatagattataaatggctacaaaatatttatgcagaatta

SEQ ID NO: 35290 - DNA, 1383 bp, Staphylococcus haemolyticus
ttgtcattagaaatagaaaataatgactataataaagatgaagtatataaccaaaatttgttagatgatcttttaaaacaagacgacattgatcgatttagagaagaatttctagcaatgcacgaatatgaacaaagtgaatattttgaagatacttcaaatgaaaatagacaaaagatatttgaatttttatcacctcaagaggtaggggaattctttgaacaattagaaattgatgatgaagcatatgaagacctttttgatacgatgaatgcacattatgctagtaaagttttagaagagatgtcttcagataatgctgtagatatattaaatgaactttcgaaacccaaagtagctagtttactgacattaatgaaccgtgaagatgctaatgaaattaagcatctattacattatgaagaagatacagccggcggtatcatgacgacggaatatatctctttagatgtcaatactccggttaaagaagcattaatgttagtaaaagaacaagcaccagatgccgaaacgatttatgttatttttgccgtaaacacggacggacaattagttggtgtattatctttaagagatttaatcgtggcagaaaatgatgcttacatcgaagatatcatgagtgaacgtgtcattagtgttaatgtcgcagatgaccaagaagatgtagctcaaaaaatgagagattatgactttattgcaatgccagtaatagattatcaacaacatttacttggtattattacaattgatgatattctagatgttatggatgaagaggccagtgaagactactctcgtttagctggggtatctgatattgactcaacaaatgattctgttgtgaaaactgctactaaacgattaccttggcttatcattcttacatttttaggaatgattaccgctactatattaggtagttttgaggcaacattatcacaagttgcattattagctgcatttatacctattattagtggtatgtccggaaattctggtacacaatcacttgcggtgtctgtacgtaatatctctactggggaaattgatgaacaaagtaaatttaaggttgcattaagagaagcgggaagtggcttgctttcaggattagtttgtgccactgttttatttattatcatcgttgttatatatagacaaccatttttagcactaatagttggaggcagtcttactattgcaatgacggttggtacgttagttggttctatgattccattatttatgaataaactgaatattgatccagccgtagccagcggaccatttattacaacaattaatgatattgtaagtatgttaatttactttggtttagcaacaacattcatgtcatatttaaca

SEQ ID NO: 35291 - DNA, 395 bp, Staphylococcus haemolyticus
gaattcagaaacgttaatgttgatgaatacgaataggtcaagaagtcacagttgatacttttgaagctggagacattattgatgtaacaggaacttcaaaaggtaaaggtttccaaggtgctattaaacgtcatggccaagctcgtggaccaatggctcacggctctcatttccatagagcgccaggttcagtaggtatggcttcagatgcttcaagagtattcaaaggccaaaaaatgcctggacgtatgggtggaaatacagttactgttcaaaacttagaagtagttcaagttgatacagaaaacaatgtaattttagtaaaaggtaacgtacctggacctaaaaaaggtttcgtagaaatccaaacttcaattaaaaaaggtaataaataa

SEQ ID NO: 35292 - DNA, 621 bp, Staphylococcus haemolyticus
atggcaaattatgatgtattaaaagtagacggatctaaatcaggttctgttgaattaagcgattcagtattcgctattgaaccaaacaacagtgttcttttcgaagcaattaacttacaacgtgcttcattacgtcaaggaactcacgcagttaaaaatcgttcagctgtacgtggtggcggacgtaaaccatggagacaaaaaggtacaggacgtgcgcgtcaaggtacaattcgtgctccacaatggcgtggtggtggtatcgtattcggaccaacaccaagaagctatgcatacaaaatgcctaagaaaatgcgtcgtttagcattacgttctgcattatctttcaaagttaaagaaaacaacttcactatcgttgataattttggttttgaagctccaaaaacaaaagaattcaaaaatgtattaactacactcgaacaacctaaaaaagtgttagtagttactgatagcgaagacgtaaacgttgaattatctgcacgtaacattcctggcgtacaagttagtacagctcaaggattaaacgttttagatattactagcgctgacagtgttattattactgaatcagctgcgaaaaaagttgaggaggtgctcgga

SEQ ID NO: 35293 - DNA, 273 bp, Staphylococcus haemolyticus
atggaagcaagagatgttcttaagcgccccgtaatcactgaaaaatcttctgaagcaatggctgaagataaatatacttttgacgtagatactcgtgctaataaaacacaagttaaaattgcagttgaagaaattttcgacgttaaagttgcaaatgtaaacatcatcaactacaaacctaagaaaaaacgtatgggccgttaccaaggctatacaaacaaaagaagaaaagcaattgttactttaaaagaaggttcaattgacttattcaac

SEQ ID NO: 35294 - DNA, 831 bp, Staphylococcus haemolyticus
atggctcttaaaaaatataagccaataacaaatggtcgtcgtaatatgactagtttagatttcgcagaaatcacgaaatctactcctgaaaagtcattattacaaccgctaccgaaaaaagcgggtcgtaacaaccaaggtaaattgacagttcgtcatcatggtggaggacataaacgtcaataccgcgttatcgatttcaaacgtaataaagatggaatcactgcaaaagttgattcaatccaatatgatccaaaccgttcagctaacattgctttattagtatatgctgatggtgaaaaacgatatattattgctccaaaaggattacaagtaggccaagtagttgagagtggtgcagatgctgacattaaagttggtaacgcattaccattacaaaacattccagttggtactgtaattcataatatcgaattaaaacctggtaaaggtggacaattagctcgttcagcgggtgcaagttcacaagtacttggtaaagaaggtaaatacgtactaatcagattacgttctggtgaagttcgtatgatcttatcaacttgccgtgctacaattggtcaagttggtaacttacaacatgaattagttaatgttggtaaagcaggacgttctagatggaaaggcatccgtcctacagttcgtggttcagtaatgaaccctaacgatcacccacacggtggtggtgaaggtcgtgcacctatcggtagaccatctccaatgtcaccatggggtaaaccaacgcttggtaagaaaactcgtcgtggtaaaaaatcatcagacaaacttatcgttcgtggacgtaagaaaaaa

SEQ ID NO: 35295 - DNA, 276 bp, Staphylococcus haemolyticus
atggctcgtagtattaaaaaaggacctttcgtcgatgatcatttaatgaaaaaagtagaagctcaagacggaagtgaaaagaaacaagtaatcaaaacatggtctcgtcgttctacaattttcccaaatttcatcggtcatacttttgcagtatacgatggtcgtaaacatgtacctgtttatgtaactgaagatatggtaggtcacaaattaggtgaatttgctccaactcgtacatttaaaggacatgctgcagacgataaaaaaactagaaga

SEQ ID NO: 35296 - DNA, 351 bp, Staphylococcus haemolyticus
atggaagcaaaagcggttgctagaacaatcagaatcgcacctcgtaaagtaagattagttcttgacttaattagaggtaaaaatgctggagaagctattgctattttaaaattaactaacaaagcttcatcaccagtaattgaaaaagtattaatgtccgctttagcaaatgctgaacataactatgacatgaacactgatgaattagttgttaaagaagcatatgcaaatgaaggaccaactttaaaacgtttccgtccacgtgcacaaggtcgtgcaagtgctatcaataaacgtacaagccacattacaatcgtcgtaagtgacggtaaagaagaagctaaagaagct

SEQ ID NO: 35297 - DNA, 651 bp, Staphylococcus haemolyticus
gtgggtcaaaaaattaatcctatcggacttcgtgtcggaatcatccgtgactgggaagctaaatggtatgctgaaaaagatttcgcttcacttttacacgaagatttaagaatccgtaaattcattgataacgaattaaaagaagcatcagtttctcacgttgaaatcgaacgtgctgctaaccgtattaacattgctattcacactggtaaaccaggtatggtaattggtaaaggcggatcagaaattgaaaaacttcgtaataaattaaacaacttaactgataaaaaagtacacatcaacgttatcgaaatcaaaaaaattgatatcgatgctcgtttagttgctgagaatattgcacgtcaattagaaaaccgtgcttcattccgtcgtgtacaaaaacaagctatttcaagagctatgaaacttggtgctaaaggtatcaaaactcaagtatcaggtcgtttaggcggagctgacattgctcgtgctgaacaatattcagaaggaactgttccacttcatactttacgtgctgacatcgattatgcacatgctgaagcagacactacttacggtaaattaggtgttaaagtatggatttatcgtggtgaagttcttcctactaagaatactagtgaaggaggaaaa

SEQ ID NO: 35298 - DNA, 432 bp, Staphylococcus haemolyticus
atgttactaccaaaacgtgttaaatatcgtcgtcaacatcgtcctaaaacaactggtcgttcaaaaggcggtaattatgtaacatttggtgagtatggattacaagctactacaacatcttggatcacatctcgtcaaatcgaatctgctcgtattgctatgacacgttacatgaaacgtggcgggaaagtttggattaaaatcttccctcatacaccatatactaaaaaacctttagaagtacgtatgggtgctggtaaaggtgccgttgaaggctggatcgctgttgtaaaaccaggtagaattttattcgaggttgcaggcgtatcagaagaagttgctcgtgaagcattacgtttagcaagtcacaaacttccagtgaaaactaagtttgtaaaacgtgaagaattgggtggtgaaacaaatgaaagc

SEQ ID NO: 35299 - DNA, 261 bp, Staphylococcus haemolyticus
gtgagtgaaagaaacgatcgtaaagtttatgtaggtaaagttgtttcagacaaaatggacaaaactatcactgtattagttgaaacttacaaaacacacaaattatacggtaaacgtgtaaaatactctaaaaaatacaaaactcatgatgaaaacaattcagctaaattaggagacattgttaaaattcaagaaactcgtcctttatcagcatcaaaacgttttcgtttagtagaaattgttgaagagtcagtaattatt

SEQ ID NO: 35300 - DNA, 429 bp, Staphylococcus haemolyticus
atgatccaacaagaaactcgtttaaaagtagcagacaactctggtgctcgtgaagttcttacaattaaagtattaggtggatctggtcgcaaaacagcgaacatcggcgatgttatcgtatgtactgttaaaaatgcaacaccaggtggcgttgttaaaaaaggtgacgtagtcaaagctgttgtcgttagaactaaatcaggcgttcgtcgtaatgatggttcttatatcaagtttgatgaaaatgcatgtgtcattattcgtgatgacaaaggcccacgtggtactcgtatctttggtcctgttgctcgtgaattacgtgaaggtaacttcatgaaaatcgtttcattagcaccagaagtacttcaatttatacaaaccatatcatttaaggaggtgcccacatgcatatcaaaaaaggtgactacg

SEQ ID NO: 35301 - DNA, 537 bp, Staphylococcus haemolyticus
ttgaaccgtttaaaagaaagatacaatactgaagttactgaaaacttagtaaaaaaattcaactatagttctgtaatggaagtaccaaaaatcgaaaagatcgttgtaaatatgggtgtaggtgatgcagttcaaaactctaaagtgttagataacgctgtagaagaattagaattaatcactggtcaaaaaccattagtaacaaaagcaaaaaaatcagttgcaacattccgtttacgtgaaggtatgccaatcggtgcgaaagttacacttcgcggagaaagaatgtatgaattcttagataaattaatcgcagtttcattacctcgtgtacgtgacttccaaggtgtttctaaaacagcattcgatggtcgtggtaactacactttaggaattaaagaacaattaattttcccagaaatcgactatgataaagtaagtaaagtaagaggaatggatattgttatcgtaacaactgctaacactgacgaggaagctcgtgaattgttaacaaacttcggtatgccatttcgtaaa

SEQ ID NO: 35302 - DNA, 2628 bp, Staphylococcus haemolyticus
atgaatatggagcctaagtataatccacgcgaagttgaggctgggcgttatgaagaatgggtaaagaatgattatttcaaaccctcagaagacaagtcaaaagagacatatacaattgtaattccaccacccaatgtgacaggaaaattacaccttggacatgcatgggatacaactttacaagatattattacgcgtatgaaacgtatgcaagggtatgacacactatatctacctggtatggaccatgcaggtattgctactcaagcaaaggtagatgctaaattaaaagaacaaggtatttctcgtcatgatatcggacgcgagaagttcctagaacacgcttggtcatggaaagaagaatatgcgtcatttatacgccaacaatgggctaaattaggtttggggctagattatagcagagagcgttttactctagatgatgggttaagtaaggcagtaagaaaagtcttcgttgacttatacaataaaggcataatttatcgtggtgaacgtattattaactgggatcctgaagctagaacggctttatcagatattgaagtaattcatgaggatgtgcaaggtcatttctatcattttaaatatccttacgctgatggtgatggctatattgaaattgcgacaacaagacctgagacaatgttaggagatactgccatagttgttaatcctaatgatgatcgctacaaagatgtaattggtaagaaagttatattaccaattgttggtcgagagttaccgatattagctgatgagtatgttgatattgattttggtagtggtgctatgaaggtaacgcctgcacatgatccaaatgattttgagattggtcaacgacatagtttagagaacattattgtcatggatgaaaatggtaaaatgaacgataaagctgataaatatgctggattagatcgatttgaatgtcgtaaacaattagttgaagatttaaaagcgcaagatctagtcattaagattgaagaacatgttcattcagttggtcattctgaacgctcaggtgctgttgttgaaccatacttatcaacgcaatggtttgtaaaaatgaaaccgttagcgcaacgttcacttgataatcaaaaaacagatgatcgcatcgatttttatccaccacgttttgagaacactttcaatcgttggatggaagaaattagagactggacaatttctagacaattatggtggggtcatcaaatacctgcttggtaccataaagaaactggtgaaatttatgttggtgaagaagcgcctaaagatattgataattgggtgcaagatgaagatgttctagatacttggttctctagtgcattgtggccattttcaactttaggttggccgaatattgatgcagatgattttaaacgttactatccaactaatgcacttgttactggatatgacattattttcttctgggttgcaagaatgatattccaaggtcttgaattcactgacagaagaccattcaatgatgttttacttcatggtttagttcgagctgaagacggtcggaaaatgagtaaatctttaggtaatggtgtagatcctatggatgtaattgaagaatatggagcagatagcttaagatatttcttggcaacaggatcatcacctggtcatgacttacgttattctactgagaaagtagagtctgtttggaatttcattaataaaatatggaacggtgcgcgttttagcttaatgaatataggtgatgaatttaaatttgaggatatcgatttaactggaaacctttctttagcggataaatggatcttaactcgtttgaatgagacgattgaaacagttactaatttaagtgaaaagtatgagtttggtgaagttggtcgtgcgctatataatttcatttgggacgagttctgtgattggtatattgaaatgagtaaaataccaatgaacggtgaagatgaagcacaaaaacaaacgacacggtctgttttaagttatacactagatcaaattatgagaatgttacatccatttatgccttttgttactgagaagatatggcaaagtcttccacatgaaggagaaacaattgtaaaagcatcatggccaacggttagggaagagcttgtatttgaagaaagtaagcaaacgatgcaacaattagttgaaattatcaaatctgtaagacaatctcgtgttgaagtaaatacgccactttctaaagctatacctatttacattcaagccaaagatgaaaatattaaagcaacactaattgaaaatgaagattatattcataaattctgtaatcctagtgatttaacgattgatacacatattgatattcctgaaaaagcaatgactgcagtggtaatcgctggtaaagttgtattacctttagaaggtttaattgatatggataaagaaattgcacgcttagaaaaagaattagataaattacaaaaagaacttgatcgtgttgataaaaaattatctaatgaaaattttgttaataaagcgcctgaaaaagttatcaacgaagaaaaagaaaaacaacaacgttatcaagaaaaatatgatggtgtgaaaaacagaattgaacaattaaaagca

SEQ ID NO: 35303 - DNA, 407 bp, Staphylococcus haemolyticus
gtcgctcatcagtatcaagatcaacatccacagagtatattaagctccgtgtattacgaacgtatcagacacggcggaagacatgtaagtaggatttaaaactgcaatgacacgtgtgctcatcgattatgcaataagagtccctgaattgcctgatacagacatatatttagacggtcatgatatccgtgatggtatcactgcagactatacagttcgcgttcctgatgaactgttgcaatttgaacggcacactaattctacgttgggtacttcagaagctcgtagtgctggggattcagtagtttctgataaattggcatatgatcgggatgataaggggcaactttctagatctctagtgtagcaagcaattaaagcacggcaagctagggaagctgcgcgta

SEQ ID NO: 35304 - DNA, 1598 bp, Staphylococcus haemolyticus
atgaacgctattaaacgttttgggagtgcaatgattgttcccgtattaatggttgcattctttgggatagtattaggttttgcaacattattcaaaaatcctaccatcatgggtggattagcaaatgatcatacattttggtttaaattttggtctgtaattgaatcaggtggttgggttatcttcaatcatatggaaatcgtatttgtggttggattgcctttatctctagctaagaaggcccctggtcatgcggctttagctgcattgatgggctatttaatgtttaatacctttatcaacgctattttaacgcaatggccacatacatttggtgctaatttagaaaaaggtgtagaaaatgtaactggattaaaagcgattgctggtattgaaactttagatactaatattttaggtggtatcattatttctgccattgtgacatggatacataatcgtttttatagtaaaaaattaccagagatgttaggtgtattccaaggtttaacatttgttgtaacaatttcattctttgttatgttgccaatagctgcaattacttgtgtcgtttggccaacaatacaaaatggtattgaatcaatgcaacatttcattatcgcatcaggctacatcggtgtttggttgtatcatttcttagaacgcgtgttaataccgactggtttacatcactttatctatgcaccaattgaagtaggtccggttgttgcaaaagacggacttaaagcagaatggtttagacatttaaatgaatttgctgaaagtagtaaaccgttaaaagaacaattccattacggtttcatgttacaaggtaacggtaaagtgtttggtgctatcggtatcgcattagcaatgtattctacaactcctaaagctaatcgtaaaaaagttgctgcgttattagtaccagctacattaactgcgtagttgttggtattactgaacctttagaatttacattcttatttatcgcaccttacttatttgttatacatgcattattagcagcgacaatggatacaattatgtatggtttcggtgttgttggtaacatgggcggtggattacttgatttcatcgcgacgaactggattccgttaggacaaaatcactggctaacttatgtagctcaagttgttataggattgattttctcaggtatctatttcgttgtattcagatatttaatcttgaaatttgatattccattacctggacgtcgagctgaagaagaagttaaattattctctaaaaaagattataaagagaaaaaaggcgatggaagtactgacaattctggattccaacctagcaatgaatatgaagcgaaagcacattattatttagaaggattaggcggaaaagaaaatattaaagacgttactaattgtacaacacgtttacgcctaacagttaatgatgaaacaaaagttgaagatagtggatatttcactcatgaacaaatgtcgcacggattagttaaaagcggtaaaaatgtacaagtcgttgttggaatgactgtgccccaagtacgtgaagcatttgaacatttagtttatgatgatagtgataaaaaa

SEQ ID NO: 35305 - DNA, 291 bp, Staphylococcus haemolyticus
ttgaataatcatgaaaatgcacatcattccgatcaaattaaaatgaatttaaaatcaagacttaatcgtattgaagggcaagttagagcgattaatcgcatgattgaagaagatgtatactgtgatgacgtgctaactcaaattagagctacaagatcagctttaaatagtgtggccactaagttgctagatcatcatatgaaaagctgtatcatggataaagtgaataacggcgctcaagaagaagcgatggaagaattgttagtgacttttcaaaaattaatgaaagat

SEQ ID NO: 35306 - DNA, 687 bp, Staphylococcus haemolyticus
atgacattttcaactgagattaaagaggctgcgcaacctattattgaagaaatttataatgatggttttatacaagacctattaaaaggggatttagatgctcaagcagtacgtcaatatttaagagcagatgcatcatatttgaaagaatttacaaatttatatgcacttcttatcccaaaagcgccatcaatgaaggatgttaaatttttagttgaacaaattgaatttatgcttgatggtgaggttgaggcacatgaaatcctagcagattatatcaacgaaccttatgaagaaattgttaaagaaaaagtatggccacctagtggagatcattatattaaacatatgtattatcacgcatatgcacatgaaaatgctgcgtatactatagctgcaatggcaccttgtccttatgtatatgaagtagtagctaaaatggcattagatgatcaaaatctaaatagagattcagtaacatcgaaatggtttgatttctatagcacagaaatgcgaccattaatcgaagtatttgacaatttattagatgaattaacagcaaattgtacagaacaagagaaaaaagatattaaagaaagtttcttacaaagtactatacatgaacgtaatttctttaatatggcttatattaatgaacagtggaacttcggaggcgacaaaaatgca

SEQ ID NO: 35307 - DNA, 439 bp, Staphylococcus haemolyticus
atgatgaataacttagaacgtttgagacaagagaaccctctagttgtatgttatacaaatgatgtcgtgaagaattttacagccaatggtttactcagtatcggcgcgagcccagcaatgagtgaagcacctgaagaagcgaaggaattttataaagtcgctggtgcattacttattaatattggcacgatgactaaagcaaatgaacaagacatattggaaattggtaaaattgcgaatcaacaaggaacaccgattgtatttgatccagtggcagttggtgcatcttcatatcgtaaagcattttgccaaaaattcttatcagaagtgaaagtatcagtaattaaaggaaatgcctcagaaattttaacgttagtagatgcgactacaacgatgaaaggtacagatggtaaaactgacttagatgttgttgaaatag

SEQ ID NO: 35308 - DNA, 339 bp, Staphylococcus haemolyticus
gtgaaaaataaatttttaatatgtgatgaatgtcaggcggtaaatatcaaaactttgaaaagaaaattagaaaaattagatccagaagcagaaattgaaatcggctgtcaatcttattgtggccctggacgtcgaaaaacgtttgccttcgtcaataatcgaccacttgctgcgcttactgaagacgaattgttagaaaaagtcacagctcagctaaaaaaaccaagagatccggaagaagaagaacgattaagaaagcgtaatgaggaacgtaaacgccgtaaagaagaacaagatcgaaagctaaaagagaaattagctaaacgtaaggcgataaaa

SEQ ID NO: 35309 - DNA, 933 bp, Staphylococcus haemolyticus
atggcagatttagtacaattaggtaaatcagatgttcacgtatttccaattgcattaggtacaaacgcagtaggtggtcacaatttatacccaaatttagatgaagaacagggtaaagatgttgtacgtaaagcaattgacaacggtattacgttactagatacagcttatatttatggacctgaacgttctgaagaattagttggccaagtagttcaagagtatcctcgtgaacaagttcaaattgcaacgaaaggttcacatgttattaaagaaaatgatgaagtcgtacaaaataatgatccagattatttaaaacagcaagttgagaatagcttgaaacgccttcaagtagattatattgatttatactacattcattttccagatgaagatacaccgaaagataaagcagttgctgcattaaaagaacttaaagatgaaggcaagattaaagcgataggcgtgtctaacttctcattagaacaacttaaggaagcgaataaagatggttatgtcgatgtagtgcaattagaatacaacttattacatcgtgaaaatgaagaagtcatgaaatatgcagctgaaaataatattacatttataccatacttcccattagcatcaggcatcttagctggtaagtatgaagaaaatcaaacgtttgatgatcatcgtgcacctcgccgtgatttccaaccggaagtatttaatgataatgttcgacgagtgaaacaattacaaggcattgcggaagctcataacacatctattgctaatgtggttctagcattctatttaacgcgtccagcgttagatgtggtgattcctggtgcgaaacgtgctgaacaagttgtgcaaaatattgaagcggcaaatattcaattaacagatgatgaactgaacaaaattgatgaattatttccgattgaa

SEQ ID NO: 35310 - DNA, 534 bp, Staphylococcus haemolyticus
atgattacagttttatttggaggaagtcgtccagaggggaatacagcacaacttactaagtcagcagttgagggattagattataaatggattgacttaaccgattatcaattcaatcctgtaagagactttcgtcacgagaatagagatattacaagctataacgatgattataaacaggtcattgatcaagttttagaaagtgatacggtcatatttgcatcaccggtgtattggtatagtgtttctgcatctttaaaggcatttattgatcattggtctgaaactttgatagacgataactacaaagactttaaagaaaaaatggcaaagaaagattttcgacttattttagttggtggagactgccctaaagtgaaagctaagccatgtattactcaaatgaaatatacattagattttattggtgctgaacttaatggatatataattggtaccgctgaacgtccaggtgatatttcgaaagatacgtttgcactagaaagagcaaaagaatggaatgaaacattagcg

SEQ ID NO: 35311 - DNA, 1410 bp, Staphylococcus haemolyticus
atgaggctcttgtttaacttattacgtatttgtttaacaatgggactactggcctttttgttttatgagcttttttatctggcaacaataggaaggagcaatataatgacgctaagtattaagaacttaacaaaaatttactctggcaataaaaaagcagtagataatatttcattagatattgaatctggtgaatttattgcctttattgggacaagcggtagcggtaaaacgacagctttacgaatgattaaccgaatgattgaagccactgacggcacaattgaaatgaatgggaagaatgttcgaaatatgaatccagttgaattacgtagaagtattggctatgttattcaacaaattggattgatgcctcatatgaccattagagaaaatattgtcttggtaccaaagttgcttaaatggtctaaagagaagaaggatgctaaagcaaaagaattaatcaagttagtagacttacctgaagactatttagatcgttatccatctgaattatcaggtggtcaacaacaacgtattggtgtcgtacgtgcattagctgcagagcaagatatcatcttaatggatgaaccttttggtgcattggatccaattacgagagatactttacaggatttagttaaagatcttcaaaagaaattagggaaaacatttattttcgtgacacatgatatggacgaagcgataaagctcgcagaccgtatttgtatcatgtctaaagggaaagttgttcaatacgatacaccggataatattcttagaaatcctgccaatgattttgttagagaatttattggacagaatagattgattcaagatcgtccgaatatgagaacggttgaagatgcgatgattaagcctgttacggtaaatgccaacgacactcttaatgatgcagtcaatgttatgcgacaaagacgtgttgacacaatatttgtagtcaacaatcatcatcatttacttggattcctagatattgaagatattaaccaagggttacgtcaacgtaaggaattaattgatacaatgcaacgagatgtttacaaagtccatattgattctaaattacaagactccgtacgtacgatattaaagagaaatgttagaaacgtaccagtcgttgataatgacaatgcacttataggtctaattacacgttctaatcttgttgacattgtctatgactctatttggggtgaagaagatgatgagatgacattgtctgattcgcacatgaatgatgtcgaacgtgaaaatgagttaggtaacattgaaaaaaatgaacatgccgaagaccgtcataatgacgctacatcgaaacaaaaagatgttacagatagattagacacacatgatgtgaaggattctgaccattcgggagttgatcgt

SEQ ID NO: 35312 - DNA, 1257 bp, Staphylococcus haemolyticus
atggaaaagatgaatatcactaaccaagagcatgatgcgtttgtgaaagctcatcctaatggtgatttattacagttaacaaaatgggcagaaactaaacgcctaacaggatggtattcaaagcgtgtggcagtgggtgaagatggtgagattaaaggtgtaggtcaattattatttaaaaagatacctaaactaccattcacgctatgttacgtttctcgtggtttcgtaacggattatagtgataaagctgcattggaacagttattagaagaaactaaaaaagtagctaaagcagaaaaagcctatgctattaaaattgatccagatgtagaagtagataaaggtatagatgcacttaaaaatttaaatgcgctaggttttaaacataaaggtttcaaagaagggctgtctaaagactatattcaaccacgtatgacaatgattacgccaatagataaatcagatgaggaaatattccaaagttttgagcgccgtaatcgttctaaagtaagactatcattgaaacgtggtactaaagttgaacgttcaaatcgagaagggcttaaaaatttcgctgaattaatgaaaataacaggagaacgtgacggctttttaacacgtgatttaagctattttcaaaatatttatgactcacttcatgaagatggcgatgctgaattattccttgtgaaattagaacctaaacctgtcttagatgatattgataatgaacttaaggaacttgaaagcgaaaaaacgcaacttcaaaataaatacgagagaaagcaagataaaaagactaaaaataaattaaacgatgtcgaagctaaaattcaaaaaaccattgaaagaaaagacgacatgactgacttattagcaaaacatcctaatggaatttatttatctggtgcattgttaatgtttgcaggatctaaatcatattacttatatggtgcttcatcgaatgattaccgtgacttcttgcctaaccatcatatgcaatatgagatgatgaagtttgcgcgtgaacatggcgctaaaacatacgattttggtggaactgataataatccagataaagactctgaacactacggtttatgggcgtttaaacgtgtctggggcacttatttaagtgaaaagataggggaatttgactatgtattaaatcaacccctttatcaattaattgaacaggttaaaccgcgattaacaaaagctaaaattaaaatttctcgtaaattaaaaggcaaa

SEQ ID NO: 35313 - DNA, 1686 bp, Staphylococcus haemolyticus
gtgataaagaggatgttaacgttctcgttgggaaataaattcgcaattttcttaatggttgttttagtaatattaggaggcgtatattctagtgctaaattaaaattagaattacttccagatgttgaaaatccagttatatctgtacaaacaacaatgccaggtgctacacctcaaacaacccaagatgagattagttctaaaattgataaccaagtacgatctttagcatatgttaaaagtgtagagacacagtcgatacaaaatgcatcaattgtaactgttgaatataataatggtacagacatggataaagctgaagaagtattaaagaaagaaatagataaattagactttaaagatggggttagtgagccagaattaacacgaaattccatggatgcattcccaatcgtagcctattcatttactaataaaaatgatgacttaaaaaccacaacaaaagaaattaatgaccaacttattcctaaattacaaacaattgatggcgttcagaatgctcaacttaatggtcaaacaacgagacaagttacattgaaatttaaacaaaacaaattagatgaagcgggactaacagctgatgacgtagaaaattacataaaaacagcaactcgagaaacacctcttggattatttcaatttggaaaaaatgaaaaatctttagtagttgatggtcaatttaaatctgttaaagcactcaaagacttagaaatcccattaacaataagtggtcagagtcaatcaggtagtagtgatgatcaatcaggtagtgagatgagtagtactggagataatgcatcatcttcaagttctcaatctcaaatgagtaatcaatctcaagcttcaaatggagaaatgccaagcgtaccattaagtgaattagcaacaataactgtaggagatgaacgtgagtcaatttctaagacgaacggaaaagatgcagttaatgtacaaattatgaaagcacaagatgctaacacagttcaagttgctaaagaagctcaaaataaaattgatgaatttgtaaaaaataatgatgacataaaagctacaaaaaccatggatactgctaaaccaattgaagattcattatatacaatggttgaaaaagcagctttaggaacgattgtcgcaattatagttatcttattattcttgagaaatattagaaccacggctatctcaattgtttccattccgctttcgattttaatagcacttatcgcattaaaattaagtgatgtatcgctaaacattttgacattaggtgcattaacaattgctatcagtcgtgtgatagatgactcaattgttgttgtagagaatatttatcgaagattatcagatcctaaagaagaattgtctggcaacaatttagtcattagtgcaacaagagaagtagttaaaccgattctatcttctacaattgttactataatcgtgttcttaccactagcatttgtgtcagggtcagttggtgaaatgtttagacctttcgcactagcaattgcatttagtttattagcatctttacttgtatccattactgtggtgccagcattggcttctacattttttaaaaaaggtattaagttaaaacgcaattcacaacatcagaatgatagaggactaggtgttgtaagcaagagttatcgtaaaatttta

SEQ ID NO: 35314 - DNA, 606 bp, Staphylococcus haemolyticus
atgatgatagtagtcatgctcatattaagctatctcattggtgctattcctaatggatatgttataggaaagctttttttcaaaaaagatattagacaatatggcagtggtaatactggcgcaactaatagtttccgagttctaggtaaaccagcaggatttattgtaacctttttagatatatttaaaggatttattactgtgttctttcctatttggtttccagtgcatgcagatggaccgcttagcacgttcttcacacatgggttaattgtaggtttattcgcaatacttggccatgtatatccaatatatcttagatttaagggtggaaaagctgtagctacaagtgctggtgttgtcttaggcgtaaatcctatcttgctacttatattggcaattatattctttggagtattatatatatttaaatatgtttcactctcaagtattattgcagcaatttgttgcgttattggctctctcatcatacaagattacatattatttgggatgagcttactcgtttcaataattttaatagtaagacatcgcaccaatattgtaagaatttttaaaggcgaagagccaaaaataaaatggatg

SEQ ID NO: 35315 - DNA, 1998 bp, Staphylococcus haemolyticus
ttggcaacaaaaaattcaaatcattactcagatgattctattcaagtattagagggattggaagctgtaagaaagcgtccaggtatgtatataggatctactgataaacgaggactacatcatttagtgtatgaagtagtagataactccgtagatgaagttttaaacggatatggtaatgaaataaatgtaacaataaatcaagataatagtatttctattgaagataatggtcgtggtatgccttcaggaatgcatgcatcaggtaaacctactgtagaagttattttcacagtattgcacgccggtggtaaattcggccaaggcggatataaaacatcaggtggattgcatggggttggtgcatctgtagttaacgcattaagcgaatggttagaagtagaaatacatagagacgggaatatttacaagcaaagctttaaaaatggtggagtgccagcatctggattagttaaatcaggtaaaacaaaaaaaacaggaactaaagttacatttaaaccagatcccgaaatatttaaagctacaactacatttaattttgaaaccttaagtgagaggttacaagaatctgccttcctattaaagaatcttaaaataacattgaaagatttacgtaatggcaaagaacgtgaagatgtttatcattacgaagaggggattaaagagtttgttagttatgtaaatgaaggcaaagaggttcttcacgacgtaactatgtttacaggtgcttcaaatggtatagaagtagatgtcgcttttcaatataatgatcaatattcagagagtatattaagcttcgtaaataacgtacgtaccaaagacggcggaacacatgaagtaggatttaaaactgcaatgacacgtgtgttcaacgattacgcaagaagaatcaatgaattgaaagaaaaagacaaaaatttagacggtaatgatatccgtgaaggtttaactgcagttatatcagttcgcatacctgaagaattgttacaatttgaagggcaaactaaatctaaattgggtacttcagaagctcgtagtgctgttgattcagtagtttctgataaattgccattttatttagaagaaaaaggtcaactttctaaatctctagtgaagaaagcaattaaagcacaacaagctagggaagctgcgcgtaaagcacgtgaagatgcacgttcaggtaagaagaataaacgtaaagacactttattatcaggaaagttaacacctgctcaaagtaaaaatactgagaaaaatgaattatatctagtcgaaggtgactcagcaggcggttcagctaaacttggaagagatagaaaattccaagcgattttacctttaagaggtaaagttattaatactgaaaaagcaagacttgaagatatttttaaaaatgaagaaattaatactatcattcatacaattggagctggtgttggaaacgactttaaaatagaagacagtaattataatagaattattatcatgactgatgccgacacagatggtgcgcatattcaagtattattattaaccttcttttttaagtatatgaaaccgcttgtacaagctggtagagtatttatcgcattgccgccattatataaactggaaaaaggaaaaggtaaatctaagcaagttgaatatgcatggactgatgatgaacttgaaaaacttcagaagaaattaggaaaaggatttatgttgcaacgttataaaggtctaggtgaaatgaaccctgaacagttatgggaaacaactatgaatcctgaaactagaacattaattcgtgttcaaattgaagatgaaatgcgttcatctaaacgagttacaactttaatgggtgataaagttgcgccacgtcgtgaatggattgaaagtcacgttgaatttggcatgcaagaagatcagagtatattagataatactgaagtacaagtactagaaactgaagaatatactgaggaggaaacaaat

SEQ ID NO: 35316 - DNA, 2358 bp, Staphylococcus haemolyticus
gtgataggcgatcgttttggaagatatagtaaatatattattcaagaacgtgcattaccggatgttcgtgatggcttgaagccagtacaacgaagaattcttttcgcaatgcatagtagtgggaatacgtatgataagaatttccgtaagagtgcgaagacagtcggtgacgttattggtcaatatcatcctcatggcgactcatcagtatatgatgcaatggtgcgcttaagtcaagattggaaattacgtcatgttttaattgaaatgcatggtaataacggtagtatcgataatgatcctcctgcagccatgcgttatactgaagcgaagttaagccaattatcggaagaacttgtcagagatattaacaaggaaactgttgcatttgttccaaactatgatgatacaactttagaaccaatggttttaccagcaaggtttcctaatttattagttaatggttcaacagggatttcttcaggttatgcgactgacatcccaccgcataatttagcagaggtaattcaagcaacattgaaatatatcgataatcctgatattactgtcactcaactaatgaaatatataaaaggtccagatttccctactggcggtattattcaaggcgtggatggcattaagaaagcttatgagactggtaaaggtaaaattgttgtgcgttctaaagtagatgaagaaacccttcgtaatggtcgtcaacaacttatcgttactgagattccttacgaagtgaataaaagttcactagtcaaaagaatcgatgagttaagagcagataaaaaagtagatggtattatcgaagtccgtgatgaaactgatcgcactggattacgaatagcaatcgaactgaaaaaggatgtaaatgcagaagctataaaaaactatttattcaaaaactctgatttacaaattgcttataactttaatatggttgcaattagtgacggtcgtccaaaattaatgggtattcgccaaattattgatagttacttaaatcatcaaattgaagttgtggcaaatcgtacgaaatatgatttagatcatgctgaaaaacgcatgcatattgtggaaggtttaatgaaagcactatcaatattggatgaggttatcacgttaattcgtaactctaaaaataaaaaagatgctaaagacaatttagttgctgaatttgaatttacggaagctcaagcagaggctattgttatgcttcaactttatcgtttaactaatacagatatcgttgcattggaaaatgaacataatgagttagctaatttgattaaagaatatcgtcatatacttgataatcatgatgcattgttacaagtaattaaaagtgaattgactgatattagaaaacgatttaaatctgagcgtttatcatcaattgaagcggaaatcgcagaaatcaaaattgataaagaagttatggttccaagtgaagatgttgttttaagtattacacgtcaaggatatattaaacggacatctacacgtagttttaatgccagtggtgtcactgaagtagggcttaaagatggagacagtttactcaaatatcaaacagttaacacgcaagatacggtacttgtttttacaaataaaggaaggtatttattcattccggttcataaattagcagatatcagatggaaagaacttggacagcatgtatctcaaattgttcccctagatgattatgaaactgtagttgatgtttacaatgaacaaagttttaaagatgacgcattttatgtactagcgactcgaaatggaatgattaaaaaaagtaacgttagcttatttaaaacgactcgttacaataaaccattagttgctatgaaagttaaagataatgatgaattaataaacgtcattcgattaaatgaagatcaactcatcagtgtattaacacataaaggtatgtcattaacgtattcaagtgaagaactatctgatacgggattacgagcagctggggtgaaatctatcaacttaaaagatgaagattttgtcgttatgacggatgttgtagatagtgatagctcaattataatggctactcaaagaggtgctgtaaaacgaattagctataagattttacaacaagctaaaagagcacaaagaggtattacattacttaaagagttgaagaaaaatccgcatcgtgttgttgcaggttatgttgttaaagatgaaagtatgtatactctatattctgaaagtcactctgaagaaggacaaatcactgatattcatttatctgaacaatacacaaatgggtcatttgttgttgatgttaaagattttggagacgtcttagatatgacaatc

SEQ ID NO: 35317 - DNA, 687 bp, Staphylococcus haemolyticus
gtgaaagatgtgaaagaaggttatccagaacaatggcttggtggcatgtctaaaggagaaggtgtcgcagcagaaatacgattgcaaattgtgagtggggaaatcgaagtagatacgctacttactgagaatcaagtcgcaaaacaatttgatgttagtcgttcccctgttagagatgcattcaaattattacaaacggatcaacttattcaattagaacgcatgggagctaaagttttacagtttggtgatcaagagaagaaagaactctatgatttacgtttaatgttagagtcatttgccttctctaagatcaaacacattgatagagcacctataactaaagagatgcgtaagcaccttgaaatgatgaaagtagcagttaaattcgaagatgctgaagcatttacacaacatgacattcaatttcatgaagcaatgattaacgcatcaaaccatcaatatttacaaacattctggaatcatttgaaacccgtaatcgaaacactcgtattactatctatgagacatcgcatggaacaggataaagcagattttgaacgtattcatagcaaccatgaggtgtttattgaagcggtagaacaatatgactctacaaaattaagagaagccttccatttaaatttcgatgatgttggggaagatattgaaagtttctggctaaga

SEQ ID NO: 35318 - DNA, 1536 bp, Staphylococcus haemolyticus
atgaagtacatgattggtgttgacataggaacaacgagtacgaaatcagtattatacgatgaaaatggacaattcatcatgaaacacaacattggttaccccttacatactcccaatgtagacgtttctgaagagaaccctgacgaattattcgatgcagtactaatgactgtgaaatatgttgttagagaagcaaatataaaaaaagaagacatcaaacttatttcatttagtgcacaaatgcatagtctgattgcacttgatgcagaacatcatcgtttgactgagagcattacttgggcagacaatcgcgcgagtaaatacgcagaattaattaataaagaacatcaaggttcagacatctatcaacgcacaggaacaccaattcatccgatgtcaccattatctaagatattctggatgaagcatgaacaatcagatatttataaacaaactgccatgttcgcagatataaaaacttacatattctatcaactatttgaaaaatatgtcatcgattactcaatggcatcagctacgggcatgttcaatcttgaaaaacttgactgggataaagaggcacttgaattgatgggtatcactgaagcacaactaccacaactggtacctacgacacatattcttaaaggtatgaagaaacgctatgcaactttaatgggcattgatgagaatacacctattattgtaggtgcaagtgatggtgttctctctaacttaggagtgaatagttataaaaaaggcgaagtcgctgtcacaatcggtacatctggcgcgattcgaacagtcattaataaacctcgcaccgattataaaggacgtatcttctgttacgtactagacgaagatcattatgtcattggtggaccagtgaataatggtggagttgtcttgagatggttacgagacgaactccttgcaagtgaagttgaaactgcaaaacgtttaggtgttgatccatatgatgtactgactaaaatcgcaagtcgggttaagccaggtgcagaaggtctcatcttccatccataccttgcaggtgaacgtgcaccattgtggaacgccgatgctcgtggttcattcttcggtcttacactctcgcatcaaaaagaacatatgattcgtgctgctttagaaggtgtactctataatctttatacagtttatcttgcgcttatagaagtaatgaacgaaacaccaagcacaatcaaagcaacaggaggatttgctaagagtgaagtgtggcgtcaaatgatggcagatatcttcgacacagatcttatcgtgcctgaaagctttgaaagttcttgtttaggcgcttgtgtattaggtttgaaagcattaggggaaattgatgacttctcaattattgaagaaatggtcgggacaacgaatgcacatcaacctgattcagaaaccgttcaagtgtatcaacagttagtttcaatcttcattaatttaagtcgctcattagaagaacgttatgcagaaattgcagattttcaacgtaagcacatggaa

SEQ ID NO: 35319 - DNA, 1195 bp, Staphylococcus haemolyticus
atgcctaaacgtacatttagtaaagatgacattcgtaagtttgcaaaagaagaaaacgttagatacttaagattacaattcacagatatcttaggaacaatcaagaacgttgaagtaccagttagccaattagaaaaagtattagataacgaaatgatgtttgatggttcatcaatcgaaggtttcgtacgtatcgaagaatctgacatgtatttatgcccagatttagatacttgggttatcttcccatggactgccggtcaaggtaaagtagctcgtttaatttgtgatgtttatactactgacggtgaaccatttgctggtgacccacgtaacaacttaaaacgtgtgttgaaagaaatggaagatatgggctatacagatttcaacttagggcctgaaccagagttcttcttattcaaattagatgaaaaaggtgaaccaacattagaattaaatgacaatggtggttacttcgatttagcaccaacagacttaggtgaaaattgccgtcgtgacattgtgttagaacttgaagatatgggatttgatatcgaagcaagtcaccacgaagttgcgccaggacaacatgaaattgactttaaatacgcagatgcgattactgcttgtgataacatccaaacatttaaattagttgttaaaacaattgcacgtaagcataatttacatgcaacattcatgccaaaaccattattcggtgttaacggaagcggaatgcacttcaacgtatcattatttaaaggtaaagaaaatgcattcttcgatccaaatggtgaaatgcaattaactgaagatgcttatcactttactgcaggtatcttaaataatgcacgtggattcacagctgtgtgtaacccattagtaaactcttataaacgtttagttcctggttacgaagcaccttgttatatcgcttggagtggtaaaaaccgttcaccattagtacgtgtgccatcttcaagaggattatcaactcgtattgaagtacgttcagtagacccagctgctaacccttacatggcattagcaacaatcctacaagctggtttagatggtattaagaacaaaactaaagttccagaaccagtcaaccaaaatatttatgaaatgaaccgtgaagaacgtgaagctgtaggtatccaagacttaccttcaacactttacactgctttaa

SEQ ID NO: 35320 - DNA, 1107 bp, Staphylococcus haemolyticus
aactttaataatcaatccaatgaatccgaacaattggaacaaaatgaagcaattgaacaatctaatgaaacatcagatgaaaatgctcaaaacgttgaaagtaccaaaacgaatgatagtcacagactctccactaattctagtgaaaacacatataagctatctattaaagatagagttaaagagttcaatgacaatcgtaaaagaaaaaaacatgccaagagtacacaatttgatcatttatcaccacaagagagaaaagaacaattaagaattcagcgaaggaagcgtcaaaaaagaattcagtacgttatcattacatttttagtattattaataattttatttttactctacatgtttacaccactaagtagaatttctaatattaaaattagtggaaataacaatgtgagtaacagtcaagttgaaaaagctttggatgtaaaagataattcaagaatgtatacgtatagtaaacgtaaaggtattcaaaatctgaagaagaatgatttaataaaagacgtaaaaattaaaaagcaattaccgaatacgttaaaagtgcaaataactgaaaatcaagttgtaggtgttgttaaagaaaagaataaatatgtgccaattatagaaggaaatcaagaattgaaaaactttgatggtaatattgccggaagtggacctattttagaaggatttaaaggtgaagaaaaaagcaatatgattaaatctttatctaagatgtctccagaaattagagatatgatttcagaaattaagtacgcacctaagcaaaatagccctaatcgaattcttttatatatgcaagatgatatgcaagtagttggcaacataaaaacgattgctaataaaattaaatattatcctcaaatgtcacaatctttatcaaaagacgactctggcaacttgaaaacccaaggttatatagatttatctgtaggtgcatcatttataccgtataatgaaaacagtagcggagattcaaaatccgatcaaaatgttcgtcaaaaatcacaacaagaaactgatgcaaaagatgagttacaaagcgctttaaataaaattaacgaacaatcagattcaaataat

SEQ ID NO: 35321 - DNA, 1431 bp, Staphylococcus haemolyticus
atggaggaacattactatgtaagcatagatattggttcatcaagtgtaaaaacaatagtaggcgaaaaatttcacaatggaataaatgtgataggtacaggacaaacctacactagcggtatcaagaacggattaattgatgatttcgacattgctaaacaagcagttaaagatacaattaaaaaagcttctatcgcatcaggtgtagacattaaagaagttttcttaaaattacctatcataggtactgaagtatatgatgaagcaaatgaaattgatttttatgaagatactgaaataaacggcacacacattgaagaagtgctagaaggcattcgccaaaaaaatgatgtagcggatactgatgtaattgatgtattccctattcgttttattgtggatggggataatgaagtatcggaccctaaagaattgattgctagacactcattaagagttgaagcaggagttattgcaattcataaatctatcttaatcaacatgattaaatgtgtagaatcatgtggcgtagatgttttagatgtttattcagatgcttataattatggctcaattcttacagctactgaaaaagaattaggagcatgtgtaatagatattggtgaagatttaactcaaatcgccttttatgaacgtggagaattagtagacgctgattcaatagaattagcaggtcgcgatattactgatgatattgctgaagaactaaatactacatatgaaacggctgaaaagataaaacatcaatatggtcatgcttatgctaactctgcatcagatcaagatgtatttagtgtagatcaagtagacagtgatgaattagttgaatatactcagaaagatttaagtgctgtaattgagagaacaatgcaagatatctttgatgaggtgtttgatgtattagttgacttagggttaactagagtgaacggtggtttcattgtaactggcggttcttcaaacttattaggagttaaagaattacttaatacgatggtaaatgaaaagattagagttcatacaccgtcacaaatgggtatcagaaagccagaattcacatcagctatttctactatatctagtagcatcacttttgatgagttgctcgattatgttacaatgagttatcaagataatgatgagtttgaagaagaagttattgaagataacgagagagaacatacttctaaatcaggtggatttgactggtttaaacgtaagtcaaataaaaatgaaaatacttatgaagaagactacaacgaaccacatgaaagaacagataaagtagacgacgatgataagtatgatagcaatgaaagtcatcacgatacgacagaacattatgatgatcaagagcaacctcaaaaagaagagggcaaatttaaaaaacttatgaaatctctatttgaa

SEQ ID NO: 35322 - DNA, 1179 bp, Staphylococcus haemolyticus
atgttagaatttgaacaaggatttaatcatttagcgacattaaaagtcatcggtgtaggtggcggtggtaacaacgctgttaaccgtatgatcgaccatggcatgaacaatgtagaatttattgcaattaatacagacggacaagctttaaacttatctaaagcagaatctaaaatccaaattggtgagaaattaacacgcggacttggtgctggtgcaaatccagaaattggtaaaaaagcagctgaagagtcacgtgaacaaattgaagatgcaatccaaggtgcagatatggtattcgtaactgctggtatgggtggcggaactggtacaggtgctgcaccagtagtagctaagattgctaaagaaatgggagcattaactgttggtgtagtaacacgtccattcggttttgaaggacgtaaacgttcaactcaagcagcagctggtgttgaatctatgaaagcagcagtagatacactaattgttatccctaacgatcgcttattagatatcgttgataaatcaactccaatgatggaagcatttaaagaagcagataatgtattacgtcaaggtgttcaaggtatctctgacttaatcgctgtatcaggtgaagtaaacttagactttgctgacgttaaaacaattatgtctaaccaaggttctgctttaatgggtattggtgtctcttctggagagaacagagcagttgaagcagctaaaaaagcaatttcatcaccattacttgaaacttcaatcgttggtgctcaaggtgtgttaatgaacatcactggtggggaatcactatcattatttgaagctcaagaagcggctgacatcgtacaagatgctgcagatgaagatgtaaatatgatctttggtacagttatcaatcctgaactacaagatgaaatcgtagtaactgtaattgctactggttttgaagataaaccaacttcacaaggacgtaaagcttcaagtactggtttcggaacaagtgcaacttcaagcacttcaacacaaacaagtacgccaagagaagaatcattctctcaaagctcatcaagctctcgttcttctgaaagtgtatcagaaagaagtcatactactaaagatgacgatattcctagctttatcagaaatagagaagaaagacgttctagaagaactagacgt

SEQ ID NO: 35323 - DNA, 1734 bp, Staphylococcus haemolyticus
atgatacgacgctatttagaatttgttaaaccttacaaatatcgtataatagcgacgataattatcgggattataaaattcggcattcctatgttaattcctttacttatcaaatatgcaattgatggcgttattaataatagtgcactttctacgaatgaaaaatttcaacatctaagtgtagctatcggcatagctttatttatattcttgattgtgagaccaccaattgaatacttacgtcaatatcttgcacaatggacgagtaacaagattttatatgatattcgaaaacaattatataatcatttgcaagctttaagtgctagattttatgcgaacaatcaggtagggcaagttatttcaagagtgataaatgacgtagaacaaactaaagattttattttaaccggtttaatgaacatatggttagattgtataacaattgtcattgcactatccatcatgtttttcctagatgttaagttaactttcgcagctatattcatctttccattctatattttgacagtgtatttcttcttcggtcgtttaagaaaattgactcgtaaacgttcgcaagctttagctgaagtacagggctttttacatgaacgtgtacaaggtatgtccgtcattaaaagttttgcgatagaagataatgaagctaaaaactttgatcataaaaaccaacatttcttaaatcgagcatttcaacatacgtcatggaatgcctactcatttgcagcaattaatactgtgacagatttaggaccaattatcgtcattggcttcggtgcctatttagccattaatggttcaatcactgttggtacacttgctgcatttgtaggatacttggaacaattattcggaccactgagaagattggtttcttcttttacgacactaactcaaagttttgcatcaatggatagagtattccaattgatggatgaagattatgatataaaaaatggtattggcgctcaacctattgaaattaaacaaggacatattgagttgaagaatgtaagttttaaatacaatgaagatgaatcaactatactaaaagatataaatcttaatattaataaaggtgatacagtagcttttgttggtatgagtggtggtggtaagtcaaccttaattaacttgatacctcgcttctatgatgtgtctgaaggtgaaatattaatagatgattataatgttaaagattttcttactggtagtttaagaaatcaaattggtctagtccaacaagataatattcttttctcagatacagtgagagaaaatatcttactaggtcgcccagatgctactgaagaagaagttattgaagcggctaaaatggcaaatgcgcatgaatttataatgaatcttcatgatggctatgatactgaagtaggggagcgaggcgtaaaattatctggtggtcaaaaacaacgtctctcaattgcaagaatctttttaaataatccaccaattttaattttagatgaagccacatcagcattagatttagaaagcgaagcaattatacaggaagcattagatgtattaagtaaagacagaactacactcattgttgcgcatagactatcaacaattacacatgcagataaaataattgtaatgcaaaacggtgaaatagtagaaacaggaacgcacaaagagttgattgaaaaacaaggtgcttatgagcatttatatagtatacaaaattta

SEQ ID NO: 35324 - DNA, 1287 bp, Staphylococcus haemolyticus
atgaaattcactgagagtgaacgtctacaacaattgtcaaatgaatatattttgggtggcgttaattcaccatcacgctcttataaagcagttggtggaggtgctcctgttgtaatgtgcgaaggacatggcgcatacttgtatgatgttgatggcaataaatttattgattatttacaagcatatggtcctattatcacaggtcatgctcaccctcatataactaaagctattcaagatcaagcagctaaaggtgtactttatggcacgccaacagaattagaaattgaatttagtaaaaaattacgagaagctattccgtcacttgaaaaaatacgattcgtaaactctggaactgaagcagttatgacaacgattcgtgttgctagagcttatacaaagagaaataaaattattaaatttgcaggttcctatcacggtcattctgatttagtattagtagctgctggtagtggtccatcacaattaggatctcctgactctgcaggtgttcctgaaagtgtcgctaaagaagtaattacagtaccgtttaatgatattgaatcatataaagaagctatgaaacattggggagatgaagtagctgctgtgctagttgagccaattgttggtaattttggaatggttgaaccacaaccaggtttcttggaaaaagttaatgaaattactcacgattatggtgcattggtgatttatgatgaagttattactgcattccgcttccattatggtgcagcccaagatctattaaatgtatacccagacttaactgcattcggaaaaataattggaggtggccttccaattggaggctatggtggccgacaagatatcatggaacacgttgccccattaggtccggcataccaagctggaacgatggcaggtaatccactttctatgagagcaggtatcgcattactagaagtactagaacaaaatggtgtttatgaaagattagatcaattaggaaaacgacttgaagatggtctattagagctaattgataaacataatattacagcaactattaatagagtatatggctctttaacactttacttcacagatgaaaaaatcacacattatgagcaagttgagaattcaaatggagaagcatttgctaagttctttaaattaatgttgaaccaaggtattaatttagctccatcaaaatttgaagcatggttcttaactacagagcatactgaagaagacattgatgagacacttaaagctgttgattatgcgtttagtcaaatgaaa

SEQ ID NO: 35325 - DNA, 966 bp, Staphylococcus haemolyticus
atgaaggccgtcaattggaatacccaagaagatatgacgaatatgttttggcgtcaaaatatttctcaaatgtgggtagaaacagaatttaaagtatcaaaagatattgcaagttggaagacactaactgaagacgagaagaatacattcaaacgtgcgttagcaggattaacagggttggatacacatcaagcagatgatggtatgccgttgattatgttacacacaacagacttacgtaaaaaagcagtgtattcatttatggcaatgatggaacaaattcatgcgaaaagttattcacatatatttacaactttacttccatctagtgaaacaaactatttactagatacttgggtaatagaagagcctcatttaaaatataaatctgataaaattattgaaaactatcacaaattgtggggcaaagaagcctctatatatgatcaatatattgcaagggtatcaagtgtatttttagaaaccttcttattctactctggtttctattatcctttatatttagctggacaaggtaaaatgactacttctggtgaaatcattagaaagattttactagacgaatcgatccatggtgtgtttacaggattagatgctcaaagtttacgtaacgaactatctgaaaatgaaaaacaaaaagcagataaagagatgtataaattattagaagatttatacgctaatgaagtatcttatacacatatgttatacgatgatatcggcttaagtgaagatgtattgaactatgtacaatacaatggaaacaaagcattatctaacttaggctttgaaccatactttgaagaaaaagaatttaatcctatcattgaaaatgcattagatactacaactaaaaaccatgatttcttctcagttaaaggtgacggatacacattggcattaaatgtagaagccttacaagacgaagatttcatttttgataat

SEQ ID NO: 35326 - DNA, 966 bp, Staphylococcus haemolyticus
gtgaagtttttatttaagggttatgttttacttattttattagtttgtttaactatagtctccttatttgttggagtgagtcagctctctctttcagatattttccacttaagtgaagagcaacaaaatattttgttctcaagtcgtattccacggacggttagtatcctactttcaggtagttcactcgcgttagcaggattaattatgcaacagatgatgcaaaataaatttgtaagtccgactacggcaggaacaatggagtgggccaagttaggtattttgatttcgcttatcttttttccgaaaggtcacatcctaatcaagttgctattttcagtaggattgagtttagcagggacatatttatttgtgaagttaattaatttgattcgtgttaaagaagttatcttcgtaccattattaggaattatgatcggtggtattgtatctagctttactacttttattgcgttaagaaccaatgcattgcaaagtattggcaactggatgaatggtaactttgcaattatcacaagcggacgttatgaagtgctttatcttgtagttccattactcattatcgcttttatttttgcgaatcattttacgattgctggtatggggaaagactttagtcataatttgggagtaagttatgaaaaaattataaacattgcattatttattacagcagcattgacggctttagttgttgttactgtaggtactttgccatttttaggtctcattgtacctaatattatttcaatgtatagaggcgaccatttgaaaaatgcacttccacatacgttgatgttagggtcaatatttgtattattcgctgatatcatcggtagattaatcgtttatccttatgagattaatataggattaacgataggtgtatttgggacagtgatattcctaatcttactaatgaaaggtagaaagcattatgcaaat

SEQ ID NO: 35327 - DNA, 468 bp, Staphylococcus haemolyticus
atggctaagaagaaaacgaaatcacccggcacactagctgaaaaccgtaaagccagacatgattataatattgaagatacaattgaagcgggtattgctttaaagggaacagagattaaatctattcgtcgtggtagtgccaatttgaaagatagctatgcgcaagttaaacgtggcgagatgttcattaataatatgcacattgcaccttatgaggaaggtaaccgtttcaatcatgaccctttacgttctagaaagttattacttcataagaaggaaattattaaacttggcgaacgtacgagagaaattggctattcacttattccattaaaactttatttaaaacatggtcaatgtaaagtcttattaggcgtagcacgtggtaagaaaatacatgataaacgtcaagctttaaaagataaagcaatgaaacgtgatgttgatcgtgcaatcaaagaccgttat

SEQ ID NO: 35328 - DNA, 1191 bp, Staphylococcus haemolyticus
cgttcagatgagagaaaattaacttttgaagcatatggtttagatcctgagaaacgtttcaatgtgccagaagaagtatatgaaattttccaaacaactatgttaaaacgtgcaaatgagcatgaagatgcatggaaagcattactagaaaattattctaaacaatatccagaattagcagatgaatttaaattagctattagtggtaaactacctaaaaactatagagatgaattaccacgctttgatagcgatcataatgcagcaacacgtgctgattcaggtgaagtaattcaagcattaagtaaatcagttccgtcattctttggtggttctgctgacttagctggttctaacaaatctaacgttaaagaagcgactgattatgatagaaatacacctgaaggtaaaaatatatggtttggtgtacgtgagttcgcaatgggtgcagctgtaaatggtatggcagcacatggtggattacacccttatggtgcaacattctttgtatttagtgactacttaaaaccagcgttgcgtttatcagctatcatgggattcaattcaacattcatcttcacacatgattcaatcgctgtaggtgaagatggacctactcatgagcctattgaacaattagcgggcttaagatcaataccaaatatgaatgtcattcgtccagctgatggaaatgaaacaagagtagcatgggaagtagctcttgaatcagaacaaacaccaacttctttagtattaactcgtcaaaatctaccatatttagatgtagatgaagagacagttgaacaaggtgttcgtaaaggtgcttatgttgttttcgaaactgaaactaaacctgagtatctattacttgctactggttcagaagttagcttagcaattgaagcagctaaagatttagataaacaaggtaaaggtgtacgtgtagtatcaatgcctaactggtttgcttttgaacaacaaccagaagaatataaagagtctgtaattcctaaagaaattactaaacgtgttgcaattgaaatggcatcaccattaggttggcacaaatatgtaggcactgaaggtaaagtgataggtattgaccaatttggtgcaagtgcccctggcgacttagtcgtagaaaaatatggtttcactaaagaaaatgtattaaatcaaattcgcacattt

SEQ ID NO: 35329 - DNA, 1122 bp, Staphylococcus haemolyticus
atgaaggttattcacactgctgattggcatttaggtaagattttaaatggtaagcaatttttagaagatcaacattatatattgaacaaacttattgataatttgaaggaagagaaaccagatgttctggttatttcgggtgatatatatgatacgtcttatcctagtaaggagaccattagactttttgaagaaacgattaaaattataaatgtaaatatgaaaattcctacaattataaccaatgggaatcatgatggtagagaaagattaaattatgggtcaacatggtttgagttttcacaattatatattagaacgcaactagaattaatgtctacacctataactattaataatattaacttttacacacttccttttgccactattagtgaaattaaggcttacttcgatgatgatgatatcaagacatatgagcaagcaactcaaaagtgtattaaccacatttcgaagattatagacccgaatcaaattaatattttaattggccatttaactataaaaggtggtaaaacatcagaatctgaaaggccacttacaattggaacagttgaaagtgtagaaagcgctaacttcaatatttttgacaaagtactattaggacatcttcatcatccatttagtattacagataatattgttgattatagtggttcgttattacaatactcattttctgaagtgaaccaggccaaaggatacaaaaaattaatgattaattcaaaaggtgacataaatactaagtttgtacaattaaaacctttaagagagttagaggaaattgaaggtgactactcggctgttatacaaggcgacgttcctgtgaaaaataaagataattattttcacttcaaacttaaaaatatgtctcatgttaccgaccctatcatccaccttaaacagatatacccaaatacactttcgcttagtaatatcacttttgaaaatcataataaatcaacgtacgcagattttaaaactacagatgaccctacaataattaaaaatttctacaaaacaattacggatgaagatttaacaaactatcaagagaagaaaatacatcaattattaaatcaagttatcaatagggaggac

SEQ ID NO: 35330 - DNA, 1030 bp, Staphylococcus haemolyticus
atgttatttgatggcattgtttatgcgctatttggtaaggcttctacagaaggtagaaatgagggggaattacgaagtcattttgcagatggtaaatccccaatgagtgtagaatatgaatttaaaattaacgataaaaaatttaaaatatctagacaggctggatttattaaagaggggaatacttccttaacacctggtaaacttgatgtttttgaatttgatgaagaaagtcagctttacgaactacgagagagtaaaatcagctctggtaatggttttatcaaagatttgttaggtatcaacgctgaacaatttagacaattattcatattacctcaaggagaatttaagaaatttttagtatctaatagttccgataaacaaagtattttaagaacattattcaatagtatccgttttgaagagatgcaaaatttattgttaaatcaagttaaagacgagaagaaacaaatagaatcacgttatagtcggattcaaatactttgggaagatattgaaacatttgagaatgatgaattaattcaatttaaatctttgaatagtatgcaaaccaaagacattattaaagcaatacctcagtttgaactagtaggtcaacacttaaatgaagaatatgaacaattaaaatctgaacacaatgatgcgcttgaagctataaaaagaaaaattgaagaaaacaataaattaatagaatcacttaaagaactcgatcgaaataaagataagaaagtgcaactagaaaaaaacaaagatagtattgaaaaattaaaagctgaattacgtaaaattattgaaattaaacccttgagtcaattgtataatcaaagaaacacaaaagaacaaaaatatgaaaatactaaggttaagctaaattctatccttgaagagtcaaatgaacttaatgttaaattagagatatttaagaaagaaaaggaaattttaaatgaacaattagaagatattaacattaagtctgaatatattgataaaactaaacagttttatt

SEQ ID NO: 35331 - DNA, 828 bp, Staphylococcus haemolyticus
gtgaacgaaactcaatcaaatgaacaaattctaaagttatttatcgtatcagattccattggcgaaacagcacaacgaatgattcatgcaacattaacacaattccctgatttgcataatgttgaaattaagaaatttccatatattaaagatgaagaggaattcttaaatattttaaatttagcacgtgaacaacatgcgattgtagcgacgacgttagtaagtgaatcctttaatgcattgggacatcaatttgcacatgaacatgatattccttatgttgactacatgtctgatttaatcagtattattaagaaggtaacacacagtcaaccgcttatggagagtggtgcgttacgtaaattaaatgatgaatatttcaagcgtattgaagcgattgaatactctgttaaatacgatgatggtaaacattttactgatataggtgcagcggatgcattaattgttggtgtgtcacgaacatctaaaacaccattaagtatgtatttagctaacaaaggttataaaatagctaatattccattggtacctgaaattgaaattcctgataatgtttataaacaaaaagggttaaaagtatttggattaactgcgagtccacagtatattgcaaacatacgaaagaatcgtgcggaaacgttaggtttatctagtgaatcacgatacaataacttggatcgtattaagaaagaacttgtatatgctgaggaagtctttaagaaattaaatgcgactgttatcaatacggaatataaatcgattgaagagtcagcattctatattgagaagtttttacaacctaaattg

SEQ ID NO: 35332 - DNA, 702 bp, Staphylococcus haemolyticus
ttaacagagcaattagctaaaagagctaaaaaggtgatgtcatttgaaattgatcaacgacttatacctgtactaaaagaaacactagcgccatatgacaatgttacgataattaacgaagatatattgaaagcagacattggtaaggcggttaaaacgtatttgaatgattgtgacaaaatcatggtcgtagctaatttaccatattatattacaacaccaattttactgaatttaatgcaacaagatattccgattgatggttatgttgttatgatgcaaaaagaggttggtgaacgcttaaatgcacaagtaggaacaaaggcttatggttcattatctatcgttacacagtactatacagaaacaagtaaagtgctaacggttcctaaatcagtttttatgccaccacctaatgtagattctattgttgttaaattaatgcaaagagagacgccactcgttagcgtggatgacgaagaaactttctttaaattagctaaagcagcttttgcgcaaagacgtaaaacaatcaacaacaattatcagaatttctttaaagatggaaaaaaacataaagaaagtatattaaaatggcttgaacaaacaggtattgatcctaaaagacgcggggaaacgctatcaatacaagattttgcacgattgtatgaagaaaagaaaaatttcccagaattagaaaat

SEQ ID NO: 35333 - DNA, 1349 bp, Staphylococcus haemolyticus
caaagaaatgcggtaatattagcagctggaaaaggtactagaatgaaatcaaataaatataaagtgctacataaagttgctggaaaatcaatggtagaacatgtgttaacaaatgttaagaatgctggtgttaaccaaatcgtgacaattgtaggtcatggcgctgaagacgttaaagaaacattggggaaccaatcgttatatagctatcaagaagaacaattgggaacagcacatgctgtaaagatggctaacgaacatttgaaagaagtggaaggtacaactttagttgtttgtggagatacaccactcattacagctcatacgttacaaaagttaattgagcatcatgaaagtactcatgcgcaacgacagtattatcagcaactgctcagattccgtttggttatgggcgaattgttcgcgatgaacaacgtagactacaacgtattgtcgaagaaaaagacgcgtcagaagcacaaaaagcattaactgaaattagttctggaatttttgcgttcgataatcgagttcttttctctaaattagaagaagttaaaaatgataatgctcaaggtgaatactacttgccagatgtgatcagcttaatcttagctgaaaatggcgtcgctgaagtttatcacacagacgattttaatgagattatgggtgtaaatgatcgtgtcatgttaagtaatgcggaaaaggcgttgcaacaacgtattaacattgagcatatgagaaatggtgtaactattatcgaccctacaactacatttattggaccagatgtcaaaataggtatggatacaattattgaacctggtgtgcgtattaatggtgaaacagtaataggagaagaagctgtcatcggtcaatactctgaaatcaacaatagtcatattggctcacaagttgacattaaacaatcagttattaatgattcaatcgttggtgataaaacaaaagttggaccattcgcgcaactaagacctggttcaaacttaggttcagatgttaaagtgggtaactttgtagaagtgaaaaaagcagatctcaaagatggggctaaagtatctcacttaagttatattggagatgctgaaatcggtgaacgtacaaacattggttgtggttctatcacagttaattatgatggtgttaataaatttaaaacggttgtaggtaaagatgcatttattggatgtaatactaacttagtggcacctgtaactgttggtgacggtgtgttaatcgctgcaggttcaacaattaccgacaacgtccctaatgaaagtttagcccttgcgcgtgcccgtcaaatcacaaaagaaggatatctcaaaaaa

SEQ ID NO: 35334 - DNA, 690 bp, Staphylococcus haemolyticus
atgttaaataatgaatacaagaattcatctttaaagattttctctttaaaaggaaatgagccattagcacaagaggtagctgatcgagtagggattgaattagggaaatgttctgttaaacgctttagcgatggagaaattcaaatcaatattgaagaaagtattcgtggatgtgatgttttcattatccaaccaacttcaaatccggttaatttacacttgatggagttattgattatgattgatgcttgtaagcgtgcatcagcagctaatatcaatattgtggttccatattatggctatgcacgtcaagatagaaaagcacgtagccgtgaacctattacagctaagttagtagctaacttaattgaaacagctggcgctaatcgcatgattgcattagatttacatgcaccacaaattcaaggattctttgatattccaattgaccatttaatgggtgtaccaatcattggtcaacattttgagaatgaccctaacattgacccagaagaatgtgtcgtagtatcaccggaccacggtggcgttacacgcgcacgtaaacttgctgacattttaaaaactccgattgcaattattgataaacgacgtcctaaaccaaacgtagcagaagtaatgaatattgttgtgtgaaattgaaggacgcactgcgattattattgatgacag

SEQ ID NO: 35335 - DNA, 378 bp, Staphylococcus haemolyticus
atgaaaattatattgaagaacaccagtgaacaacccatttatgaacaaatcaaacaacaaataaaagagaatattttaaaggggtatgttgaagctggtagccacttaccttcgatgcgtgagcttgcaaaagatttacaggtgagtttaattacaactaaaagagcttatgaagatcttgagaaagagggattcgtaacaactgtccgaggaaaaggtacatttgttaaagaacaagatagttccatattaaaagaaaagcaattctttgtaattgaaaatcttgctcgattaatgattaaagaagctaaaacaatagatatgcctctcaaggaattaaaagaaatactagctttaatttatgaggaggaagaagaa

SEQ ID NO: 35336 - DNA, 897 bp, Staphylococcus haemolyticus
atgaatgtcattgaagtaaaagatgtatcgtttcaaagtagtgcattttcaataaacaatctttcattcagtattcctcaaggatttgtaactggattcattggggctaatggggcagggaaaacaacgataattcgtatgataatggatattatagaacctaagcaaggtcatatatcaatatttggtgaaaaaatagcaaataaaccgaaatggataaaaaataaaataggttttgtttattcagaagtttattttaaccaacaatggactgcaaaaaaacttgaaaaaatggtttcaccattttataccgattgggactcacaagcatttaaaaattatttagaaaaattcaatttacctttcgatgaaaaaataaaacatttttctacaggtatgaaaatgaaattgtctttagcactagctttgagtcaccatgctgaattgtttatattagacgaaccaactgcggggttagaccctattgttcgtaatgaagtgttagaaattttacaaagtgaattactcgacgaacataagactttatttatttcaacccatattatttcggatttagagaaaattgctgactatcttgtacatataaaagatggagaagttattatgcaaggttttcgtcatcaacttcaagaacaatactcaattgtacaaggtgataatcaagatttagacgaggaattaaatcgcttgttcctttataaagaagtgaagtcgacaggttttgttggttttactaaacaggcccaagtgtttaaagaattgttcggaaaaaaagttaatattaaacaacctacgattgaagaacttatgatctacatcgaaaagtctaaaagtaatgacaatcaaatagattttcagcaaagtaggttgataaaa

SEQ ID NO: 35337 - DNA, 789 bp, Staphylococcus haemolyticus
atgatagataacattttattatatataaaacttttcccatcactaataaagtttactaagcaacgtataatagatacttggaaacggtttgcaattctcttcattgctgaacttgtcttagtattaatagcactaattacgttgtcgtttatcgagattgaagatattagtaaagctaggtggttatatagaattgttgctatgattacatttgctacaatgtttgcaacaatttttaaatcttttaaagagtatagtcaagattatttaataactaagtcgtttcaatcaacaccattgataacaacagttgcgaacgcacttatcggaagttctatttgttgtatattatcaattattactttattgtttaaaccagtgaatttcgatgcatctttcactgcatttattgtattttatataatgatgattctatttataatattcatatctgttactttaggattgttagatattatatataaaaatatgactatgatattctggttagctgtagttataaacttttttatagtacctattatttttattccttctgcaaatgagaatttaatgattcaattgttaaagttaaatcctctgttttatttaattgatggattagcgacttctacgatttatggtgtagtgaatatgtataatatttcatatcatatctattttattttaataatagtaacgattggagcaattaattttatgcttatgagatatgtagcacattcaaaatataaatattcttctaatataattgcgacaaaaaataaa

SEQ ID NO: 35338 - DNA, 387 bp, Staphylococcus haemolyticus
atgtataaaacaggcatattaaatagcgacatttcaaaagtgctcagtgatttaggacatacagatcaaattgtaatagctgattgtgggttacccgttcctaaagacgttaagaagattgaccttgctttaacattaggacagccaagttttctagaagtttatgaagtacttaagcaacacatggaaattgaacacgtaacgatagctgaagaaatggaagtagacaatgcacctatctttgaacaagtgacaaaggacttttcagaaatagaacaagttaatcatgaaacatttaaagcattaactaaaaacgctaaagcaattattcgaacaggggaagcaacgccatatgcaaacatcatacttcaaagtggtgtcatattt

SEQ ID NO: 35339 - DNA, 840 bp, Staphylococcus haemolyticus
atggcgacattatatttagtgggaacgcctataggaaatctaggtgatattacatttcgtgcaattgaaactttaaaagatgctgatttcatagcttgtgaagatacacgagtgaccaaaaagctttgcaatcattatgatattcaaacccctctcaaatcatatcatgaacataataagtcacagcaaactgagtatttaattgacttgttaaatgaaggttacaatatcgctttagtgtcagatgcaggtttacctttaataagcgatccgggttatgagttggtcgttgcagcccacagttatgacattcatgtagaaaccgtgcctggtcctaatgcaggtttaactgcactaatggcaagtggcctaccatcctatacgtatacatttttaggctttttacctagaaaagaaaaagataaagtagcagtattacaggaacgaatgtttcaagatagcacattaattatttatgagtcaccattccgtgttgttgaaacgttaaaagctatttccaaagttgatgatactagacgtgttgcagtcggtcgtgaattaactaaaaagtttgaacaaattgtgatgcaagaagttgggcacttaataaatgcatttcaaaacgatgaaattatgcaaaaaggtgaatttgtaatcttgattgagggcgctaagcctcttgaaactgaacaatggtttcaatcacttaccatttcagaacatgtcgaacactatatatcagaacaaaatattaaacctaaaaaggcgattaagttagttgcagaagatcgtcatatgaagactggagaagtttatgacatatatcatgatgtcaatcaa

SEQ ID NO: 35340 - DNA, 1977 bp, Staphylococcus haemolyticus
atggcgaaagaaacattttatattacaaccccaatttattatccgagtggtaatttgcatatcggccatgcatattcaacagtagctggtgatgtgatttcacgttataaacgtatgcaaggctatgatgttcgttacttaactggtacagatgaacatggccaaaaaattcaagaaaaagctcaaaaagcaggtaaaactgaattagaatatttagatgaaatgatcagtggtattaaaagtctttggagtaagttagaaatctctaatgatgactttattcgtactacagaagatcgtcataaacaagtagttgagaaagtttttgaacgtcttttaaaacaaggtgatatttatcttggtgagtatgaaggatggtattcagtaccagatgaaacatattacactgaatcgcaattagtagatccaatatatgaaaatggcaaaatcgttggcggaaaaagcccggattcaggtcatgaggttgagttagttaaagaggaaagttatttctttaatattaataaatacacagatagattattagaattttatgatgctaatccagatttcattcaaccgccttcaagaaaaaatgaaatgattaacaactttattaaacctggtttagaagatttagctgtttcacgtacatcatttgactggggagtcagagtgccatccaatcctaaacacgttgtatacgtatggatagatgcattagtaaactatatttctgcattaggatatttatcagatgatgatgaattattccagaaatattggccagcagatgtgcatttaatggctaaggaaattgtacgtttccactcaattatttggccaattttattaatggcgttagacttaccgcttccaaaaaaagtgtttgcacatggttggattctgatgaaagacggtaaaatgagtaaatctaaaggtaatgtggtagatcctaacgtattaattgaccgctatggtcttgatgcaacacgctattatttaatgcgcgaactaccatttggctctgatggagtattcactcctgaagcttttgtagagcgtactaactatgatttagcaaatgacttaggcaacttagtaaatcgtacaatctctatgattaataagtatttccaaggtgaactgcctgcatatgaaggtcctaaacatgaactggacgaagatatggaagcattagcacatgaaactgtgaaacatttcaatgaaagtatggaaagtttccaattctctgtagctttatctactgtatggaagtttattagtcgtacgaataaatatatcgatgagactacaccatgggtattagctaaggatgatagtcaaaaagatatgcttggtaatgtcatggcacatttagttgaaaatattcgatttgctgcagtgttactacgtccattcttaacacatgcgcctaaagaaattttcaaacaactgaatattaatgaacctgaattatttgaattagaaagtcttgaacaatatggtgcattaaaacaaccgattatggtaactgagaagccaacaccaatcttcccacgtttagacactgaagcggaaattgcatatattaaagaatcaatgcaacctccaaagtctgaagaatctaaagatgaagtggaagagccaagtaaagcgcaaattgatattaaagattttgataaagttgaaattaaagcagcaacaattactgatgctgaaaacgttccaaagtctgataaattgttaaaaattcaaattgacttaggtttagagcaacgtcaaattgtttctggaatcgctaagttttatcgtccagaagatattatcggtaaaaaagttgcagtggtcactaacttaaaacctgctaaattaatgggtcaaaagtcagaaggcatgattttatcagctgaaaaagatggtgtcttaacattagttagtttaccaagtgcaattccaaatggtgcagttattaaa

SEQ ID NO: 35341 - DNA, 767 bp, Staphylococcus haemolyticus
atgttaatcgatacacatgtccatttaaatgatgaacaatatgcggaagatttaactgaagtcatttctcgtgcgagagaagcaggcgttgatcgcatgtttgtcgttggttttgatacaccgacaattgaacgtgctatggaactgattgaacaatatgattttatatatggaattatcggttggcatcctgttggtgcgattgattttacagatgaacgtttacaatggattgaagaattatcacaacatcctaaagttattggtattggagagatgggcttagattatcattgggataaatctccagctgatgttcaaaaagacgtatttagaaagcaaattgctctcgctaaaagagtgaacttgcctatcattattcataatcgcgaagtacgcaagattgtgtagatatcttaatggaagaacatgctgaagaagtaggcggaattatgcatagcttcagtggttctcctgaaattgcagatgtagttattaataaactgaacttccatatttctttagggggtccagttacatttaagaatgctaagcaacctaaagaagtcgcaaaacatgtgcctatggatagattgttagttgaaacagatgcgccttatctttcacctcatccatatagaggtaaacgtaatgaaccagaacgtgtgactttagttgctgaacaaattgcagaattacgtggtatgtcatatgaagatgtatgtcgtcaaactacggaaaatgctgaacgtttatttaaattaaaa

SEQ ID NO: 35342 - DNA, 506 bp, Staphylococcus haemolyticus
atgaaaatcaatgaatttatcgtagtagaaggtagagatgacactgaacgagtaaagtcggctgttgaatgtgatacgattgaaacaaatggaagtgcaatcaataaagagactttagcagtcatccaaaatgcacaagaaacaagaggtgttatcgtattaactgatcctgactttcccggtgataaaatacgtcacacgattacagaacacgtttcaggtgttaaacatgcatacttagatagagaaaaggctaaaaataagcgtggtaaaatcggcgttgaacatgcgcatccaaaagatattagagacgcattaatgcacgtcagttctccttttgaagaagcggaagaatcaatcgacaaaagtgttctcatagacttaggattaataattggtaaagacgcacgtcgtaaaagagaaatactaggtcgtaaattacacatcggacattcaaatggcaagcaactgcttaagaaactcaatgcatttgggtatactgaatc

SEQ ID NO: 35343 - DNA, 1467 bp, Staphylococcus haemolyticus
atggttaatttcaatataagtaatacagttttaaattcagaagtatttattatagggttgcctgatcacatcaatcaacttggttatattaattacaataatgaagatataacaaaacaaattgatacataccgtcatcatcatttaattagcagtcaattaggtaaaatatcttcaactttgttacctttaaaagactcatcaaaacgacttattactgttggattaggaaatttaaagacgcttgattatggtacgctattgagagctttcggcaatttatttcaatttttaaaagaagaacgtgtaactgaagcagatgtattattcgatacattgatttcaaagaaaatagagcaaaccaaagtcgcagaggttatgggactacaaagtgaacaggcagtttacagttttgacaactataaatctgataaatctgcaccctatcaattagagttaaacataagtacgaataaagaggacttacatcgatattttatcaatggtgctataatcggacaatcggttaatgttgcacgtgactatagcaatatgccacctaatatactaacgcctaattattttgctgaacaggttacgcaacactttgatgaaacatcagtaaaagttgatattaaagatggaaaacaattattagatgaaggattcggacttattcatgctgttggtaaagggtcggagaatcctccagttgtaataactatgacatataatggtggtgacagtgaagacgcaccaattgcattagtaggaaaaggtattacatatgattcaggtggctatagcattaaatcgaagataggtatgcagactatgaaatttgatatgtgtggcgcagctaatgtagttggaatgattgatgcgatatcacgcttgcaaattcctatcaatattgtaggagttattgcttctgctgaaaatatgataagtagtaatgcaatgaaacctgatgatgtattgacggcattgagtggtgaaacagttgaaatgttaaatagtgatgcggaagggcgtttagtactaggagatgctgtattctatgctaatcaatttcaacctaagattattttagatttcgctacattaacaggagctgcagttgcagcactaggtgaagataaagcagctttatttaactctaatgcagataaagagattgaggaaatacgagttagtgctaaagaaatggatgaatatgcttttgaattacctatgactcaaactgagcaacgattaatacgtcaatctgacgttgcagatttagtcaatcatacaaacggtcatggaaaagcactctttgcagccacatttattactcattttagtggatctacaccacatatccatttcgatattgctggtcctgcgacaactaacaagactagctataaaggtccaaaaggcccaactggcagtatgattactactgtattaaattggttaaga

SEQ ID NO: 35344 - DNA, 846 bp, Staphylococcus haemolyticus
atgaaagactatgctttccaaattgaaaatattgaaactgcacgtaaattatctcgtcacatcgaagataaatttgcaaactacgcagcttctaaagaaaaagatgataaagacttagctatcttagttggtggtgcaggctttacaggtatcgaattcttaggtgaattaactgaaagaattcctgaattatgtaataaatacggtgttaatcaaaacaaagttagagtaacttgtgttgaagctgcgccaaaaatgttaccaatgttctctgatgaattagttaattacgcagttaactacctagaagaccgtggtgttgaattcaaaattgctacaccaatcgttgcttgtaacgaaaaaggtttcgtagttaaaattaatgatcaagaacaacaattagaagctggtacagcaatctgggctgctggtgttcgtggtagtaaattaatggaagaatcatttgaaggtgttaaacgtggtcgtatcgtgactaaacaagatttaactattgaaggtcatgatgatatctttgttattggtgacgtttcagcattcatcccagctggtgaagaacgtccattaccaactacagcacaaattgcaatgcaacaaggtgaacacgttgcgaaaagcattaaaaacatcttaaacggtcaagcagctacagactttgaatatgttgatcgtggtactgtatgttcattaggtgcacatgatggtgttggtatcgtatacggtagagacattactggtaaaaaagctgcattcatgaaaaaagttatcgatactcgtgcagtattcaaaatcggtggcgtaggcttagcattcaaaaaaggtaaattc

SEQ ID NO: 35345 - DNA, 864 bp, Staphylococcus haemolyticus
  misc_feature (335)..(335): n=g, a, t or c
atgtttaaagacttttttaatcgtagtagtaaaaaacgaaaatatttaacagttcaagattcgaaacaaaatgaagtaccagcaggtattatgactaaatgtccaaaatgcaaaaaaataatgtatacaaaagaattaaatgagaatttaaatgtatgttttaactgtgatcaccatattgcattacctgcatataagagaattgaagcaatcactgatgaaaatagtttcgttgaatttgataagggaatgacatcagcaaaccctttagactttcctggttatcaagaaaaaattgaaaaagaccaacaaaaaactgatttaagcgaagtatntgtaaccggtactgccaaactagatggtgttcaatttggtgtagctgttatggatgctagatttagaatgggaagtatgggttcagttgttggtgagaaaatatgtcgaattattgattatgcaacagaacatagactaccattcatattattttctgcaagtggtggtgctaggatgcaagagggtattatttcattgatgcaaatgggtaaaaccagtgtttcactgaaacgtcactcagatgccggactactttatatttcttatcttacgcatccaacaactggtggtgtttctgctagttttgcttctgttggggatatcaatttaagtgaacctaaagccttaattggatttgctggtcgacgtgttattgagcaaactattaatgagaaacttccagatgatttccaaactgcagaatttcttcttgagcatggtcaacttgataaagttgttcaccgtaaagagatgaaagaaacacttgctcaattattaaaattgcaccaagaggtgaaaaaagatgct

SEQ ID NO: 35346 - DNA, 945 bp, Staphylococcus haemolyticus
atgcttgattttgaaaaaccactttttgaaataaaaaataaaattgaatctcttaagcaatctcaagaaaaaaatgatgtagatttacaagatgaaattgatttacttgaagcatcacttgaaagagaaaccaaaaaaatatataccaatcttaagccttgggatagagtgcaaattgcacgtcttcaagaacgacctacgacattagactatattccatatatcttcgattcatttattgaattacatggagatcgtaattttagagatgaccctgcaatgattggtggaattgggtatttaaacggtacccctgttacagttataggccaacaaagaggtaaagatactaaggataatatatatcgaaactttggtatggcgcatcctgaaggttatcgtaaagcgttaagattaatgaaacaagccgagaaatttaatagacctatttttactttcattgatactaaaggtgcttatccaggtaaagctgccgaagaacgtggacaaagtgaatctattgctagaaacttagttgagatggcatctctaaaagtgccagtgatagctatcgttatcggtgaaggtggtagtggtggtgcactaggaattggtatagccaatcgaattatgatgcttgaaaacagtacttattctgttatttctccagagggagcagcggcactgttatggaaagatagctcattagcaaaaatggctgccgaaactatgaaaattactgcaaaagatttacatcatttaaacgttattgatagtgtgattgacgaacctttaggtggagcacacaataatatagaacaacaagctattgatattaagcaagcattcgtagatcaattagaacaacttcaacaacaaagtgcagatgaattagttgaagatagatttaataagtttagaaatatcggtgcttttattgaaaaa

SEQ ID NO: 35347 - DNA, 1497 bp, Staphylococcus haemolyticus
atgcatttaaaatttaaagtcacttacacattaacgttattaaatccaatcgcaaagcaagttaggagtaaaattatgagtgaaaatcaatatgacctagtcatcttaggtggaggaaccgctggttatgtagcggcaattcgagcatctcaattaggtaataaagtagctatagtagagaaatctttgttaggtggcacttgtcttcacaaaggatgtattcctacaaaagctttattaaaatctgctgaagttttaagaacagttaaagattcagttcatttcggagtgaatgttggtcaatattcatttgacttaaaatccatgatgaaacgtaaagacaaaattgttaatcaaatgcatcaaggtattgaaagtttaatgcagaaaaatcacatagatatatttaatggcacaggtagaattatggggacatctattttctcacctcaaagtggtaccatttcagttgaatatgataatgtagaatctgaattattacctaatcagaatgtactgatagctacaggttcactaccaactcaattaccattcttgcctttcaatcacaatacagttctatctagtaatgacatattgcaactcactgatttacctgcaagcatagcaatcattggcggtggagtgataggtcttgaatttgcttctttattaattgacttaggtgtaaatgttagtgtgatagaggctggtgaacgaatcttgcctaatgagagtgctcaaattgcaaattttctaaaaacatcacttatagcaagaggagtaacgttctatgaaaattgcgcattaaatgaatctgcagttaaagtcaactctaattctgtaactattcaagtaaataaagataaaactatagaagttgaaaaagttttagtatcaattggtcgcaagcctaatactgatgatataggattaaataatactaaaattaaaactgatgataatggtaatatacttgttaatgactttttacaaaccgaagataagcatatttatgctgcaggtgattgcataggtaagcttcaattagcacatgtatcttctaaagaggcaatacttgctgttgaacacatgtttaatggcaatggactacctctaaattatgacaagatgccgaaatgcatatatacacacccagaagttgcttcaattggttataataaagaatcagccgaagccaaaaacattaagaccaaatcatttaaagtaagctttaatgcaattggtaaagcagtaatagaggaaactactaatgatagaggattttgtgaaatgataattaatgatgaaactaatgaaattatcggtattaatatgataggccctcaggttactgaattaatcaacgaagcctcattattgcaatttatgaatggttcagcaattgagttaggtctgacaacacatgcacatccttctatatcagaagtacttatggaattgggattgaaagtagaaaatagagcaatacacgtt

SEQ ID NO: 35348 - DNA, 999 bp, Staphylococcus haemolyticus
atgattgattataaatctgtcggactttcagaagaagaccttaaagaaatctataaatggatggatttaggtagaaaagtagatgaacgattatggttattaaaccgcgctggtaaaattccatttgttgttagtggacaaggacaagaggctactcaaataggaatggcttacgctatgaaagaaggagatatttcatctccatattatagagatttagcatttgttacttttatggggatttccccatatgatacaatgctagcttcatttggaaaaaaagatgatattaattccggaggaaaacaaatgccttcccactttagtcatcgtgaaaagggcatattatcacaaagttctccagttgctacacaaataccacactcagttggagctgcattagctttaaaaatggataaaaaaccaaatattgctacggcaactgtcggagagggaagttcaaatcaaggagattttcatgagggtttaaactttgcaggcgttcataaattaccatttgtttgtgtcatcatcaataataaatatgcgatatctgtgcctaatactttacaatacgctgcagaaaaactttctgatagagccttaggatatggcatatatggtgagacagtagatggggatgatccgatagcaatgtataaagctatgaaagaagctagagaacgtgcactaaatggtgagggtgccactctaattgaagctatcacacatcgtatgacgccacattcttcagatgatgatgatacatatcgtacgaaagaagaaagagaagcattaaaaacttatgattgtaatcttaagtttaaagattatttattagaaaaagagattattaatcaagaatggttagacaatatagagcaagagcataaagaaattattaataaagccactaaagatgcagaaaaagcgccatatccatctgtagaagaaacatatcaatttgtttatgatccagaaggaggtatgggcaatgag

SEQ ID NO: 35349 - DNA, 769 bp, Staphylococcus haemolyticus
atgatccagaaggaggtatgggcaatgagtaaaatgagttatattgaagcaatacaacaagcgcaagacctagccatggaacatgataataacgtatttatattaggtgaagatgtaggacgtaaaggtggcgtttttggtgcaactagaggtcttcaagacaaatatggtgttgaaagagtaatagatacacctttggctgaatctaatattgtaggaactgctattggagcagcaatgattggtaaacgaccaattgcagaaattcaattcgcagattttatacttcctgcagttaatcaaattattagtgaagcagctaaaatgcgctatcgttcaaataatgactggcaatgtcctatcacaatcagagcaccctttggtggtggggtacatggtggtttatatcattctcaaagtatcgagagcatctttgcgtctacaccggggttaactattgtcataccttcatccccttatgatgctaaaggattattattatcctctattgagtcaaacgatccagtattattctttgaacataaaaaagcatatcgcttcttgaaagaagaagtgccagaagattattatacagttcctctcggaaaagctgatgtaaaacgtgaagggaaggacataactgtatttacatatggattgtgtgtaaattattgtatgcaagctgctgatattttagcagcagatggtattagtgttgaaatagttgatttgagaactgtttatcctctagataaagaaacaattattg

SEQ ID NO: 35350 - DNA, 457 bp, Staphylococcus haemolyticus
  misc_feature (17)..(17): n=g, a, t or c
  misc_feature (38)..(38): n=g, a, t or c
gcttggatgagactgcngctaaggcaaagaccgacaangcaacaagcacgtatcaacccgttttaatgatttagaatcagaagtgcaagatcaacacgttcaagataaagggcaattgaatctagcgtattcaagattaggcaaacaagtgtatgagttagaaaaactttcaaaacaaattaacggcagaacattatttgaagatattactgaaattattcaaagtgggcaacttattggtattgttgggccaaatggagctggaaagacaacattattaaatattttaagcggagaagacaacgattatacaggcacacttaaaattggccaaactgtaaaagtagcatactttaaacaaacagaagaaacgttagatagagatatacgtatgattgattacctacgagaagagagtgaagtggctaaagagaaggatgggacttcaatttcttag

SEQ ID NO: 35351 - DNA, 563 bp, Staphylococcus haemolyticus
atgactaatgtaattatagttcattcacaattagggaattctcataaccactggtataagtggttgcaacataatttagaactagaaggttacgatgttcaattattccatttagatgaaagtaagaatgataatatagacaattgggtcttcgaattaaatcaacaaattgaacttttatctaaagatacttattttgtcactcatgggtatggttcattggctactttgaaatacattgaaggtctatcaattgacggaccatttgaggggttcttcagtatagcaggatttaaagaagatgcgaagaaaatagacgattcaataaatgtaggggagtttaatgttgaatgatttaattaaaactaaagttaatcacttttatggactagcttcaaaagatgattcttatgtatcatacatagaaacccaaaacttaattgacgaattaggtggtaagactaaaattgttgatgaaggtggacatttcttagaagaagaaggcctttgtatcttttactgaattacaaggaaaaatgcaacatttcatgactaaataataa

SEQ ID NO: 35352 - DNA, 1068 bp, Staphylococcus haemolyticus
atggtaaaagaaaacatttgtatcgtatatggtggtaaaagtgctgaacatgatgtttctaaattgactgcgcaaaatgttcttaatgcaattgataaagaaagatatttagtggatatcatttatattacgaatgatggcttatggaagaaaaaagaaaatatcactgaggaaattaaagaaattgaatccctaaatatgacagatatagaagcgggcgaaatcactattttgcttaaagaaagtagaaatggtaaaccttatgatgcaatattcccattacttcatggccctaatggtgaagatggtacaattcaagggttatttgaagttcttgatttaccatatgttggaaacggtgtactagctgcatcaagttcaatggataaacttgtcatgaaacaattatttgaacatagaggattgcctcaattaccttacattagtttcttaagaagtgaatatgaaaaatatgaggggaatattattaaactcgttaaagataaacttacatatccagtattcgtaaaacctgcaaatcttggctcaagtgtaggtattagtaaatgtaataatgaggatgaactaaaatcaggtattgaggaagctttccaatttgaccgtaaactcgttattgagcaaggtattaatgctcgcgaagttgaagtagctgtattgggcaatgactatcctgaaacaacatggccaggagaagttatcaaagatgttgcattctatgattacaaatcaaaatacaaagacggtaaaatcagtttacaaattcctgcagaattagatgaagaagtgcaaatgacattaagaaacatggcattggaagcatttaaagctacagattgttcgggattagtacgtgcggatttctttgttactgaagacaatcaaatttttattaatgaaacaaatgcaatgcctggatttacagcatttagtatgtatccaagtttatgggagaatatggggttatcttattctgacctaatcacaaaattaattgacctagctaaagaacgtcacgaggataaaaagaaaaacaaatacacaattgac

SEQ ID NO: 35353 - DNA, 1353 bp, Staphylococcus haemolyticus
atgatagaagttactttacagcaaattcaggaatggataccttgtgatattgattcacaatatttacgacaaaccatcaaaggtgtgacgatcgattcacgtgcaatcaaaactaatatgttatttataccatttaaaggtgagaacgtagatggtcattgctttgtttcacaggcgttaaaagatggcgctggggcttctttctatgaaaagggccatgacattgatgataacgtgaagggacctattatatgggtagacgatacattaattgcgttacaacaattagctaaagcatatcttaaacatgtgaaccctaaagtaataggtgttactggttcaaacggtaaaacaactacaaaagatatgattgagagtgtattacacactgaatttaaagtaaaaaaaacgcaaggtaattacaataatgaaataggcttaccgttaactattttagagcttgatttagatacagagatttcaatattagaaatgggtatgtctggattccatgaaatagaattactttctaatatagcagaaccagatattgctgttattactaatattggtgaatcacatatgcaagatttaggttctcgtgaaggcattgctaaagctaaatctgaaataacaattggacttaaaaaagaaggaacattcatctatgatggtgatgaaccattgcttgaaccacatgttaaaaaaatcaaacacgctaaatgtttaagtgtaggtttgaaacaagataatgctttagtatgcgaagtagaacatagtgaaaatgatggcattgctttctctattaacggtaatgaacattataaattacctattctaggaatccataatatgaaaaatgcagctatcgctattgctattggtcatgaactaggacttaaatatgagactattcaacataacattaatcatgttcaacttactggtatgcgaatggaacgccatattactgatgatgatattactatcataaatgatgcttataatgccagtcctacaagtatgaaagccgcaattgatactttgagtcaaatggaaggtagaaaaattattgtacttgctgactcacttgaattaggggaaaatagtcgttcaatgcacgaagaggtaggcgcatatttagaaggtaaaaacatccatacattattaacatatggcaaagatgcaaagtatattagtgatattggaggacaatttgttgaccacgttgaatattttattgataaacaacaattaactcaatatttaataaataacttagttgctaacgacaaagttcttgtaaaaggttcaagaggaaataaacttgaagaagttgtaaataaattgatt

SEQ ID NO: 35354 - DNA, 1509 bp, Staphylococcus haemolyticus
ttgcaaaattttaaagaactagggatttcggataaaacagttgagacccttgaagcaatgggctttaaggaacccacacctatccaaaaagatagtatcccttatacattagaaggaaaagacatccttggacaagctcaaactggtacaggtaaaacgggagcgttcgggattcctttaatagaaaaagttgtgggtcaatcaggtgtacaagcgttaatattagcacctacaagagaattggctatgcaagtagctgaacaattaagagaatttagccgtggtcaaaatgtacaagttgtaacggtatttggtggtatgccaatcgatcgacaaattaaagctttaaaaagaggaccacaaatcgttgtaggtacaccaggacgtgtcattgaccacttaaatagacgtacattaaaaacaaatggtattcatacattgattttggatgaagcggatgaaatgatgaacatgggattcatcgatgatatgagattcattatggataaaattccagctgaacaaagacaaacaatgttattctcagcaacaatgcctaaagcaatccaaactttagtacaacaattcatgaaatctcctcaaatcgttaagacaatgaacaacgaaatgtcagaccctcaaattgatgaatattatacaatagtgaaagagcttgaaaagttcgatacatttactaatttcttagatgtacaccaacctgaattagccattgtcttcggtagaacaaaacgtcgtgtggatgaattaacaagtgctttattatctaaaggatacaaagcagaaggcttacatggtgatatcacacaagctaaacgtttagaagtattgaagaaatttaaaaatgatcaaatcgatatattagttgctacagacgttgcggcacgtggtttagatatttcaggtgtaagtcatgtatataactttgacattcctcaagatactgaaagctatacacatagaatcggacgtacaggaagagctggtaaagaaggcatcgctgttacatttgtaaatccaattgaaatggattacatccgtcaaattgaagattcaaatggaagacgcatgaacgctttaagaccacctcaccgaaaagaagtattaaaagcgcgtgaagatgatattaaagataaagtgaaaaattggatgtcacgagaaagtgaagcacgtttgaaacgtatctcaagcgagttattagaagaatatgatagtactgaattagttgcatcattactacaagaattagtagaagcaaatgatgaagtggaagtacaattaacatttgaaaaaccattagcacgtaaaaatcgccaaggtaaaggtaatggatcacgtcgtggtggaaaacgtaataacaagttcgataataaaaacaaacgttcaaaaggtaactttaataagaaaaaaggtaaaaaacctgaccgtcgtgaaagacaagacaaaggtagatctacgatgaaaggtcgaacattcgcagatttacaaaaa

SEQ ID NO: 35355 - DNA, 1071 bp, Staphylococcus haemolyticus
atgtggtataacaatcaactaacgcaatctttaaatattcaatatcctattattcaagcaggtatggctggtagtacaactgcggaacttgttgcaactgtaagtaataaaggtggtttaggctgtattggagcgggctactttactacaaaaaagttagagcaagaaattcaaaaagtgcaaggattaacatcacaaccatttggtgtgaatttgtttgtaccaagtcatcaatcatacactaatgaacaagtcgaacatatgaatgcttggctgaaaccctatcgtaaggcattaaatcttgaagagccagtagtcaatatttctgaagaacaacaatttaaaagtgcaattcaaactgtgattaaatatagagtaccagtatgttgtttcacctttggtatcccgtcaaaagaaatcattgaacaattaaaaggtgctaaaattactttaattggtacagctactactgtagatgaggcaattgcaaatgagcatgcaggtatggatattgtagttgctcaaggcagtgaagcaggtggacatagggggtcatttttaacaaccaacaatcagcgtgaaccgctcataggaacaatgagtttaataccacagatagttgatcatgtatcgataccagttgttgctgcaggtggtgttatggatggtcgtggtatattagctagtcagatactaggtgcacaaggtgtacaaatgggaaccgctttcttaactactgaagaaagtggcgcaaatcaattagttaaacaagcagtgcttcatagtaaagagactgatacaatagtcactgacgtatttagtggtaaatcagcacgcggtatcaacaatgaatttgtagagacgatgaaacaatacgaagggaacataccgccatatcctgtacaaaatcaactaactaattctattagaaagacagccgcttccacagggcatcgtgaatggacgcatatgtggagtggtcaatcgccacgtttagctacgtcacaacatgtcaatcaattgatggatcgacttgttgaacaagtaaaaacattattaacggttgttcga

SEQ ID NO: 35356 - DNA, 696 bp, Staphylococcus haemolyticus
gtgaagttaaccatttttcacacgaacgatattcatagtcatttaaacgaatatgcacgtataacatcttatatggcagaacatagacccaaacttcaacatccctcactctatttagatataggcgaccatgtggatttatcagcaccagtgactcaagcaacgataggtcgcaagaatatcgacttgcttaatgaggctcagtgtgatattgcgacgataggtaataatgaaggtatgaccatctctcatgaagcattaaataatttatataataatgcgacatttaacgtcatttgtacaaatgttatcgatgaagaagggaagttacctcataacatagcctcatcatgtattaaagaaattgaaggcgtacgtattttatttgtagcggcaacagcacctttcacaccattttacagagctcttgattggattgtaacggatcctttagaagcgattaaagatgaaatcgctaatcaacagggtaattatgatgtacttattgtgatgagtcatgtaggcatcttttttgatgaaaagttatgccaagagattcctgaaattgatgtgatttttgggagtcatacacaccatcattttgatgagggtgaaatgaataatggcgtacttatggcagctgctggtaaatatggttattatttaggtgaagttaatttaactattgaaattaaa

SEQ ID NO: 35357 - DNA, 1602 bp, Staphylococcus haemolyticus
atgctacaagtaactgatgtaagtttacgttttggcgatcgtaaactttttgaagatgtaaatattaagtttactgaaggaaattgttatgggcttatcggtgctaatggtgctggtaaatcaacgtttttaaaaattttatcaggagaaattgattctcaaacaggacatgtttcaatgggtaaagatgaacgtttagctgttttgaaacaagatcacttcgcctatgaagaagaacgtgtattagatgttgttatcaagggacatgaacgcttatatgaagtcatgaaagaaaaagatgaaatttatatgaaacctgatttcagtgatgaggatggtatacgtgccgctgaactagaaggtgaattcgccgaaatgaatggttggaacgcagaggctgacgctgcttctttactttcaggtttaggcatatctgctgatttacatgataagcaaatgtcagaattggaaaataatcaaaaagtgaaagtcttattagctcaaagtttatttggtgagcctgatgtacttttacttgatgagcctaccaatggtctagatattcctgccattagttggttagaggatttcttaattaacttcgataatactgtcatcgtggtatctcatgaccgtcactttttaaacaatgtatgtacacatattgctgatttagatttcggtaagattaaattatatgtaggtaactatgatttctggtatcaatctagtcaattagctcaaaaaatggctcaagaacaaaataagaaaaaagaagaaaaaattaaagagttacaagactttattgtacgtttctcagctaatgcctctaagtctaaacaggcaacaagtcgtaagaaacaattagaaaaaattgaattagatgatattcaaccatcttcaagacgttatccatatgttaaattcacaccagagcgtgaaatcggtaatgatttattgactgttcaaggactttctaaaacaattgatggtgaaaaagtacttgataacatttcattcactatgaatcctaatgataaagcaattttgattggagatagtgaaattgcaaaaactacattactgaaaattttagctggtgaaatggagcctgatgaaggtacatttaaatggggtgtaacaacttcattaagttacttccctaaagataactcagagttctttgaaggcgtagacatgaatttagtagactggttacgtcaatatgcacctgaatatgaacaaacagaaactttcttacgtggtttcttaggacgaatgttatttagtggtgaagaagttaaaaagaaagctagtgtgctctctggtggtgaaaaagttcgctgtatgttaagtaaaatgatgctatcaagtgctaatgttttactattagacgaacctactaaccatcttgacttagaaagtattacagcagtaaatgatggattagcttctttcaaaggatcaatcatctttacatcttatgactttgaatttatcaatactattgcaaatcgtgtgattgatctaaatcaatcaggtggtttatctaaagaagttccttatgaagaatatttacaagaaattggcgtattacaaaaa

SEQ ID NO: 35358 - DNA, 987 bp, Staphylococcus haemolyticus
atgacaagattagcagtagtcggagcaacaggtttagttggaacaaaaatgttagaaacaattgatcgcaaaaacatcaagttcgatgagttagtattattctcatcagctagatcagcaggtaaagaagttcaatttcaaggtcaaacgtatgttgtacaagaattaacagaagaagcagcaagtgaaaaatttgactacgttctaatgagtgccggtggtggcacaagtgcacaattcgccccaatctttgaaaaagcaggtgcaattgtcatcgataactctagtcaatggcgcatgactgaagatatcgacttaattgtacctgaagtaaatcaacctgaatttaagcgcggcattattgccaaccctaactgttctacaattcaatcagtagtaccattaaaagtattacaagatcaatttggtttaaaacgtgttgcatatactacttatcaagctgtttcaggttcaggtattaaaggtaaaagagatttagctgaaggtgcaaatggtaaagaaccagaagcgtatcctcaccctatttataataatgtgttaccacatattgatgtgttcttagaggatggatatacaaaagaagaacaaaaaatgattgatgaaacacgcaagattttacatgaacctgaattaaaagtaactgcgacatgtgcacgtgttccagtacaagatagtcatagtgttgaaattgacgttactttagataaggaagcaactgtacaagaaattaaagatttatttgataaagacgaacgtgttgtattagttgataaccctgaaaaaaatgaatatcctcaggcacttaactctactggtagagatgaagtatttgtaggccgtattcgtagagatgactcattagataatacattccacgtttggtgcacatctgacaatttattaaaaggtgcagcattgaatgcagtacaagtattagagcaagtaatcaatttaaaaggagctaga

SEQ ID NO: 35359 - DNA, 723 bp, Staphylococcus haemolyticus
atgaaaattttacttattggttacggtgcaatgaatcaaagagtggctcgattagcagaggaaaaaggtcatgaaattataggggttattgagcctcaaaaaaatgagacaacaccatatacacactatgatcacattgctgatgcacaaaatgaagcggatgtagcgattgatttttcaaatcctaatctattgttcccacttcttgaagaagagtttcaattacctttagttatagctactacaggtgaaaaggaaaaattaattgaaaagttaaatgaattaagccataacatgccagtattctttagtgcaaatatgagttatggtgtacatgctctaactaaaatattagaagcagctgtcccacttctgcaagattatgatatcgagttgactgaagcacatcataataaaaaagtagatgctcctagtgggacattagtaaaattatatgatgttattaaagacttacgccaaaatatcacaacagtttatgatcgacatgaacttacagaacaacgcactaaagacgaagttggcattcactcaattcgtggtgggactattgtaggtgaacatgatgtattatttgcaggaacagatgaaaccattacaatctcacataaagcacagtctaaagatatttttgcaaatggagcaatcactgctgctgaaaaattaataaaccaatctaacggttattacacgtttgacaaccta

SEQ ID NO: 35360 - DNA, 717 bp, Staphylococcus haemolyticus
atggtacaacatttatcagctgaggaaattattcaatatattagtgacgccaaaaaatctacaccattaaaagtatatgttaatggtaattttgatggtgttaccttccctgattcttttaaagtatttggttccgacaattctaaagtaatcttttgtgaagccgatgattggaaaccattctatgaatcaaaccaatctacaattactgagttagaaattgaaatggatcgacgtaattcagcaattccacttaaagacttaacaaatacaaatgcgcgtattgaaccaggtgcatttatacgtgaacaagcaattattgaagacggtgctgtcgttatgatgggcgcaacaatcaatattggtgctgtagttggtgaaggaactatgattgatatgaatgctacattaggcggtcgtgcgacaactggtaaaaatgtgcatgtaggtgctggcgccgttctagctggcgtaattgagcctcctagtgcttcaccagtagtcatagatgataatgtattaattggtgctaatgcagtcattttagaaggtgttcatgttggcgaaggcgcaattgtcgctgcgggtgcaattgttactcaagatgttccagctggtgcagtcgtagctggtacccctgctaaagtgattaaacaaacttcggaagtagaagactctaaacgtgaaattgtttcagcattaagaaaattaaatgac

SEQ ID NO: 35361 - DNA, 1116 bp, Staphylococcus haemolyticus
atggcagaattacaaaaaggtttagaaggggtaattgcagctgaaactaaaatcagttcaattattgatagtcaattaacgtatgcgggatacgatattgatgatttagcagaaaatgctttgttcgaagaagtagtgtttttattatggaattatagattgcctactcaaggtgaactagatgcattaagagaaaaattttatcattatatgactttaaatccaagagtttataagcattttgaagaatacgcaactgataatgtacaccctatgacggcactacgtacatctgtatcatatattgctcattttgatcctgatgctgaaaatgaaacagaagaaaatagaaaagaaagagcaatacgtattcaagctaaaattgcatctttagttacagcatttgcgcgtgttcgtgaaggtaaagaaccagttaaacctaatcctgaattaagttatgcagctaacttcttatatatgttgagaggggaattacctacagatactgaagttgaagcatttaataaagcattagtattacatgctgaccatgaacttaatgcttctgcatttactgcacgttgtgccgtttcttctttatctgatatgtactcaggtattgtagctgctgtaggttcattaaaaggaccattacatggtggtgcaaatgaacaagtaatgagcatgcttgctgatgttaaatcagtggatgaagttgatgcttatttagatgaaaaattcaaaaataaagaaaaaatcatgggattcggtcatagagtatacaaagacggagatccaagagccaaatatttacgtgagatgagccgaaaaatcacttctgaaactggtagaagtgaattatatgatatttcaatagctattgagaaacgtatgaaaaaagaaaaaggactcattcctaatgtcgatttctttagtgctactgtatatcacagtatggatattccacacgatttattcacaccaattttcgcggtaagtcgtacatctggttggacagcacatattctagaacaatatcgtgataatagaataatgcgtcctagagctaattacgtcggtgaaactaatcgtaagtatttaccaattgaagaaaga

SEQ ID NO: 35362 - DNA, 1266 bp, Staphylococcus haemolyticus
atgtcagctgaaaaaattactagaattaacgatggattaaatgtacctaatgaaccaattattccttttattattggtgatggtattggaccagatatttggaaagcagcgagtcgcgttattgatgcagctgttgaaaaagcatataacggcgaaaaacgtattgaatggaaagaagtactagcaggtcaaaaagcttttgatgaaacaggtgaatggttacctcaagaaacgcttgacacgattaaagaatatttaatcgctattaagggaccattaactacaccaattggtggtggtattcgttcattaaatgttgcattacgtcaagaattagacctatttacatgtttacgtccagttcgttggttcaaaggtgtcccttcaccagttaaacgtccacaagatgttgatatggtcatcttccgtgaaaatactgaagatatttatgcaggtatcgaatttaaagaaggtactgatgaagttaaaaaaattattgatttcttacaaaatgaaatgggtgctactaacattcgcttcccagaaacttcaggtattggtgtgaaaccagtttctaaagaaggtactgaacgtttagttagagctgcaattcagtatgcaatcgataataaccgtaaaactgttacgcttgttcacaaaggtaatattatgaaattcaccgaaggcgcatttaagcaatggggctatgatgtagctcataatgaatttgctgataaggtatttacttggcaacaatatgatgaaattgttgaaaaagatggtaaagatgcagcaaatcaagctcaagaaaaagctgaacaagatggaaaaatcattattaaagattctatcgctgacattttcttacaacaaattttaactcgtccagcagaacatgatgtagttgctacaatgaatctaaatggtgactatatttcagatgctttagcagctcaagtgggcggaattggaattgcacctggtgcaaacattaactatgagtcaggacacgctattttcgaagcaacacatggtactgcacctaaatatgctggtttaaacaaagttaacccatcttctgaattattaagttcagttctaatgttagaacatttaggttggcaagaagccgctgataagattactgatgcaattgaagctactattgcttctaaagttgtaacttatgattttgctcgtttaatggatggtgctactgaagtatcaacttcagaattcgctgatgagttaattaaaaacttaaag

SEQ ID NO: 35363 - DNA, 1350 bp, Staphylococcus haemolyticus
atgggaaaatattttggtactgatggattaagaggaatagccaataaagagttaacacctgaattagcatttaagttagggcgttatggcggttatgtattagcacataatgaaggtgctgacagaccaaaagttttagttggtagagatacacgtgtgtcaggtgaaatgcttgaatctgctttgattgcaggattagcttcaattggagctgaagttatgagattgggtgtaatatctacacctggagtagcttaccttactagagaaatgggagctgaattaggagtaatgatttcagcttcgcacaatccagtggctgataatggaattaagttcttcggtgcagatggttttaaattatctgatgctcaagaggaggaaattgaaacattattagatcaagataatcctgatttaccaagaccggtaggaacagatattgtacatttttctgattacttcgaaggtgctcagaaatatttaagctacttaaaatcaactattgatgttaatttagaaggattaaaaatcacacttgatggtgcgaatggttctacatcagcactagcacctttcttatttggagatttagaagctgatactgaaacaattggctgcagcccagatggttataatattaatgataattgtgggtcaactcatcctgaattattagctgaaaaggttcttgaaactgaaagcgactttggtttagcatttgatggcgatggtgaccgattaattgctgttgatgaaaaaggtaatattattgatggtgaccaaatcatgtttgttattggtcaagaaatgcataaaaaccaagaattaaacaacgatatgattgtttctactgttatgagtaatttaggcttctataaagctttagaaaacgaaggtatcaaatctaataaaacaaaagttggagatagatacgtagtagaagaaatgagaaaaggtaactacaaccttggtggtgagcaatctggacatattgttatgatggattacaatactacaggagatggcttattaactggtgttcaattagctgctgttattaaaatgagtggtaaacctttaagtgagttagctgctcaaatgaaaaaatatccgcaatctctaattaacgttaaagttacagataagcatcatgtagaagataatgaagatgttaaaaaagtgatggatgaagtagagactgaaatgaatggtgaaggcagaattttagttagaccttcaggtacagaaccattagttcgtgtaatggtcgaggcttcaactgatgaagatgcgcaacgttttgcacagcgaattgctgatgaagttcaatctaaaatgggcttagag

SEQ ID NO: 35364 - DNA, 1803 bp, Staphylococcus haemolyticus
atgtgcggaattgtaggatatattggatatgataatgcaaaagaattgttattatcaggattagaaaaattagaatatagaggatatgactcagctggtattgcagttgcaaacgataatggtacaactgtttttaaagaaaaaggtcgtattgcagaattaagaaaagttgctgacaacaatgacactgatggtcacgttggtatcggtcacacacgttgggctacacacggtgtaccaagtacagtgaattcacatcctcatcaatctaataatgaacgttttacattagttcataatggtgtaattgaaaattatgaagaattaaaaagtgaatatttatcagatgtaacattccaatctgagacagatacagaagttattgttcaattagttgaacatttctcgaacaaaggtttagaaactgaagaagctttctctaaagttgtttctttattacacggttcatatgcattaggcttacttgataatcaagatagcgacacaatctatgtagctaaaaacaaatcacctttattagttggagttggagaagggttcaatgtcattgcgtctgacgcattagctatgattaaagtaacaaacgaatataaagaaattcatgatcatgaaattgttattgttaaaaaagacagtgtaactattaaagaccttgatggcaatgtacaagatcgagacacttatactgctcaaattgatgcttcagatgctgaaaaaggtatctatgatcactacatgcttaaagaaattaatgaacaaccagcagttatgcgtcgtattattcaagagtatgaagatgaaaaaggcgacctaaaaattgatcctgaaattgttaaagatgttgcagctgcagatcgtatatatatcatcgcagcaggaacaagttatcatgcaggtttagttggtaaagaatacttagaaaaatgggctggtgtacctactgaagtacatgtagcttctgaatttgtttataacatgccactattatctgaaaagccattattcatctatatttctcaatcaggtgaaactgctgatagccgtgcagtgttagttgaaactaacaaattaggttacaaatcattaacagttacaaatgtggctggttcaacattatcacgtgaagcagatcatacattgttattacatgctggtcctgaaattgcagttgcttcaacaaaagcatatacagctcaaattgctgttttatcaatcttatctcaagttgtagctaaagcacacggtcgagataatgatattgatttattgagagaattagctaaagtaacaactgcaattgaaacaattgtagatgatactccagtaatggaacaaattgctaaggatttcttagaaacaacgcgtaatgcattcttcattggtcgtacaatggactataatgtaagtcttgaaggttcattaaaattaaaagaaatttcatatattcaagctgaaggattcgctggtggagaacttaaacacggtacaattgcattaattgaagacggcacacctgtaatcgcattatctacacaagaaaaggttaacttatctattcgtggtaatgtcaaagaggtagtagcacgtggagcaaaaccatgtattatctctatggaaggtttagaaaaagagggagatacttatgtaattccacatgtacatgagttattaactccgcttgtatctgtagttacattacaattaattgcttactatgcagcgctacacagaggattagacgtagataaacctcgtaacttagctaaatcagttacagttgaa

SEQ ID NO: 35365 - DNA, 1476 bp, Staphylococcus haemolyticus
atggtagtaagtaagtcaagtccattaatttttgaaagatctagagaaggtagatatgcatactcattacctcaaagcgatataaaaacagattcagttgaaagtattcttgatgataaatttattcgtaaaaataaagcagagtttcctgaagttgcagaattagatttagttcgtcattatactgaattatcaaataaaaactttggtgtagattcagggttttatccactcggatcatgtactatgaaatataatcctaaaatcaatgaaaaagttgctcgcatacctggatttgcagagtcacatcctttacaagaagaagagcaagttcaaggttctttagaaattgtgtatagtttacaagaagaacttaaagaaattactggtatggatgaagttacattacaaccagctgcaggtgctcatggtgagtggactgctttaatgattttcaaagcgtatcacttagataatggtgaaggtcatcgtgatgaagttattgttcctgactcagctcatggtacaaaccctgcatctgcgtcgtttgctgtttttaaagctgttacagttaaatcaaatgaacgtggtgaagttgatattgaagacttaaaacgcgatgttaatgaaaatactgctgcaattatgttaactaatcctaacactttaggtattttcgagaaaaacatcatggaaatccgtgaaattgtacatgaagcaggcggattattatactatgacggtgcaaacttaaatgccattatggataaagtacgtcctggagatatgggatttgatgcggttcatttaaacttacacaaaacattcactggtcctcacggtggcggtggtccaggttcaggtccagttggtgtaaaaaaagaattagctagttatttaccaaaaccaatggtaatcaaagatggagatacttttaaatacgataatgatattaaaaactcaattggacgtgtaaaaccattctacggtaattttggtatttacttaagagcatacacatatataagaactatgggtgctgaaggtttaagagaggtttctgaagcagcagttcttaatgctaattatattaaagctagcttaaaagaccactatgaaattccatatgagcaatattgtaaacatgaattcgtattaagtggttctaaacaaaaagaacatggagtccgtaccttagatatggcaaaacgtttattagactttggtgttcatccaccaacaatttatttcccacttaacgttgaggaaggtatgatgattgaaccaactgaaacagaatctaaagaaacgttagattactttatcgatgctatgattcaaattgctgaagaagctaaaaatgatccagataaagtattagaagcaccacatagtacaataattgatagattagatgaaactaccgcagcgcgtaaacctgttttaaaatttgataatctacatgaagaaaaagaa

SEQ ID NO: 35366 - DNA, 384 bp, Staphylococcus haemolyticus
atgaatgtatctttgattatagctttagctattatagtcataattattttatatatgcttggaaattggtttatgaataaacgagcagtcactgaacttgagcagaatgaatttcacaaaggtttaagaaaagctcaagtgattgatgttcgtgagaaagtagactatgattacggacatattaatggcgctcgtaacattccaatatcaatgtttagtcaaagatatcaaggtttacgtaaagatcaacctatttatctttgtgatgcaaacggtgtcgcagggtatcgtgcagcacgtatccttaaaaaaaatggctataaagatatttatatgttaaaaggtggatacaaaaaatggacaggtaagattaaaactaaaaaa

SEQ ID NO: 35367 - DNA, 1058 bp, Staphylococcus haemolyticus
atgaataaattagcaaaagttcaagacttactagatgttcaacaattggatgctttagttattttatcagattataatcgtagatatttatcagatttcactggtacaagtggtgcattaataatttcaaaaaataactatcaattaattactgattttcgatatattgaacaagcaactaatcaagcaactaaatttaacatcatcaaacgcagtggtggtttaattgaagcgattgtagaaattattaatcatgaacaatttaatcatgttggttttgaaggacacttagtgagttatgatacataccaaacattagatcaatcgaaagctaaattaatctctattggaaatgagattgaaaaaatcagagaaataaagacacccgaagagatagaaaagattaaatacgctgctaaaatagttgatgatacatataactatgtattagatattgcaaaggttggaatgactgaaagagaattaaaaagtaaattagaagctaaaatgttagaattaggcgcagatggcccttcatttgacacaattgtagcatctggttatagaggcgctttacctcatggtgtagcaagtgataaagtcatagagcaaggcgatatgattacgcttgattttggggcatactatagaggatattgctctgatataacaagaacatttgctataggggaacctgactctaagatgaaagatatttataacattgttctcaattcccaaattaaagcaatcaacgaaataaaagctggaatgactgtagctgagctgacgcgttatcaagagactatattgaatctcatggttatcgggaggcattcggtcactctcttggacatggaattggattagacattcatgaaggaccattattatctaaaaatgcaaagggtataatacaagtaaataattgtgttactattgaaccaggtatttatgttgatggtcttggtggcgtacgtatagaagatgatattttaataactgaaaatggttgtgaagtctttactaaatgtacaaaagaccttattattttatag

SEQ ID NO: 35368 - DNA, 1353 bp, Staphylococcus haemolyticus
atgaaaaaaatcttaatcgctaatcgtggagaaattgcggttagaatcattagagcttgtcatgatttaggcatacaaactgttgccatttattctgagggagacaaagacgcgttacatactcaaattgctgatgaagcatattgcgttggtccaactcagtctaaagattcttatttgaacattccaaatatattatcaattgcgacttcaactggttgtgatggtattcatccaggttatggctttttagctgagaatggtgattttgcagagctgtgtgaagcatgccaattgaaatttatcggtcctagctatgagtctatccaaaaaatgggcatcaaagacattgcaaaagcagaaatgattgcagctaatgtcccagttgttccaggtagtgatgggctagttacaaccatttcggatgcaaaacaaattgctaaagaaattggatatccagtaattattaaagctactgcaggtggtggtggaaaaggtatacgagtggctagaacagagaaagagcttgagaatggctatcgtatgactcaacaagaagcagaaactgcttttggtaatggcggtctttaccttgaaaaatttattgagaacttccgtcacattgaaattcaaattattggagatcaacatggaaatgtcattcatctcggagaaagagattgtacgattcaaagacgcatgcaaaagttagtcgaagaatctccatctcctattttatctgatgaacaacgtgaagagatgggtaatgcagctataagagctgcaaaagcagttaattatgaaaatgcaggtactattgaatttatatatgatttaaatgataatcaattttattttatggaaatgaatacacgtattcaagttgaacatcctgtcactgaaatggttactggcattgatttagtaaaattacaactaaaagttgcgatgggtgaagcactcccatacactcaagaagatattactatcaatggtcatgcaatagaataccgtataaatgctgaaaatccatataagaacttcatgccatctcctggtaaaatcacacaatacctagctccaggcggatatggtgtaagaattgaatcagcttgttatacaaattatacaattcctccatattatgattctatggtagctaaactcattgttcatgaaccaacgcgtgatgaagcaattatgactggtcttagagcattaagtgagtatttaattttaggaatcgatacaacaattcctttccatttaaaacttatgaataatgatatatttagaagtggatcttttaatactaacttcttagaacaatataatattatggatgacgaggag

SEQ ID NO: 35369 - DNA, 384 bp, Staphylococcus haemolyticus
atgagtcgtaaagaatcaagaatgcaagcatttcaaactttgtttcagttagaaatgaaagacacagaattaacaatcaatgaagccattaatttcataaaagatgatgagcctgaattagactttgattttatacattggttagtaacaggtgttaaagatcatgagccagttctagatgatactattaagccacatcttaaagattggtcacttcaacgtttattaaaaacagaccgaataatattacgaatggctacatttgaattattgcatagtgatacaccaccaaaagtaatcattaatgaagctgtagaattagcaaagcaatttagcgacgatgagcattataaatttataaatggtgtgttgagtaacataaaa

SEQ ID NO: 35370 - DNA, 1339 bp, Staphylococcus haemolyticus
atgacaatgtctgaatacttaagcgttacaactttaacgaaatatattaaatataaatttgatcaggacccacatttgcaatctatcttactaaaaggtgagctttctaactttaaaaaacattcaagtggacatctttatttcaacgttaaagataaggatagtgtgataagtgcaatgatgtttaaaggtaatgcgaaccagcttacttttgagccaaaagaaggtgatgaagtccttttagaagcacgtgtttcagtatatgaacgacgtggaaattatcaaatttatgtgaataaaatggaattagatggtatagggaacttgtatcaaaagttagaacaattaaagcaaaaattaaaaaaagaaggcttttttaataatgaacataaaaagcctattcctcgattccctaaaaaaatcgcaatcttaactgctagtactggtgccgcaattagagatattcaatctacaataaatagtagatatcctttggccgaaaaaatccaaataagtactttagtacaaggtacacaagccaaagaggatattataaaaaatattaaatatgctgattcacttggcgttgatactattattgtaggccgtggtggtggatctatagaagatttatggaactttaatgaagaagatgttgttaaagcgatttttgagtgtcaaacacccattatttcagctgttggacatgaaaccgattttactctcagtgatttcgtagcagatgtcagagcagcaacaccaacacaagctgcagttatggcgactccagatcagtatgaattgatgcaacaaattaagcaataccaattttcattatcaaggtatattaaacagtatcttgaaaaacaatataaacaactagatcatttagcatcttattataagtttaaacaaccctcattattatacgatcaacagatacaacgcaaagatgacttagaaagacaactaactcaattattattatccaaaattgagaataaaaaatatcaattaaaagttcttcatcagaattttaatgtaaaaacattaaatcaaactatattacaaaataaaaggcaactaatgaatgttaaaaatcgtttatcaaatctaacaatgaaaaacattcataataataaattagagctcaaaaataaagttgaactattaaatacatttaagtcctactaatactatgttgagaggctattctattattaataaagatgataaagtcattacaagtacacaggatttaagtaaagatgatgaaattacattagcaatgaaagatggtaacgtggatgccatcgttaaaaagggtaggtgtgaacat

SEQ ID NO: 35371 - DNA, 519 bp, Staphylococcus haemolyticus
tgtgactattctaagtctagtaatagagatggatttttctataatacattcgtagaaccaatgtctaaagtattacattggttaggccattcagtatttaacgatgactacggtattgcaattatcgtattagttttagtaatacgtattatcttgttaccattcatgctatcaaactataaaaatagtcatttgatgcgtgaaaaaatgaaagttgccaaaccagaagttgatggtgtgcaagagaaagttaaacgtgcacgtactcaagaagagaaaatggcagcaaaccaagaaatgatggaagtttataagaaatacgatattaatccaatgaagagtgcattaggatgtttacctgtattaattcaaatgccagttgtcatgggattatactttgtattacgttaccgtattggtggcggtattgcagaacatcctcacttcttatgggttaatttaatacatccctgatatttggattactatcattgccaggtgtgctttactttatccaag

SEQ ID NO: 35372 - DNA, 1273 bp, Staphylococcus haemolyticus
atgataaaatgtactaaaacatcgttaggagagattgtggtgtatcgttacgaagatgacagtttaatgttacataatgacttataccaaattaacatggcagagagctattggaatgatggtattcatgaacgaaatgcagtatttgatttgtattttagaagtatgccatttgagagtggatatgcagtttttaatggtttaaaaagagtaattcaatttattgaacattttcattttagtgattctgatattgaatatttacagtcaataggttataaaaatgatttcttaaactatttaaaaaatttaaagttcactggtaatattcgctcaatgcaagaaggtgaattgtgttttggaaatgaaccattacttagagtggaggcaccattaattcaagcgcaacttatagaaaccgtattacttaatataatcaacttccatacattaatttcgactaaagcaagtagaattcgtcaagtagcacctgatgatacattaatggaatttggaactcgccgtgcacaagagttagatgctgcgttatggggggctagagctgcttatatcggtggttttgattctactagtaatgtgcgttccggtaaattatttggtatacccgtttctggtacgcatgcacacgctttagttcaaacatatggtgatgaatataaagcttttaaaatttatgcagaacgccataaaaattgtgtgttcttagttgatacgttccacacgcttaaatcaggtgttcctacagctattaaagtagcgaaagaactaggggataaaatcaatttcattggtatccgtttagattctggagatattgcttatttatctaaagaagcacgcagaatgttagatgaagcgggattcaaagatgctaaaatcatcgcatctaatgacttagatgaacaaacgataatgagtttgaaatctcaaggagctaaagttgactcatggggtgtaggtacgaaattaattactggttatgaccaaccagcacttggtgcagtatataaactagtagcagttgtagatgacaacggccgatatgttgatagaattaaactgtccaacaatgcagaaaaagtgacaacacctggtaagaagaaagtgtatcgcattataaatactaaaacaggtaaagcagaaggcgactatattactctagaacatgagaatcctaataatgaaaaacctttaaaaatgttccatccagttcacacgtataaaatgaaacatatcaaacactttgaagcga

SEQ ID NO: 35373 - DNA, 765 bp, Staphylococcus haemolyticus
atgacacaaacaattaatgaagcaaagcacatattgtctgaaattaactcaattgaagttttagaaaaacatgaattaaatcaagacgttcgtaaagggatacaacaagctattacaagacgtcgtaaacaacttttaaaagaacaagaaattttagaccattacaatacaatgaataaatttgaaagtgagttgctgaataacaatcctcaagcattaatctgtggtattgacgaggttggacgtggtccgttagcaggtcctgttgttgcatgtgcggtgattttaaatgaagggcatcgctatttaggacttgatgattctaaaaaagtaacagcgagtaaaagacaaatacttaataaaaagcttaaagatggggtgttggagtatgcctatggtttagctagtccagaagagatcgatgaattgaatatatataatgcaactcaagtagcaatgaatcgagctttgagtcaattagtaaatcgtccagatcatttattaatagatgcaatgtctttagatacaacaattcctcaaacatctattattaaaggcgacgcaaagagtgtgtctattgctgcagcaagtataatggcaaaagagtacagagatgatttaatgaaagagattgcagatgaatatccaggatatgaatttgagaaaaatgtgggttacggaactaaagcacatttagatggcctaaataaactcggtattacaccttatcatcgtaaaagctttgaaccaatcaaatctatgacg

SEQ ID NO: 35374 - DNA, 882 bp, Staphylococcus haemolyticus
atggcaattcaatggtatccaggacatatggcaaaagctaaacgagaggtaacagaacaattaaaaaaagtagatgttgtatttgaattagttgatgcacgtattccatatagttctcgtaacccaatgattgatgaagtaatcaaacaaaaaccgcgcgtagttattcttaataaaaaagatatgtccaatttaaatgaaatgcagaaatgggaaagcttctttatagataaaggatattatcctgtatcagtagatgctaagcatggcaaaaatttaaaaggtgtagaaactgcagctatagcagcaacaaaagaaaaatttgaacgtgagaaggctaaaggacttaaacctagagcaattagagcaatgattgttggcatacctaacgttggtaaatcaactttgattaataaattagcacgtaaaaatattgcacaaactggtaataaaccaggtgtaaccaaacaacaacagtggattaaagttgggcaatctctacaattattagatacacctggaattttatggcctaaatttgaagatgaaattgttggtaaaaaattaagtttaactggcgcaataaaagacagtattgtacatttagatgaagttgctatctatggtttacagtttttaattaaccatgatttagaaggttttaagcaacattataagattgatgtatctgcagatgctgaaatattagaatggtttgatgcaattggacgtcgacgtggacttttacaaagaggcaatgaagtagattacgaagcggttattgaactgataattaatgacgttagaaatgccaaaattggaacatacagttttgacttatattcagaaatgaagagtgaattagataatgacacaaacaat

SEQ ID NO: 35375 - DNA, 552 bp, Staphylococcus haemolyticus
atgaaaattggtgtattagcattgcaaggtgccgtacgtgaacacatccgtcatattgaacttagtggtcacgaaggtattgcagttaaaaaggttgaacaattagatgagatagatgggttaattcttccaggtggcgaatctactacattgcgaagattaatggatttatatggatttaaagaaaagttacaacaatctgatttaccaatgtttggcacatgtgcaggtcttatcgtactagcgaaagatgtcgaaggtgaaactggctatttgaagaaattagacataactgttgaacgtaattcatttggaagacaagtagacagttttgaagcagagttagatattaaaggtattgctgaagacattgaaggtgtatttattagagcacctcatatcgctaatgttgaagagggcgtagaaatattaagcacagttggcgataagattgtagcagtaaagcaaggcaagtatttgggcgtatcattccatccggaattaacagatgactacagagtaacgcaatactttattgatcatatggttaaa

SEQ ID NO: 35376 - DNA, 885 bp, Staphylococcus haemolyticus
atgtctaaaatcgtaggatcagatcgagttaaacgaggaatggctgagatgcaaaaaggcggcgttattatggacgttgttaatgcagaacaagctaaaattgcagaagaagctggcgcagttgcggttatggctttagaacgtgtaccatctgacatcagagcagctggtggggtagcacgtagcgctaatcctaaaattgttgaagaagttatgaatgctgtatcaattccagttatggcgaaagcacgtattggtcatattactgaagcacgtgtgttagaagctatgggcgtagattatattgatgaatcagaagtgttaacacctgctgatgaagaatatcatttaagaaaagatcaattcacggttccttttgtatgtggttgtcgtaacttaggtgaagctgcgcgtcgtattggtgaaggtgctgcaatgttacgtactaaaggtgaacctggtactggtaacattgtagaagcagttagacatatgagaaaagttaattcagaagttagtcgcttagttgtgatgaatgacgatgaaattatgacttatgctaaagaacttggtgcgccttatgaagttttaaaacaaatcaaagatcacggacgtttaccagtagttaactttgcagctggtggcgttgctacacctcaagatgctgctttaatgatggaattaggtgctgatggtgtatttgttggttcaggtattttcaaatctgaagatcctgagaaatttgctaaagcaattgttcaagctacaacgcattaccaagattatgagcttattggcaaattagcttcagaattaggcacagcaatgaaaggtttagatattaatcaaatctcattagaagaacgtatgcaagagcgtggttgg

SEQ ID NO: 35377 - DNA, 2043 bp, Staphylococcus haemolyticus
ttgcttaaaaggttaaaggaaaagtctaatgacgaaaaaataaagcacacaatgaataaacgaataagttttgtgtttggtgctattgtagttatatttggaattatagttttaaggttaggatatttacaaattgcgcaaggctcccaatacagccaactagttaaaaacgatgaaaacataactgtaaatgaatctgttcctaggggaagaattcttgataggaatggaaaagtattagtagataatgcttctaaactaacgattacatacacaagatctaggaaaacaagtcaaaaagatatgctcgatactgcaaaaaaattgtcatctctcattactatgaaaactgacaaaattactgaaagagataaacaagatttttggattcagaaacaccaagatgaagtagacaaattaatgaaaaaagaaacttcaatgttaaatgaaggtagtattacccaagatcaatatgataaacaattatataaaaaggttggagacaaacaaattaatagtttatcaaaaaaagacttacgagttttagcaatttatcgtgaaatgtctgctggttctaccatgaacccgcaaacaattaagaatgaggatgtaagtgaaaaagaatatgctgcagtgtcacaacaacttgatagtcttccaggtgtaaatacaactatggattgggaccgacgctatccttatggtgatacattaagaagtatatttggtagtgtatctacatcaagtgaaggtattcctaaagaattgaccgaacaatatttagctaaaggttattctcggaatgatagagttggtaaatcctatttagagtatcaatatgaagatattttacgtggtaagaaaaaagaaatgaaatatactactgataaatctggaaaagtcataaactctgaagtcattaatcctggatctagaggcgatgatttacagttaacaattgatatagacttacagaagaaagtagaatctttattagaaaatcaaatcaagacgttacgcagtcaaggtgctaaagatatggataacgcgcttattgtagtgcaaaatcctaaaaatggcgatattttagctatggcaggaaaacaaatcgataaaaatggtaagctaacagattatgatttagggaactttactggtcaatttgcagttggttcttcagtaaaaggtggaaccctattagctggatatcaaaataatgcgattaaagttggcgaggaaatgatagatgagccacttcattttaaaggtggattaacaaagcgctcatactttaataaaaatgataaagtcagaattaatgataaagaagcattaatgcactcttcaaacgtatatatgtttaaaactgctcttaaattagccggagatccttactatagtggaatgggcttacctacagatataagtgaagctggccagaaattaagaaaagggcttaatcaagtcggattgggagttaaaacaggtattgacttgccaaatgaaacaataggtcaaattgaaccattaacaaacaattcaggcaattatcttgatttatcaattggtcaatatgacacatatagtccaattcaattatcacagtacgtttctacaatagctaatgatggttatagaattcaaccacacattggattagcaattcatgatgctacaaatagtgatgacataggtccagttaaacaaaaaattaaaggcaatgtcttaaacaaagtaaataattcagaagatgaaattaaagaagtacaaaaaggatttgaaatggcattcaatgaaaaagatggaacaggctattcaagtttccacaaaacaaaagtaccttctgcagggaaaactggtactgccgaagtattccaagatggtgaatcaagagttaattcaacttatataggttatgcaccaatcaataaccctaaactatcattttcaattgtttacaccaatcaacctgttccaccaccatggttaaatggcggagatttaggtagagacgtcattaattattattttgatgataaaaag

SEQ ID NO: 35378 - DNA, 539 bp, Staphylococcus haemolyticus
atgagtaaaaaagagattagaaaagaaatattatctcaaatgaaacaattagataaagaacacaaacttcgtgcagacgcatggttgaagaatcaattaatcaataatactgaatataaaaatgcgaaaagaataggtattgttttatctatgactcatgaagtagatacttatcccatcatcgaaacgatgttatctgatggtaagaaagtctttgttcctaatacaaactacaaatttaaaaagaaatgaattttaaacaactattatctttaaaccgtcttgaaaaagatgaaaaaggcttattatatgttaatgatgacactgaaattactgatcaattagatttaattgttgttcctggagttgcttttagagatgatggttatcgaataggttatggtggaggatattatgatcgcttcttaagtgattcaaatgccaatactattagtttaatttatgacctacaattaacacagtttgaaatcgaatcccatgatcaacctgttgaaaaattaataattttcaatacttaa

SEQ ID NO: 35379 - DNA, 690 bp, Staphylococcus haemolyticus
atgccttttacacctagtgaaattaaaaataaagaatttacaaaagtgaaaaatggtttagaaccagctgaagtaagtgattacttaaatcaattaagtaatgaaattgaacgtttaaaagaagaaaaaaaacagcttgaaaaagtaattgaagagagagatactaatattaaatcttatcaacaagttcatcaatcagtaagtgatgcccttgttcaagctcaacaagctggagaagagactaaattggctgctaataaagaagctgaagctgttatcagtaaagctcaagcacaagcagatttaattgttaatgacgctatcgaaaaagcacgtcatttatcattccaaactgaagatatgaaacgtcaatctaaaatattcagatcacgtttccgcatgctagttgaagctcaattagatttacttaaaaatgatgattgggattatttattaaactatgatatcgatgcagaaaaagtcacacaagaaaatttccaacatttaaatagccaagacattacacctgaagaacaacttagcgctcaatctcaacaatctgaaagcgtgcttgcaagcgagagtaataacagtaaaacaaattcactaagtacaagtgacgcaactagtacaagtgagaacgttacttcacaatcaagcgtgagtcaaagcgaatcaacatcaaataaa

SEQ ID NO: 35380 - DNA, 2735 bp, Staphylococcus haemolyticus
tataaagatactttattaatgccaaagactgactttcctatgcgtggtggattgccaaataaagaaccgcaaatccaagaacaatgggaagctaacaatcaataccaaaaagcattagaaaaaaataaaggtaaccaatcttacatcttacatgatggaccaccgtatgcgaatggtaatttgcatatggggcatgcgttaaacaaaatcattaaggatattattgtacgttataaaacgatgcaaggtttttacgcaccatacgttccaggttgggatacacatggcttaccaattgaacaagctttgactaaaaagggcgtagatcgcaaaaaaatgtcaattgctgaatttagagaaaaatgtaaggaatttgcgttagaacaaatcgaattacaaaagaaagactttaaacgtcttggtgtacgaggagattttaatgatccttatatcacgcttaaacctgaatatgaagctgctcaaattcgtttatttggtgagatggcggataaaggattaatttataaaggtaagaaaccagtttattggtcaccgtcaagtgaatcgtctttagccgaagctgaaattgaatatcatgataaacgttcagcatctatctatgtagcatttgacgtgaaagatactaaaggtgtagtagatcaggatgctcaattcattatttggacaactactccatggactattccatctaacgtagcaattacagttcatcctgatttaaaatatggtcaatataatgtgaatggcaagaaatatattatcgcacaagcattatctgaagatgtagcagaagctttagaatgggataaagatgccattcaattagaaaaagaatttacaggtaaagagttagagtatgttgaagcgcaacatcctttcttagatagaatctcacttgtaattaatggtaatcatgttacaactgatgctggtacaggttgtgttcataccgctcctggtcatggtgaagatgactatatcgttgggcaaaaatatgatttaccagttattagtcctttagatgataaaggtgtgtttactgaagaaggtggacaatttgaaggtatgttttatgataaagctaacaaagcagttactgacttattaactgaaaaagacgctttattaaaattaaactttattacacatagttaccctcatgattggcgtactaagaaaccagttatcttccgtgctacaccacaatggtttgcctctattaataaagtaagacaagatattttagatgctattgaagaaacagatttcaaagtggattggggtaaaacacgtatttacaatatgatccgtgatcgtggagaatgggttatttctcgtcaacgtgtatggggagttccactacctgtattctatgccgagaatggcgatatcattatgacgaaagaaacagttaaccacgtagctgatttatttgaagagcatggttcaaatatttggtttgaaagagaagcaaaagacttattacctgaaggctttacacaccctggtagtccaaatggtacttttacaaaagaaatggacattatggatgtttggtttgactctggttcgtcacatcgtggtgtattagaaaatcgtccagaattaagtttcccagctgatctatattttgaaggtagtgaccaatatcgtggttggtttaactcttcaattacaactgctgtagcaactagaggtcaagcgccttataaattcttattatcacacggctttgtaatggacggtgaaggtaagaaaatgagtaaatcactaggtaatgttattgttcctgaccaagttgtaaaacaaaaaggtgctgacattgcacgtttatgggtaagcagtactgattatttagcagacgttcgtatttcggatgaaatcttaaaacaaacttctgatgtttatcgtaaaattagaaatactttaagatttatgcttggtaatattaacgattttaatcctgatactgatgtaattcctgaagcagaattacttgaagtcgatcgttatttactaaatcgtttacgtgagtttactgctagcacaattgaacattatgataactttgattatttaaatatttatcaagaagtacaaaactttataaatgttgaattgagtaatttctacttagattacggtaaagatattctttatattgaagagaaaaatgcgcataaacgtcgtagtatgcaaactgttctataccaaatcttagttgatatgactaaattattagcacctattttagttcacacagctgaagaagttggacacacacaccgcatgtaaaagaagaaagtgttcatttagctgacatgcctaaggtagttgaagttgatcaagcattgcttgacaaatggaatcaattcatggcattacgtgatgatgtaaaccgtgcgttagaagttgcacgtaataataaagttattggtaagtctcttgaagcaaaagttgtaattggtaataacgacaactttaaagctgcagagttcttacaacaatttgaagatttacaacaattattcattgtttcacaagttgaagtttcagattctgtagacaatgcagaggcttatcaacatggtgatattagaattgaccatgcagtaggtgaaaaatgtgaaagatgttggaactatactgaagaattaggttcagtaggtgaattagaacacttatgtccacgatgccaagaagtagttaaaact

SEQ ID NO: 35381 - DNA, 456 bp, Staphylococcus haemolyticus
atgaattttgaaggtaaattggtaggaacagatttaaaagtagctattgtagtaagtcgatttaatgattttattacgaaccgtttattagatggtgcaaaagatacacttgttcgtcatggtgtggaagatagtaatatagatgttgcttatgtacctggtgcatttgaaattcctttagtttctaaaaaactagctcaaaaaggtgaatatgacgcagtcatcactttaggttgtgtaattagaggtgcaacatctcattatgattatgtatgtaatgaagttgcaaaaggagtatcaaaggcaaatgatgtaagtgatattccagttatatttggcgtattaaccactgaaagtattgaacaagcggttgaaagagctggaactaaagcgggtaataaaggtgctgaagcagcagtaagtgctattgaaatggcaaatttattaaaacaattt

SEQ ID NO: 35382 - DNA, 1179 bp, Staphylococcus haemolyticus
atggaatttgacgaaattaaggatgcattaaatgctttaaaacgtggtgaaagtattattgttgtggatgacgaggatcgtgaaaatgaaggagatcttgtagctataacacaatggatgaatgataatactattaattttatggctaaagaaggtagagggctaatttgtgcaccaattagtaaagacttggcactcaaatttaatctaatgcctatggtagaacataacacagatggttttggaactaattttacagtaagtatcgatcacgctacaacgtcaaccggtataagtgcatttgatagaatggcaacggcacgcgctttaattaatccagaatcaactcctgaagatttccataaacctggtcatctttttccactaatagctaaagaaaatggtgtcttggaacgtactggtcatacagaagcagctgtagatttagcgaaattaacgaaagcagctccagcaggtgttatatgtgagatcatgaatgaagatgggacaatggctaaaggtgagcaactagaagcgtttaaacatcaacatggtcttaaaatgattactattgaaagtttagttaattatcaaaaagacaaagacactagtgttgagttaaaagcaaaagttaatatgccgacagatcatggagcttttgaaatgtatggattcgaatcatcattaactaaagaagaaattgttgtacttgctaaaggggaaccacgtgtcacagagaatgtgcgtattcattctgcatgtttaacaggtgatattttccatagtcaaagatgtgattgcggtgcacaactagaatcagcgatgaaatatattaatgagcatggtggcatgatcatttatttgcctcaagaaggaagaggcatagggttaatcaataaattaagagcatacgaattaattgaacaaggtcatgatacagtaactgccaacctagctttaggatttgatgaagatttaagggattatcatatagctgctcaaattttgaattatttcaatgtacaacaagtgaatttgttaagtaataatcctaaaaaatttgagggattatctgagtatggtattaaagttgcggaccgcacaccaattattgtagctgaaactgaacataatcatgattatatgaatactaaaaaaataaaaatgggacatttaatt

SEQ ID NO: 35383 - DNA, 630 bp, Staphylococcus haemolyticus
atgtttacaggtattgttgaagaaataggtaccgtcaaaaatattcgtactcatcaatcggttagaacattggatatagcttgtcaaactatcacagaagacatgcatatcggtgactctatcagtgtgaatggagcttgtttaacagtgattgacttcacaagtaattatttttctgttcaagtcataaaaggtactgaagataaaacatatctatctcaaatcaataaaaatgatgaagtcaacttagaaagagcaatgtcaggaaatggacgttttggaggtcattttgttttaggtcatgttgatgacaaaggtgttataacacaagttaaagaaactcctaattctagaatagtttcgattagagcatcttcaactatcattaatcaaatggtcaaacaaggatcaatcactgtggatggtgtgagtttaacaattttcgatttacgacatgatagttttgatattcatttaatacctgaaacaagacgttcaacgattttatcttctaaacaaaatggcgaccaagttcatttagaaacggatgttctttttaaatatgttgaacgaatggtaagtagaaatgagtcagagcttacattagataagttaaaagcatttggcttt

SEQ ID NO: 35384 - DNA, 1041 bp, Staphylococcus haemolyticus
ttgagtaattttatggaatacgctatacaactcgcacaaatggttaaaggacaaacgggtatcaatcctccagttggtgcagtcgttgttaataacggccgaatagttggactcggtgctcatctaaaacaaggtgagaaacacgcagaagtacaagcacttgatatggctggaaaggaagcaaaaggtggaataatctatatttcgctagaaccatgtacccactttggctcaacaccaccatgtgtgaacaaaattattgaatttggacttagcaaagttatttatgctgttaaagatacgacattaccgtctgaaggtgatgctatattagaacaagctgggattgatgtagaatatcaatactctgaagaagcagctgccttatataaagacttttttaaagctaagtcagggcaaatccctgaaataacgatgaaagtgtctgtgtcattagacggtaaacaagcaacagatttaggtcagagtaaatggattactaattcagaggttaaacaagatgtctaccatttaagacatacgcatgatgctgtgttgacaggaaatggcacaattaatgctgataacccactttacacgactcgtattccgaatggtaaaaatccaatccgaatagtgttggctaaaagtggcaatgttgattttacgaaacaactttttcaagattcgtcgagtgaagtgtggatttacactgaaaatcaaacgcttgaaagtccaaatcgaaacataaaggttatctgtatagataaatgctatttaaaagatatacttaaagatatttataagcgaggtattggttcattattaatagaagctggtcctcgtataacttccaaatttcttcaaactgattttattaatcaacttattatttattacgccccgaaaataataggtggttctggaaaaaatcaattctatcaaactgcggatattattgatttaaatgaaaccacgcaatttgaaatttcttctactgagttaattaatcaaaatttaaaaatgattttgcgaaagaag

SEQ ID NO: 35385 - DNA, 357 bp, Staphylococcus haemolyticus
atgatacatggaataggtattgatttaatagaaattgatagaattaaaaaagcttttgagaaacaaaaagacaagttagtaaagagaattttaacacaagaagaggaacaacaatttcattcatttaaaagtgaaaagagaaaatttgaatttttatctggtcgtttcgcaaccaaagaagctttcagtaaagcattaggtacaggcttaggaaaaacagtggcattcaaagacattaattgttacaacgatataaaaggtaaaccatgtatagattacaatggttttatcgtacatgtttcaataactcatacagaacattatgcgatgagtcaggttttgttagaaaagagagat

SEQ ID NO: 35386 - DNA, 1146 bp, Staphylococcus haemolyticus
atgtcagataaattctatagatcaacttatttaaacgtagatttatcagcgattttaaataactataatactgttagaacgttgcatagcgataaaacagttataccagtagtaaaagctaatagttatgggctaggtagcgttaaaatcgcacaacatttaatgaaaaacggtgctgacttttttgcagtagcaactcttgatgaagctattgaactacgtatgcatggaatcaatgctcaaatacttatcttaggcgtcattcctcttgaagatataaataaagctattcaacacagagttgctttgactgtaccatcattacaattgctacaacatgcaatagaattaattagtgatgataatgaaaagaatttatggctacatgtgaaactcgacacaggtatgggcagacttggaattaaatcactggaagaatataaagaagtcattgacttaattcaaagtcatcctcatttggtattcgaaggtgtatatacgcactttgctaatgctgatgaacctggcgactcaatggatcatcaatatgaacaatttgaaaccttagtaactcaagctgaaaaacctaaattcatacattctcaaaattcagctggttccttattgagaaactttgaattatgtaacgcagttagacttggtatttcactttatggttattatccgtcagcgtatgtaaaagaaaaagttgaaactgaattacaaccaagtgcgcaattattaacacaagttgtccaaactaaatatttaaaagttggcgaatcggtaagttatggcagtacatttacagcaactgaagatataaaaatcgcaattttgccaattggatatgcagatggttacttacgctcaatgcaaggggcatttgttaatgtcaaaggccatcaatgtgaagtcataggtcgagtatgtatggatcaaatgataattaaagtgccagatgatgtaaaagagggagactctgtgacacttctagataatgcttatgattcacctcaatcagctgaaactctagctcaaaaacaagacacgattagctatgaagttttatgtaatttaggtagacgtttacctagaatctatcaagttgatgacgagatgcatgtaactaatgaattattaaaa

SEQ ID NO: 35387 - DNA, 363 bp, Staphylococcus haemolyticus
atgattagaagaggcgatgtatatttagctgatttgtcaccagtacagggctcagaacaagggggagtcagacctgtagttatcattcaaaacgatactggtaacaaatatagtcctaccgtaatcgttgctgcgattacgggaaggattaataaagcgaaaatacccacacatgttgaaatcgagaaaaagaaatacagacttgataaagattcagttattctactcgagcaaattagaacattagataaaaaacgactaaaagaaaaattaacatatctatctgatgagaaaatgcaagaagtggatgaagcgttagacattagtctaggattgcatgatgaagttaaaacgcaaaacaca

SEQ ID NO: 35388 - DNA, 537 bp, Staphylococcus haemolyticus
atggcaaatgtagcaaataaatacgctaaagcattatttgacgtcgttattgataaagacagattagatttaatgtatgatgaattgagtgaagttagtgaagctacaaaaaactatggtgaagatttaagagcaattgactcaaatccaaaccaaccagcttctgaaagacgcaaatttgttggtatcgtttttggagatgctaattattacttaaaaaatatgctaatgatattagctaataatcgtcatttagtacttatcaattcaatttttaaagaatttaaaagtttatataatgaatatcataatgaagattcagcaattgttgaatcagtttatcaattaagtgatgaagaacttgatcgcattaaagacttaattttaaaacaaactaatttatcacaagtacatattactacgaaaataaatccagaattaattggaggatttagagttaaagttggtactactgtgctagatggcagtgttaaaaaagatttagaacaaatcgaacgcaaatttagaagagtaaac

SEQ ID NO: 35389 - DNA, 1506 bp, Staphylococcus haemolyticus
atggccataaaagctgaagaaatcagtgcattacttcgctcacaaattgaaaattatgagtctgaaatgtctgtaactgatgttggtacggtactccaaattggtgacggtatcgcattaattcacggattaaatgactgtatggctggtgagctagtagagttctcaaatggtgttcttggtttagctcaaaaccttgaagaatcaaatgtgggtgtagttattttaggaccatatactgaaattactgaaggcgacgaagttagacgtactggacgtattatggaagttccagttggggaagaacttattggtcgtgttgttaacccactaggtcaacctattgatggacaaggtcctattaatacaactaaaacacgtcctgttgaacaaaaagctacaggtgtaatggctcgtaaatctgttgacgaaccacttcaaactggtattaaagcgattgacgcactagttccaattggacgtggtcaacgtgagttaattattggagatagacaaacaggtaaaacaacaatcggtattgatacaatcttaaaccaaaaaggtttagatacaatttgtatttacgtagcaattggtcaaaaagattcaactgtacgtgcaaatgtagaaaaattgcgtcaagctggtgcattagattacacaattgttgtttcagcttcagcatctgaaccttcaccattactttacattgcaccttactcaggtgtaactatgggtgaagagtttatgttcaatggtaaacatgtattaatcgtttacgatgatttaactaaacaagctgctgcttaccgtgagttatcattattattacgtagaccaccaggtcgtgaagcgtatccaggtgacgtattctacctacatagtagattattagaaagagcagctaaactaaatgatgatttaggtggcggttcaattactgcgttaccaatcattgaaacacaagcaggggatatttctgcgtacgtaccaactaacgtaatttcaattacagatggacaaattttcttacaatctgatttattcttctcaggtgtaagaccagcgattaacgcaggacaatcagtttcacgtgtaggtggatctgctcaaattaaagcaatgaagaaagtagcaggtacgctacgtttagacttagcttcgtatagagaattagaatcatttgcacaattcggttctgatttagatgaatttacagctagaaaacttgaaagaggtaaacgtacggttgaagtcttgaaacaagatcaaaacaaaccacttcctgttgaaaatcaagttttaattatctatgcattaacaaaaggttacctagatgatattcctgtagaagacatcacacgttttgaagatgaattgaatagttggactaaatcaaatggttcagacttattaaatgaaattagagaaactggtggcttaccatctgatgataaatttgaagcaactattaatgaattcaagaaaagctttagcaaatctgaa

SEQ ID NO: 35390 - DNA, 1011 bp, Staphylococcus haemolyticus
atggataaaatagttataaaaggtggcaatcgcctaactggagaagttaaagttgaaggagctaaaaatgcagttttaccagtactaactgcatcactgttagcatcagaaggtcaaagtaaacttgttaacgttccagatctaagtgatgttgtaacaataaataatgtgttatcaacattaaacgctaatgtggagtataacaaagaagaaggtgctgtattagttgatgcatctacaacattaaaagaagaggcaccttatgaatatgttagtaagatgcgtgcgagcatattggttatgggtcctttactagctcgattaggacatgccattgtcgcattaccaggtggttgtgcaattggtgcacgaccaatagagcaacatattaaaggttttgaagctctaggtgctgaaattcaccttgaaaatggaaatatttatgctagtacaaaagatggtttaaaaggtacagatattcatttggatttccctagtgtaggtgcaactcaaaacattattatggctgcttcacttgcaaagggtaaaacagtaattgaaaatgttgctaaagaacctgaaattgttgatttagcaaactatatcaatgaaatgggtggtaaagttaccggagctggtactgatactattacaattcatggtgtcgaaaaattaagaggtgttgaacattcaattattccagatagaattgaagcaggtacccttatcatagctgctgcaattacacgtggtgatgtatttgttagagacgctgtgaaggaacacatgactagtttaatttataaactagaagaaatgggtgttaatttagatttccaagaagatggtgtaagagtcactgctgaggatgaacttaaaccagttgacgttaaaacattgccacatcctggattcccaacagatatgcaatcacaaatgatggcgttattattaacagctgaaggtcataaagtgataactgaaacagtcttcgaaaatagatttatgcac

SEQ ID NO: 35391 - DNA, 1683 bp, Staphylococcus haemolyticus
atgaagcgatatcttattccacttttagttttatgttttatcgtatttggtattaccactggtacctcttatgcagctgaatcacaggcaacacaatctactaacataactgctaccgaagaagcatcacaaacagcttcaaaagaagcatcatcagccaacattgaatctactaataaacctttatctcttgagtcaagcaacgtttcacataatgaacaagccacaccttcgtctgaaacaactacacatcctagtgttgaaacgtctacaacacaaaacactacttcagagaagcatagtaattcatcacaaggttctgccttttcacaagaaaaagctacacctgaacctgctacaaatgatgataatacatcttcacaagaaaaagcatcgtcagaatctacttcaaatgaaaataatacatcgcaattccatggtacggaggtaaaaccttctccttcgacatcggagcaaagtaagtctacgcaagtagaacctacaaaagaatctacttctactaaagttaaacaaacacctcaagaaccaactcaacaacagcaaaagcgtaatgttccagaatcacaacaatctacacctgcttcaaagcaagtgtctaaaagtagcaatactacatcagaacaagcagcaccgaaatctcaacatgtgactgtcaacaaaagaatggcaacaacttctgataacacaaataaacatacaattttacatacaaatgatattcatggccgatttgtagaggatgatggaagagtcatcggtatggctaaagtaaaaggtcttaaagacaaatataatccggatttaatggtggattcaggagatgcttttcaaggtttacctgtttctaacaattcaaagggagaagaaatggccaaagctatgaatggtgttggctatgatgcaatgactgtcggaaaccatgaatttgactttggttatgaccaattacttaaattgcaaaaacaattaaatttccctatagtttcttctaatatctataaaaatggcaaacgtgtatttgatccttcaacaacagtaactaaaaacaatgtccgttatggtattgtaggtgtcacgacacctgaaacaaaaactaaaacgtcacctactgcagttgaaggtgttgaatttaaagatccgttgactagtgttaagcaagccatgaatgagattaaaaataatgtcgatgttttcgttatcttatcgcacttaggcgtagataaatcgacgcaaaaaacttggcgtggtgattatttaattgatcaacttacgaaagacggttcatttaaacaacctatctttgtattagatggtcactcacataccgtgattgataaaggcgaacattatggtactaataatgtactcgctcaaactggtactgcactagcaaatgtaggacgtgtggattttacttttcaaaatcaaaaagcgtctgatatcaatgcatcgttaatcaatgtagcggacgccaaagatatcacacctgacccacaaattgatgcacaaactaaaaaggcaaatgacgacttcttaaaagaaacatcaacagttgttatacctaataatacagtgacgttaaatggtgaacgtgctcaagcgcgcacgcaagagacaaacttaggtaaccttattacggatgctatggaagcatatgcctca

SEQ ID NO: 35392 - DNA, 1074 bp, Staphylococcus haemolyticus
atgtcagaaaaagttaaatttgaacaacgcgactcgcttaaagaaaaaccagaaggtaatttaggattcggtcaatactttacagattatatgttaagttttgattatgatgtagataaaggttggcatgatttaaaaattattccttacgcaccattcgaagtttcaccagctgcacaaggtcttcactatggacaagcggtatttgaaggtttaaaagcatataaacatgaaggagaagttgtattatttagaccagatcaaaacttcaaacgtattaatgattcattagcacgtttagagatgcctaaagtagatgaggaattattactagaaggtttaaaacaattagtagacgttgaacgtgattgggtacctgagggagaaggacaatcattatatatccgtccatttgtatttgcgactgaaggcattttaggagtaagagcatctcatcaatacaaattattaatcattttatctccatcaggcgcatattatggcggagacacattaaaaacaactaaaatttacgttgaagatgaatatgttcgtgccgtacgtggtggtgtaggattcgctaaagtagcaggtaactatgcagcaagtttattagcacaaacaaatgctaataatttaggctatgatcaagtattatggttagacggtgtagaacaaaaatatgttgaagaagttggtagtatgaacatcttcttcgttgaaaatggtaaattagttacacctgctttaaatggaagtatcttaccaggtattacacgtaaatcaatcattgaattagctaaagagttaggctatgaggttgaagaacgtaaagtgtcaatcgaggaattattcgaagcttacgacaaaggtgaattgactgaagtattcggttcaggtacagcagcagttatttctccagtcggtacattaaagtatgaagatagagaaatcgttattaacaataacgagccaggagaaattactaaaaaattatacgacatatatactggcatccaaagtggtaaattagaagatacgcatggttggcgagtcgtagttccagaatataaa

SEQ ID NO: 35393 - DNA, 1344 bp, Staphylococcus haemolyticus
atggcaactcacccatttgaattatttaatttagactcaaaacttatagaagcaattaaagacttaaaatttgataaaccaactgaaatacaaaatagaataattccaagaattaaaaaaggcgtaaatttaataggtcaatctcaaacaggtacagggaaatcgcatgcatttttattaccgttaatagataaaatagacgttgaaaataaagaacctcaatctatcgtggtggcacctacaagagaattagcacaacagttatatcaggcagcaaatcatctagctacttttaaacagggcattaaagttagtttgtttattggtggtacagatattgagaaagatagacagcgtacaagtaataaaccgcaattagtaataggaacaccgactagaattaatgatctagctcaaagtgggcatctacatgcgcatttggcatcttatcttatagtggatgaagctgatttaatgattgatttaggattaattgaagatgtagatttaattgcttcacgcttagatgaaaattcacatatagctgtcttcagtgctacaattcctaaatcattacaaccatttttaaataaatatctaagcaatccggaatatgtagaagtggattccaagtctcaaaataaaaaaaatattgaattctatttaattccaactaaaggaactgaaaaagtagataaaacacttcaattaatcgatattttaaatccatacctatgtatcgttttctgtaatagtagagataatgcggatgagctggcaaattcactcaatgctgctggaattaaagttggcatgatacacggaggtttaacaccaagagagcgtaagcaacaaatgaaacgtatacgcaatttagagtttcaatttgtaatcgcaagtgatctagcttctcgaggtatagacattgaaggcgttagtcatgttattaattttgacgtacctaaagatattgacttctttacacaccgtgtgggcagaacaggtagaggtaattataaaggtgtggcaataacactctatagtccggatgaagaacatttaatcacactaattgaagataaaggctaccattttgaaaatgttgatgttaaaaataatgaattaacaccaattaaagcacataatactcgacgtaagcgtgtaagaaaagacgatcacttaacgaacgaagtgaagcataaagtgcgaagtaagactaaaaataaagtcaaaccaggttataaaaagaaattcaaacaagaagtcgaaagaatgaagagacaagaaagaaaacaatttagtaaaagacaaaatagacaacaacgaaaaaataataaaaagggt

SEQ ID NO: 35394 - DNA, 897 bp, Staphylococcus haemolyticus
gtgaaagcaatgttacttgggtcacatgtttccatgagtggtaaaaagatgttagaaggttctgcagaagaagcacacaaatttggtgagtctacatttatgatttatactggcgcacctcaaaacacaagaagaaagagcatagaggatttaaatatcgaaaaaggacatgaggccatggataaatatggtttatctaatttagtcgtccatgctccatatattataaacatcgctaacactacaaaaccggaagtctttcaattaggggtagatttccttcaaaatgaaattgaacgaacacaagctttaggtgctaaagatattgttctacatcctggttcacatgtgggcgctggtgctgataaaggtattcaacagattattaaaggtttgaatgaagttttaactcatgataatgatgtgcgtatcgctctagaaactatggctggaaaaggatctgaagtaggacgcacgttcgaagaaattgctcagatcattgatggcgtcacacataatgatcgattatcaatctgtttcgatacatgtcacactcatgatgctggatataacattaaagaggattttgatggtgtattaaatgaatttgataaaattattggcttagatcgaataaaagtggttcatgttaatgatagtaaaaatgagcaaggtgctcataaagatagacatgaaaatattggattcggtcacattggatttgacgcattaaattatgtagtacaccatgatgttttcaaagatattcctaaaattttagaaacaccctatgttggtgaagataaaaaaaataaaaaaccaccttataaatttgagatagagatgttaaaagcacaacaatttgattcagaattaaaagataaaattcttcaacaa

SEQ ID NO: 35395 - DNA, 420 bp, Staphylococcus haemolyticus
atgaatacaaatgatgcaattaaaattttaaaagataatggtttgaaatatactaagaaacgtgaagatatgattaatatttttgttaaagaagataaatacattaatgcaaaacatattcaacaacaattagacaaagattatccaggtatctctttcgatacaatttatcgtaatttacatttatttaaagacttaaaaattattgagagtactgaattagatggtgaaatgaaatttagaattgcttgtatgaatcatcaccatcatcactttatttgtgaaaattgtggtgatactaaagtcattgatttttgcccaattgatcaaataaaggtgtatctacctaatgtagatattcacacccataaattagaagtttatggcgtatgcgaagaatgtcaaaaacaaaactcaaaa

SEQ ID NO: 35396 - DNA, 2271 bp, Staphylococcus haemolyticus
atgattaaatctaaatataactggctctatgaacctccaacagaatacataaatgaaactttaataaaaaaatatcaattaacaccgattataaaaaaactgcttgaaagtaaatcgataactgatgatgagtcaattaaagccttattagatgaaactatcattaaccacgatccatggctattaagtgatatggaaaaagcggtgactcgaatcaatgaagcaattgataaaaatgagcgtatattggtatatggtgattatgatgccgatggtgtcacttctacaactatattagttaaaacattgcagacattaggggctgaagtgggttggtatattcctaatcgattttcagaaggttatggtcctaatgaacttgcatttagaaatgcatatgatgaaggcgtgtctctcatcataactgtcgataatggcatacaaggtcataaagagattgaaatggtacaaaagctaggagttgatgtcatagtaactgatcatcatgaaattggacatactttgcctgaagcgtatgccatcgtacatccaatgcatccagagtatgaatacccatttcactttttatgtggtgctggtgtagcttacaaactgtctcaagttttattagacaatcctcctaattattttgtaagtttagctgcgattggtactatagcagatttagtgtcaatgacagatgaaaaccgctctatagtaaaacaaggtttatcatttttaaatcaaagctgcccgattcaaattaaagcattacttaaccaagctggttataatgacacgattaacgaagaaactgtaggttttattatagggccgcgacttaatgccgttggtagattagaggatgcatcattagctgctgagttattaatgaccgaagatgaagaagaagctgaatttcttgctgaacaagtagaacattttaatgttgaacgtaaagaaatagtagctcagataactgatgaggcactagccattgctgaagaaaaagtaaataatggcaatcaatttttactattagctaaagaaaattggcatgaaggtgtcttaggtatagtagcatctaaaattgttgagacatatgcattacctaccttaattttgaatattgatttagaacaaaatcatgctaaaggatcagctcgtagtatagaacaagtttcaatgtttgaaattttgagtgcacatcaagatttaatttctaagtttggtggtcatcatatggctgcgggtatgactatggagatagattatattgaagcattagagcaaggattaaatgactggatgtttaaattatcagaacatacgtcactagagccgacaaaacatgtatcagttaaattagaagagaatgatatttctataaataacattcgtgatattcaaagactaagtccatttggcacagactttgaaaaaccattattggaaattgatgataatgaagtcgttgatgttagagcaattggaaaagataaaaaccatttaaaattagtaaccggtcagttacaattacaaagcatattttggaaaaatggtcagttagcaactcaaattgaacctggtcaaccaatcaatctactaggaaatttacaaatcaatgaatggaacggaaatcaatcaccacagtttattattcaagatatagcaacgaataatgaacaaatattagattaccgaagtaaacgtaaacaattaaatatagacccaaacgatactaaagttgcttttttaatacaccctaaaaaagaaaaattgaatcataattactattattatggtgataaaatcgatcaagaacatgaagtagtaattttaagagacttgcccaatgatttagacagtcttaaagatagtctcaaaaacttaaattattcacaactctatttagtactgcaacatcagcagagtatatattttgatggtatgcccacgtcaaatcaatttaaaagctgtttcaaagcgctaatgaccaaaaaagaaaccaatcttgaacaagagggtatgttactgtgtcaacatttgaatgttaaacctaatattttaaaatttatgcttaaagtattttatgagttaggttttgttacagaagaaaatggtataattaaaattgtagataatgctaacaaacaaaatattgaaacaagtcgcgtttatcaattaagacaatcaagaatggaagttgagaaacttttactatatgatgatttcacgcaactaaaaacttggatcaaatcacagaagggt

SEQ ID NO: 35397 - DNA, 1896 bp, Staphylococcus haemolyticus
  misc_feature (1847)..(1847): n=g, a, t or c
  misc_feature (1896)..(1896): n=g, a, t or c
ttgaataacgagtatccatatagcgctgatgaagtgctaaataaagctaaatcatatttatcaactgacgattatcaatatgttctaaaaagttaccatatagcttatgaagcccatcaaggacagttccgcaaaaatggtcttccgtatatcatgcatcctattcaagtagcgggcatattaacagaaatgcgtttagatggtccaacgatagtggcaggttttttgcatgacgtcattgaagatacgccgtacacatttgacgatgttaaagatatgtttaatgaagaaatagcgcgtattgttgatggtgttactaaacttaaaaaggtaaaataccgctctaaagaagaacaacaagcagaaaatcatcgtaaattatttattgcaattgcaaaagatgttcgagtgatacttgtcaaattagccgatagattacataacatgagaacattaaaagctatggctagagaaaaacaagtgcgtatctcaaaagagacactagaaatttatgcaccgttagcacatagattaggtattaatacgattaaatgggaattagaagatactgcactaagatatatagacagtgttcagtatttccgtattgtcaatttaatgaagaaaaagcgtagtgaacgggaagcttatatcgctaatgcaatagataaaattcaaacagaaatgattaaaatggacatcactggagaaattagcggtagacctaaacatatttatagtatataccgaaaaatgatgaagcaaaaaaagcagtttgatcaaatattcgatttattagctattcgtgtaattgttaattctattaatgattgttatgcaattttagggttagtccatacattatggaaaccaatgcccggaagatttaaagattatattgcaatgcctaaacagaatatgtatcaatctctccataccactgtagttggtcctaatggagaccctttagaaatacaaattagaacgtatgaaatgcatgaaatagctgaacatggtgttgcagctcattgggcatataaagaaggaaaaacagttaatgaaaagaaccaagattttcaaaataaattaaattggttaaaagaattagctgaagctgatcatacatcatctgacgcacaagaatttatggaatcactgaaatatgatttacaaagtgataaagtatacgcttttacacctgcaagtgatgttattgaattgccttatggagcagttccaatagatttcgcttatgctattcatagcgaagtcggaaataagatgattggtgcaaaagttaatggtaaaattgttcctattgattatgttcttcaaaccggagatattattgaaattcgtacaagtaagcactcttatggacctagtagagattggcttaagatagttaaatcatcaagcgctaaaagtaaaattaagggtttctttaaaaaacaagaccgttcatctaacattgaaaaaggtaagtttatggtcgaagcagaaattaaagaacagggctttagagtagatgatattttaactgataaaaatatagaagttgttaatgagaaatacaattttgcaaatgatgatgacctatttgcagcagttggatttggtggtgtaacagcattacaggttgttaataaattgaccgaaagacaacgtatacaagataaacaaaaagcgctaaacgaggcacaggaagttattaaatcacttccgattaaagatgatatcatcactgatagtggtgtatatgtcgaaggtatagagaatgtattgataaagctttcaaaatgttgtaatccaatccctggagatgatattgtaggatatatcactanaggacatggtattaaagtgcatcgtacagattgtcctaatgttaaaaan

SEQ ID NO: 35398 - DNA, 276 bp, Staphylococcus haemolyticus
atgtatgtcgtacgtccaaacattgaagaagatgctaaaaaagcagttgttgaacgcttcaacggtatcttagcttcagaaggatcagaagttttagaagaaaaagactggggtaaacgccgtcttgcttatgaaattgaagatttcaaagaaggtttctataacatcgtacgcattaaaactgataacaacagagccacagacgaattccaacgtttagctaaaatcagtgacgatatcatccgttatatcgttatccgtgaagaccaagataag

SEQ ID NO: 35399 - DNA, 510 bp, Staphylococcus haemolyticus
atgataaacagagttgtattagtaggtcgtttaactaaagatccagaatacagaaccactccctcaggcgtaagtgtagcgacatttactctagcagttaatcgtactttcacgaatgctcaaggggaacgcgaagctgacttcatcaatgttgttgtatttagaagacaagcagagaatgtgaataattatttattcaaaggtagtctagctggcgttgatggtcgcatacaatcacgcagttatgaaaatcaagaaggtcgtcgtatctttgttactgaagttgtagcagatagtgttcaattccttgaacctaaaaatgctcaaggtggccaacgtaatcaaagtaataacaatgatttccaagactacggtcaaggatttggtggtcaacaatcaggacaaaatacatcttacaataacaataattcatcaaataataaacaatctgataatccatttgcaaacgcaaacggaccgattgatattagtgatgatgacttaccattc

SEQ ID NO: 35400 - DNA, 240 bp, Staphylococcus haemolyticus
atggcaggtggaccaagaagaggcggacgtcgtcgtaaaaaagtatgctatttcacagcaaatggtattacacacattgactataaagacactgaattattaaaacgttttatctcagaacgcggtaaaattttaccacgtcgtgtaactggtacttcagctaaatatcaacgtatgttgactacagctatcaaacgtgctcgtcatatggctttattaccatatgttaaagacgaaaac

SEQ ID NO: 35401 - DNA, 1482 bp, Staphylococcus haemolyticus
ttgaatgcgaatgagttgttcgaaaaaatacgagttaaacaagtaataggtactttagatataaatgttactgatatcactacagattcacgtaccgctagtgaagggagtatattcgtcgcatcaaaaggctatacagttgatagccataaattttgtcaaaatgttgttgatcaaggtgcaaaagtcattgtggttaaccatcaacaagacattaacggtgacgtgacgcaggttatcgtaccagatacattaagagttgctagcctgttagcacatactttatatgattttcctagccatcaattaactacaataggtgtgacaggcactaatggcaaaacttcaattgctactatgattcatcttatttatagaggtttaggtaaaggaagcgcatatttaggaacaaatggtttccaaataaatgaacataaaactagaggtgccaatacaactccagaaacagtgtctttaactaaaaagattaagcaagcggttgatgaaaatgcggaagctatgactatggaagtatctagtcacggtttatcactagggcgattaagaggtgtagaatttgatgttgcgatattctcaaatttaacacaagaccatttagattttcatggcacaatggaagcctatggacatgctaaatcattgttatttagtcaactgggagaagatttatcgaaagagaaatatgctgttttaaataatgatgatgatttctccaaatatttagcatcagttacaccatatgaaatatttacatatggaatagaccatgacgctcaatttatggctaaaaatattcaagaatctttacaaggtgttcactttgatttcgatacgcctataggtacttacagtgttaaaacaccatatgtaggtaaatttaatatttcaaatattatggctgccatgattgccgtctggagtaaaggaacatctatggaagatatcgtcagagtagttgagaatttagagccagttgaagggcgtttggaagttctagatccttcgctaccaattgatttaattattgactatgcacatactgctgacggaatgaatgaacttatagatgcagtaaaacctttcgtgaaacaaaaattaatctttttaattggaatggctggagaacgtgacttaactaaaacacctgaaatgggcgcagtagcttgtagagcagattacgtaatatttacgccagataatcctgctaatgatgatcctaaaatgttgactgctgaactagctaaaggcgcaacacataatcattatgttgaatttgatgatagagctgaagggatcaaacatgccattgatatagctgaaccgggcgatacagtagtattagcttctaaaggaagagaaccttatcaaatcatgcctggacatattaaagtgccacatagagatgatttaattggacttgaagcggcatacaaaaaatttggcggtggcccaagtgaacat

SEQ ID NO: 35402 - DNA, 252 bp, Staphylococcus haemolyticus
gtgaacattaaacaattatctataaatgacgaaattgttaatgtttacttatatataagtgaagataaaaatcaaatcatgttggctattccagatatattttggtcaatagaacttgatttgaatatggacagtaatgatgttaaagaagaattggtaatgcaattatttgcttttatcgaggaaaatgaagcaatcaaaattgcttcgaatttaacaaactggattgtgaatgattttaaaggagatcaa

SEQ ID NO: 35403 - DNA, 1877 bp, Staphylococcus haemolyticus
  misc_feature (1823)..(1823): n=g, a, t or c
cgttttatcaaatttaatgatgagcaattagatgctaagcaagttatgatgctacaagacttagcgcgcttacttcttaaaaatgagcaaacacaagttaaaattcaaaaattcccttactacgatccaattaataacacattgatcacaagttggttctggtcgcaccgtcccgagcatatagagaaagccggtcttaaaactgacgtgatgctcgcagcctatgggtatcaaatgatggatgaatctattgtgaatgaagtattacatgatgatgagtttgaacaccctaagttttatcagcaaatctttagattactagaagatatgcgcgtgtttaatcatattcgtaatgaacgcccaagtacgtctaaattaatagatttacgtttacaaacgagattgtcttatactgaatctcaaattaaattctataaaactaaaactgtttatactgatttactatttttatatttagaaaaagcatttctcagtcagaatttctttgatattccaatgatgcattcacaattagacgatattttgaattctatgtttcaatatctgcctaactttttccaaaatgaaacatcagaagataatatgtacttagctcaacgtattatgtttcaaattgatgatatgctaaccaaagatatgttaaatgaatattatcatctccctcgtcgtgtatatgaggcaatccatgaaatgacgtttgatgagttaaaacgtacagatgcgagtaatgtagatggaaaagacaatacctctgaggatacggactctgagactgctgaagctgaaacgaatgcccaagatagtaaatcagaaggcggtgcttaccttgaaatggaacttcacgagggcgagaatagtgaggtaataagtgataatgatactgctcgtgaaggtgattctacagacgatatgacagacatgatgactaaaaagggtcgtggttctgataatacattaaataatgatgaaggtggctctataggagagaatacgtcattcgcacttaaagggattaatgaaaatgtagaaattaaatggaatgttcccgatatcgaaccggattacttattagagtatcaaaatgttaaaaacgatgttcaatttgaaactaaggatttaattcaaattatcaagagaaccattgatcgcgagcacgttgatgagcgacataaccttactaaaggtcgtttgcaaagagatttaacaaattggtttatcgatgatcaatataaattattttataaaaaacaagatttaagtaaaacgtttgatgccacttttactttattaattgatgcatctgcaagtatgttcgataagatggaagagacaatcaaaggtgttgttcttttccatgaaacattgaaagcattaaatgtcaaacatgaaatacttgcgttcaatgaagatgcatttgattctgatgatcgtaaacagcctaacatcattgatgaaattgttcattatgattattcaaccatggaaaaaagtggcccacgaatcatgtctttacacccacaagatgataatcgtgatggcgtagctatacgtattgctagcgaacgtttgctaagaagaagtcataatcaacgtttcttgatagtattttccgatggtgaaccttcagcatacaattatgcgcaagatggtattttagacacttatgaaggtgtagaaatggcccgcaaatacggtattgaagtatttaatgtgtttttaagtcaagatgttataacagaggatatcgaacaaaccattcataacatttatggtcagtacgcgttatttgtagaaggtgtagnaaatttgccgagtcatttatcgcaattactaaaaaattacttctaaaatcattt

SEQ ID NO: 35404 - DNA, 2080 bp, Staphylococcus haemolyticus
gtgtttaaaactgagtgggctggaagatcgttaacgattgagatagggcaattagcaaaacaagctaatggtgcagttttagtacgttatggagatacggttgtattatctacggctgtagcatctaaagaacctcgtgatggtgactttttcccattaacagttaactatgaagaaaaaatgtatgctgctggtaaaattccaggaggatttaaaaaacgtgaaggtcgtccaggagacgaagcaacattaactgcacgtttaattgatagaccaattcgaccacttttccctaaaggatatcgacatgacgttcaaattatgaacacagtactaagcgctgatccagattgttcgcctgaaatggctgctatgataggttcttcaatggcattaagtgtttcagatattcctttccaaggaccaattgctggtgttaatgtaggttatgttgatggtaaatatgtaattaaccctaccgttgaggaaaaagaagtttcacgtctagacctagaagttgccggccataaagacgctgtaaacatggtagaggctggtgcaagtgaaataactgagaaagaaatgttagaagctattttcttcggacatgatgaaatcaaacgtttagtagcattccaagaagaagtggtagctcacattcagcctgttaaaaaagaatttgtacctgtagaacgtgatgaagcactggtttcaagagttaaaacacttactgaagaaaaaggcttaaaagaaacagttctaacatttgataaacaacaacgtgacgaaaacttggatacgttaaaagctgaaattgcaactgaatttgttgacgaagcagatcctgaaaatgaattgttaattgatgaagtttatgcaattttaaatgacttagttaaagaagaagtacgtcgtcttatcgctgatgaaaaaattagacctgatgggcgtaaaccagatgaaattagaccacttgaatctgaagttggtttattgccacgagcacatggctcaggtttatttacacgtggacaaactcaagctttatctgtattaacattaggagcattaggtgattatcaacttattgatggactaggtcctgaacaagaaaaacgattcatgcatcattacaacttccctaatttctctgttggagagacaggcccagttagagcacctggtcgtcgtgagattggacatggtgcattaggcgagagagcactaaaatacattattccagatacaactgaattcccttacactgtacgtattgtaagtgaagtattagaatctaacggttcatcttcacaagcatcaatttgtggttcaactttagctttgatggatgctggtgtgccaattaaagcgcctgttgcaggtatagcaatgggactagtcacacggtgaagatagtaatacggatcttacggatattcaaggtatggaagatgctttaggagatatggattttaaagttgcaggtacaaaagaaggtatcactgcgatacaaatggacattaaaattgatggtttaacacgtgaagtcattgaagaagctctagaacaagctcgacaaggtcgattagcgataatggatcacatgttacaaacaattgatcaacctcgtaaagaattaagtgcttatgctcctaaagtggaaataatgcatattaaacctgaaaaaattagagacgtaattggaccaggtggtaagaaaattaatgaaatcattgatgaaactggggttaaattagatattgaacaagatggtacaatcttcataggtgcaatcgatcaagacatgattaaccgtgctcgtgaaattattgaagatatcacacgtgaagcggaagtaggccaagtttacaatgcaaaagttaaacgtattgaaaagtatggtgcttttgttgaattgtttgccggtaaagatgctttattacacatctctcaaatttcaaaagagcgtattaataaagtagaggatgtattaagtataggcgattcaattgaagtgaaaataactgaaattgacaaacaaggtcgcgtaaatgcttctcataaagcattagatgaaaat

SEQ ID NO: 35405 - DNA, 1704 bp, Staphylococcus haemolyticus
atggacggggattttataataggaggtaacattttgagtttagtgaaaaaaaagaatgacgatattcgcatcattccacttggtggtgtcggcgaaatcgcaaaaaatatgtatatcgttgaagtagacgatgaaatgtttatgttagatgcggggttaatgttcccagaagatgaaatgttaggtgtagatattgtaattcctgacattcaatatgtcattgaaaataaagaaaaactaaaaggtatctttctaagccatggtcatgaacatgctattggtgcagttagctacattttagaacaaattgatgcaccagtatatggctctaaattaacgttagcacttgttaaagaaaatatgaagtcacgtaatgttaaaaagaaagtacgttattatactgtaaatcatgattcagtaatgagatttaaaaatgttaatattactttctttaacactacacacagcattcctgatagtttaggaatttgcattcatacttcatacggttcaatcgtttatacaggtgaatttaaatttgatcaaagtttacaaggacactacacgccagatatcaaacgtatggctgaaataggtgaagaaggtgtcttcgcattaatcagtgactctacagaagctgagaaaccaggatataatacacctgagaatgttatagaatcacacatttacgatgcttttgcgaaagtaaaaggacgcttaattgtgtcatgctatgcttcaaactttattagaattcaacaagttttgaacactgcaagtaaactaaatcgtaaagtttcctttttaggtcgttcgcttgaaagttcgtttaatattgcacgtaaaatgggatattttgacattcctaaagacttgttaatccctattaacgaagttggaaattatcctaaaaatgaagtcgtaattattgccactggtatggaaggcgaacctatcgaagcattgagccaaatggcccaacagaaacacaaaataatgaatattgaagaaggcgattcagtatatttagcaatcacagcatcagctaatatggaagttatcattgctgatacactaaatgaattagtgcgcgcaggtgcatatattattcctaacaataaaaagattcatgcatctagtcatggttgcatggaagaattaaaaatgatgattaatattatgaaacctgaatactttatccctgttcaaggtgaatttaaaatgcaaattgcgcatgctaaattggctaacgaatctggtgtggcgccggagaaaattttcttagtcgaaaagggagacgttattcattacgatggtaaagatatggtattaaacgagaaagttaattctggcaatattcttatcgatggtattggtgtaggagatgtcggtaatatcgtattgagagatcgtcatttacttgcagaagatggtatttttattgcagttgttacattggatccgaaaaatagacgaattgctgctggtcctgaaattcaatcacgtggctttgtatacgtccgtgaaagtgaagaactaatgaaggaagcagaagataaggttcgtgaaattgttgaagcaggtcttcaagagaaacgtattgaatggtctgacatcaaacagaatatgcgagatcaaatcagtaaattactatttgaaagtacaaaacgtcgtccaatgattattccagttatttcagaaatt

SEQ ID NO: 35406 - DNA, 2347 bp, Staphylococcus haemolyticus
cgtaaatcgactaagaaaaagcaacagaaaaaagatagctcaattcgctatatcgttgcaatcattatagtcattttgtcggttttgggaatgttccaattaggaattgttggtcgaatgattgatagctttttcaattatttgtttggaatgagtcgctatttaacatacatattactaagtttgattacagtctatattgcaatgcagaagaaatttcctaaaacaagacggacttttgggttaatatcattacaatttgtcttattgattacaacacaaattatttatcattttcaaaaaggtgcagcatctgaaagagaacctgttttatcctatgtgtataaggcttatgaacatagtcattttccgaattttggtgggggattaataggattttatttacttaaaatatttattccactcatttcaattgccggtgtcataatccttacattaattttattaagttctagtattattttattgcttaaacttagacatagagatgttgttaaagcatcaattgataaaatgagaaactcaagtcaaagtgcatcatctaatttcaaagtaaaaagagagcaaaacagacttaaaaaagaagaacgtcaacgtgaaaaagaagaagagcgtgaacgcctaagacaacatcaattagaacaagaacaacttgagtcagaacaaatcaaagatgttagtgacttccctgaagttagtactgaaccagaagatattcctatatatggacctagtgaatcgcaagaaagtaaacaaacaactactaataaacgtaagaaaagacgttttggtttaaatagtgaagatattgataaagagaatagtagtaacgatggaacaaatctagaggatgaaaatttaccagagtcgaattcaaatgataatcatcaaatgaatggaacaatttccgaagctggtgaagagtcaaatgtggcatatcacattcctccattatcattacttaatcagccagctaagcagcaatctacatctaagtctgaagttcaacgtaaaggccagatactcgaatcaacaatgaaaaattttggtgtaaatgcaaaagttaagcaaattaaaattggtccagctgttacacaatatgaaatccaaccagcccaaggggttaaggttagtaaaattgttaatttgcataatgatattgcactcgctttggcagcaaaagatgtacgaattgaagcaccaattccaggtcgctcagctgttggtatagaggtaccaaatgataagatttctttagttacgcttaaagaagttcttgaatctaaattcccagcgagtaataagctggaagttggacttggtagagatatttctggtgaaccaatgacaattcaattaaatgaaatgccccacctattagttgcaggatcaactggtagtggtaaatcagtatgtatcaatggcattattactagtattcttttaaatgcaaaacctcatgaagttaaacttatgttaattgatcctaaaatggtggaattaaatgtttataatggggtgccacatttattaataccggtagttacaaatccacacaaagcttctcaagcattagagaaggtagttgctgaaatggaacgacgatatgatttattccagcattcatctacacgtaatattgaagggtataataaatttatacgccgtcagaatgaagaacttgatgaaaaacaagcagaattaccttatatagtagtcattgtagatgagttagctgatttaatgatggttgcaggaaaagaagtagagaacgcaattcaacgtatcactcaaatggctagagcagcaggtattcatttaattgttgctactcaaagaccatctgtagatgtaatcactggtataatcaaaaataatataccatcacgtattgcgttcgcagtaagttctcaaactgactctagaacaattataggctctggtggagctgagaaattacttggtaaaggtgatatgctatatgtaggaaatggtgaatcagctcaaacgcgtgtacaaggtgctttcttaagtgatcaagaagtgcaagatgtagttaactatgttgttgaacaacaaaaagcaaattatgtgaaagaaatggaaccagatgcgccagtagataaatcagaaatgaagagtgaagatgctttatatgaagatgcatatatatgtaattgaacaacagaaagctagtacttcactattgcaacgacaatttaggattggctataatcgtgcttctagattaatggacgatttggaacgtaaccaagttatcggaccacaaaagggcagtaaacctagacaagtattagtaaattta

SEQ ID NO: 35407 - DNA, 1425 bp, Staphylococcus haemolyticus
atgcattttgaaacagttatcggacttgaagttcacgttgagctaaaaacagactcaaaaatgttctctccatcaccagcacactttggagctgaacctaactcaaatacaaatgttattgatttagcatatcctggtgtattaccggttgttaatagacgtgctgtagactgggctatgcgtgcatcaatggctttaaatatggatatcgctacaaattctaaatttgaccgtaaaaactatttctatccagataatcctaaagcttatcaaatttctcaatttgatcaaccaattggtgaaaatggttatattgatattgaagtagatggtgaaacaaaacgtatcggaatcacacgtcttcacatggaagaagatgctggtaaatcaacacataaagatggatactctttagtagacttaaaccgtcaaggtacaccattaattgaaattgtatctgaaccagatattagatcccctaaagaagcttatgcttatttagaaaaattacgttcaattattcaatatacaggtgtatcagactgtaaaatggaagaaggctcattacgttgtgatgccaacatttcattacgtccttatggacaagaagagttcggtacaaaaactgaattaaaaaacctaaattcatttaactatgttagaaaaggtttagagtacgaagaaaaacgccaagaagaagaattattaaacggcggtacaattggacaagagacgcgccgctttgatgaatcaactggtaaaacaatccttatgcgtgttaaagaaggctcagatgactaccgttacttccctgaacctgacattgtacctttatacgtagatgaagaatggaaagagcgtgtacgtcaaacaatccctgaattaccagatgagcgtaaagctaaatatgtaaatgatttaggtttacctgaatacgatgcgcacgtattaacacttactaaagaaatgtctgatttctttgaaggtgctattgaaaaaggtgcagacgttaagttaacttcaaactggttaatgggtggcgttaatgaatatttaaataaaaaccaagttgatttacaagatactaaattaacaccagaaaaccttgctggtatgattaaacttattgaagatggtacgatgagtagtaaaatcgctaaaaaagttttcccagaattagctgaaaatggtggcgatgctaaacaaattatggaagataaaggtttagttcaaatttctgatgaagctactttaactaaattcgtcactgaagctttagataataatcctcaatctgttgaagattataaaaatggtaaagggaaagcaatgggcttcttagttggtcaaattatgaaagcatctaaaggccaagctaatcctcaaaaagtaaaccaaatattaaaacaagaattagataaacgt

SEQ ID NO: 35408 - DNA, 990 bp, Staphylococcus haemolyticus
atgagaaaatgtgcaagaatcatttataatccaacttctggaaaggaactttttaaaagaactttaccagatgttttaattaaattagaacgtgccggttatgagacaagtgcttatgctactgagcgtgaaggcgatgcaacgcttgaagctgaacgtgcacttaaaagagattatgatattattatagcagctggtggagatggcacacttaatgaagttgttaatggcatagctgaacaacccaatcgtcctaaattaggtatcatccctatggggacagtgaatgatttcggtagggccttacacttaccaagtgatattatgggtgctgttgatgttattattgatgatcacacgacaaaagttgatataggaaaaatgaataatcgttatttcatcaatttagcagctggtggtcaattaactcaagtttcatatgagacgccaagtcgattaaaatcaattgtaggtccctttgcgtattacattaaaggatttgaaatgttacctcagatgaaagctgtagatttgcgtatagaatatgataatcaagtttttcaaggtgaggcattattattcttattgggactgacaaactcaatggcaggatttgagaaattagttccagatgctaagttagacgacgggcatttcacattaattattgtagaaaaggctaaccttgctgaattaggacacattatgactttagcatctcgcggagaacacattaaacatccaaaggttatttatgagaaagctaaatcaattaatatctcatcctttactgaaatgcaactgaatgtagatggtgaatatggtggtaaattaccagctaatttcttgaatttaaaaagacatatcgaagtatgtacgccaaaagatatatataatgaagaattaactgaagatcaacaagtcgaagatggcattattgaagagaagccatcgaatgaagaaattattaaaaacaatgaaatatcagag

SEQ ID NO: 35409 - DNA, 281 bp, Staphylococcus haemolyticus
atgccgaagcaatcgcagatgagtaacatggcttttgggccatttaatctagatgctgatagaaactttcatttaatttaaggtccaatgggtaaattaactttaccttccagcccggtaatatggaagaggttctcgacacacaaatgtttggtttacaaaaagaagttgattttgcagttaagcttggcttagttgataaagaagacggcaaaaatttaatgcttcgtttagaaaaagaattatctaaacttcatgaagcatttactaatgtaaaataa

SEQ ID NO: 35410 - DNA, 864 bp, Staphylococcus haemolyticus
ttgaaacagataaaaaaagcaatcatacctgctgctggtttagggacgcgattcttaccagccactaaagcgatgcctaaagaaatgcttcctattctagataaacctacaattcaatacatagtggaagaggcttctcgtgcaggaattgaagatattatcatcgtaactggtaaacataaacgcgcaattgaagatcattttgataatcaaaaagaattagaaatggttcttgaagaaaaaggaaaagatgacctacttgagaaagtacaatattctacggacttagcaaacatcttctacgttcgacaaaaagaacagaagggattaggacatgcgattcacacagcacgtcaatttattggaaatgagccatttgcagtcttattaggtgatgacattgttgaatcagagacaccagccattaaacaattgatgaacgtttacgaagaaacaggccattcagtcattggcgttcaagaagtaccagagagcgttactcatagatatggtattattgatccattagaaaaagaaggccgtcgttacgaggtaaaacaatttgttgagaaaccgaaacaaggtacagcaccttcaaatctagccatcatgggacgttacatcttaacacctgagatatttgactaccttgaaacacaaaaagagggcgctggaaatgaaattcagctcactgatgcgattgaacgtatgaatagtgatattccagtttatgcatacgactttgatggtgatcgttacgatgttggagaaaaattaggtttcgttaaaacaacgattgaatatgcacttaaagatccaaagatgaaagatgaactcattaagtttataaaagaattaggattt

SEQ ID NO: 35411 - DNA, 885 bp, Staphylococcus haemolyticus
atggaacatttaactactgaaagcagaaacacacaaacgatgcatttagatgaaatgtcgatattagaagctttaaaaacaataaataaagaagatcaactagtagctaaagcaattgaacctattttgccccagttaaacagagtaatcgaacaaacaattacgcgttttcgagatggtggacgtctaatttatataggagctggtacaagtggacgtttaggtgtattagatgcagctgaatgtgttccaactttcaatacgcatcctaatgaagtaattggcttaattgctggagggcaacaagctatgactgaagcgattgaaggtgctgaagacaactatgaaatgggaatgactgatttgaaagcaatccatttgaatgaaaaggatgtagttattggtatttcggcaagtggtcgcacgccttatgttaaaagggcattgacatatgccaatgaaataagtgcactgactgttgccctctcttgcaatacgaatagtgacattagtactgtcgcttcccatgcacttgaagtcaatgttggtccagaagtattagcagggtctactcgcttaaagtcaggtactgctcaaaagcttgtgcttaatatgatatcaacaatgactatgattggtgttggtaaagtttatgataacttgatggttgatttaaaagcgacaaatcacaaacttgaacaacgttccatacatattatcgaagagatttgtggcttaacttttgaagaagctcaagaactctatataaaagccgacaatgatattaaaattgcaatcgttatgaatttatgtaacacaactaaaagcgatgctcaatcaagactcataaataataatgacattgtaaaaaaagcaattcaatct

SEQ ID NO: 35412 - DNA, 1352 bp, Staphylococcus haemolyticus
aaggatcaacaattggcccatcacatcttagatgcggttggtggcattgataatgtggataacattatccattgtatgacacgtgtgcgcctaaaaattaacaatgagacacaagttgattatcctaaacttaaaaacatagaaggcgtgctcggagtcatacaagatgagcgacttcaaattgtggtcggacctggaacggtaaatgaagtatccgcagaaatggtaaagctaagtggtgttcaattaggtgaagatatcccccatcgtagcaacacgtcaaatattaaaaatcaagcacaacaaaacaaacgtgaattccaacaaaagcgtaaacaaagtaaaatgaatacaattttaaagtcaattgctaatattttcatacctctcatacccgcatttataggagctggacttattggtggtattgcagctgtattgaacaactttattactgctggtaccattacagctgattgggtaaaacaacttgtggccgtattaaatgtcatcaaagatggcatgttagcctatctagctattttcactggttttaatgcagcaaaagtatttggtgcaacaccaggtttaggtggtgtcattgggggtacgactttattaacaggtattactgaagataatccaattaaaaatgtatttactggcgaaccattaatagctggtcaaggtggcattataggagtgatcttagcggtatggttattaagtataattgagaaaaaactacataaaatagttcccaatgctatagatattattgtgacaccaacaatttcattacttatcatagggttactactatattcttctttatgcctatagctggatttatttctgatggattagtaggcgtagtgaattgggtaattggtgtaggtggtatatttagtggatttattataggtgcatttttcttaccactagttatgttaggattgcatcatattttcaccccaatacacattgaattaataaatcagtcaggtgcaacatatttgttacctattgccgctatggctggtgcaggtcaggttggggctgcattagcactatgggtaagatgtaaaaataatactactttaagaactgcaattaagggtgcgttaccagtcggatttttaggaattggagaaccacttatttatggtgttaccttgccattaggtcgcccattcatcacagcatgtcttggtggtggaatcggtggtgcagttataggaggcattggtcatataggtgccactgctatcggacctagtggtatttcattattaccgttaattgcccatcaaaaatatttaggttacatcatagggttattatctgcgtac

SEQ ID NO: 35413 - DNA, 2205 bp, Staphylococcus haemolyticus
atggagctattagaagcatttttattatttatattcgcagttattatcagttctattatttataataggttccctaaaattcctactgcttttattcaaatcgcattgggtgtctgcttatttgtgctacctattccaatgcactttgaatttgaatcggaagtctttatgatggcggttatcgccccacttttatttgtggaaggtacgcatatttctcgaacaaagttacttgagtaccgtaaacccatagtacttatggcaatggcactcgtctttgctactgttattggtgttggtttctttattcattggatttgggcggatttaccaatgccagctgcctttgcaattgctgcaattctttgccctactgatgcagtcgcagtttccgcaattactaaaggtaagatattacctaaagggtcaatgtcaattcttgaaggtgaatcattacttaatgacgccgcaggtatcatttcatttaaaattgcagttactgcacttgtaactggtagtttttcagcatttgatgcaattggccaatttattatttcaactattttaggtgtgttaattggtatcattgttagcgcactagtcgtaactttaagagtttatttaactgccaataaaggcatgaaagatagtaatacgttaacattcattcaattacttactcctttcgccgtttattttattggcgaagagcttcacgcatcaggaattatagccgtagttgtcgctggtttaatccatggtttagaacgcgaccgtttaattcgtgcccaaacggaattacaaatgaactataaccaaatatggaatacgctaagttatgcgttaaatggctttgtatttgttgtattaggatatatcgttcccgaagtagttatggaaattattcatgacgaaccacaaaacattgtatttttaattacaaccgcgctattaattgcgctagcgatttatgtatttagatttgtttgggtgtacttattatttaaagatttttattatccaaacaacgttcaatcttatttagatgatgaagaagatgctggaccaccgaagcgtaatcactatgcctttattatgacaatgtgtgggatacacggtaccatttccttatcaatggcactaacacttccatatatgatggatggtaaccaagagtttatatatcgtaatgatctgttattcatcgcttcatttatggtattaactagcttaattctcgctcaagttgttctaccgtttatcacaccatctgaaaagatctcagaatttaaaggtatgtcctatcaatcagctaaaatattcatggttcaacaagtactcgatgcatttaaaaagaaaaactctgaagaaaaaagtatggattatcgaccaatattaaatcaatattttaatgagttatcattcttaatcaatatggaaccggacaataaaaatacgaaagaattacgtcgccttcaagaaatagctgaagaagaagaaacaagaacactagagcgattaatcgaaaaagaaagaattactaagaaggatttaacagactatcgcaatattacggaattcagtcaatcttatcgtgaaatgtctattataagaaaaataagtcgtttctttaaattaatcggcttacgatttaaagctcgtaaagaatcacgaaaagagacacatcgcatccataaagaaaaccgaggattattaaaagaagaacatcatgctacaccagaacaaaataaaatggatattaaagctaagcgtgaagaatataaagctgaacgtcaaaaagtaaaagacgagaaaaaggcacaaagagaagaatgtgcaaatagctttaacaaagtgcaacaattaatgcgtgttgttaatcacaatattattatgaaaatgcgtcaagaacaaaatagttcaaatgtcttagaagtgagtttaattattaaccaatatcacaacttatctcgtacgattcgtcacaataagaatagaaagcaacaaaaaaatcaaaacaaagaagtatatgaacttactacacagcaacaacaagatgtaaaattggaagcattatacatccaacgtaccattttagatgaattaatttcacgaaataaagtaactaatgaagttgcaacccaattacgagaaaacatcaattacaatgaaatcgttctagcacatgaagtaagcaacgctcac

SEQ ID NO: 35414 - DNA, 924 bp, Staphylococcus haemolyticus
atggcatcggaaactaatgttagagacttgatagctaaaaataacgctaaaaagggcggtttcagtgataaaatcgtacctattattttaggaattatagctgcaatctcaattttaactacaatcggtattcttttcactttgataactgagacaataacattcttcacacgcgtatctattgttgaatttttattcactaaagactggaacccaactggttctgatcctaaatatggtatttgggcattagttattggtacgttgaaaattactgttatcgcaactatcgtcgcagttccaattggattaggtgctgcaatttacttaagtgaatacgcaagtgacaaagcaagacgtattattaaaccaattcttgaaattttagcaggtattccaacaattgtatttggtttctttgctttaacttttgtaacacctgtattaagaactattattccagcacttgatagtttcaactcagtcagtccaggaattgtagtaggtatcatgattgttccagtaattacaagtatgagtgaagatgcaatggcatctgttcctaacaaaattcgtgagggtgcttatggtttaggttcaacaaaatttgaagttgctactaaagtagtattaccagccgcagcttcaggtgttgtagcttcaattgtattaggtatttcaagagctatcggtgaaactatgattgtttcattagctgcaggtagttcaccaacagcttcattaaacttaacgaattcaattcaaactatgactggttatattgttgaagttgcaactggagatgctacattcggttctgatatgtactatagtatttatgcagtaggtttcacattatttattttcacattaataatgaacttaatttcttattggatttcgaaacgcttcagagaggagtat

SEQ ID NO: 35415 - DNA, 823 bp, Staphylococcus haemolyticus
caagaatcaatttcaacagtagtttcatcaaatgaagttaagcacaataaagaatcagatagtaataaaaaagtagtttattcaacacaaaacttagatttatggtacggagatacacatgcgctacaaaacattaatttagatattttagaaaataatgttactgctattattggaccatctggttgtggtaaatcaacttatattaaaacattaaaccgtatggtagaattagtaccttcagtaaaaactgctggtaaaattttataccgtgaccaaaatattttcgatgaaaactattctaaagaaaaattaagaacaaatgtaggtatggtattccaacaaccaaacccattcccaaaatcaatttacgataatatcacttatggtcctaaaacacacggtattaaagataaaaaattattagatgaaatcgtagaaaaatcattacgtggcgctgcaatttgggatgaattaacagatagattacacacaaacgcatacggtttatctggtgggcaacaacaacgtgtttgtattgtagatgtttagctattgaaccagatgttattttaatggacgaacctacatcagcattggacccaatctctacattaagagttgaagaacttgttcaggaattaaaagaaaattactctattattatggttacacacaacatgcaacaagctgcacgtgtatctgataaaactgcattcttccttaatgttatgttaacgaatacgacgacactgataaaatcttctctaatccttctgataaacaaacagaagactacatctcaggacgttttggttaatat

SEQ ID NO: 35416 - DNA, 1816 bp, Staphylococcus haemolyticus
atgagacaaaaaacattagacgtcttagaatttgataaaatcaagtcatttgtagcttcggaaacaataagtgacttagggcgtgaaaaagtgtctaagatgtctccagccactgactttgaaacagtagaatttcaaatgaatgagacagatgaaatttcacaaatttataacaaacatcgtttaccaagtttaagtggtttagccaaaatttcaccattgattcatcgtgcaaatataggtggcgtattaaatgttacagagctaaatttagttaaacgtttaattcaagttcaaaatcaatttaagacattttataatcaattattagaagaagatgaacaagttgttaagtatccaattttgaatgataaaatgaaccaattaccaattttatcggatcttttccaagagataaatgaaaaatgtgatacacacgatttatatgatagcgcaagttatgaattgcaaggtatacgaagtaaaatttcaagtacaaaccaacgcatacgacaaaatttagaccgtatcgttaaaagccaagccaatcagaagaaattatctgatgctattataacggtacgcaatgaccgtaatgttataccggttaaagctgaatatcgccaagatttcaaagggattgttcacgatcaatctgcctctggacaaacgctttatatcgaaccatcatcaattgtagaaatgaataatcaaatcagtcgtttacgaaatgatgaagcagtagaacgtgagcgtattttaacagaattaacaggtatggttgctgccgaagcagatggttgcttaattgctgaatcagtcatgggacaaattgactttttaacagctaaagcacgatatgcacgctcaattaaaggaacgaaacctacattttacaaagatagaactgtttatttacctaatgcatatcacccactattaaataaagatacggttgtagctaatacaattgaatttgttgatgatattgaaactgtcataattacaggtccaaatacgggtggtaaaacagttacattaaagacacttggattaattattattatggctcaatcaggattgctaattccgacattagatggtagtcagttaagtgtctttgaaaatgtttattgtgatataggtgatgagcaatcaattgaacaatcactatccactttttcttcacatatgaagaatattgtggaaattttgcaagagacagataaaaatagtttagttttatttgatgaattaggtgcaggtactgatccaagtgaaggtgcagcgttggcgatgagtatcttagatcacgttcgtgaaataggttcattagtaatggctacaacacattatccagaattgaaagcatatagttataatcgtgaaggtgtcatgaacgctagtgttgaatttgatgttaatacgttaagcccaacttataaattattaatgggtgtacctggtcgttcaaatgcatttgatatttctcgtaaattaggacttagcttaggtattattaataaagctaagacgatgattggaacagacgaacaagaaattaattcaatgattgaatctcttgaaaagaattcaaaacgtgtcgacgaacaacgaattgaattagatagactgttaaaagaagcgagaaaaacgcatgatgatttagaacaccagtatgaacaatataaaagttacgagaagaaattgatggatgaagcgaaagacaaagcaaatcaacgtgtcaaatctgcgactaaagaagcgggtttcaatcttaaaagaattaagaacattacgtgatccaaaaaggtgc

SEQ ID NO: 35417 - DNA, 1701 bp, Staphylococcus haemolyticus
gtgatgaaacaatcgaaagttttcataccaactaggagagatgtccctgctgaagcagaagcattgagtcaccaattattattaaaagcaggattaatcaaacaaagtacaagtggtatttatagctatttaccattagcatctcgtgtgttaaataatatttctaaaatcatccgtgaagaaatggaaagcattgatgccgttgaaattttaatgcctgcacttcaacaagcagaactttgggaagaatcaggtcgttggggtgcatacggtccagagttaatgcgcttaaaagatcgtaatggacgtgaatttgctttaggtcctacacatgaggaagtagtgacttctatcgttagagatgaacttaaatcatataaacaattgcctttaacgttattccaaatacaatctaaatttcgagatgagaaacgtccacgctttggtttgttaagaggtagagaatttattatgaaagatgcgtattcatttcatgctgatgaagcatctttagatgaaacatatcaagatatgtacaatgcttacgaccgtatattcaaacgtgttggcatcaatgctcgaccagtggttgcagactcaggtgcaattggcggtaaccacacacacgaattcatggccttaagtgaaattggtgaagatactatcgtatatagtgagcatagtgattatgcagctaatattgaaaaagcggaagtcgtttatcatccaaatgaaaagcatacagaagtagcagaactagaaaaggttgaaacacctaatgttaaaactgctcaagaattagctgattttttaaaccgtccggttgatgaaattgttaaatcaatgatttttaaaattgatggagaattcattatgttcttaatacgtggtcatcatgaattaaatgatgtcaaagtaaaagcattttttgaaacagataatgttgaaatggctactcaagaagagattgttaacttattaggtgctaatcctggttcactgggaccagttcatgataaagatattagaatttttgcagataattatgtcagagatttaaataatttagtcgttggtgctaatgaggatggatcccactatattaatgctaatttagatcgagatttcaaggttgatgagtttggagatttccgctttatcttagaaggagaaacattaagcgatggctctggcgaagcgaaatttgcagaaggcattgaagtaggtcaagtatttaagttaggaactaaatactcagaagcaatgaacgcaacattcttagataaccaaggtaaagctaagccattaatcatggggtgctacggaataggcgtttcaagaacgctaagtgctattgttgaacaaaataatgatgaaaatggtattatttggcctaaatcagttacaccatttgatttacatctaattactattaatcctaaaaaggatgaacaactagaattaggtgatcaattgtataaagaattacaacaacaatatgatgtactttatgatgatcgtaaagatcgagctggcgttaaatttaatgatgcagatttaatcggtcttccaataagaattgtagttggtaaaaatgctagtgagggtatcgttgaagttaaagtacgtcaaactggtgaaagcgaagaagttcatattaacgatttaaacactcatatcgctacactttatagtaattta

SEQ ID NO: 35418 - DNA, 1134 bp, Staphylococcus haemolyticus
gtggcaagtaatgaacttttattagcaactgaatatttagaaaaagaaaagaaaatccctagagaagtattaatcgatgctattgaagcagctttaataactgcatataaaaagaactatgatagtgctagaaacgtacgtgtagaattaaatatggatgaaggtacttttaaagttatagcacgtaaagaagttgtagaagaagtatttgatgacagagacgaagtagatttaagtacagcattagttaaaaatccagcatatgaagttggtgatatctacgaagaagatgttacaccaaaagattttggtcgtgttggtgcacaagctgctaaacaagcagtaatgcaaagactaagagatgctgaaagagaaattctgtatactgaatttattgataaagaagatgatattttaacaggtgttatcgatagagttgaccatcgttacgtttatgttaacttaggtagaattgaagcggtcttatctgaagctgaaagaagtcctaacgaaaaatatattcctaacgaacgtattaaagtctatgttaataaagtggaacagacaactaagggaccacaaatttacgtttctagaagtcatccaggcttgttaaaacgtttatttgagcaagaagttcctgaaatttatgatggaactgttattgtgaaatcagtagcacgtgaagctggtgatcgttctaagattagtgtttattctgataatccagatatcgatgcggtaggcgcatgtgttggtgcaaaaggtgctcgagttgaagctgtagttgaagaacttggtggagaaaaaatcgacatcgttcaatggaatgaagatcctaaagtatttgtacgtaatgctttaagtccctcacaagtattggaagttatcgttgacgaagacaatcaatctactgttgttgtagttcctgactatcaattgtcactagctattggtaagagaggtcaaaatgcacgattagctgcaaaattgactggatggaaaattgatattaaatcagaaactgatgctcgtgatgcgggaatttatcctgtgattgaatctgaagaattagctgaagacatcggtttatcagatcagatgatgaggatattgaaattgatgatgttaatt

SEQ ID NO: 35419 - DNA, 972 bp, Staphylococcus haemolyticus
ttgagtaaacattctaaacatattccttgtttaattactattttcggtgctaccggagatttaagtcatagaaaattatttccatcactattccacttatttcaacaagataatttagatgaacatattgcaataattggaattggacgtagagattacacgaacgaagtctttcgtgaacaagttaaaagttctatccaaaagcatgtcaaagatacggatcaaattgatgcatttatggaacatgtctattattttaaacatgatgtaagtgatgaacaaagttatgattcattattgagtttttcaaatgaattagattcacaatatcagttaaaaggaaatcgcttgttttatttagcaatggcacctcaattctttggtattatttcggattacttaaaatcatctggtttaaccgatactactggttttaaacgattagttattgaaaaaccatttggcagtgatttaaaatcggctgagcaattaaacaatcaattaagacgctcatttaaagaagaagaaatatacagaattgatcattatttaggtaaagatatggttcaaaatatagaagtcttgcgcttttcaaatgcgatgtttgaaccattatggaataataaatacatttcaaacattcaagtaacgtcttcagaagtattaggtgttgaggaccgtggaggttattatgaatctagtggcgcattaaaagatatggtacaaaatcatatgttacaaatggttgcccttttagctatggaagcgccaatcagcttaaatagtgaagatatacgtgctgagaaagttaaagtattgaaatcacttagacagcttgatcctcaaggagttaaaccaaaattttgtacgtggacagtatgatgaaggatttgttgaaggtgaaaaagtcattgcttatcgagatgaagatcgagtagccgaagattcaatactccaacttttggatcaggc

SEQ ID NO: 35420 - DNA, 906 bp, Staphylococcus haemolyticus
atgcaaaagaatattttaaagagtggcatcgaaatttcagaattagggttaggttgtatgagtttaggtacagagtatgctaatgctgaacctatcattgaaaaagcaatcgaaagtggtatcacttattttgatactgctgatatttatgataaagggactaatgaagaaattgtgggcaaagctttaaaaaaatatcaaaatcgtgatgatattgtaattggaacaaaagttggaaatcgccctactgaagatggaggtacaacatgggacccttctaagaaatatattaaagaaagtgtaaagggatcattaaaacgattaggactaaatcatatagatctatatcaattgcatggtggtacaatagatgatccattggatgaaacgattagtgcatttaatgaattaaagcaagaaggtatcattaaggcatatggtatttcttcaatacgcccaaatgttattgattattatttaaaacatagtgaaatcgagacaattatgtcacaatttaatttaattgataatcgtccagaacaattattgaatgacatccatgcgaaaggcgttaaagtgttagcacgcggacctgtatttaaagggttgttaacttccaatagtattgatgctttagatcataaatttagtgagggcatatttgagtatacacatcatgatttaggagaaactattgcctctgttaaagaaatagaaagtaatcttagtgctttatcttttgaatatttaaaatctcatgatgcacttggcgcaattatcgttggcgctagttcgccacaacaattagaagaaaacgttaataattacaataaaaaagtaagtcttgatcaagtgaaggcagctcgagaaagagttaagaacttagaatatactcaacatttaaaa

SEQ ID NO: 35421 - DNA, 885 bp, Staphylococcus haemolyticus
atggaaacaattatcgaggaatatttaaaatttatacaaattgaaaaagggttaagtgaaaatacgattggcgcttatcgcagagatttgaaaaaatatcaattatatatgcaagaacaaaaaattgctcatattgattttatagatagacaaacaatacaagaatgccttggttctctaatagatcaaggtgcttccgcaaaatccattgcaagatttatttcaacaatacgtagttttcatcaatttgctttacgcgaaaaatatgctgctaaagatcctaccgttttaattgaaacacctaagtacgagaaaaaacttccagatgttttagatgttgaagaagtaattcagttactagaaacaccggatttaactaaaaataatgggtatcgcgatcgtacaattttagagttattatacgcaacaggcatgcgtgttactgaattaatacaaatcgagatagatgatgtcaacttaattatgggatttgttaaagttttcggtaaagggaacaaagagagaatcattccattaggtgacactgtcattgaatatttagatacttatatcaataatgttagatctcaattacttaaaaaaacggtaacgaatgtactgtttttgaacttgcatggtcgacctttgacacgtcaaggtatatggaagctaattaaacaatatggtttaagagcgaatattaataaatctttgaccccacacacattaagacactcgtttgctacacatttactagaaaatggcgcagatttacgagcagttcaggagatgttaggtcattctgatatttctaccactcagttatatacacatgtttctaaaactcaaatcagacagatgtataaccaatttcatccaagagcc

SEQ ID NO: 35422 - DNA, 2814 bp, Staphylococcus haemolyticus
atgaaaaacgcactaaaattatttataacggacttgaagcgagttgctaagacgccagcagtttgggttatactagcaggacttgcgatattaccgtctttctatgcttggttcaacttatgggctatgtgggatccttatagtcatacaggtcatatcaaggttgccgttgtaaacgaggacaagggtgacaaagttcgtggcaagaaaattaatgttggtaatacattagaagacaatcttaagaaaaacgataaatttgattggcaatttgttagccgggaaaaggcagaccatgaaattaaaatgggtaaatactatgctggcatatacatacctaaagaattctcgcatcaaattactggcacattaagaaagaaaccacaaaaagccgatatcgaatataaagttaatcaaaaaatcaatgccgtcgcaccgaaaatgaccgatacagggtcaacggtcatcgtagacgaagcgaataaacagttcaatgaaaccgtcacgaaagcgttactacaagaagcgaataaagtgggtattcaactcgaggatgaagtacctacaattaataaaattaaaaatgcagtttatgcagcacatgactcattaccacaaatcaataaaattgcggatcgaattgaatatttgaatgatcatcaggatgatcttgataaatatgcaaatcaattccgtgcgttaggtaactacaaaggtgatattttagatgcgcaacaaaagcttaatgatgtgaatgcggccattccgtcacttaacgaaaaggcaaaactcatcttagcacttaatgaatatatgccgaacattgagaaattattagatgtagcttctaatgatataccggcacaatttcctaagattaatagaggcgtggatattgctagtgaggggtttgatctagcgaatacgcgtttaaatgatgcacaaggttatcttacatctgctcagcaacgtgtaggtgattatcaagaagcggcagggcgtgctcaagaagtaaataaccaagccaatagtgcattgcgtcaacaaagtacatcgggacttcctcaatatcaaattcagaagttgagcacagataatagccaggacacggtaaatgataatcaaatcgtctcaaacaatgacgtgaagtctatgaatagtgcgcttgcagaagcattattaacactttcaagtaattctgataatcaagcgaaagcaacacagtcagacattaaagccttgaaagatatatcttatggtgttattggttctaatcgaccaacggaatttaatgacatgttacgtaacttaaaaacacgtcttgaaaatagctcgaaaagtaatcaacaattgatagacgtgttaaaagaattagaaaaaagagaacatgtcgatttatcgtctcaaattaaacaagttgagagtgccaataatcgtatcagcgattcattacgttcaacgaatcaactcattgatgcactgaaaaatggtagttcaggtaaagcagaagcagttaacgtattacgttcgttaccagatttaaataaagcgttaggtaactatcgtgatttcattaaaaatgacttaaacaatcgtttgttagttgtatctaatcaaattacacaagaattaaacaaaggtcagaatacgttatcagacgttcaatctaaattaaatacgattaatcgtgttatcattgctggtcaggatatagttacagatggacagaatcgtatagctaacattcaaagcgaattacctgctttagaacaaacctatattaatgcgatgcaaactgctcagaaatatttccctacagtgaaaaaagacgtagcgaatgcagctgactttgttcgtaatgatttgccagatttagagcaacaacttgcgaatgcgacagcaacagtaaatacaaacttgccgacattgttcaataagtatgacaatgccgttgatttattaaatcaaaatcaaccacgtgcgaaagaagcgttagcaaacttagctaatttctctgaaaaccgtttgccagatattgaaaaagatttaaacaaagcgaataaaatatttaaaaaattagacgaagatgatgcggtagataaagtgattgatgcgttgaagaatgacttgaagaaacaagccgacgtgattgcgaatcctattcataagaagcaagtagatgtctttccagttaaagattatggttcaggtatgacaccattctatacctctttatctatatgggtaggggcattattactagtaagtttattgtctgtagataataaacatgaagccttgacagatgagttgacgaaacgtcaaatttatttaggtaaaggtgctttctttataatgatgggtatcattcaaacgttgattgtaacgattggtgacttggttattttgaaagcgcaggttgaatcgccgaccttatttatcttagtcgcactgtgtggtgctattgtctttaatacgattgtgtacacatgcgtgtcattacttggaaatccaggtaaagctattgcaatcattttactagtattacaaatcgctggtggtggaggaacattcccagttgtaactgcacctaagttcttccaaacgatttcaccatatttaccattcacgtatgtgatagattccttacgtgaaacggtaggtggcattgtaccagaaattttaattacgaaaatgattatcttaatactatttggactaggattctttattttaggcatcttagtcaaaccagttcttgatccaattatgcgtaaaatttctaaacgcgtggatgaaagtaaagtaacggaa

SEQ ID NO: 35423 - DNA, 1173 bp, Staphylococcus haemolyticus
atgtctgttatgcggatagcgacatttatcatcagtgtatttatagtaggtatggttgaaatgatggtcgctggtatcatgaatttaatgagtgatgacttaggtgtttcagaagcaataattggacaacttgtcacactttatgcattaacctttgcgatatgtggacctatacttgttaaattaacaaatcgatatcctgcacgtcctgtattattatggactttagtcatctttgtagtaggtaatggaatcatcgctgtggcgcctaactttacgattctagtcattggacgtatattatcttcagctgcagcttcattaatcattgttaaagtcttagcgctcacagcaatgctaacgatacctaagaacagaggtaagatgattggcgttgtctatactggattcagtggggcaaatgtctttggtgtgcccattggtacgatgattggtgattggattggttggcgtttcacattcgtatttattattgttattagtcttattgccggcttattaatgttgaaatatcttccaactactacggaactcaatcaagccaatagaatgtataataacgtttccgatgataatcaagtcacatctcatattgttcgaccagttgagatcattaagtttttagcaattacattgcttattctaatcgctaattcagtgacgtttgtatttatcaatccacttattttagaaaatggtcactccatgggctatgtatcattagcactactcgttaatggcgttgccggtgttgttggtacatcaatgggtggtgtactagctgataaattgactagtaagcgatggttaattattgctttctcagtatttattgtcgtgatgctagccatcaatttaattttatctacaacagtactattattagttggactctttatttggaatatcgtgcaatggagtacgaaccctgcgatacaaagtggtattatcgaacatgttgaaggtgacacaagtcaagttatgagttggaatatgtcttgtcttaatgcaggtattggtttaggtggtattatcggtggccttgttgtttcaaatatgaatgttgaagcggtcacgtttgtaagtgcctttataggtttattaggactgattattgtacttacattaaagaacgtacattatgctaaaaat

SEQ ID NO: 35424 - DNA, 171 bp, Staphylococcus haemolyticus
ttgacgtcttatcatcatgcctcttatggttagggccatacacggtctacaatcgatagtacatagggcaccgcaaccgctaggtcatgcaaatcccataaagttgttctcagttcggattgtagtctgcaactcgactacatgaagctggaatcgctagtaatcgtagat

SEQ ID NO: 35425 - DNA, 171 bp, Staphylococcus haemolyticus
atgacgtcaaatcatcatgccccttatgatttgggctacacacgtgctacaatggacaatacaaagggcagcgaaaccgcgaggtcaagcaaatcccataaagttgttctcagttcggattgtagtctgcaactcgactacatgaagctggaatcgctagtaatcgtagat

SEQ ID NO: 35426 - DNA, 2637 bp, Staphylococcus haemolyticus
gtgtcggaaatgaaaaatttaaaagctagtgaaattcgtcaaaaatatattgatttcttcgtcgaaaaaggtcatatggttgaaccttcagcccctttagtgccaattgatgacgattcattattatggataaattctggtgtagcaactttaaagaaatatttcgatggtagagaaacaccaagaaagcctagaatagtcaattctcaaaaagcaattagaacaaatgatattgaaaatgtaggatttactgcacgacatcatacatttttcgaaatgcttggtaacttttcaattggtgattatttcaaaaaagaagcaatccactttgcgtgggaatttttaactagtgaaaactggatgggcatggaacctgaaaaattatatgtaactattcatcccgaagattctgaagcttatcgtatttggaatgatgaaattggattagaagaaagtcgaattattagaatagaaggtaatttctgggatatcggtgagggtccatctggtcctaacactgaaattttctatgatcgtggagatgaatatggtcaagatgatccatcagaagagatgtatccaggtggggaaaatgaaagatatttagaagtttggaacttagtttttagtgaatttaaccataataaagacaacacttatacaccattaccaaataaaaatattgatacaggtatggggcttgaacgaatggcctctgtttctcaaaacgtaagaacaaattatgaaacagacttatttatgccaatcattaatgaagttgaaaaagtagctgacaaaaaatatttagtaaacaacgaacatgatattgcctttaaggtaatagcggaccatattcgtacaattgcatttgctattgctgatggcgctttacctgcaaatgagggaagaggttacgttttacgtcgacttctacgtagagcagtcagatttagtcaaactctcgacattaatgaaccatttatgtataagttagttgacatcgttgcagagataatggaaccatattatccaaatgttaaagaaaaagctgattttattaagcgtgttattaaatcagaagaagaacgtttccatgagacacttcaagaaggtttagcaattttgaataatttattagcaaaagctaaatcatctaataatgaaattaacggttcagatgcgttcaaattatacgacacttatggattcccaattgaattgacagaagaattagctagtcaagaaaacatctctgtggatatggcaacgtttgaaaaagaaatggatcaacaacgtacacgagctagagaagctcgacaaagttcacaatcaatgcaaatccaaagtgaagttcttaaaaatattaccactgaaagcaaatttgtcggatatgaaactacagattatcagactacgttaactgatttaatttataatggagagaaagttgaatctgctgaaccaggagaaactgtatatttcattttaaaagaaactccattttatgcagttagtggtgggcaagtagctgataaaggaacagtaggtaatgagaactttgagattgaagtaactgaagtaactaaagcacctaatggtcaaaacttacatcaaggtgtcatccaatttggtcaagttacaattaatagtgatgtagatgcaagtgttaatagggatgaaagaaaagacatccaaaaaaatcatagtgccactcatttacttcacgctgcattaaaagaagtattaggtgaacatgtaaatcaagcaggttcgttagttgaaagtgagcgtttgcgtttcgacttctcacattttggtccgatgactcaagacgaaattgatcaagttgaaagacgtgtaaatgaagaaatttggagaggtatttcagttaatatacaagagatgcctattaatgaagcaaaacaaatgggtgctatggcgttattcggagaaaaatacggagatattgtgcgcgttgttaatatggcaccgttctcaattgagctatgtggtggtatacatgttgataatactgcagaaattggacttttcaagattataagtgaatcaggtacaggtgcaggcgttagacgtattgaagcatttactggtaagtcagcattcttacatttagaagatattcaaaataaatttaattctattaaagatcaagttaaagttaaatctgataatcaagtatttgataaaattgtccagctacaagaagaagaaaagaaccttcataaacaattagaacagcgaaataaggaaatcacttcacttaaaatgggcaatattgaggatcaaattgaagaaattaatggctttaaagtattagctacagaagttgaagtttctaatgctaaagaaataagacaaactatggatgatttcaaatctaaacaacaagatgctattataatcttagcaagtgatttaggtgaaaaggtatcactaatagcaactgtaccaaaagaacagacagataaaattaaagctggagatatcattaagaatatggcgccattagttggtggtaaaggtggcggtcgtccagatatggctcaaggtggcggtacgcaaccagagaatatctcagaagcattacgctttattaaagattacattaaaaaaata

SEQ ID NO: 35427 - DNA, 258 bp, Staphylococcus haemolyticus
atggataatattgataaaacaatgaagtttgactatgaagaaattccgaaagataatgttgaaacagtgttaaacaacgtacaccgaactttagaagagcgtggttacaatgctgtaaatcaaattgtaggatatttactctcaggtgatcctgcatatatacctcgtcaaaatgatgctcgaaatcaaattcgccacattgatcgtgacgttatcatggaagaactcgtttcaaattatttaaaagagaataagaaa

SEQ ID NO: 35428 - DNA, 426 bp, Staphylococcus haemolyticus
atgttaactcacaaaattttgggtttggatgtaggtagtaaaacagttggcgtagctataagcgatttaatgggttggactgcccaaggattggacactctaagaattaacgaggaactagaagattatggtatagagcaattagtgaccatcattaaagaaaataacgttggttctgtagtgattggtttacctaagaatatgaataattctattggctttcgtggagaagcttcgttaagatataaggagttactcaaagaaagcttacctgatatagagataattatgtgggatgaacgattaagtactatggcagcagagcgttcattacttgaagcagatgtatctagacaaaaaagaaaaaaagtaattgataaaatggcagcagtgtttatattgcaaggctatttagattcaatccaa

SEQ ID NO: 35429 - DNA, 312 bp, Staphylococcus haemolyticus
atgactgaacataatcataaccacgatgtagaattagatattagtaatgaagaagagttattaactttattcgatgaaaatggtaacgaagttttatatcgtaaaatgttggaattttaccatccagaatttaaaaaagaatatgttattttagctgaggaaggtgctcaatctgacgatgatgacatgattgaattgattccaatgattaatgaacctgatgaatcaggcgatggtggtaaattagtacctatcgagactgacgaagaatgggacatgattgaagaagtagttaacacaaacatggaagaa

SEQ ID NO: 35430 - DNA, 1266 bp, Staphylococcus haemolyticus
atgaaaacattgactgaaattcaaacgaaagttaaaagtaaaattaaaaagcccgaattattagcgcctgctggtaatttagaaaaattaaagattgcagtacattatggtgcagatgcagtatttttaggtggtcaagaatatggtttgcgttctaatgctgataattttactatggctgaaattaaagaaggcgttgaatttgcaaatcaatataatgcaaaaatatacgtaactactaatattatcgctcatgacgagaatattaaaggtctggaaaattatttaattgaattagaaaaaacgggtgctaccggaatcattgttgcagatcctttaattattgaaacttgtaagcaagttgctcctaaattagaaatacacttatcgacacaacagtcattgtctaatactaaagcggttcaatactggaaagaagaaggtttagatcgagtggtattagcacgtgaaactggtgcgatggaaatgaaagaaatgaaagaaaatgtagacattgaaattgaagcatttatacatggtgcaatgtgtattgcatattcaggtcgctgtacactaagtaatcatatgacagctagagattctaacagaggtggttgttgtcaaagttgtcgttgggattacgatttattagaagtagataatgacggtgaacttgatctttattatcaagatggagacaccgtaccatttgctatgagtcctaaggatttaaaattaattgaatcaatacctcaaatgatggaaatcggtatcgactctttaaaaatagaagggcgcatgaaatctattcattatatagctacagttgtatcagtttatagaaaagttattgatgcttatgctgaagatcctgagaattttaaaattaatcctgaatggttaaaagaattagataaatgtgctaatagagatactgcaccagcattttttgaaggtacaccaggatatgaagagcaaatgtttggtgttcaacaaaataaaaaatcaccttacgatttttgtggattagtaatagattatgatgaaactactcaaattgctacaatacaacaaagaaatcactttaaaccaggtcaagaaattgaattctttggacctgaaatacaaagttttagacaagttattgatgccatatatgatgaggagggcaatagtctagatgctgctcgtcacccacttcaaattgtacaaattaaagtaaatcatccaatttatcctaagaacatgatgagaaaggaaattaga

SEQ ID NO: 35431 - DNA, 1194 bp, Staphylococcus haemolyticus
atgacttacaataaacgtttatttacttcagaatcagtgacagaaggacatccagataagattgctgaccaagtatctgatgccattttagatgaaatcttaaaagatgaccccaatgcacgtgttgcttgtgaaactactgtaacaactggaatggctctaatttcaggtgaaatatctacatcaacctatgtagatatccctaaagttgtaagagaaacaattaaaggtattggctatactcgtgctaaatatggctatgattaccaaactatggcagttttaactgcaatcgatgagcagtcacctgatattgcacaaggtgttgacaaagcacttgaatacagaaatgatatttcagaagaagagattgaagctactggtgccggtgaccaaggtttaatgttcggatatgctacaaatgaaacagaaacatatatgcctttacctatctttttatctcatcaattagctaaacgtttatctgatgtacgtaaagatggaattttaaactatttaagaccggatggtaaagttcaagtaacagttgaatacgacgaatcagataaacctaagcgtattgacacgattgtagtatcatctcaacatgcggatgatattgaattagaacaaattcaaagtgacattaaagaacatgtcatatacccaacagttcctgaaggattaattgataatgaaacgaaattctttatcaatcctactggaagatttgttatcggtggacctcaaggtgatgctggattaacaggacgtaaaatcattgttgatacttatggtggttatgcacgtcatggaggaggttgctttagtggtaaagacccaactaaagtagaccgatcagcagcttatgcggcaagatatgtagctaaaaatattgttgctgcaggactagcagaccaatgtgaagtacaacttgcttatgctattggcgtggctgaaccagtttcaatttcaattgatacatttaaaacgggcaaagtttctgaagctcaacttgttgaagctgttagagctaactttgatttacgtccagcaggtatcattaaaatgttagatttaaagcatcctatatacaaacaaactgctgcttatggtcactttggtagaacagatgtattgttaccatgggagaaattagataaagtcaatgtattaaaagatgctgttcaagct

SEQ ID NO: 35432 - DNA, 834 bp, Staphylococcus haemolyticus
atggaaacaattgaattttataatggtcacacaatgcctaaagttggaattggtacttttagagtagaaaataacgatgaatgtaaggaggcagttaagcatgcaattgtctcaggttatcgtagtattgatacagctaaagtatatggtaatgaagaacaagttggtttaggaattaaagaaggtctagaagctactgggttagaacgtaaagatttattcattacatcaaaactatattttgaagattttgggcgcgaaaatgttgcaaatgcttatgaaacaagtatcaataaattaggactagattatttagatttatatcttgttcattggcctggtactaatgaagcaataatgattgatacatggaaaggtatggaagatttatataaagatgataaggttaaaaatattggtgtaagtaacttcaatgcagaacactttgaagcattattagctcaagtttctattaagccagtcatcaaccaagtagaatttcacccatattttactcaaaataaactacgtaaatatttagaagtacaaaatatccatatggagtcatggtcaccatttatgaatgcccaaatcttaggtgatgaaacacttaatcaaattggcaaagaagttaataaatcggcagcacaagtcgtcattcgttggaacatgcaacatggtgtcatcgttattcctaaatcagttacacctcaaagaatagaggaaaatattaatgtttttgatttcgaactaacagatgaacaaatggaacaaattgattctctaaacaaagatcaacgcattggtcctgatccagcaacatttgagggacat

SEQ ID NO: 35433 - DNA, 711 bp, Staphylococcus haemolyticus
atggcaaaattaaatgtcgaagtatttgcagatggcgcagatattgaacaaatgaaagcagcatataaaaataaagaggtagacggattcactactaatcctagcttaatggctaaagcgggtgtaacagactataaatcattcgctgaagaagcggttaaagaaattccagatgcatctatttcatttgaagtattcgctgatgatttagaaactatggaaaaagaagctgaaatattaaaacaatatggtgataatgtttttgtcaaaattccagttgtgaatactaaaggcgaatcaacaattccgttaataaaaaaattatcagcggacaatgtgcgtttaaatgttactgcagtttacactattgagcaagtaaaagaaattactgaagcggtaactgaaggagtacctacatatatttcagtatttgcaggtagaatagctgatactggtgttgacccattacctttgatgaaagaatcagtagatgtggcgcatagtaaagaaggcgttaaattattatgggcaagttgtcgtgaactatttaatgttattcaagcagatgaaattggtgccgacattattacatgtccagcagatgtagttaagaaagtaaatactaatttaggtcgagatattaatgaattatcagttgatactgtaaaaggtttcgctaaggatattcaaagctcaggtttatctattctt

SEQ ID NO: 35434 - DNA, 3211 bp, Staphylococcus haemolyticus
caggaactcgatgatgtattcggtcatcaaaacattcttgttactggtctctctccctctgcgaaagctacgattatcgctgaaaagtatctaaaagatcaaaaacaaatgttgttaatcactaacaacttatatcaagcagataaattagaaactgatattttacaatatatcgatcattctgaagtttataaatatcctgtacaagatattatgactgaagaattttcaacgcaaagccctcaacttatgagtgaacgtgtaagaacactgactgcattagctcataataagaaagggttatttatcgttcctttgaacggattgaaaaagtggctcacgccatttgaactatggaaagatcatcaaattacgcttagagtaggcgaggatatagatgtcgatgaattcttaaataaattagtgaatatgggatatcgtcgcgagagtgttgtatcacatataggcgagttctcattgcgtggaggcattatcgatatttacccactcataggtcaacctgttcgaatagaattgtttgatacagaagttgattcaattcgtgacttcgatgttgagacgcaacgttcaaatgacaatattgaagaagtttcaatcacaacagcaagtgattacgttattacagatgatgtcattcaacatttacaatcagaattgaagaccgcatatgaagcaacacgaccaaaaattgacaagtctgttcgtaatgatttgaaagagacatatgaaagtttcaagttatttgaaacaacgttttttgatcatcaattattacgtcgtttggtggcatttatgtacgagcaaccttcaacgcttattgactattttgcaaaagacgccatcattgtagctgacgaatataatcgcattaaagaaactgaaaagacgctaacaactgaagtggacgatttcattcagaacttaatagaaagtggaaacggatttatcggtcaatcatttatgcaatatgatggttttgagtcgttattgaaggattatccagtgacgtacttcactttgtttacgtccactatgcctgttcagttacaacatattattaagttttcttgtaaaccagtacaacagttttatgggcaatacgatattatgcgttctgaattccaacgctatgtacacaacgactatcatatcgtggtgttagttgaaactgaaacgaaagttgaacgaattcaatcgatgttgaatgagatgcatataccaactgttactaatgttcacaatgacattaaatctggccaagtcgtcgttacagagggcagtctttcagaaggtttcgaattaccttatatgcaacttgttgttataactgagagagaattgttcaaaacaaaacaaaagaaacagcgtaaacgtactaaaactttatctaatgctgaaaaaatcaagtcatatcaagaccttaatgttggtgactacgtcgtacatgtacatcatggggtagggcgttatcttggtgttgaaactttagaagttggagatgttcaccgagattatattaaattgcaatataaaggcacagaccaactctttgtaccagtcgatcaaatggatcaagttcaaaaatatgttgcttcagaagataagtcgcctaaattaaataaacttggtggctcagaatggaagaaaacaaaagctaaagttcaacaaagtgtcgaagatattgctgatgaattaatcgcattatataaagaacgtgaaatgtcggtaggttatcaatatggtgaagataccgctgagcaaagtgcatttgaaatggacttcccatatgaattaacgcctgaccaagcgaaatcgatagacgaaattaaaggtgatatggaacgcgagcgaccaatggatcgtctattatgtggtgacgtaggttatggtaaaacagaagttgctgttagagcagcttttaaagcagtaatggaagggaaacaagttgcatttcttgtacctacaacgattttagcgcaacaacattatgaaacgttaattgaacgaatgcaggattttccagtacaaattgaattgattagtcgattccgtcccaactaaagaagtcaaagaaactaaagaaggtcttaaatcaggatacgttgatattgttgttggaacacataaattattaggcaaagatattcattataaagatttaggattattaatagtcgatgaagaacaacgttttggtgtacgtcataaagaacgtattaagacaatgaagacgaatgtagacgtactgacgttaactgcaacgcctattcctagaactttacacatgagtatgctaggagtacgggatttatcagtcattgagacacctccagaaaatcgcttccctgtacaaacttatgtgttagaacaaaatagtaattttattaaagaagctttagaacgagaattatcacgtgatggacaggtattctatttatacaacagagttcaatccatttatgaaaagcgtgaacaattacagatgttaatgccggatgctaatattgccgttgcacatggtcagatgacagaacgtgatcttgaagaaacaatgctaagctttattaatggcgaatttgatattttagtgactacaacgattattgagacaggtgtagatgtacctaacgcgaatactctaatcattgaagaagcagatcgctttggattaagccaattgtatcaattgcgcggtcgtgtaggacgctcaagtcgaattggctatgcatacttcttacattctgcgaataaagtgctaactgaaactgcagaagaaagattacaagctattaaagaatttactgaattgggttcaggattcaaaattgctatgcgtgatttaaatattcgtggtgccggaaacttactaggtaaacaacaacacggctttattgattcggttggctttgacttgtattcacaaatgttagaagaagcggttaatgaaaaacgtggaattaaagaagaagaaccagatgcaccagaagtagaaatggaactcaacttagatgcctatttacctgcagaatacattcaaaatgagcaagcaaaaattgaaatttataaaaaactacgtaaagttgaaacagaagaacaattatttgatattaaagacgaattgatagatcgattcaatgattatccagttgaagttgaacgtttacttgaaatggttgaaattaaaatacat

SEQ ID NO: 35435 - DNA, 1611 bp, Staphylococcus haemolyticus
ttgaagatgaaaactaaaagcatatcagaatctaaatctacacaatcgttatcatctaagagttcaaacgagttcaaacacattgaaccctctaactacacagcgttcaatggcgttgtgattctaacccttgcactcatcatagttaaaattttaagtgcaatttacagagtgccttaccaaaatgttctcggagatactgggttgtatgcttatcaacaaatatatccaattgtggcgctaggtatgattttatctatgaatgctattccaagtgcggtaacgcaaacgctgggtattaatggacaaccgtcttcgttttcaaaagtgctaatacgatttcaaacgttaggcatagtaatatttttaatgctcttattattagcgcacccagtggctatattgatgggagattcaagacttgcacctatgatacgaatggcaagtttgagttatttatttattggtatattaggtgtgtgtcgtggttattatcaaagtcaaagacgtatgaatatacccgctatttcccaggttattgaacaaatcattcgtgttggtctcatcattgtagccattggtttatttatgattaaagattggtcgatatatcaagcaggaacgattgctattttagcttctgcacttggttttttaggttcaagtctctttttaatagttatgaaacctttctcttttaagatgcagaatttatcagcaaatataccttggaaagacttacttatggctacacttgtatttgcattgagccaattattggtcatattatggcaatttatagatagctttacaatcgttcatacactacaatcacacggcctacattttaaagaagcaatcatgcaaaaaggaatttatgatcgtggtgcttcatttatacaaatgggtttaattgttacgacaacttttagttttgtgttaatcccacttttaactgaagcaatcgaacaacgaaatcaaattaaaatgaatcgttacgctaatgcatcgcttaaaatcactatattaattagttcagcagctggtataggattaattaatttattacctatgatgaatgcagtcttctttaagaccaatagtttaggttttacacttggattctatatgttaacggttatctgtgtatcgcttataatgatggatattgcattattacaagtactcaattgcattcgtccgatattgattggtgtaactattggcttagtagtgaaagcgatactcaacgtcctattgattcatcattatggtattgctggcgctagtattagcactgttttgtcccttatttgttttgtaattatattgcataaagaagtgcttaagcagtatcactttagtcaaatgaaaccattcattttgaaaatgtttactgcgcttgtcatcatgacgataatcattcaaattattatgcagatattacctcaagtgggacgtataggtggacttatagagttagttgttgtggcaatcataggcattgccgtattattaatattagttatatatatgaacatcttaggttataaagaattaaaacatttgccatttggcgaaaagctttatcatataaagaaaggacgacat

SEQ ID NO: 35436 - DNA, 576 bp, Staphylococcus haemolyticus
atgacagaaaaagaaaagatgttagcacaccagtggtatgatgccaattttgataaagatttggaaactgaacgagtacgtgcaaaagatttatgttttgactttaaccaaacgcgtccgagtgatgacagtagaagacaggctatattaactgaattatttggttatacattagagaatgtcgcaattaatagtccgttcgatacagattatggttggaatgttaaattaggcaaaaatgtgtttgttaatagtaattgttacttcatggatggaggtggcatcacgattggtaatgatgtatttataggtccgtcttgtggcttctatactgcccatcatccattaacgcctaaagaacgtaatgcaggtttagagttggcgcagccgattactattggaaataatatttggtttggtggcaatgtcgttgtcacacctggtgtaacgattggagatggttcagttatagcagcaggaagtgtagtaactaaagatgtaccaccgaatagcctagttgcgggtgtgcctgctaaagtaataagagagataaatgaaaatgacgcacctaaaaat

SEQ ID NO: 35437 - DNA, 696 bp, Staphylococcus haemolyticus
atgaaaagtattaactttgaagaacattatgttgtagaagagattcaaaaagaaacaatgaaatatatgtcatcagatcctaatggtgtaccaatgaaaacaatgcttgaaggtcttgaacaaaaatcaggtttcacagatgctgatgaaatctcatatcatgataaacgtattgattttatggataaacatgatgtcgaaatgcaagtactatcatatggtaatggtgcgccttcaaacttagaaggacaacgtgcaattgatttatgtaaaaaggcaaacgatacattagcagaatatgttgaaaaatatccagatcgctttgttggatttgcgactttaccaattaatgaaccagaagcagcagttgaagaatttaaacgttgtatcaatgacttaaaattcaaaggcgctttaattatgggtcaccctaaaaatggtttccttgatcaggaggaatacgaaccattatttgcggctgcagaagaattaaacgcaccgatttatttacatccatctccaattcaaagtgatgtatatcaagcttactataaaggtaactatcctgatgtaacagcagctacattcgcttgtttcggttatggttggcatgtagatgtaggtattcacgcaattcatttagtactttcaggtgtatttgatcgtcatccaaacttaaatattattattggacat

SEQ ID NO: 35438 - DNA, 520 bp, Staphylococcus haemolyticus
gtgagacaaatggaacatatttatagaccaggtaaggataacgcacctacgttaattttgttacatggaactggtggggatgaaacagatcttattccacttggaacagctttaaatcctaactataacttgttaagtattcgtggagaagtcaatgaaaatggtatgaatcgttatttcaaacgtcttgcagaagacgtatacgatgaggaagatttagaatatcgaggtcaacggttgcttggttttatttatgaagcggctgaacagtatcaatttgatttgaaacgaacggctttagttggtttctctaatggatcaaatattgcgattaacttaatgttacgtgacaaagcaccgtttaaaaaagcattactatttgccccactttatccaatagacgcttcaacaagcaaagatatgagtgatgtagacgttctattatcaatgggaaaaaatgatccaatcgtatctattagatcaagtagacatgtcattaacttatttagacatcagggtg

SEQ ID NO: 35439 - DNA, 1539 bp, Staphylococcus haemolyticus
atggaaatggctcaagagcaagagttgattcttgtcttagactttggtagtcagtacaatcaattgattacgcgtcgtattcgtgaaatgggtgtatacagtgaattacatgatcacgaaatttcggttgatgaaattaaacgtatgaatcctaaaggtattattctttcaggtggtccgaattcagtatatgaggaaggttcattcactatcgaccctgaaatttataatttaggcattcctgtactaggtatttgttatggtatgcagttgacgactaaacttttaggcggaaaagttgagcgcgctaatgaacgtgagtatggtaaagcaattattaacgcaaaatcagatgagttattctttggattaccagctgaacaaactgtatggatgagtcattctgataaagtaattgaaattccagacggatttgaagtgattgcagatagtccaagtacaaattatgcggcaattgaagataagaaacgtcgtatttacggtgtccaattccatcctgaagtacgtcatacagaatatggtaatgatttattaagaaacttcgtacgccgtgtgtgtgaatgcacaggcgaatggacaatggaaaactttatcgatatagaagttgaaaaaatccgtaaacgcgttggagatcgcaaagtattatgtgcgatgagcgggggcgtagactcatcagttgtagctgtcttattacataaagcgattggcgatcaattgacatgtatctttgttgaccatggtttgcttcgtaaaggcgaaggtgacatggttatggaacaattcggtgaaggtttcgacatgaatattatccgtgtgaatgcacaggaacgtttcatggataaattaaaaggtgtatctgatccagaacaaaaacgtaaaattattggtaatgaatttgtatatgtgtttgatgatgaagcggcaaaattaactgacgttgatttcttagcacaaggtacactttatactgacgtcatcgaatcaggtactaaaactgcacaaactatcaaatctcaccataacgtaggtggattacctgaagatatggaatttgaacttattgagccgattaacacgttatttaaagatgaagtgcgtgcattaggtatagaattaggcattcctgaacatttagtatggagacagcctttcccaggtccaggtttaggaatccgtgtattaggtgaaattactgaagataaattagaaatcgtacgagaatcagatgcgattttacgtgaagttgtgcgtgaggaaggtcttgaaagagacatttggcaatacttcacagtacttcctggcattcaatctgtaggtgttatgggagactatcgtacgtatgatcatactgtaggtattcgtgcagttacatctattgacggtatgacaagtgacttcgcccgcattgattgggaagtcctacaaaaaatctcaagccgtatcgtaaatgaagtagatcacgttaaccgcgtagtctatgacatcacttctaagccaccaagcactatagagtgggaa

SEQ ID NO: 35440 - DNA, 930 bp, Staphylococcus haemolyticus
atgccattatttttaaagcctatttttttcgagaaaatttggggcggtaataaattaactcaattcaattatgatatacctagtgaatccacaggagaatgttgggggatttctgcacacccaaatggaaagagtatgatccttaacgggccttatgctggacaaacattagaccaagtttggacgcaacatagagaattgttcggtgattttccaagcaaagattttccgttattgtgcaaaatagttgatgcgaatgagccgctatcgattcatgttcacccagatgattcttatgcttatgaatttgaaaatgggcaatatggcaaatcagaatgttggtatattattgatgcagaagaagatgctgaagttttaattggtactacggttaactctaaagaagaactggaaaatcagattaaccaagataatttattggaatctttaaaaagagttaaagtacaacctggggaattttattttattcctgctggtactatacattcaatcggttcaggtataactgtatatgaaacaatgcaatcttcagatattacatatagattatatgattataatagacaacgtgaaaatagttcttcattagatgttgataaagcattagatgttattcaatattctcaagaactacctagtatcgttcctgaaaatgaaattattgaaaatcataaatgtagtcacattgtgtctaatgatttctttacaatggttaaatgggaagttagtgggacattaaattatatgaaacctagagaattttgtcttgtttcagttttaaatggtgatggacaaattattattgatggagaaatcttcaagattcaaaaaggttccaattttgtgctgacttcagaagacttagatagtgtctttgaaggagactttacactaatcattagttatatt

SEQ ID NO: 35441 - DNA, 1707 bp, Staphylococcus haemolyticus
atgaaagtagaagtatttgaaagcgagcaaggtaattataatttacaagactatgaaaagacatatcaggactttgattgggataaagtgaaaaaagctttctcatggaatgaaacaggaaaaataaatatggcttatgagtgtattgatcgtcatgttgataatggtaaaggcgataaaattgcacttaattatagagatgaaaaacgtaaagaacaatatagttttaatgagttgaaagtgctatcaaataaggctgccaacgttttagtagataaagcgaatgttcaaaaaggggatcgtgtatttatctttatgccaagaacgcctgaactatattttgcctttctgggtattctaaaaattggtgctatcgttggtccattatttgaagcttttatggaaaaagcggtaactgatagattagaaaatagtgaagcaaaagtcattgttactacaaatagtttactaggcagaattcctaaggataaattacctcacttagaaacaatagtagttgttgatgatgaagttgatgaacaatatgttgatttcaataaagaattgaatcaagcaagtgaagaatttgatattgagtggttaaaagaagatgatggtttaatcttacattacacatcaggttctactggtcaacctaaaggggtattacacgttcaaaaagcaatgttacttcattatatttcaggtaaatatgtattagatttaaaagaagacgacatttactggtgtacagctgatcctggttgggttacaggtacatcttatggtgtgtttgcaccgtggttaaatggtgttacaaattgtatagctggtggtcgattctcccctgaacaatggtatagcatgattgaaacatttaaagtaacaatttggtatactgcgcctacagcattaagaatgttaatgagcgctggtgatgatgtagtagaaaaatatgatctatcatcattacgttcaattttatctgttggtgagccacttaaccctgaagttattaaatggtctaaagatgtatatgataaacgtgtattagatacatggtggatgacagaaacagggggccatatgattgtgaattatcctgcagttgacgttaaattaggttctatgggtaaaccattaccgggaatagaagctgctattatagatgactcaggtaatgtattaccaccgaacagaatgggtaatttagctattaaaaagggttggccatctatgatgtattcaatttggaaaaaccctgaaaaatataattcttactttattggagattggtacgtttctggtgattcagcatatcaagatgaagatggttatttctggttccaaggccgtgttgatgacgttattatgactgctggtgagcgtgtaggtccatttgaagtagaatcgaaattagttgagcatgaagcagtagctgaagcgggtgttatcggtaaaccagatcctgtcagaggcgaaattatcaaagcctttatttcattacgccaaggctatgaaccttctgatgagctaaaagcagatattcgtaaatttgttaaagaggggctatcaggtcatgcagcaccaagagaaatagaatttaaagataaattacctaaaacacgttctggtaaaattatgagacgtgtgttaaaagcttgggagcttaatttagatgcaggcgatttaagtacgatggaagat

SEQ ID NO: 35442 - DNA, 1260 bp, Staphylococcus haemolyticus
atgtcaaacgctttaattgaagagttacaatggagaggtttaatttatcaacaaacagatgaaagtagcattgaagaattattaaataaggaacaaatttctttatattgtggtgctgaccctactgctgatagtctgcatattggtcatttacttccctttatgactctaagacgtttccaagaacatggtcatcgacctatcgttctaattggtgggggaactggtatgattggtgatccatccggtaaatctgaagaacgtatactacaaacagaagaccaagtagaggctaacgttgagggtattagtgctcaaatgcataaattatttgaatttggtactgataaaggtgccattttagttaataacaaagattggttgagtcaaatctcattaattagtttcctaagagactatggtaaacatgttggtgtgaactacatgttaggtaaagattctattcaatctcgccttgagaatggtatatcttacactgaattcacttatactatacttcaagctatcgactttggtcatttaaaccgtgaattaaattgtaaattacaagttggtggttcagatcaatggggtaatatcactagtggtattgaattaatgcgacgtatgtatggacaaactgaagcatatggtttaacaattcctttagttacgaaatcggatggtaagaaatttggtaaatcagaatcaggtgctgtatggttagacgctgacaaaacaagcccttatgaattttaccaattttggattaatcaatcagatgatgatgtcattaaattcttgaaatacttcacatttttagataaagatgaaattaatcgtctcgaagaatctaaaaatcaagaacctcatttaagagaagcgcaaaaagccttagcggagaatgttacagaatttattcatggtaaagaggcattagatgatgccattcgtatttctaaagctttgtttagcggcgatttaaagtcattatcaggcaaagaattaaaagaaggcttcaaagatgttcctcaagttgaattatcaactgaaacttcaaatattattgatgtcttaattgaaacaggcattgcgacgtctaaacgccaagcacgtgaggatgttaataacggtgctatatatattaatggggaaagacaacaatcagtagactatgaattaagcaatgaggataaaatagatgatgaatttacaatcattcgtcgtggtaagaaaaaatatttcatggttaactataaa

SEQ ID NO: 35443 - DNA, 1955 bp, Staphylococcus haemolyticus
ggcttaagtgacgcagaatataacaaagtttgtgaaatattgggaagagaacctaattttacagaggtaggcatcttctcggttatgtggagtgagcactgttcttataagcactctaaaccattcttaaaacaatttccaactactggtgagcatgtcttaatgggaccaggtgaaggcgcaggtgttgtggatattggtgataatcaagcagtagtatttaaagttgaatcacataaccatccgtcagctatcgaaccttatcaaggtgctgcaactggtgtaggtggcattattagagatatcgtatcaattggagctagaccaatcaatctgttaaacagtctacgtttcggtgaattgtcagttaaacagaaccaacgtttacttaaaggtgtagtacgtggtattggcggttatggaaattgtatcggtatcccaacaacagctggagaaattgaatttgatgatcgttacgatggaaatccgttggttaatgccatgtgtgtaggtgttattgatcatgacatgattcaaaaagggactgctaaaggtgaaggtaactcagtcatttatgtagggttaaaaacaggtcgtgatggtattcatggtgcaacttttgcatctgaagagttaactgaagaaagtgaaagtaaacgaccatctgttcaaattggtgacccttttgtaggtaaaaaattaatggaagccacattagaagcgattactttcgacgaattagttggtattcaagatatgggtgccgctggtttaacgtcttcatcatcagaaatggcagctaaaggtggcagtggtctggaattacatttagatcaagtgcctacacgtgaaccaggtatttcaccttatgaaatgatgctttctgaaacacaagaaagaatgttattagttgttgaaaaaggtactgaacaaaaattcttagatttatttgaaaaacatgaacttgatagtgcggtaattggtgaagtaacaaatactgaccgcttcgtacttaaatatgaagatgaagtattcgcggatataccggttcaatcacttgcagatgaagcgccggtctatgttttagaaggtgaagagaaagagtacaacacatctaaaaatgactatagctctataaatgtcgaagaaacatttaagaaacttctaatacatccaacgattgcctcaaaacattatttatatgagcaatatgatcaacaagttggtgctaatactatcattaaaccaggtttacaatcttcagttgttcgtgttgaaggtacgaataaagctgtagcctctacaattgatggcgaagcacgttatgtgtttaatcagccttatgaaggtggaaaaatggtcgtagctgaagcctatcgcaatttaatagcagtaggtgcaactccacttgctatgacggattgcttaaattatggctctcctgaaaagaaagaaatctatcagcagttaattgattcaacgaaaggtatgtcagaagcgtgtgaagtattaaaaacaccggtagtttcaggtaatgtatcactttataacgaaacacgtggcacatctattttcccaacgcctgtcgtaggaatggtaggtttgatagaggatattgattatctgaaggatttccatcctgaagctggtcataaattatatttagttggtgaaacaagagatgattttggtggtagccaattgaaaaattattatacggtaaagtcaatcatgaatttgaagcaattgatttaagcgatgaagttaataaaggagaagcagtcaagaatacgattagaagtggcgtggcttctcacgtacaaacagttggtaaaggtggcttattaattactttagcgcgtatcagtgcccattatggtttaggattagaagcttcaattgacctttcagatgcacaattgtttagtgaaacgcaaggtcgatatattattgtt

SEQ ID NO: 35444 - DNA, 714 bp, Staphylococcus haemolyticus
atgaggtttatagatatggcaagaaaagttgttgttgtagatgacgaaaagccaattgcggacatcttagaatttaatttgaaaaaagaaggatatgatgtttactgtgcctatgatggtaatgatgcagtagatttaatctacgaggaagaaccagacatcgtattattagacatcatgttacctggtcgtgacggtatggaagtgtgccgtgaagtacgtaagaaattcgaaatgccgattattatgttaactgcgaaagactctgaaatcgataaggtcttaggtcttgaacttggtgcggatgactacgttacgaaaccgttcagtacacgtgaattaatcgcacgtgtgaaagcgaacttacgtcgccattattcacaaccagctcaagaagtaagtggtacgacaaatgaaattacaattaaagatattgtcatttatccagatgcttactctattaaaaagcgtggggaagatattgaattaacacacagagaatttgaactcttccactacctttctaaacatatgggtcaagtcatgacacgtgaacatttactacaaacagtatggggttatgattacttcggtgacgtgcgtacagtagacgtaacaattcgtcgtttacgtgagaagattgaagatgatccatcacatcctgaatacattgtgacacgtagaggcgttggatacttcctccaacaacacgat

SEQ ID NO: 35445 - DNA, 1824 bp, Staphylococcus haemolyticus
atgaagtggctgaaacagttacaatcccttcacaccaagcttgttattgtttatgtgttattgattattattggaatgcagatcatcggtctatatttcactaatagtttagaaaaagaactgacaaataacttcatgaagaatattaaacagtatgcgacacagcttgaagttaacattgagcggatatacagagatgatccctctaacgctcaaaaagaagttcaaagtttattaaatgagtatgccaaccgtcaagaaattgaagaaattcgttttattgataaagatcaaattatcatggctacagcgaagatatcatcacataatatgattaatcagaaagttaatgataactccgttcaaaaagccttatcgctaggagaatccaatagtcacaatgttttaaaagactatggtagcggtaaagagcgaatttggatttacaacttacccgtaaagaatggcaacgagacgattggtaatatttacatagaatcgaatatcaatgatgtatataatcagttgaataatattaaccaaatattcattatcggtactgcgatttccctcttcattaccgttatactcggtttctttatcgcaaggacgattacaagaccgattacggacatgcgtaatcagacggtagagatgtctaaaggtaattatacgcaacgcgttaagatatatggtaatgacgaaatcggtgaattagctttagccttcaacaatttgtctaaacgagttcaagaggcacaagcgaatactgagagtgagaaacgtcgtttagactcagttatcacgcatatgagtgacggtattatcgcaacagaccgacgtggtcgtgtgcgtatcgtcaatgatatggcgataaaaatgttaggtatgtctaaggaagacttaatcggttattacatgctaagtgtattgaatttagaagacgaattctcattagatgaaattcaagagaataacgatagcttcttattagatataaatgaagatgaaggcatcatcgcacgtgtgaatttcagtacgattgttcaagaaactggatttgtgacaggttacatcgccgtattacatgacgttactgaacaacaacaagttgaacgtgaacgtcgcgaattcgttgcgaacgtatctcacgaattacgtacgcctttaacatcgatgaatagttacatagaggcgcttgaagaaggtgcttggaaagatgataatttagcaccatctttcttatcggtaacacgtgaagagacagaacgaatgatacgtcttgttaatgatttactgcaattatcgaaaatggataacgaatccgaacaaattacgaaggaaattgtcgacttcaacatgttcattaataagattattaaccgtcatgaaatggcagcgaaagacacgacgtttgtgcgtgaaattccttcagaaaccatctttactgaaattgatccagataagatgacacaagtgtttgataacgttattactaacgcgatgaaatattctcgtggtgaaaaacgtgtcgagttccacgtgaaacaaaacgctttatacaatcgtatgacgattcgtattaaagataatggtataggtattcctattaacaaagtggataaaatctttgatcgtttctatcgtgtagataaagcgcgtacacgtaaaatgggtggtactggtttaggactagccatttcgaaagagattgtagaagcgcataatggaagaatttgggcgaatagtgttgaaggacaaggtacatcgatatttattacacttccttgtgaagttatagacgacggtgattgggatgaagag

SEQ ID NO: 35446 - DNA, 2535 bp, Staphylococcus haemolyticus
atgggatttttatcaaaaattgttgacggcaataaaaaagaaactaaacgtctaagtaaaatagccgatgaagtactttcattagaggaagatatggctatcttaactgatgaagaaattaaaaataagacgaagcaatttcaacaagaagtacaagaaattgaagatgtaaaaaaacaaaatgactatctagataaaatcttacctcaagcatatgctttagtaagagaagggtcaaaacgtgtctttaatatgacaccttataaagtacaagtaatgggtggtatcgccattcataaaggtgatatcgctgaaatgagaactggtgaaggcaaaactttaacagcgactatgcctacgtatttaaatgcgcttgcaggacgtggtgtgcacgtaatcaccgttaacgaatacttatctagtgttcaaagtgaagaaatggcagagttatatgaattcttaggcctaactgtaggattaaatttaaatagtaaatcaacgaatgaaaaacgtgaagcctatgctcaagatattacttatagtacgaataatgaattaggatttgattatttaagagataatatggtgaactatgctgaagagcgtgtaatgagaccattacattttgcgatcatcgatgaggtggactctattttaattgatgaagctagaacgcctttaattatctctggtgaagcagaaaaatctacgtcgttatatacacaagcgaatgtattcgccaaaatgttaaaagctgaagatgattataaatatgatgaaaagacaaaagcagttcatttaactgaacaaggtgcagacaaagctgaacgtatgtttaaaattgaaaatttatatgatgtacagaatgtggaagttattagtcacattaatacagcattaaaagcacacgtaacattacaacgtgacgtggactacatggttgttgatggagaagtactcattgttgaccaatttactggacgtacaatgcctggtcgtcgtttctctgaagggcttcaccaagcgatagaagctaaagagggcgttaaaattcaaaatgaatcgaaaacaatggcatccattactttccaaaactatttccgtatgtataataaattagctggtatgactggtactgcaaaaacagaggaagaagaattccgtaatatttataatatgacggttacacaaattcctacgaataaacctgttcaacgtgatgataaatctgatttaatttacattagtcaaaaaggtaaatttgatgcagtcgttgaagacgtagtcgaaaaacataaacaaggtcaacccgttcttttaggtactgttgcggttgaaacaagtgaatatatctctaatttacttaaaaagcgtggtattagacacgatgtattaaacgctaaaaaccatgagcgtgaagcggaaattgttgcaaatgcaggacaaaaaggtgctgtgacaatagcgacaaacatggctggtcgtggtactgatattaaattaggtgaaggtgtagaagaaattggcggtttagcagttattggtactgaacgacatgaatctagacgtatagatgaccaattacgtggtcgttctggtcgtcaaggtgatagaggggatagtcgtttctatttatcacttcaagatgaattaatggttcgtttcggttctgaaagacttcaaaaaatgatgaatcgtttaggcatggatgattcaactcctattgaatcaaaaatggtatcacgcgctgttgaatctgctcaaaaacgtgttgaaggtaataactttgatgcacgtaaacgtatacttgaatacgatgaagtattacgtaaacaacgtgaaattatctacaatgaaagaaacaatattattgattcagaggatagttcacaattagttaatgcaatgttacgttctacattacaacgtggtgtgacctatcatataagtgaagaagatgacaatcctgactacgctccgtttataaattacgttaatgatgtctttttacaagaaggcgatcttaaagaagaagaaattaacggtaaagattctgaagacatcttcgaagtagtttggtctaaaattgaaaaagtatatgaaagtcaaaaagccaaaattggtgaccaaatggctgaatttgagcgtatgatattactacgctctatagatactcactggacagatcatattgatactatggatcaattacgtcaaggtatccatttacgttcatatgcacaacaaaatccacttcgtgattatcaaaatgaaggtcatgagttatttgatatgatgatgcaaaatattgaggaagatacatctaaattcatccttaaatctgtaattcaagttgatgaagatatagaaagagagaaaacaactgactttggaacagctcaacatgtctctgctgaagatggcaaagaaaaagctaaaaagcaacctattgttaaaggcgacaaagttggtcgtaatgacccatgtccatgtggtagtggcaagaaatataaaaattgccatggaaaagaagaa

SEQ ID NO: 35447 - DNA, 996 bp, Staphylococcus haemolyticus
atgactgaacctgacttttgggatgatcagaataaagcacaagaggttattgataaaaataatgcattaaaatcagttgtaaatggttatcatgaattagaagaagaagttgaggatatgacggcaacttgggaattattacaagaagagttagatgatgatgtaaagagtgatttagaacaaaatgttctcgacttcaaagagaaagttgatcagtttgaattgcaattattattagatggtcctcatgatgcgaataatgcaattttagaattacatccgggtgctggaggtactgaatcacaagactgggctagtatgttactacgtatgtaccaacgttatggtgaacaacaagggttcaaagttgaaactgttgattatttaccaggtgatgaagcgggcgtcaaaagtgtcacattgttaattaaagggcataatgcgtatggttatttaaaagccgaaaaaggtgttcatagactagttagaatttctccatttgattcatctgggcgccgtcacacgtcatttgcttcatgtgatgtcattccggaatttaataatgatgaaattgaaatagaaattaatcctgacgatattacagtagatacatttagagcatcaggtgctggaggtcagcatataaataaaacagaatctgcaattcgaattacgcaccatccaacaggcatcgtagttaataaccaaaatgaacgttcacaaattaaaaaccgtgaagcagcgatgaaaatgttaaaagccaaattataccaattaaaattagaagagcaagaacgtgaaatggctgaaatacgtggtgaacaaaaagaaattggttggggaagccaaattcgttcatatgttttccatccttattcaatggtaaaagatcatcgaacaaatgaagagactggtaaagttgatgcagtcatggatggggagattggaccattcattgaatcttatctaagatatacaatgaatcaaagtgacaat

SEQ ID NO: 35448 - DNA, 477 bp, Staphylococcus haemolyticus
atgactttatcaattttggtagcacatgatgaacaacgcgttattggatataataatgatttaccatggcatttacctaatgatttgaaacatgttaaaaaattatcaactggaaacacgctagtgatggggagaagaacatttgagtcaattggtaaaccgcttcctaacagaagaaatgtagtgttaacgagtgacacaacgtttaacgttgatggtgtagatgtgattcattctatagatgatatttacaaattagaaggtcatatttttatctttggtggtcagtcattatttgaagaaatgattgataaagtagatgatatgtacattactgttgttaatggtaaacaccagggcgatacatttttcccaccttatacttttgaagaatgggaagtagagtcatcggtagacggagagttagatgagaaaaatacaattccacatacgtttttacatttagtacgtaaacat

SEQ ID NO: 35449 - DNA, 501 bp, Staphylococcus haemolyticus
atgataagactaggtaatatgcaagatatttcacaaatagaaactttagttgaagaagccaaaaaattaatgaaagaatttaataataatcaatgggatgataaatatcccgttacagaacactttgaagaagacatcaataccgaaacactatatgtgttggaagaaaatgacacaatttatggctttatcgtggtcgaccaacaacaatcagaatggtatgatgagttagaatggccaatcgatcgtgaaggcgcctatgtcattcatagacttgctggatcacaacagtataaaggagcagctacagagttatttgatttcgcagttaagttagctgaagaacataatatccatgttcttttaactgatacttttgctctaaataagccagcacaaggattatttgaaaaatttggtttcataaaagtcggtgaagcagaaattgactatcatccatttgatagaggcgcaccattctacgcatattataaaaccatt

SEQ ID NO: 35450 - DNA, 1048 bp, Staphylococcus haemolyticus
ttggataatgatcgtcaaaaagctttagatacagttataaaaaatatggaaaaatcattcggtaaaggtgccgttatgaaactaggcgataataaaggacgccgtgtttcaagtgtttcaagtggttcagttacattagataacgcattaggtgtaggtggctatcctaaaggtagaattatagagatttatggacctgaaagttctggtaaaacaacagtagctttacatgctattgcagaggtacaaaagaacggtggcgttgctgcatttatcgacgctgaacacgcgcttgatccggtatatgcagaagcattaggtgtagatattgataatttatatctatcacaaccagaccatggtgaacaaggtttagagattgctgaagctttcgttcgaagtggtgcggttgatattgtagtagttgactctgttgccgcattaacacctaaagcggaaattgaaggtgaaatgggcgatacgcatgtaggacttcaagctcgcttaatgtcacaggcgttacgtaaattatctggtgcaatttcaaaatcaaatacaacagctattttcattaaccaaattcgtgaaaaagttggtgtaatgtttggtaacccagaaactacacctggtggacgtgcattaaaattctatagttctgttcgtttagaagttcgtcgtgctgagcagttaaaacaaggccaagaaattgttggtaacagaactaaaattaaagttgtcaaaaacaaagttgcaccgcccttttagagtcgctgaagtagatattatgtatggtcaaggtatctctaaagaaggtgaagtgattgatcttggtgttgaaaatgacatcgtagataaatcaggtgcatggtactcatataatggtgatcgaatgggtcaaggtaaagagaatgtaaaaacatatctcaaagaaaatcctcaagttaaagaagaaatcgatcgtaagttacgagaaaaactaggtattttcgatggagatgttgatgaaaaagaagaagatgcacctcaaacattattcgttgaagaatag

SEQ ID NO: 35451 - DNA, 1557 bp, Staphylococcus haemolyticus
gtgaatttattaaacctcctactcattttgctggggattattctaggggttgttgtggggtattttgtagcccgaaatttattgcatcaaaagcaattacaagctagacaaactgctgatgatattattaagcaaggtcaaaaagaagcagataatatcaaaaaggaaaaattattagaggcaaaagaagaaaaccaaatcataagagaacaaactgaatcagaactacgtgaaagacgtggtgagcttcaaagacaagaagcccgacttcttcaaaaagaggaaaatttagatcgaaaatctgatcttctcgataaaaaagatgagattttagaacaaaaagaatctaaacttgaagaaagacaacaacaagtagatgcaaaagagagtagtgttcagacattaataatgaagcatgaacaagaattagaacgcatctccggtctcactcaagaagaagctgtaaatgaacaacttcaaagggttgaagaagaactgtcacaagatattgcagtacttgttaaagaaaaagagaaagaagctaaagaaaaagttgataaaaaagcaaaagaattattagctactaccgttcaaagattagctgctgaccatacaactgaatcaacagtttcagtagttaatttaccaaatgatgagatgaaaggtcgtatcattggtagagaaggtagaaatattagaactttagaaacattaacaggtattgatttaatcattgatgatacaccagaagcggttattttatctggttttgatccaattagacgtgaaatcgcgcgtacagcattagttaatttagtctcagatggacgcatccatccaggcagaattgaagaaatggtagataaagctagaaaagaagtagatgacattattagagatgctggtgaacaagcaacattcgaaatcaatgttcataatatgcacccagacttagttaaagtcttaggtcgtctaaattatagaactagttatggtcaaaacgtcttgaaacattctattgaagtggcgcatttatctggaatgctagctgctgaactaggagaagatgttagcttggccaaacgtgctggattacttcacgatgttggtaaagcgatagatcatgaggttgaaggtagccacgtagaaataggtgttgaattagctaaaaaatatgcagaaaatgaaactgtaattaatgctattcactctcatcatggtgatgttgaacctacttctattatttcaattctggtagcagctgctgacgcattatctgcggctagaccaggtgctcgtaaagaaacgcttgaaaactatatacgtagattagaacgcttagaaacactttctgaaggttatgatggtgtagaaaaagcattcgctattcaagcaggtcgagaaattagagttattgtttcccctgatgaaatagatgacttgaagtcatacagactggctagagacatcaaaacgcaaatagaagatgaattacaatatcctggtcacatcaaagtgacagttgtaagagagacaagagcagtagagtatgcgaaa

SEQ ID NO: 35452 - DNA, 792 bp, Staphylococcus haemolyticus
atgaggatattatttattggagatatcgtaggtaaagttggaagaaatgcaattgctgaatatttacctaaaataaaacaatcatatagacctactgtaagtatagttaatgctgaaaatgcagcgcacggtaagggtctaactgaaaagttatataaacaattattaagagatggcgtagatttcatgacgatgggtaatcatacatacggtcaacgtgaaatatatgactttattgatgatgcgaacagaatggtaagacctgctaattttccaagtgaagcgcctggtgtaggcatgagatttattcaaattaatgatattaaattagcaattattaatttgcaaggccgttcatttatgcaagatatcgacgacccttttaaaaaagctgatcaacttattgaagaggctaaaaaagagactaattttatatttgttgactttcatgcagaaacgacatcagaaaaaaatgcaatgggatggtatttagatggtagagtaagtgcggtagttggtacgcatacacacattcagacttcagatgaacgagtactaccgaatggcacagggtatattactgatgttggtatgacaggatattacgatggtatattaggtattaatcgtgatgaagtaatagagagatttatcacaagcttaccacaacgtcatgttgtgccggatgatggaagaagtgttctatctggtgttattatagatttagataaagatggaaaaacaaaacaaattgaaagaattttaattaatgacgatcatccatttaataaa

SEQ ID NO: 35453 - DNA, 699 bp, Staphylococcus haemolyticus
atgaaatggatattatttgataaagacgggactttaatagaatttgataagagttgggagaaaattggtataagattagtggatagtcttttagatgaatacccagtagctgataaagaagttgcacatcgacaattaggtgttcttgataatgccatcgttcctgattctgtaatggggtcagggtcactagatgaaatgattaaagcttttaataacgttgttggtaaagatgtctcaacttggacacgtaatacgagccaggagcttgttgatacacgtgtgccagagaacaactggattgatggtgtgtatgatatgattcaatctttaaaaaaagacggctataaaattggaattgttacaagtgattcacgaaaaggggtattgcaatttcttgaagataccaattctaaagacgctttcgacttagttatctctacagaatcacatgcagcggaaaagccaaatccagcagtattaaatccactgtttgattcttatgatgtcgaacctgaagatgtagttatagtaggagacactaataacgacatgaaaacaaaggttaatgctgaattaggtttagcaattggtgtacttactggtatagctaaaaaagaagagttagtagatgctgatgtgataatagatacagctgtgagtgtgcccgaagtcttaaaacaatatattgaaaacaaa

SEQ ID NO: 35454 - DNA, 429 bp, Staphylococcus haemolyticus
atgttcatgggagaatacgaacatcaacttgatgctaaaggacgtatgataattccatctaagtttagatatgacttaaacgaacgttttattatcacgcgaggccttgataaatgtttattcggttacacacttgaagagtggcaacaaatagaagaaaaaatgaaaaccttacctatgacaaagaaagacgcacgtaagtttatgcgtatgttcttctcaggtgccatcgaagtggaattggataagcaagggcgtattaacattcctcaaaatttgaggaagtacgctagtttaactaaagaatgtacagtaataggtgtttcaaatcgaattgaaatttgggatagagaaacttggaatgatttttatgatgaatctgaagagagtttcgaagatattgctgaagatttaatagattttgatttt

SEQ ID NO: 35455 - DNA, 933 bp, Staphylococcus haemolyticus
gtgtttcatcatattagcgtcatgcttaacgaaacaattgattatttagacatcaaagaagatggtatttacgtagactgtacgcttggtggcgcgggtcatgcactctatttattaaatcaattaaacgatgacggtagattaattgcgattgatcaagacactacagcattagataatgctaaagaggtattgaaagatcatctacataaagtcacgttcgtgcatagtaattttagagaattaactgacattttaaaaaacttaaacattgaaaaggtagacgggatttattatgacttaggcgtttctagtccacaattggatgttccagagcgaggatttagttatcatcatgatgctaaacttgatatgagaatggatcaaacgcagcaacttagcgcatacgaagtagtcaatcaatggccatatgaagcacttgttaagattttttatcgctatggtgaagagaaattttctaaacaaatagcgagacgaatcgaagcacatcgtgaacatcagcctatcgaaactacattagagctagttgacatcattaaagagggcattcctgctaaagctcgaagaaaaggtggtcatcctgcaaaacgtgtatttcaagctatacgtattgctgttaatgacgaattatctgcattcgaagattcaattgagcaggcaatcgagcttgtaaaagttggaggcagaatttcagtaatcactttccactctttagaagacagattatgcaaacaaatgtttcaagagtatgaaaagggtcctgatgtgcctagagggttaccaattattcctgaagcttacacacctaaactcaaaagagtaaatcgtaaaccaattacggcaacggatacagatttggatgaaaataacagagcgcgcagtgcaaaattacgtgttgcagaaattttaaaa

SEQ ID NO: 35456 - DNA, 399 bp, Staphylococcus haemolyticus
atggctgtagaagaaatatatgaaccatatgaagacgtccagcacaatagtataccgaaacaacaacctcaatcggaaccacaaacaagaacagttactaagaaggttgtagttcaactcacaagatttgagaaatacttatacataacacttgttactgcaattgcagttattgctatttatatgctatctttaaaaatggatgcgtatgatacgaatggaaagattgcagatttagactccaaaattgaacaacaatcaagtgaaaatagcgcaattcaatctgaaattaagaaaagttcttcttaccaacgcatttacgacaaggctaaagcacaaggtatgagcctaaataacgacaatgtaaaggtagtgcgtacaaatggcgaacgaagaaat

SEQ ID NO: 35457 - DNA, 2125 bp, Staphylococcus haemolyticus
agaaaaaataaattaggagcagtcctccttgttggtatattcggactgctcttttttatattggttttaagatattcatatattatgatcacagggcattctgatggacaagatttagtaatgcgagcgaatgaaaaatatttagttcaaaacaatgaacaagctgaacgaggcaagatttatgatagaaacggtaaaattcttgccgaagatgtcgaaagatataaagttgtagcggtagtcgataaaagcgcaggtaaaagtggagacaaacctcgctatgtagaggataaaaagaagacagctaaagaactttctaaaattatagacatgaaaccggaagaaattgaaaaacaacttaatcagaaaaaagctttccaagtggaatttggtcaaaaaggaactaatttaacttatcaagataaacaaaaactggaaaaaatggacttaccaggtattacattatatccagaaactgaacgcttttatccaaatggtaattttgcgtctcacttaataggaatggcacaaaaaaatccagatacaggcgaattaaaaggtgcacttggtgttgaaaaaatctttgatagttatttaagtggaactaaaggtgcattatcttatatacaagatatttggggatatattgctccaaatactaaaaatgaaaaatcacctaaacgtggtgatgatgttcatttaacaattgattcaaatattcaagtattcgttgaggaagcattggatgatatggttaagaggtatcaaccaaaagatttatttgctgttgtcatggatgctaaaacaggtgaaatcttagcattcagtcaacgtcctacgtttaatcctgagacaggtgaagatttcgggaaaaaatgggcgaatgatttatatcaaaatacgtatgaaccaggttctacttttaaatcatttggtttagcggcagctatacaggaaggtaagtttaatcctaagaaaaaatatgagtctggacatcgtgatatcatgggttctagaatttccgactggaataaaactggttggggcgaaattccaatgtcattaggctttacttattcttcaaatacactgatgatgcacttacaagacttagtaggtgctgacaaaatgaaatcatggtacgaaagatttggctttagtaaaccaactggtggtctatttgatggcgaagcagaaggtaatatcgcttggtcgaatgaattgcaacaaaaaacgtcagcattcgggcaatctacaactgttacgccggtacaaatgattcaggcacaatctgccttttttaataaagggaatatgcttaaaccgtggtttgtggatagtattaaaaatccaatttccaaaaagacgttctatcaaggcgaaaaagaaattgctggcaaaccaattactgcttctaccgcaagtaaagtggaaacagaattagataaagtagttaatagtaagaagagtcatgcgatgaattatagagtagatggttatgatattgaaggtaagacaggtactgcccaagtggcggatgaaaagagcggcggatatgttaagggtgaaaatccatactttgtaagtttcattggtgatgcgcctaagaaaaatcccaaagttattgtttatgccggtatgagcttagctcaaaagaatgatcaagaagcttatgaaatgggtgtaagtaaggcttttaaaccaattatggaaaatacacttaaatatttaaatgtaggttctaaaaaagatgaaacaaaatctgcacaatattcaaaagtaccaaatgtaactggacaatctactgataaagcaaaggaaagtttgaaatctgaagatttacaagcaacagttattggtaatggagataacgtcaaatctcaatccattaaagcaaataaaaaattattgcctaatagtaaggtgctcttattaactgatggtgatattacaatgccaaatatgaaaggttggacaaaagatgatgtacttgccttccaagaattaactggcattaacgttacaactaaaggtagtggctatgtaacaaaacaatcgggttaacaatggaaccacattaaaagacaatagtaaggttgaaattgaattatctccagaagatcct

SEQ ID NO: 35458 - DNA, 963 bp, Staphylococcus haemolyticus
atgctttttatacttgcggttatcgcactattaattacttttatcttagtacctattttaattccaacgctgaagcgaatgaaatttggacaaagcattcgtgaagaaggtccacaaagccatatgaaaaaaacaggcacaccaacaatgggtggtttgacttttctaattagtattatcattacctcaattattgcaattttctttgtagataattcaaatccaatcattttattattatttgtaacaattggttttggtttaataggttttattgatgattacatcatcgtcgttaagaaaaataaccaaggtttaacaagtaagcagaaatttctagcacaaattgcaattgcagttgtattctttttactaagtgatgttttccatcttgtagaattttcaactaatctaaacataccttttacaaatattagtattccattatcttttgcatatgtgatttttattgttttttggcaagttggattctcaaatgctgtgaatttaacagatggtttagatggcttagcaacaggattatcaatcattggttttacaatgtacgccattatgagctttgttttagattcaccagcaattggagcattttgtattataatgatttttgcattattaggatttctaccgtataaccttaatcccgcaaaggtatttatgggagacactggtagtttagctttaggtggaattttcgcaacaatttcaattatgctaaatcaagaattatcattgttactaattgggctggtatttgtaattgaaacagcttcagttatgttgcaagttgcttcatataaacttacaaaaaaacgtatctttaagatgagcccgattcatcatcactttgaattaagtggttggggagaatggaaagtagtgacagtgttctggacagcaggtttaatttcaggattaatcggattatggataggagtgcat

SEQ ID NO: 35459 - DNA, 809 bp, Staphylococcus haemolyticus
atgctcaattatacaggattagaaaataaagatgttcttgtagtaggactagccaaaagcggatatgaagcagctaagttattaatcaaattaggtgccaatgtgactgtaaatgatggtaaagacttgtcacaagatcctcatgccaaggatttagaggcgttaggagttaaaatagttgatggtggacatcctttatcattattagataatgagccaattatagtaaaaatcctggtattccttatacagtttctataattcaagaagcatatcagcgacatttaaaaatattaactgaagtagaattaagttatttaatatcagaagcaccgattatagctataactggaactaatggtaaaacaactacgagttctttaattggcgatatgtttaagaaaagtagattgactggtagactctctggaaatataggttatgtagcatctaaagtagcacaagaaacatcacctaatgaatatctaataactgaattatcttcattccaattactaggtgtagagcaatatcgtccgcatattgcgattatcacaaatatatattctgctcatctagattatcacgaaacgcttgaaaactaccaaaatgcaaagaaacagatttacaaaaatcaaacagaaaatgattacctaatatgtaattatcatcaaagacatttaattgagtctgaaaatttgaaagctaaaacattgtatttctctactcaacaagaagtagacggtatttatattaaagatgggtttattgtttaccaaggaataagaatcattaatatagatgattta

SEQ ID NO: 35460 - DNA, 519 bp, Staphylococcus haemolyticus
atgtcttattcaatgctttacaaatctcccgtacaaaatttagaactcatcagtgatggtgagtcacttacacacgtactttataaatataacgacacaactgttactcatccaactaatcctgatttagatatttttaaaaaagtggttgagtggttaaatgaatatttctcaggaaatcgtccgcaaattgatttttcacttaaaccggaaggcactgattttcaaaaaagtgtgtggcgaaagctacaagaaatagaatatggacaattaaaaacatatggtgatctagcgaatcttgtaggtgaagaacgcaataagccgaatatgtctgcacaagcaataggtggtgcagtcggtagtaatccgatttctattattattccatgccatcgcgtggttggaaaagatggaagtttaacaggatatggtggcacgattaatcataaaattaaactactcgagcttgagcaagtagatatgaataatttgtatagacctaaaaattcaactaaacca

SEQ ID NO: 35461 - DNA, 1149 bp, Staphylococcus haemolyticus
atgaaaaaaattgctatagttagtgctaaaagaacgccaatcggtagatataaaggtaaattaagaaattattctgcagttgaattgggaacgacagctttgaaaggtgcaatcgattcagcaaatattgatcctaatataatacaacaagttattttcggtaatgtgctacaaagtggtgtaggacaaaacccagcacgtcaaattgcgattaaagcgggtgtacctgatacaacaccagctatgacaattaatgaggtatgtggatcaggtcttaaagcaattatattagggaaacagttaattcaattaggtgaagcggatgtagtagcagtgggtggagttgaaagtatgacaaatgccccacaattaatcttaaaagaaggtcaagaaccagtggaaagctttatgcatgatggtttaacagatgcctttcattatgtaccaatgggtgtaacagctgagaacatagctgaaaaatatgacatcacgcgtgaaatgcaagatgagttcgcaaatcattcacaagctaaagcagctaaagcgacgcaagatggtaaatttaataatgaaatcatcggtatgactgacgcagaaggggaacaaatgacttctgatgaaggtgttcgcccaaatagtagtgttgagaagcttgcgacattaaagacaattttcaaagaagatgggacagtaactggtggtaatgcttcaagtattaatgatggttcatctgcactcattttaatggaagaatcatatgctaaagcgcatggttacgatattttaggaattgttggagattatgcagaagtaggttgtgacccacaatatatgggctatgcgccattctatgctgttgaaaagctacttgataaaacggatagcaaaatcgatgacgttgatattgtagaaatgactgaagcatttgctgcacaaagtataccagtcaaagacaatttgcatattccagatgaaaaattaaatatctatggcggtgctattgcactaggacacccaattggtgccagtggtgctagattagtcactactttagtgaacgcacttgaacaagaaaataaacgtacgggtattgctacagcatgtattggtggaggactaggtatcgctctaatgattgataaaggggaa

SEQ ID NO: 35462 - DNA, 1275 bp, Staphylococcus haemolyticus
atgaagagtttagataagacatttcgacatttatctcgtgaagataaattaaaacaacttgttgattatggatggttaactgatgaaagctatgatgttttactaaaaaatccattaattaatgaagaagttgcgaatagtttaattgagaatgtaattggtcaaggtacattgcctgtaggtttattacctaaaatcattgtcgatgataaagaatatgttgtaccgatgatggttgaagaaccttcagtagtagctgctgcaagctatggcgctaagttagtcaacaatacaggtggctttaaaacagttaagagtgaacgattaatgattggccaaattgtatttgatgatgttagtgatacagatgccttagcacaagccatatatgatttagagccacaaattaaacagatcgcagctgaagcttacccatcaattatagaacgtggtggtggttacagacgtattgaaattgatacgttcccagagaatcaactattgtctttaaaagtatttgtagatactaaagatgcaatgggtgccaatatgcttaatacaatcttggaagctataactgcacatatgaagaatgagtttccaaatcgcgatgtgcttatgagcattttgtctaaccatgccacagcctcagtagtacgagttcaaggtgaaattgatatcaaagatttaaataaaggtgatcgttctggtgaagaagtagcacaacgcatggagcgtgcttctgtactagcacaagtcgatatacatcgtgctgcaacacacaataaaggtgttatgaatggcattcacgccgtagtcttagcaactggtaatgatacgcgcggagcagaagcaagtgcacatgcatatgccagtcgtgatggacaatatagaggtattgcgacttggaagtttgataaagaacgtggtcgcttagtcggaacaatagaagtaccgatgacattagcgatcgtcggtggcggtacgaaagtattgccaattgcgaaagcatcacttgaattattgaatgttcaatcagcacaagaattaggtcaggttgttgctgctgttggattggcacagaacttttcagcatgtagagccttagtttctgaaggtattcaaaaaggtcacatgagtttacaatacaaatcattagctatcgtagtaggtgctcaaggtgatgagattgctcgtgttgccgaagcattgaaagctgcgcctaaagctaatactgctacagctcaacaaattttaaaagatttacgacaacaa

SEQ ID NO: 35463 - DNA, 1248 bp, Staphylococcus haemolyticus
atgtatcaaacgattattataggtggtggacctagtgggcttatggcagcggttgctgcatcagaacaaagtcaaaatgtactcttattagagaagaaaaagggtctgggtagaaaacttaaaatttcaggtggtggtagatgcaatgttacaaatcgtttaccttacgcagaaattataaaaaatatccctggtaatggaaaatttttatatagtcccttttcagtatttgataatgaatcgataatcgacttctttgaatctagaggcgtcaaattaaaagaagaagaccatggccgtatgttccctgtctcaaataaatctcaagatgtagttgatacacttgtaaataccataaaacaaaacaaagttgacataaaagaggaaactatcgtcaatgagattaatgtagaagataacggaacttttgaagttacaactgataaaggtattttttcaagtaaaagtgtcattattgcaactggtggaactagtgtgcctcaaacaggttcaacgggtgacggctataagtttgctaaaaaattaggacatagtatcactgaactcttccctactgaagtccctatcacttcagcagagcactttattaaatccaaagaacttaaaggtttaagcctaaaagacgtagaattatctgtacttaagaaaaatggtaaaaaaagaataagtcataaaatggatatgatattcactcattttggtataagtggtcctgcagcgttaagatgtagtcaatttgtttataaagaacaaaaaaaccaaaagacaaaagaaattaatatgcaattagatgtttttccagaatacaaaaatcatgttctagaggaaaaaataacatctattttaaatgaagaacctgataagtatataaaaaatagtttaagaggacttatagaagaacgctatttgttatttatgctgaatcaagctcaaatcgatgaaaatactacatatcatcacctatcaaaccaacaactaaaacaattagttgactgttttaaagcctttacctttaaagtgaacggcactttaccaattgataaagcctttgtaactggtggtggtgtaagtttaaaagaaatttggccaaaaacgatgatgtcaaaattacaacctggattatttttatgtggagaagtattagatattcacggttatacaggtggctataatattacaagtgcacttgttacaggacatgtagcaggttacgaagcaggtaaattt

SEQ ID NO: 35464 - DNA, 1635 bp, Staphylococcus haemolyticus
atgagtgaaaataaggaaatggtaagaggtacctttctcattacattaagtattcttattactaaaattttaggtgtacttgttgtaattcctttttatgccattatgggtgcaaatgcggaagaaaagttagcaccatttaactatgcttatgttccatataatattgcaattgcagtagcaaccgcaggcataccgttagcggcttcaaaatttgtagctaaatataatgccttaggtgcgtataaagttggacaaaaattgtataaatcgagttttatagtgatgtccatttctggaataattggatttttaatattattcttcttagcaccagacattgctgctttaacgttaggacgtaaagaaggcaaaggcggttggacaatagatgatatcacatggattatccgagttattagtatggtagttatgttcataccattacttgctacttggcgtggagtatttcaaggttatgaatctatgggtcctacagcagtttcagaagtaacagaacaaattgctagaatagtttttattcttataggtagttttttagtattaaatgtttttcatggttcttatctacaagcaaatggtatagcaacatttgcagctgctataggtgcaattgctggtttgttaacgctttggtattactggcgtaaacgtaaaccacatatacagaaaatggtagcttctgatcataccggtttggacgtgccatacacaaaaatgtataaggaaattatttcatatagtgttccatttgttattgtaagtttgaatttccctttatttaatttagtggatcaatttacacataataatgcactagatgcagcaggatttcatgcgaataaagactatttctttacaattttaaactttacaacaaataaaattgtcatgataccaacatctttagcagctggatttgctgttagtttaataccatttattaccaaaacttttgcagagggtcgcttaaatgaaatgcatcgccaaattaaaacttcaattggtgtattaatgtatataacagttccggctagtctaggtataatggcattgtcttcaccattatatacagtattttaccagtacaatccagatggtaataaaatattattttattatgcgcctgttgcaatattaatttctttattgagtgttactgcctcaatgttacaaggaataaacaaacaaaaattaacagtttttgtaattttaggctcagtatttgttaaattaatcttaaatattcctttaattatgatattccatacatcaggagctgttttaagtactgcaatcgcattaatggttgccaatgttgcaaacttaatgattttaaaagtttatgccaagttccactttacagatacattggttcaagttgctaaaattttcatttatagtttaatcatgatgataagtgttgaagtagtatacttcttactaagcttatttatttctgtagatcgaaaatctggtgcatttataatactaattataggtgttatagttggtggactgatttatggaacaataacaattaagaacagattagctgatgagtttttaggggatttacctggtaagattcgtcgtaaagttggattcctaaga

SEQ ID NO: 35465 - DNA, 690 bp, Staphylococcus haemolyticus
atgagactagataaatttttagcaaatatgggtgttggaacgcgtactgaagttaaacatcttttaaaaaaaggaaaggtcacagttaacacctcagttgagaagtcacctaaatctcacattaatcctacagaagatatagttcatgtaaatggcaagcaagttgagttcgttaacaatgtttatattatgcttaataagccaaaaggttatatttcagctacacacgatgaatcaaatcgtactgtaattgatttaattccggaataccaacatctaaatatctttcctgttggaaggctagataaggatactgaaggtttactacttattactaatgatggtcaatttagtcatgatttaatgagtccctctaaacatgtttctaagacatatgaagtgacatcgaaaaaacccgttactaaagttgatattgacgcatttaagaaaggcatcatcctttctgacggtccagtcaaaccagcacaattaactagaataaatgaaactatatcacatgttactatctatgaaggtaaatatcatcaagttaaaaggatgtttcacgccattgaaaatgaggtattagaattaaaacgtcttaaaatcgctaatttggcgttagatgaaaatctcaaatctggagagtataagttactttcagataaagaattaaaacttttacagcat

SEQ ID NO: 35466 - DNA, 1407 bp, Staphylococcus haemolyticus
atgtggaaagaaaaagttcaagaatatgaaggtcaaattatcgatgatttgaaaggtctgctttcaattgagagtgtcagagatgattcaaaagcatctgatgaaactccagttggtcctggaccacgacaagcactcgattatatgtacgaaattgcacaaagagatggtttttctacccatgatgtagatcacattgcaggcagaattgaagcgggcaagggtgacgatgtattaggcgttttatgccacgttgatgttgtacccgccggagatggttgggattcagacccatttaacccagttgtaactgatgatgcaattattgctagaggtacgttagatgataaaggccctacaatagctgcttattatgcagttaaaattttaaatgacatgaaagttgattggaagaaacgtattcatatcattataggtacggatgaagaatccgattggaaatgtactgaaagatatttccaaactgaagaaatgcctacattaggatttgcaccggatgcagaatttccagctattcatggtgaaaaaggtataacaactttcgatttagtccaaaatagcacttctgaagaccaagatgaaccagattatgaattaatatcgtttgaatctggacaacgttataatatggtgccagatcatgcacaagctagagtatttgtaaaagaaaatatgacagacgttgtacaacattttgaacactacttagaccaacataaattacaaggtgagagtgttgttgatagtggtgagttagttttaacgcttgaaggtaaagctgttcatggtatggacccttcattaggagttaatgctggtttatatttattagatttcatatcaacattaaatttaaatcaaacggcaagagagtttgtagactttagtaatcgttatcttcatgaatcacactttggtgagaaaatgggtatgaaattccatacggacgtcatgggtgatgtaacaacaaatgttggtataatttcttacgataacaaacaaggtggacgttttggcataaacttacgctatcctcaaaaatttgagtttgaagaagcaatacaacgatttacaaaagaaattaaagcatatggatttgaccttgaattaggaaaagttcaacaacctcattttgtagacaaaaatgatccatttgtacaaaaattagttaaagcttatagaaatcaaactggtgatatgtctgaaccatatacaataggtgggggaacatatgctagaaatcttgataaaggtgtagcgtttggggctatgtttgaagattcagaggatttaatgcatcaaaagaatgagtatattactaaaaaacaattgttcaacgcgacaagtatctatttagaagcaatttattcactatgtgtggaggga

SEQ ID NO: 35467 - DNA, 789 bp, Staphylococcus haemolyticus
ttggagcagttttatcaattagggtggacacttgattctgcaggtggcgcttcaggtgaagcatacatggctgaacaagatggacaaaagctatttttaaagcgtaattctaatccatttatagcagcgctttcagctgaggggattgtacctaaattagtttggactaaacgtattgaaacaggtgaagtagttacagcacaacattggaaaaatggccgagaattagaacctgatgaaatgtatcaatcacgagttgctgcattattaaaaaagattcatggttcaaaacctttactcaatatgcttaaacgaatggaaatggaaccaatcacacctaatattatgttaaaaaagattaatgcttcattatcaagagaagtattaacacatcatattattcgtaaatcattaacatatttagaagaacacatacctaacctagattctcgcttttttactgttgtacacggagatgtgaatcataataattggttattatctgatagggatgagttgttcttagtagattgggaaggtgcaatgattgctgatcctgcaattgatattggaatgctgctttataactacgttcccgaaaaaaactggtcagactggtttaaaacatacggtgtagaagagaacattgaattaaataagcgtatgaaatggtatacggtaattcaatcaatcggaatggttcagtggtatgaagaacagaaaagatttaaagatatgaataattggttgaaattcttaaatgaggttatgaatagtaatttatttatc

SEQ ID NO: 35468 - DNA, 471 bp, Staphylococcus haemolyticus
atgattttaaaagatagttacaaaacttatgtagtagaagaaaaaggcgataacacgatttcaataaagaaaaataatgatgaacatcaatatgatgtgttagaagtgattgatgatttatcaaatgattctttttgtgtgttaaatcatttatttgttaatgaaggtatggaagatgcattcgagaagaaattcttagaacgtcctaaatacttacaaaatgttccaggatttaaagctttaagatttttgcgtccacaagtagcaggacgacactatattattttaactttatgggaagaacgtcaggcattttatgattggcagaattctaatgaatatagtcaaacccataaacatagaggcactgaaggtggtgttgatcgcaacattgttaatcgtgatttatcttataatgtgcgtattgagctatctggtttagagtcaaaattagatttaagtcatattttc

SEQ ID NO: 35469 - DNA, 1025 bp, Staphylococcus haemolyticus
atgaataaagaaacattaatattagcaatagaaacgagttgtgatgaaacaagtgtaagtgtcattaaaaatggaaattcaattttatctaatattgtattaagtcaaattgagagtcataagcgtttcggtggtgttgtacctgaagttgcaagtcgacatcacgttgaagggattacgacaacgattgaagaagcattaacaactgcaaatatatcaatgaatgatattgatgcaatagcagtgactcaaggaccaggattaattggcgcattacttatcggtattaatgcagcgaaagcactagcttttgcttatgacaaaccacttattcctgtgcaccatattgcaggtcacatttatgccaatcatttagaagaaccattaacatttccattaattgcgctaattgtgtcagggggcatactgaattagtatatatgaaatctcatatgcatttcgaagttattggtgagacaagagatgatgcagtgggagaggcgtatgataaagtcgctcgaacaattgatttaccatacccaggagggccacaaattgataaattagctcaatatggtaaagatacttatgattttccaagagtgtggttagaaaaggaaagttatgattttagttttagtggattgaaaagttctgttataaataaactgcataatttgcgacaaaagaatgaagaagttgtaaaagaagatgtagcaactagttttcaaaatagtgttgtagacgtgttaagtactaaagcgattaatgcatgtaaagcctataaagttaacagacttattgttgctggaggtgttgcaagtaataaaggattgcgataccgattacaacaattatgtgaagataataatattcatttatccattccaagtcctaaattatgtactgataatgcagcaatgattggtgctgcagcatattactattatcagtcaggaattacagctaagttagatttgaatggtgaaaataatatggatatagaagaagctactatagaagtt

SEQ ID NO: 35470 - DNA, 1686 bp, Staphylococcus haemolyticus
atgagaagtgacatgataaaaaaaggtgatcatcaagcacctgctcgaagtcttttacacgccacgggcgcacttaaaaatcctacagatatgaacaaaccttttgtagcaatttgtaactcttatatcgatattgtacctggacatgtgcatttaagagaattggctgacattgctaaagaagctattcgtgaggcaggcgctatacctttcgagtttaatactattggcgttgatgatggtatagctatgggacacattggaatgcgttactcactaccctctcgagaaatcattgctgatgctgcagagaccgtcattaatgcgcactggttcgatggcgtattttacattcctaattgcgacaaaataacacccggtatgttattagctgccgttagaaccaatgtaccagctatattctgttctggtgggcctatgaaagctggtttatcagcgcaaggtaaagctttgacattatcatcaatgtttgaagcggttggcgcatttaaagaaggtaaactctccaaagaagcatttttagatatggaacaaaacgcctgccctacttgtggttcttgcgcgggaatgtttactgcaaactcaatgaattgtttaatggaagtcttaggcttagcactaccatataacggtacagctttagcagtaagcgaacaaagaagagaaatgattcgtgaagctgcatttaaattagtagataatatcaaaaaagatatcaaaccacttgatatcgtaactcgagaagctatcgatgatgcatttgcacttgatatggcgatgggtggttcaactaacacagtattacatacgcttgccattgcaaacgaagctggaattgattacgatttggaacgcatcaatgaaatcgctaaaaagacgccttatttatctaagattgcgccaagttcttcatattctatgcatgatgtccacgaagcaggtggttgtccagctatcatcaatgaattgatgaaaaaagaaggaacattacatccagatagactcacagttactggaaaaacacttcgtgaaaataatgaaggtaaagaaattaagaattttgatgtcattcattcactagatgattcttatgataagcaaggtggtctctcaatattatttggaaatatagcgcctaaaggggctgttattaaagttggtggcgttgatccttctattaagacatttactggtaaagcaatttgtttcaattcacacgatgaagctgttgaagcaattgataataaaatcgtacgcgaaggtcatgtcgttgttattcgatatgaaggtcctaaaggtggaccaggaatgcctgaaatgttagcccctacttcttcaattgtaggtagaggtttaggtaaagatgtcgcattaataactgatggtagattctctggtgcaacgagaggtatcgctgtcggccacatttcaccagaagcagcttcagatggacctattggactcattaaagacggcgatgaagttactattgatttaatcaatcgaactttaaatgttaatcaaactaaagaagaacttaatcatcgtaaagaagcattacaaccttttaaggcaaaagtgaaatcaggttatctggcaagatatactgctttggtcactagtgcgaatactggtggtattatgcaagttcccgaaaatctaata

SEQ ID NO: 35471 - DNA, 1773 bp, Staphylococcus haemolyticus
atgacaagtaaaaaggaaagtagcgtagtaagtcctgatgctatggactattcaaaacagactagtctaaaagaagatagtgatttagacgcaaataataatttcagatccggttcagaacttttagtagaggcattattacatgaagatgttgatttcatattcggttatcctggtggcgcagttttaccattatatgacactttctatgatgggaaaattaaacacatcttagcaagacatgaacaaggtgctactcacgctgcagaaggttatgcaagagtatctggcaaaactggtgtagtggttgtaacaagtggtcctggcgctacaaatgcgattaccggtataacagatgcgtactgtgattccctccccttagtagtattcactggacaagtagcaacaccaggaattggtaaagacacttttcaagaagcagatttactttctatgactacaccaattacaaaagctaatttccaagttaaaaatgtaaatgatattccaagaatcgttcatgaagcattttacttagcaaattctggacgcaaaggccctgtagttatagattttcctaaagatatgggtgtacttaaaacatctgcaccacttgtaaatgaagtggacttaccggcatatgatgtcactgtaaatcctaaagataaagatattagtcaattaattcaatatttagataatgcaaagcaaccacttatcttagcaggcgctggcattaatcattcacaatctaatgaattattaactcaatttgtaactaaacatcaaattccagtagctactacacttttaggtctgggagctattccttatgacaatccactatttctaggtatgggaggtatgcatggctcctatgcaagtaatatggctttaaccgaatgtgatttattaattaatttaggtagtcggtttgatgatagattagcaagtaatcctaatgaatttgctcctcatgcaaccgtagttcatgtggatattgatgaatcagaaattaacaaggtgatttcgactgacttagggatagttgctgactgtaaaaaagtactcgaagctttatctcaaagatttacaaataaaacttcccatgaacactgggttaaccattgtattgaaaataagcacaaacatccttttaaatataaaaaaactgatgacacattttgcaaacctcaagaagctattgaatatatcggaaaaattacaaacggtgaagctatagttactactgatgttggtcaacatcaaatgtgggcagctcaattttatccattcaaacatcatggtcaatgggttactagcggtggtttaggtactatgggatttggtattccatcagctatcggtgctcaattagctgaacctgataaaacagttatttgctttgttggtgatggtggttttcaaatgacaaatcaggaaatagcgttactgcctgaatacggactcaacgtaaaaatcgttctaatcaataatggcacattaggtatggttaaacagtggcaagacaaattctttaaccaccgattctctcattcagtatttaatgatcaacctgacttcatgaagatggcagaagcatatggtgttaaaggtttcttaattgatcatccaaataaactaactaaaacacttgattcagcatttaattatagtggacctgcgctaatcgaagttagaatctcacctactgaaccagttaatcctatgatcccaagtggcaaagcgaaccatgaaatggaggggttagaa

SEQ ID NO: 35472 - DNA, 1002 bp, Staphylococcus haemolyticus
atgactaaagtttattacgatcaatcagttgagaaagatgcattacaaggtaaaaaaattgcaattatcggttacggttcacaaggacacgcgcatgcacaaaaccttaaagacaacggttatgacgttattgttggtattcgccctggtcattcttttgataaagctaaagaagatggcttcgatgtttatccagttgcagaagctgttaaacaagcagatatcatcatggtgttattgccagatgaaatccaaggaaatgtctataaaaatgaaattgaacctaacttagaagctggaaatgccctagcatttgcgcatggttttaatatccactttgaagttatcaaaccacctaaagatgtggatgtcttcttagtagctcctaaaggacctggtcatttagtaagacgtacctttgttgaaggaactgccgtaccagcactatttggtgtacaacaagatgctactggtcaagcacgcgatatttcattaagttatgcgaaaggtatcggagctacgcgtgcaggtgtaattgaaacaacatttaaagaagaaactgaaacagatttattcggtgagcaagcagtactttgtggtggtattcataaattaatccaaagtggctttgaaactttagttgaagcaggctatcaaaaagaattagcatacttcgaagtattacatgaaatgaagttaattgttgatttaatgtatgaaggcggtatggagaacgttcgttactcaatttctaacactgcagagtatggtgactatgtttcaggacctagagtcatcactcctgatgttaaagacaatatgaaatcagtattaaaagatattcaaaatggtaattttgcaaatagctttgttaaagacaatgaaaatggctttaaagaattctataaattacgtgaacaacaacacggtcatgaaatcgaagcagttggtcgcgaattaagaaaaatgatgccattcattaaatctaaaagtattcaaaaa

SEQ ID NO: 35473 - DNA, 2047 bp, Staphylococcus haemolyticus
tctttagagatttacggctatggccaatttgtgcatcgcaaaatagagttcaaccgtgaatttactgaaatttttggtgagaatgaagctggtaaatcaacgattcaagctttcatacattctatactttttggctttccaacgaaaaaagaaaaagaacctcgacttgaaccccgtatgggtaatcagtatgggggaaaacttacgcttatactagatgaccaatcagagatcgtagtagagagagttaaaggtaacatttcaggtgatgtaaaagtttacctagaaaatggtttgattcgagacgaaacttggctcaagaaaaaattaaattacatttctaagaaaacttatcaaggtatattctcgtttaatgtgcttggattacaagatattcaccgtaacttagatgaggaccaattacaaagttatttacttgaagcaggtgcattaggttcttctgagttcacaatgatgaataaaatggtcagtcaaaagaaaaccacgctttataaaaaggctggaaaaaacccaatactcaatcaacagcttgatgaattgaaaagccttgaagcccaaataagagaagaagaatctaagttagatgaatatcatcgtttagttgatgatagagataaatcacaacgtcatttggaacatttaaaagccaatctaaaccaattatcaaaaatgcatgaaagtaaacaaaagcaacttgctattcatgaacaagcccaagaatggaaagatttagagcaaaaacttaatattgagccattaagttttccggaaaaagggatcgagcgttatgaaacagcttcaaattacaaacaatctctagcaagagatataagtttgcgtgaagagaaattaaaacaattagagaatgaatttaatgcaattcctgctttgaacgaagatacagctaatcatatttatcatttaactcgtgatgaaaatgaaattcaacaagctgaaatgaaatcttcttcacttaagcaagaaattgatgattacgagcgtcaagaagctgatttgaaaacaagtattggttggcaagaagtttatcacaatacagatacctctgaatctatgaaaaattatgttagtaaaaccatcaagacgcgaaatgagcaaaaagtgttaaaacaacaaattgaaagagctattgatgaaaaccaaattgaacaaaatacgctatctcaggaaatagaaaacttggaaaaagatttggtttctgaagattcactggataaaaagaaacattataatcaacaaaagttagaactacatgagaaagagaatctgtataacaaacttaaagatacttttaattctgataaagaaagaaaacaaaagcgaaattggtggcttagattaagttttatagtgttatctatagttggtctgggtttaacactattctcatttgtgactcaaaatttaattttcggagttatatttgcaatcttaactgtcatatttattgttggtactttcttggttaagacaaaagaaattgattacagtgaatcaattagtgaagagattaatgatttggaacaacaaattaatgatttggaatctaattacgatttaaacttcgacttagatcaacaatttcaacttcgtgaacgttggagtaatgcaagtaacaataagagtgtattagctaataaattaaatcatcaagagaatttactgcaaaatacagaacaacaaatcaatgacttaactcaaaaattaaatgcagttaaagaaaatgtgaaagtacctaatgaaatgacagatgatttattaatagatagctttaaaacaatgaatcaacttaaatcaaatgacagttaccgtagtaaattattggatcaacatcaacaagtaaatcaaaaattgacgcatttttatgataaagcgcttaaaaatactgaaaatgagatcacaccatttaataaagcttcactatttaatgatatgaagaactggatttctaaatacgaaagtaataaagagaagaaagaacaacttaaaagtcaaattgagttattaa

SEQ ID NO: 35474 - DNA, 1170 bp, Staphylococcus haemolyticus
atgaaaatagcaactttaaatagaggtaaggaatcaaagtatttaaatcaatatccacttgtggatgaagatgatatttataaaaatgatcatttaaaagaaggcgatttattttatcttatgaacggtcaagaacagtacattgctactgcatatgtaggacgtcaacataagggtttaggctgggtattgagttatgatcaaaacgaagccattaatacttcttttttcgaaaaacaatttcaaattgcattacaagagcgtgattattactatcacattgaaggaaccaatgcgtttagactatttaacgctgaaggcgatggtgttggaggtttaacaatcgataattacgatggccacttattgattcaatggtattcaaaggggatatataagtttcgctataatgtcattgaagccattcaacaagtatttccatttaagtcaatttatgaaaaaatgcgttttaaagactctgaatacaccggtggacatgtaatcggtgaagcacctgattttccaatagttatagaggagaattttacattttacaatgtagacctagatgatggtttgatgacaggtatattcttagatcaaaaagaagtacgtaagaaattacgtgatcattttgcaaaagagaaagatatactaaatttatttagttatacaggtgcgttttcagtagtggctgctcaaaatgctaaatcaacgacaagtgtggatttagccaaccgttcacgtagtttaactgaagaaaactttggtttaaatggtattgaccctaaaagtcaatatatatatgtcatggatacatttgatttttacaattatgctgcacgacatggtaaagtattcgacacaatagttattgatccaccaagttttgcaagaaataagaagaaaacattctcagtacaaaagaattatgatgatttaattaatggtgcattaagtatacttgctccaaatggctcgttattattatgtacaaattcaagtactttctcattaaaagcatttaaaaatgttattaaaacaacacttaacgaagcgggtgtaacatacgaaattgaggaagtaatgggcttacctaaggactttaaaacacatccgcactataaaccctcaaaatatttaaaagctgtattcattaatatcaagtat

SEQ ID NO: 35475 - DNA, 264 bp, Staphylococcus haemolyticus
atggaacaaaaatcttatgtaattatcgatgaaactggtattcatgcacgtcctgcaactatgttagttcaaactgcatcaaaatttgattcagatattcaattagaatataacggtaaaaaagttaacttaaaatcaatcatgggtgttatgagtttaggtgtaggtaaagatgctgaaatcactatctatgctgatggaagcgatgaagcagacgcaattcaagctatcagtgatgtcttatctaaagaaggtttaactgaa

SEQ ID NO: 35476 - DNA, 1602 bp, Staphylococcus haemolyticus
atgtcaaaattaattaatggtattgcggcatcagacggtgtcgcaattgctaaagcttatttattagtagaacctgatttatcattcactaatgaaaaagtcactgatactgatgccgaaatccaaaaattcaaaaatgcgttagaagcttctaaaattgaattaacaaaaatcagaaataatgctgaaaaacaattaggtcctgataaagccgcaatctttgatgcgcatttattagtacttgatgatccagagttgattcaaccaatcgaagacaaaattgcgaacgaaaaagtaagtgccccagaagcgcttgatgaagtaacttcacaatttattacaatcttcgaatctatggataatgaatacatgagagagcgtgcagcagatattagagacgtatctaaacgtgtgctagcacatcttttaggtgttgaattaccaaatccaagtatgattgatgaaagtgttattattgttggtaacgacttaacgccttcagatactgcacaattaaataaagaatttgttcaaggtttcgtaacaaatattggaggtcgtacgagccattcagcaattatgagtcgatcattagaaattgctgcagttgttggtacaaaatcagttactaaagaagttaaacaaggcgatatggttatcgttgacggaatcacaggtgacgttattgttgaccctacagaagatgagttaattgcttatcaaaacaaacgtgaacgtttctttgaagataaaaaagaattacaaaaattacgtgatgctgaaacggtaacaatcgacggtgaacatgctgaattagctgctaatatcggtacacctgatgatttatacggtgtaatggaaaatggtgctgaaggaatcggtttatatagaactgaattcttatatatgggtagagatcaaatgccaactgaagatgagcaatttgaagcctataaaaaagtgctagaaacaatgaaagacaaacgagttgtagttcgtaccttagatattggtggcgataaagagttaccttatttaaatctacctaaagaaatgaacccattcttaggttacagagcaattcgtctatgcttagatcaacaagatattttcagaacacaattacgtgcattattacgcgcgtcagcttacggtaaattaaacattatgttcccaatggtagctacaatcaatgaattccgtgatgctaaagccattctgttagaagaaaaagaaaatcttaaaaatgatggtcatgacgtttctgatgaaattgagttaggtatcatggttgagattccatctacagctgctttagctgatatctttgctaaagaaatggatttcttcagtattggtactaatgatttaattcaatatactatggcagctgaccgtatgtcagaacgcgtttcatacttataccaaccttataacccagctattttacgcttggttaaacaagtcattgaagcttctcataaagaaggtaaatggactggtatgtgtggtgaaatggctggagacgaaacagctatcccattattattaggtttaggattagatgaattctcaatgagtgcgacatctatcattaaaagc

SEQ ID NO: 35477 - DNA, 684 bp, Staphylococcus haemolyticus
atgattggaattataggagctatggaagaagaagtagctatactaaaagacaaattaacagatatgaatgaaatttctgttgcacatgtaaagttttatagagggaaattaaattcaaaagaagtagtgttaactcaaagtggtattggcaaagtaaatgctgctatttcaactacgttattaattgaaaaattcaatccaaaactaatcatcaacactggatctgccggtgcattagatgagagtttatctgttggagatatgttaattagtaatgatgttgtttatcatgatgttgatgcaacagcatttggctataaactgggtcaaatacctcaaatgcctttagaatttaagtcggatcaagaattacttaaatcggtagaaacagtaattaataaaaaaaattataatgctaaaattggccaaattgttagcggtgatagctttattggtagtgttgatcagcgactaacaattaaacgacagtttcctgaggctatggctgttgaaatggaggcaactgcaattgcacaaacttgccatcaatttcatgttccttttatagttacacgtgcagtctcagatctagctaatggcaaagcagacatatcttttgaagagttccttggtgaagccgcaaaatcttcaagttcaattgttgaatcattaatcaaagtttta

SEQ ID NO: 35478 - DNA, 1098 bp, Staphylococcus haemolyticus
ttggatgacacattaaaatgtattggctgtggcgcgccacttcagtccgaagataaaagtgcacctggttatgttcctgaacataacctttttagagaggatgttatttgccaacgttgttttagattgaaaaattacaatgaaattcaagatgttggaatggatagtgaagattttttaaatttattaaatgaactgtctgaccgaaaaggcattattgttaatgtagttgacatatttgactttgaaggaacatttattaatgctttaaaacggatagttggtaacaagaagattattttagcagctaataaactggatcttctacctaaacagattaataaacgacgagtaaaagattggcttaagaaaactgctagaaaatatggcttagatgctgacgatgttatattaatatctgctcaaaaaggttggggaatcgatgatcttctaacatcaattgaacaaaatcgaaataaacaagatgtttatatagtcggcacaacgaatgtaggtaaatctacacttataaataaattgattgaacaaagtgtaggagagaaagatgtagttacgacatcacgatttcctggtactacattagacttaattgacatacctttagatgaaaaaacgtttatgtatgatactcctggtattattcaatctcatcaaatgacacactatgtttctgagaaagagctaaaaacaatcgtacctaaaaatgaaataaaacaaagagtttttcaacttaatgaaggacaaacgttattctttggtggactgtctagaattgattatgtttcaggtggaaaaagaccgttagtttgttatttttcaaatgatttgaatattcaccgtaccaaaacagaaaaagctaatgatttatggcgaaatcaaattggaaatgttttaacaccaccaaataatcctgaccacttcgatatgagtgatacaaaagctgtacgtcttgaaactggtaaggaaaagaaagacataatgatatcaggtctaggatttataacgattgaagcaggtgcaaaagtcattgtacgcgtccctaaaaatgttgatgtaatcctaagaaattcaattatg

SEQ ID NO: 35479 - DNA, 804 bp, Staphylococcus haemolyticus
atgaagtatgcagtaataggtgatcccgtttcacattcattatcaccagtcatgcatcaagttaattttaaatcattaaatatggaagacacatacgaagcgttgcatattcccacacaagatttccatgatattagacacattattgaagataaccatattaacggattcaatgttacgattccgcataaggaaagaattattccttatctggatgaaattaatgaccaagcaaaagctgttggagccgttaatactgtgaaaattattaacaataaatggataggttataatacagatggtattggttatgtgatgggcttgaaacaagtttatcccgatttagaaaatgcttatgttttaatccttggtgctggtggtgctagtaagggaattgcaaatgaactcagtaaaattgtacaaccaaaattaacaatcgctaacagaacaatgagtagatttgagacatgggatatggatattaatgcaatttcattagaacaatcagaacaatatttagatgaatttgatattataatcaatacgacatctgctggattaaataataacgatgatattgttattagcttagataatttatcatcaagtacactcgttagtgatattatttatattccatataagactaaatttttaaaagaagcagaattcaaaggcaatacggtttataatggcctggatatgtttataaaccaaggcgctgaaagttttaaaatttggaccggcaaacagcctaatatactagaaatgaaatatgcagtactaaacaaattaaaaggagtt

SEQ ID NO: 35480 - DNA, 582 bp, Staphylococcus haemolyticus
atgaaaattgataaagcgattgaacttgttaaagataaactaccggagaaacgttttaagcactcattgagagtagctgaaaccgcagtaaaacttgcagaaatttatgatggtgataaagataaagctaatttagctggtgtattacatgattattgtaagtatgatgacctaagcacaatgtaccaaattgtaagacaacacgatttagatagtgaattattaagttatggtggagaaatcttacacggaccagtctgtgctgctatcatgcaatcagaatttggtattgaagacgaggaagtgcttcttgcaatcaagaatcacacaactggtcgaaaagaaatgactaaaactgaaaaacttgtattcattgctgattatattgaaccagggagaaaaaccccaggagttgaagaaataagagatatggcatacaatcaaggtagcttagataaaacgatttatgaaatttctaagcgaacggtacttttcttaatcagtaaggatattacagtttatggcacaacgatttcatgtttaaactattataattatagtgatcaaagaataaaggatgat

SEQ ID NO: 35481 - DNA, 567 bp, Staphylococcus haemolyticus
atacgagaacacgttggaatggtcttccaaaatccagaaaatcaatttgtgggttcgattgtcaaaatacgatgttgcgtttggtttagagaaccacgctgttccaactgaaaaaatgaaagaaatagtagcacaatctattagtgacgttggaatgaccgattatgcagatagtgaaccacattcattatcaggaggacaaaagcaacgagtagctattgcaggtgtattagcattaagtccttcagtcattatattagatgaagcgacatctatgttagaccctcaagccaagaaatcattgatgagtttaatacaagaagttaaagcaactaaagatgtaacaattatttcgattactcatgacttaactgaggcgcttgaaggcgatcatgtcatagtaatgaaccaagggacagtttataaagaaggaaatccacaaacaatatttaaagatataaaaatgttacaagaaattggattagatttacctttctcaatgaaaatcaatcaacttttaggatttgatgatcactttattacttacgaagggttggtcgaaaagct

SEQ ID NO: 35482 - DNA, 561 bp, Staphylococcus haemolyticus
gtgctttgcgaaaactgtcatttaaatgaagcagaggttaaacttacagtaaaaagtaaagaaggcacttctgagaaatgggtatgttctatatgtgctcaaggtgaaaacccttggcaacaaaatgaaacgccatccccacattctcagtttcaagacgatattgaagaagcatttgtcgtcaaacaaatattgcaacatttggcaacgaaacatggtattaatttccatgaagtagcttttcaagaagagaagcgatgtccaacgtgtaagatgacattaaaagatattgcgcatgtagggaaattcgggtgtgcaaattgttatgccactttcaaagatgacatcgtagatatagtaagacgcgtacaaggtggacaatttgaacacgtaggtaaaacgcctcgttcttctcataagaaacttgccatcaagaaacaaattgaggaaaaaacaaaatatctcaatgtactaatagatgaacaaaactttgaagaggctgctatcgttagagacgaaataaaagcattgaaagacgagagcggggtggagcgcaatgag

SEQ ID NO: 35483 - DNA, 1005 bp, Staphylococcus haemolyticus
atgagtgatatgaatgctcatatcagtgaatggatgaaggaaactgaagaatctccaattgttatgtcatcaagaattcgattggctagaaacttagaaaatcacgttcacccactcatgtttccatcagaacaagatggcttcagagttataaatgaagtacaagatgtattgcctgatttagatttaatgcgtttggatacaatggatcaacaaaacaaaatgaaacttgttgcaaaacatttaattagtcctgaactgattaaacaacccgcatcagcagtgttattgaataaagatgaatcaataagcattatgattaatgaagaagatcatatacgcatacaagcaatgggcaccgatttatctttacaagacttatataacatagctagtgagattgatgatacgttagatcaatcactagacattagttatgatgaacatttaggatatttaactacgtgtccaacaaatattggtacaggtatgcgagcaagtgtgatgttacacttgccaggattatccattatgaaacgtatgaatcgtattgcacagacaattaatcgtttcggttttacaattcgaggtatatatggagaaggctcgcaagtctatggccatatttatcaaatctcaaatcaattaacacttggtaagactgaagatgaaatcatagataatttaactgaagttgttcaacaaatcataaatgaagaaatgcaaattcgtgaacgtttgactcaatacaatgaattagaaacgctagaccgtatttatcggtcattgggtattttacaaaatagtcggatcatttcaatggaagaagcttcttatcgtttaagtgaagtgaaattaggtatcgatttagggtatttaacattgagtgattttaaatttaatgaattaatggtaagtattcaatcagcgtttatctataacgatgaagatgaaacaatctctgtaaatgaaaagagagcaaatatattaagagaatatactcaa

SEQ ID NO: 35484 - DNA, 2472 bp, Staphylococcus haemolyticus
atgctatttggtagattaactgaacgtgcacaacgtgtcctagcacacgcacaagaagaagcaatacgtttaaatcattctaatataggtacagaacatttgttattaggtttaatgaaagaaccagaaggtattgctgctaaagtattagaaagttttaatataaccgaagataaagtgattgaagaagtcgaaaaattaatcggtcacggacaagatcaaacaggaacattgcattatacaccaagagccaagaaagtaattgaactttcaatggatgaagcaagaaagttacaccataactttgtaggtacagaacacatattactaggtttaattcgtgaaaatgaaggcgtagctgctcgcgtatttgctaatcttgatttaaatattacgaaagcgcgtgcccaagtcgtcaaagcgctaggtagtcctgaaatgagcaataaaaatgctacagcaaataaatcaaataatacccctacattagatggattagcacgtgatttaactgtcattgccaaagatggaacgttagatccagttgttggtagagataaagaaattactcgtgtaattgaagtgttaagtcgtcgtactaaaaacaatcctgtactaattggtgaacccggtgtaggtaaaactgcaattgcagaaggtcttgctcaagctattgttaataatgaagtacctgagacacttaaaggtaaacgcgtgatgtcacttgatatgggaacagttgtagctggtactaaatatcgtggtgaatttgaagaacgtttgaaaaaggtaatggaagaaattcatcaagctggtaacgtaatcttattcattgatgaattacacacattagttggtgctggtggagctgaaggcgcaatcgatgcgtcaaatatattaaaaccagcattagcacgtggtgaattacaatgtatcggtgcgacaacattagatgaatatcgtaaaaacatcgagaaagatgcagcgttagaacgtcgtttccaacctattcaagttgatgaaccaacagttgaagacacaattgcaattttaaaaggattacgtgatcgttatgaagcgcatcaccgcatcaatatttcagatgaagcacttgaagcggctgctaaattaagtgatcgttatgtatcagatcgtttcttacccgataaagcaattgatttaattgatgaagcaagttcaaaagtaagactgaaaagtcatacaacacctaacaacttgaaagaaattgagcaagaaattgaaaaagtaaaaaatgaaaaagacgcagcagttcatgctcaagaattcgagaatgctgctaatttacgtgataaacaaactaaacttgaaaaacaatatgaagatgccaaaaatgagtggaaaacaactcaaggtgatcaatccacttctctatctaaagaagatattggtgaagtcattgcaggttggacaggtataccacttacaaaaattaatgaaactgaatcggatcgattattaaatcttgaacaaacgttacatgatagagttattggccaaaatgatgctgtaacttctattagtaaagcggtacgccgtgctcgtgcaggattgaaagatcctaaacgtccaatcggtagttttatcttcttaggtcctacaggtgtaggtaaaacagaattagctagagcattagcagaatcaatgtttggtgaagaagatgcaatgattcgcgttgatatgagtgagtttatggaaaaacatgctgtgagtcgtttagttggagcgcctccaggctatgtaggtcatgatgaaggtggccaattaactgagaaagtaagacgtaaaccatactcagttatcttatttgatgaaatcgaaaaggcgcatccagatgtatttaatattctattgcaagttctagacgatggtcatttaactgatacaaaaggacgtcaagttgatttccgaaatacagtgattatcatgacttcaaatgtcggtgcacaagaattacaagatcaacgctttgctggtttcggtggcggttctgaaggtcatgactatgaaacaattcgcaagactatgatgaaagaattgaaaaattcattccgcccagagttcttaaaccgtgttgacgacatcatcgtattccataaactttctaaagatgaattgaaagaaatcgttacaatgatggttaataaactaacacaacgactatctgagcaagatattaatattgttgtaactgataaagcaaaagaaaaaattgctgaagaaggctatgatccagaatacggtgcccgtccattaatcagagctattcaaaaaacagttgaagataacttgagtgaattaatcttagacggtaaccaaattgaaggtaaagaagttgtcatcgaccatgatggtgatgaatttaaatataatatcaatgaaaaaaataatggtatttcagatgaaggcaatgaagtaactgaaactgaagca

SEQ ID NO: 35485 - DNA, 1362 bp, Staphylococcus haemolyticus
ttggccaaaaagaaagtgatttttgagtgtatggcttgcggttatcaatctccaaaatggatgggaaagtgtcctaattgtgggtcatggaatcaaatggaggaaattgttgaaaaagcttcaaatcctaagcacggcgtaaagacatcaacgtctagcgcgaaagtccagaaattaaatgatatcaagaatgaagtgacaccgagagttcagacagaatcaaaagagttcaaccgcgttttaggtggtggcattgtaagtggttctttagtgttaataggtggagatcctggtatcggtaaatcaacgctattactgcaaatttgtgcatcattgtcacaaaaattaaatgtactgtatattacaggtgaagaatcattaaatcaaactaaactacgtgccgatcgactagatgaggattcgagtaatttaaatgtgctagcagaaacggacttagaagtaatacatcaaacagttcaacaagcgcaacctgatattttagttgtggattccattcaaacaatatatcatccagaaattagttcagcacctggttctgtgtctcaagtaagagaaagtacacagagtttaatgaatattgctaaacaaatgaatattgcaacatttatcgtcggacatgttacgaaagaaggtcaaattgcaggaccacgtctattagagcatatggttgatacagtattgtactttgagggagatgagcatcatgcttatcgtatcttgagagcggttaagaaccgttttggttctactaatgaaatgggcatttttgagatgaaacaaagcggattaaaaggcgttcataatccttcagaaatgttcttagaggaacgttctaccaatgtgccgggatcaacgattgtagcaactatggaaggtacacgacctctattaatagaagttcaggccttagtgacgcctacaacatttaataaccctagacgtatggcaacaggtatagatcataatcgtttgagtttattaatggctgtattagagaaaaaagaaaactatttattacaacaacaagatgcatacataaaagtagctggtggcgtacgattgacagagccggcagttgatttaagtgttatagtagcaacagcttcaagttttaaagataaagcagtagatgggcttgattgttatattggggaagtaggtttgaccggtgaagtgagacgtgtttctcgaattgaacaacgtgttcaagaagcagctaaattaggctttgaacgtgttattattccacagacaaatatcggtggatggcaatttcctgaaggcattaaagtagttggagtgtctacagtacatgacgctttaaaatatgcattcaaatcg

SEQ ID NO: 35486 - DNA, 939 bp, Staphylococcus haemolyticus
atgaacgtaggtataaaaggatttggtgcatatgcgccagagaaagtcgttgataacgcttatttcgaaagttttttagaaacttcagatgaatggatttctaaaatgactggaattaaagagagacgctgggctagtgaagatcaagatacatctgacttagcattcgaagctagtaaaaaagcgattgaagatgcaggaatcacacctgctgatatagatatgattattgttgcaactgctactggagatatgccattcccatcggttgccaatatattgcaagaaaaattgggtacacgtaaagtaccaacaatggatcaattagctgcatgttctggatttatgtattctatgattacagcaaaacaatatgttcaatcaggtgattataaaaatatcctggtagtaggtgcagacaaattatctaagattactgatttaacagatcgttcaacagcagtcctttttggtgatggcgctggtgcagtagttattggagaagtttcagaaggacgaggtatcattagttatgaaatgggatctgatggtaacggtggaaaatacttatacttaaacaaagatactggtaaactagtaatgaacggacgagaagtcttcaagtttgcggtaagaattatgggtgaagcatcaacacgagtggttgataaagctggtctacaatcagatgatattgatatgtttatacctcaccaagcaaacattagaattatggaatcagctcgagaaagactaggtatagagagagaaaagatgagtgtatctgttaatcgatttggtaacacatctgctgcctcaatacctttaagtatttcacaagaattagaaaatggaagaataaaagatgatgacacactagtattagtaggttttggtggtggcctaacatggggcgctatggttatcaaatggggtaaa

SEQ ID NO: 35487 - DNA, 1077 bp, Staphylococcus haemolyticus
atgtcagaaagagtattagaagtcaacgacttgcatgtttcctttgatattactgctggggaagtgcaagcggttagaggcgtagatttttatttgaacaaaggggaaacgttagcaatagtgggagagtctggttctggaaaatcagtaaccactaaagcgattacaaagctattccaaggagatgcgggccgtattaaaaaaggtgcaattgattttcttggtgaagatttagcaaataaatctgagaaagaattaattaaattacgtggaaaagatatttcgatgatattccaagatccaatgacatcactcaatccgacgatgcaaattgggaaacaagtaatggaacctttaattaaacatcgtaattatagtaaatctgaagcaaaaaaacgtgctttagaaattttgaatttagttggattgcctaatgctgaaaaacgtttcaaagcatacccacatcaattctctggtggtcaaagacagagaattgtaatcgcaacagctttagcttgtgaacctaaagtattgattgcagatgaaccaacaacagcattggatgtaacaatgcaagctcaaattttagatttaatgaaagatttgcagaaaaagattgatacatcaattatatttattacccatgatttaggtgttgtggcaaatattgcagatagagtagctgttatgtacggaggtcaaatgatagaaacaggagatgtagatgaaatcttctatgacccaaagcatccttatacatggggattattatcatcaatgcctgatttaactactagtaatgatacagaattaattgctattcctggaacaccacctgacttacttcatcctcctaaaggagatgcattcgcacgtagaagtcaatatgctttagatattgattttaaacaagagccaccatggttcaaagtatcaccaacacattttgttaaatcatggttattagataagagagctcctaaagtaaaaccgccagaaatggttgtaaaaagacagcgtcaaatgccgaataattacgacaaaccacgtcaagtagaaagggtgtcgttcgatgga

SEQ ID NO: 35488 - DNA, 942 bp, Staphylococcus haemolyticus
atggataaaaataatgaagtgttattagaaattaaaaatttaaaacaatattttaatgaaggtaaacgtaatgaagtaagagccattgaggacatatcttttgatatctataaaggggaaacattagggttagttggagagtcaggatgtggtaaatcaactacaggtaaagcaattattaaactaaatgatattacaagtggagaaattttatatgaaggacaggatattcaaaaaatttctaagcgtaaagatttattaaagtttaataaaaaaattcaaatgattttccaagatccatatgcttcattaaatcctagattgaaagtaatggatatcgttgcagagggtattgatattcataaattagcaagcagtaaaaaagaccgtaaacgtcgtgtttatgacttacttgaaacggtcggtttaagtaaagaacatgcgaatagatatccacacgaattttctggtggacaacgtcaacgtatcggtatcgcgcgtgcactagcagtggaaccggaatttattattgcggatgagcctatttcagcgttagatgtatctatccaagctcaggtagtaaacttaatgttgaaattacaaaaagaaagaggtattactttcttatttatcgcgcatgacttatcaatggttaaatatatttcagaccgtatcgcagtgatgcacttcggaaaaattgttgaattaggttcagctgacgaaatttattatcatccattacatgattatacgaaatcattgttatcagcgattcctcaacctgacccagatagtgagagaacacgtaaacgtgtagcatatcaagaagatgaatctaaaaattctgagcgaaaacttcaggaaataagaccagatcattatgtttttgtaactgatgaagaagctgctcaattaaaacaagaacatcaaacgcaaagcgtt

SEQ ID NO: 35489 - DNA, 1182 bp, Staphylococcus haemolyticus
atggcaaaagaaaaatttgatcgctcaaaagaacatgccaatattggtactatcggtcacgttgaccatggtaaaactactttaacagctgctatcgcaactgtattagctaaaaatggtgacactgtagcacaatcatatgacatgattgacaacgctccagaagaaaaagaacgtggtatcacaatcaatactgcacacatcgagtatcaaactgacaaacgtcactatgctcacgttgactgcccaggacacgctgactatgttaaaaacatgattactggtgctgctcaaatggacggcggtatcttagtagtatctgctgctgacggtccaatgccacaaactcgtgaacacattcttttatcacgtaacgttggtgtaccagcattagtagtattcttaaataaagttgacatggttgacgatgaagaattattagaattagttgaaatggaagtacgtgacttattatctgaatacgacttcccaggtgacgatgtacctgtaatcgctggttcagcattaaaagctttagaaggcgatgctcaatacgaagaaaaaatcttagaattaatgcaagcagttgatgactacattccaactccagaacgtgattctgacaaaccattcatgatgccagttgaggacgtattctcaatcactggtcgtggtactgttgctacaggccgtgttgaacgtgggcaaatcaaagttggtgaagaagttgaaatcattggtatccatgacacttctaaaacaactgttactggtgtagaaatgttccgtaaattattagactacgctgaagctggtgacaacatcggtgcattattacgtggtgttgctcgtgaagacgtacaacgtggtcaagtattagctgctccaggttcaatcacacctcacacaaaatttaaagcagacgtatacgttttatctaaagacgaaggtggacgtcacactccattcttcacaaactatcgtccacaattctatttccgtactactgacgtaactggtgttgttaacttaccagaaggtactgaaatggttatgcctggcgacaacgttgaaatgacagtagaattaatcgctcctatcgcgattgaagacggtactcgtttctcaatccgtgaaggtggacgtactgtaggatcaggcgttgtaactgaaatcatcgaa

SEQ ID NO: 35490 - DNA, 1194 bp, Staphylococcus haemolyticus
atgaatatggttcaatcactacacaatttcttagaagaaaatattcaatatttaaaagataatggattatataacgaaatcgattctattgaaggtgctaatggtccagaaatcacaatcaatgggaaacaatatattaacttatcatcaaacaactacttaggactggcgacaaatgaagatttaaaatctgcagctaaacatgctatcgattcacacggtgttggtgctggtgctgtacgttcaatcaacggtacattagacctacacgatgaattagaagagactttagctaaattcaaaggtactgaagcagctatcgcttatcaatcaggtttcaactgtaacatggcagctatttcagcagtaatgaacaaaaacgatgcgattctttcagatgaattaaaccatgcttcaattattgatggttgtcgtctatctaaagctaaaatcatccgtgttaaccactcagatatggatgacttaagagctaaagcaaaagaagctgtagaatctggtcaatataataaagtaatgtacattactgatggtgtattcagtatggatggagacgttgctaaattaccagaaatcgttgaaattgctgaagaattcggtttaattacttatgttgatgatgcacatggttcaggcgttatgggtaaaggtgcaggtacggttaaacattttggcttacaagataaaattgacttccaaatcggtacactttctaaagctatcggtgtagttggcggttacgtagcaggaactaaagaattaattgattggttaaaagctcaatcacgtcccttcttattctcaacttctttagcacctggagatacaaaagcaattacagaagctgtgaaaaaattaatggcttctactgaattacacgatcaattatgggataacgctaaatatttaaaagatggtttagaaaaactcggattcaatactggtgaatcagaaacaccaattacaccagttattattggtgatgaaaaagaaactcaagaatttagtaaacgtcttaaagatgaaggcgtatatgtaaaatctatcgtattcccaacagtacctcgtggtacaggtcgtgtaagaaacatgcctacagcagcacatacaaaagaaatgttagataaagcaattgctgcttatgaaaaagttggtaaagaattaggcactattaaa

SEQ ID NO: 35491 - DNA, 972 bp, Staphylococcus haemolyticus
gtggaggtatcagacatgttagttttgaatgaacaagaccagcaatcattattagacatgaaagaagtcattgatgaagttgcgaattcattaaaggcattttcagaagagaagacagacacaccgttaaggtatgtcttaccatttaatgaaggaaatagatatttagttatgccagcattatctgatgatcttaaaatggttggtattaaaacagttacatttgcgccagataatcctaaaaaaggcaaaaagacaattacaggatcagtgttattaagtgattatgaaactggtgaaacattagctgtattagatggcagttatttaactaagattcgtacaggtgctatctctggggtagcaactaaatacttagcacgtgaagatgctaaaacactatgtgttattggttctggtgatcaagcacaaggactaattgctgcagtaatggcagttagaaatatcgatacaattcacttttcgagtcgtactaaggaaaatgcagaacgtttagctcaagaagtagctaataattataatgtatcgacgaaagtctttgaagaagcggatgatgcgatggaagaggctgacgttgttgtaactgcgacaaattctaatcatccggtatattcacattcattacaccccggcgttcatttaaacgcagtaggctcatttaaaccagatatgcaggaattaccatcagagtctatgttagtagctaataaaattgttgttgagtcagtagaagctgcgatggaagaaactggcgatttaaaggtacctcaagaagaaggcattataacgaaagattcattacatggagaattaggggatatcgtagctggtaaagtttcaggacgtgaagatgataaggaagtaacgctgtttaaatcagtagggttagcaattgtagatatcgttgttgctaattatttctataaaaaagcagtagcaaataaagaagta

SEQ ID NO: 35492 - DNA, 963 bp, Staphylococcus haemolyticus
atgagattaaatttagcagaacgtatcttaaatcaagacgtattaagtaaggatgaggcgttagcattatttgaagatgaaacgattgatacatttgaattattaaatgaagcatatatcattcggaaacactttttcgggaaaaaagtgaaactcaatatgatattaaatgcgaaaagtggaatttgttcagaagactgtggttattgcggtcaatcggtgaaaatgaaagaaaaacaacgctatgcgttagttgaacctgacaaaattaaagctggtgcacaggtagcgacggagaatcatattggtacatattgtattgtcatgagtggacgtgggcctacaaatagagaggttgatcatatctgtgagacggttcatgatattaaagtgttgcatccacaacttaaaatttgcgcatgtttaggtttaacaaatgaagaacaagcggagaagttaaaagaagcgggtgtggatcgctataatcataatttgaatacaagcgaaaggtatcataatgaagtcgttacaacacatacatatgaagatcgtgtgcgtacggttgaaattatgaaagcgaatcatatctcgccatgttctggagttatttgtggcatgggtgagacgaacgaggatatcatcgatatggcatttgcgttgagagaaattgatgctgatagtattccaattaatttcttacatccaattaaagggacaaaattcgggggactcgatttattgtcaccaatgaaatgtttaagaattattgcgatgtttcgattgattaacccatctaaagaaattcgtattgcaggtgggcgtgaagtcaatttacgttctttacaagccatcgcattaaaagcagccaattccatctttgtaggtgattatctgattacaggtgggcaaccgaatgaactcgattatcaaatgattgaagatttagggtttgagattgatggg

SEQ ID NO: 35493 - DNA, 1192 bp, Staphylococcus haemolyticus
atgtcgaaattcgcaccactgctagaacctattacactatctaatggcattacattagctaatcgatttgttctttcgcccatgacgacgaactcgtctactaaagaagggcatataacagaggaagacatacgttatgcgaaacgtcgtgccaattcagcaggattacaagtaactggcgcagttatatcgagccatatggtcagttatttgaatatgggtttaatatttctgatgatgcttgtattcctggtttaagaaaagtggcgcaactatgaaacaagaggggaataaagcgattattcaacttgcacatgctggaagattctcaaatactgcaattatgaattatggggaagtctatggcccaagtccaatgacgttacactctccaattaaacatgacgttttagaaatgtcggtggagaaaattcatgacgtcatacaacaatatgccgatgcaacatctagagcaattcaagctggatttgatggcgttgaaatctccgttgcacaacgtttactcattcaaactttcttctctacgttctcaaatcaacgacatgatcaatatggcgttgattcgttagagaaccgagcacgctttggcttagaagtcatgcaggcagtacaaaaagtcatcgatgaagaggcgcctagtgatttcatattcggttacagagcgacacctgaagagacaagaggtagtgatttaggctatacagttgatgaatttaatcaacatttagattgggtcatggaagtcgcaaatattcattatgtggctatcgcaagttggggacgcaatatttaccagaataagacgcgtacaccaggcgacaattatggacgccgcgtcaatcaagtcgtatatgagtatttaaatggacatgtgccgttgattgcgagtggtggtattaatacacctgaaacggcactagatgctttaaataacgctgatatggtcggcatgtcgtcaccatttgttacagaacctgacttcgttcataaattggcagaaggacgtgaagacgacattgatttacatgtacatccagatgagttagatgagctggccattccacatgctgcctttaaagacattgttcaaatgatggattacggtgaaggtctgcagaagaaaacacgcgatgaattgcgtaaattagagaaaaattatgatgaggaatag

SEQ ID NO: 35494 - DNA, 999 bp, Staphylococcus haemolyticus
gtggatttcaatatattagattatgccatgattgatgaaggcaaggatgcgacgcaagctttacaagataccacaagacttgcgaaactcgctgatgacttaggctacaagcgtttctggttaacagaacatcatgatgttccagcgtttgcgagtggtagtcctgaattattaatgatgcatttgttaggggaaacgaagcgcattaagttagggtctggtggcgtcatgttgcctcactatagcccgtttaaagtggccgaaaattttaaaatgttagaggcactccatcctggtcgggttgacttgggtatcggcaataatccaggtacagcggtggtcaaacgcgcaatggatgaggacaagcgtgactatcttgattatgcacaaagcattgaggatattcgtcattatttgacgcaagcaccagaggaacaacgtgtaggacaagtgattagtcaacctcacctatcacgtcatccagaaatgtggctcttaagtgcaagccaacgctcagctaaattagctgctacacaaggcatgggctacacattaggaacattcttattacctagccaagataagattgatgcagctaaagcgtcagtagagacgtatcgtgaacactttcaacaaactgcattaaacatgtcacccacagtcatgttaacaacgtttgcgattgtaacggacactgaagaagaagcgcaagacttactacacgcacttgacgtgtggctactaggcaaacgtcaatttgccgagttcgaccgcttcccatccatcgaaacagcacaacaatataacttaagtgaccgtgataaacgcgttatcgctcagcatcgtgcacgcatcttagctggcacaatcgagcaagtgaaaccccgcttggacgcaatgatccaagaatttaaggcggatgaagtcttagtcgtaccgctattaccaggcatcgaccaacgatgtcgtacaattgaacgcatcgcacaagcgtattta

SEQ ID NO: 35495 - DNA, 339 bp, Staphylococcus haemolyticus
atggctaaattagctaattatttatatgttgaaaaggtaggaaaccaatatatttatcgtatgacacctgaattacaagatgacgtaggtacagtaggttatgtagaatttatgggaccagatgacgttaacgtcaatgatgaaatcgtgagtatcgaagcatctaaaactgtgttagatgtgcaatctccacttgcaggtaaaattgtcgaacgtaatacgaaagctgaagatgagccagctattttaaattctgaaaagccagaagaaaattggttagttaaattagaaaatgtagatgaagcagcatacgacgcattaccagatccagatgaggac

SEQ ID NO: 35496 - DNA, 795 bp, Staphylococcus haemolyticus
atgtcagtgaaccaacaagaacgtttagcttatcttattgaaacgatgtggaaggaacaatatggtgacaaacctttagacctccctcacactgacacagaacagtgggaattgtatcgtggtttggccaatgttcgtccacctgagcctgtcagttctgagtacttagatattcaagatgcctatttatctacattaaacaaccaacaagacattacacatattgatgatttaacacctgtttcagatgagccattatatttatggctaggtgacatcacaacacttgatattgacggtatcgtcaacgcagcgaatagccgattcttaggatgtatgcaagcgaatcacgaatgcatagataacatcattcataccaaggctggtgtacagttacgtctagattgcgctcatataattgagcaacaaggacgtaaagaaggtgttggtaaagcaaaggttacctctgcttataatttaccagccaaatatgtcattcatacggttggcccgcaaattcgtaaacaacctgtatctcagatgaatagagatttgcttgcacgttgttatcgtagctgtctagcgcttgccgatgaaaaggggttaagacacttagcattctgttgtatttcaacaggtgtctttggattcccacaagacgaggcaagtcgtatagcgattgaaacgacacgtcaatatttacatgaaactggctcagagttgaaagtactctttaacgtatttacagatagagatttagaactatataaggaggctttcaatgacaacaacaga

SEQ ID NO: 35497 - DNA, 654 bp, Staphylococcus haemolyticus
atggacttaataaatattgccttggatggtcctgcagctgcaggtaaaagtactattgcacgacaagtagctagtaaattgtctatgatttacgttgatacaggtgcaatgtaccgtgcgattacttataaatatcttcaaaatgacaaaccagaggattttaaaacactcgttaatcaaacgacgttggaattaacctatgacaaaagtaaaggacaacgaattttattagataatcaagacgtcactgattttttaagagaaaatgatgtaactcaaaatgtatcttatgttgcttctaaagaacctgttagaacatttgcagttgaaaagcagaaagatctagcagctaaaaaaggaattgttatggatggccgagatattggcacagtagtattaccagatgcagaattaaaagtgtttatgatcgcttcagttgaagaaagagctgaaagacgtcaaaaagaaaatgaacaacgaggtatcccatcaacattatcacaattaaaaaaagaaatagaagaaagagatcattacgatatgaatcgggacatttcacctttaaaaaaagctgatgacgccgtcacagtggatacaactggtaaaacgattgaagaagtaactgaagaaataatgactttggttaacaatatt

SEQ ID NO: 35498 - DNA, 1176 bp, Staphylococcus haemolyticus
atgactgaagaattcaatgaatcaatgattaatgatattaaagaaggtgacaaagtcactggtgaggttcaacaagttgaagacaaacaagtcgtagttcatattaatggtggcaaattcaatggaatcattccaattagccaactttcaactcatcatattgagaacccaagtgaggtagttaaacaaggtgatgaaattgaagcatatgttactaaaatcgaagttgatgaagaaaatgactcaggtgtgtatattctttcaaaacgtcaacttgaaactgaaaaatcatatgaatatttacaagaaaaacttgataatgacgaaattattgaggctaaagttacagaagtagttaaaggtggcctggttgtagatgtaggtcaacgcggttttgtaccagcttcactaatttcaactgatttcattgaagatttctctgtattcgatggacaaactattcgcattaaagtagaagaattagatcctgaaaataatagagtcattttaagccgtaaagcagtagagcaagctgaaaatgatgtgaaaaaagcttctttattagaatcacttaatgctggtgatgttattaaaggtaaagttgctcgtctaactaactttggtgcttttgttgatatcggtggcgtagatggtttagtccacgtttctgaattatcacatgaacatgttgattctccagaagatgtagtttctgtaggtcaagaggtagatgtaaaagttaagtctgtagaaaaagatgctgaacgtatttcactttctatcaaagatactttacctacaccatttgaaagcattaaaggacaatttcatgaagatgatgttattgaaggtaaagttgtgcgtttagctaacttcggtgctttcgttgaaattgctccaggtgttcaaggtttagtgcatatttcagaaattgctcatgaacatattggcacaccaggtgaaaaacttgagccaggacaacaagttaatgttaaaattttaggtatagatgaagaaaatgaacgtatctcactttcaattaaagctacattacctaaagaagacgttgttgagagcgatgatgctacaactcaatcttatttaagtaatgattcaattgaagacaatccaacattaggtgatgtctttggcgataaatttaaagacttaaaattt

SEQ ID NO: 35499 - DNA, 1308 bp, Staphylococcus haemolyticus
atgacgaaacctattgtagctattgtaggtaggcctaatgtagggaaatctacaatatttaatagagtagtaggtgaacgtgtttcaattgtcgaagacacacctggtgttacacgtgatagaatttattcatcaggcgaatggttaacacatgaatttaatattattgatactggtggaatagaaataggagatgctccatttcaaacccaaataagagcacaagctgaaatcgcaattgatgaagcagatgtcattatctttatggttaatgttcgagaaggtttaacccaaagtgatgaaatggttgcacagatgctatataaatctaaaaagcctgttgtattggctgttaataaagtagataaccctgagatgagaaatgacatttttgacttttactcattaggttttggagatccatatccaatatcaggatcacacggcttaggtttaggggatctattagatgaggtagttaagcactttgacgaagaaactgaagattcatatgatgaagatactataaggctatcaataatcggtcgccctaatgtaggaaaatctagtttagtaaatgcaattcttggtgaagatcgtgttattgtatcaaatgttgccggaactactagagatgctgtagataccgaatacagttatgatggacaagattatgttttaatagatacagcaggtatgcgtaaaaaaggaaaagtgtacgaatcaactgaaaaatattcagtactacgtgcacttaaagcaattgagcgatctaatgtagtcttgattgtaatcgatgctgaggaaggtataatcgagcaagataaacgtgttgcaggatatgctcacgaagaaggtaaagcagttgtcattgtagtgaataaatgggacacagttgacaaagatagtaacacaatgaagaaatttgctgatgatgtcagaaatcaattccaatttttagattatgctcaaattgcttttgtttctgctaaggaaggcactcgtttacgcacgctattcccatatattaatgaagcaagcgaaaaccataaaaaacgtgttcaaagttctactttaaatgaagttgtcactgatgctatatctatgaatcctactccaacagataaaggccgtcgtttaaatgtattctatactactcaagtagctaacgagcctccaacatttgttgtattcgttaatgatgtcgaactaatgcatttttcttacaaacgttaccttgaaaatcaaatccgtcatgcatttggttttgaaggaacacctattcacatcattccaagaagaagaaac

SEQ ID NO: 35500 - DNA, 996 bp, Staphylococcus haemolyticus
atgactaaaattactgtttttggtatgggaagttttggtactgcattagctaatgtattagctgaaaatggacatactgttttaatgtggggaaaaaatgaagatagtgtgaaagaattaaatgatcaccatcaaaataaacgttatttaaaagatgtcgttttagatagtagaattaaagcaactagtgatattaaagaagccgcgaattttactgatatatatttaatggctctaccaactaaagcaatgcgcgaagttacaagtgaaattgatagtttaattgattctaagaaaacttttattcatgttgcaaaaggtatagaaaatgatacattcaaacgtgtttcagaaatgattgaagattcaatttcagaagatcacaatggtggtatcggggttttatcaggtcctagtcacgcagaagaagtagtgattaaacaaccaactacagtcgccgcatcatcaaaagatgaaaaagttagtaaactgattcaagatttatttatgaatgattatttacgtgtatacactaataatgatttagtcggtgttgaactaggaggagcattaaaaaatataattgcagttgcaagtggtattgtagcaggcatgggctatggtgataatgctaaagctgctttaatgacacgaggtttagctgaaataagccgattaggtgaaaaattaggtgctgatccaatgacatttttaggtcttggtggtattggagatctaattgttacttgtacatcaacgcattcacgtaattacactttaggatttaaattaggacaaggccaaacaatggatgaagctttaaatgaaatgaatatggtagtagaagggatttatactactaattctgtataccatttagctaaacaacaaaatgttgatatgcctataactaatgcactttacaaggttttattcgaagataatccggttaaagacagtgttaaagatttaatgggaagagataaaaaatctgaa

SEQ ID NO: 35501 - DNA, 270 bp, Staphylococcus haemolyticus
atgaataaaactgatttaattaatgcagttgcagaacaagctgatttaactaaaaaagaagctggttcagctgtagatgctgttttcgaatcaatccaacaatcactttctaaaggtgaaaaagttcaattaattggtttcggaaactttgaggttcgtgaacgtgctgcacgtaaaggtcgtaaccctcaaacaggtaaagaaattgaaattcctgcaagtaaagttccagcatttaaagctggtaaagcattaaaagatgctgttaaa

SEQ ID NO: 35502 - DNA, 717 bp, Staphylococcus haemolyticus
atgactgaaaataatgcaaaaaaagaacaagttcatacagtctttcaaaatatttcaagtaaatatgatcgtttaaataacataattagtttcgaacaacacaaagtatggcgtaaacatgtaatgaaagatatgcacgttaaagttggtagtaaagcacttgatgtttgttgtggtaccgctgattggacaatagccttaagtaaagcagttggtgcacatggtgaggtgacgggtttagactttagtgaaaacatgttagaagttggtaaagaaaaaactaaacacatgaacaatattcatttagtacatggcgatgcaatgaatttaccgtttgaagataattcatttgattatgtaactattggtttcggtctacgtaacgtacctgattatttagttgcattaaaagaaatgaacagagtcttaaagccaggtggaatgattgtttgtctggaaacaagtcaaccaacaatgcctgtgtttaaacaagtttataaattgtactttaaatttgtaatgccagtatttggtaaattatttgccaaatcaaaagaagaatatgaatggttacaacaatctacgttcgattttccagacaaggataagttaaaacaattatttgaacaagctggctttaataaaattaaaattcgtagctttacaggtggcgttgctgcaatgcatctaggctataaacaaaaaagttcgactaaa

SEQ ID NO: 35503 - DNA, 953 bp, Staphylococcus haemolyticus
gtggcaaagttaaacatgaatagcgagataaaaaatgtagaaaaacgccttcaaaaagctatcgaaagcaatgatccgatattacgtgaagcctcatcacatttgctttcttcaggaggtaaaagagttagacctgcatttgttatattaagtagtcaattcggtccacaaaagaaaacagaagacacgtatcgcgttgcagttgcattagagttaattcatatggcaacgctcgttcatgatgatgtcatagataagagtgacaaacgacgtggacgattaaccatagtaaagaaatgggatgttactactgcaatactaactggaaactttctactagcattaggactggaacatttatctgaaattcgtgacaatcgaattcatcatataatttcaaattcaattgtaaatgttggacttggtgagttattccaatttcaagatcaatttaatagcgaacaaagtattactaactatctgagacgtatcaatagaaaaacagctttattaattcagctagcaactgaagtaggagcaattacttcagaagctaatgatgaaactattcgaaaacttaaaatgataggtcattatattggtatgagtttccaaatagtagatgatattttggatttcactagcactgaaaagaaacttggcaaaccagttggtagcgatttaatgaatggacatataacgttaccagtattacttgaaatgaaaaaagatacgtcatttaagaaaaaaattgctgcactaaatcatcaatctgaatctcaagagtttaaacctctaattgaacagattagaaattcttatagtattaaagaatcaaaagcaattagtgataaatatttagctaaggcgcttaagttaattgatgaacttgatgaacccaatgctcaaagctttttattaaattaataaagaaaatgggatcacgtagtgtt

SEQ ID NO: 35504 - DNA, 1356 bp, Staphylococcus haemolyticus
gtgtctattttcagtaagttgcttaaaaaatctagccctcaacaggggatagttttatattatttgatagccatagttgtcgcttttttattattaaacctcccatttgtgcataaacatggtgtggatgttagcccaatcgatacgctattcgttgctgtatcaggcattagtgttactggactatctcccgttaacatagtagatacatattcaacatttggccaaattattatattaatcatacttaatataggcggtattggtgtcatggcgattggtacagtactatgggttgtgttagggaaacatataggtatccgcgaacgccaattaattatgttagataataataaagatacaatgagtggaaccgttaagctgatattagaaatcatcaaaacgatattaacaatagaatttataggtgcactgttattagcattttatttctatagagataatccagatttgaaaaatgcactcatgcaaggtttatttgtgtctgtctctgctactactaacggtggattagatatcacagggcaatcattaataccttacgctaaggattattttgttcaaacgattgttatgtttctaatcgtattaggatcaataggatttcctgtattacttgaaatcagagcatatgtaaggaatagggtcagccattttagattttcactatttaccaaaataactacatgcacatatctatttttatttgtttttggtgttttagccatattagcattagaacatcaccatgcttttaaaggattaagttggcatcaatccttattttattcattatttcaatctgcaacaacacgtagtgctggattacaaaccattgatgtaacaaactttagtgatgcaacgaatgtaataatgagtatcctcatgtttattggttcatctccaagttcagttggtggtggtatacgtacaactacatttgcgatactaattctctttgtaattaactttaataataatgctgaaaaaacagctataaaagtgttcaatcgagaaatacatgtagttgatattcaacgttcattcgccgtatttactatggcatcaattctaacatttgtaagtatgattgttattctcgctactgaaaaaacaaatctaacatttttacaagtattctttgaagtcatgtcagcctttggaacatgtggtctatctttaggtgttacagacgatattagtggacttactaaagtaatactaatgatattaatgtttataggtcgtgttggtttaatttcatttattattatgatagctggacgtaaggaaccggataaataccattatcctaaagaacgtgttcaaattggt

SEQ ID NO: 35505 - DNA, 1518 bp, Staphylococcus haemolyticus
gtgtgtaaattggagaaaaatgaacatataaatatagatatcttggcaacatcagatatgcatagtcattttatgaatggagattttggatcaaatatatatcgtgctggtacctatgttaaaaatattagagaaaacaatgataaagtcattttattagatagtgggggaagtgtagctggctcattggctgcgcattattatgctattgtcgcaccctataaacgtcatcctatgattaaattaatgaatgctatgcagtatgatgctagtggtataagtccggatgattttaaatttggattatcatttttgactaaagcagtatcactatcaaggtttcaatggttatctgcgaatatagaatttgcattaacaaaggaaccatacttctcaacaccttatataattaaagaatacgataatgttcgaatcgcaattgtaggtttaactgcagatggattaatgaaaaacgaattcgctgaaatggagaaagaggttagtattgaaaaagcactattatctgctaaacgctggattagatatatacatgaaagtgaacatcctgacttcttaattgtaatctatcatggaggactatataaaataaatcaaacaaatacaagacatagaaaaggttctcatgaagcggaaaaaataatgaaggaaataggtgtgatcgatttaatgataacagcgcaccagcatcaaacgattataggtaatgattttgaaacagtatatgttcaagcaggacaagatgctcaagagttagtacatgtcaaaattaaatttaaaaaacgtacgaactcgttcgaaaaagaagatattgaatctacagtaattaatttaagtgagtttccagaagatcaggaattacttgagacaacttattatgatcgtaaagccttagaacattggtcaaaggatattgtttcagagaataaagtcgatttacaggttaatggcttggaagacttactaagtagtccacatccatttatacaattattacatgatagtctacatttagcctatgtgaataatattacttgtattaacgtgcctaaaaatggcgaaaagggattaaaaggtatagtgactaatgaggatgtctataatgcttatccacaccctgataaagcaatagatataacacttagaggccatcaaattaaaaaaatgcttgaatatacttattcttatattcaatttgagcaaaatcaattaagtatgactattattgatgaaacattatgtacattgtggcaaggatttgattatgaggtagatatgtcagcgcctcgttttgatagagtgaatataaaaaatattgagttagatgaaaagtatagagttacaatgacagattattgttatagaaattatcgtcaatacttggaagatgaatcaatacttcattccacatatgatcgaccgatgagttcacttatcgctgaaaagctaaatcaacctgattattatttaaagttggactctaatttttcagtagcgtat

SEQ ID NO: 35506 - DNA, 4997 bp, Staphylococcus haemolyticus
atttatcaagatatcgatgttacaccaggttctgaattgcaattccattttattggtacttctatgggaaatatttcaggatttaacagtgctcgtttatttgtctatgatgcaaataatccttcaactttattatataaaggtacacctaaaacaagtagccaaccttttggtatttttaaaggggtatttaatgtacctgataatatctcaagaattagagtacaatttgaatctttagtaaatgtaagtcatgacacttatagtggacatcgattacttaagggcccaaataactttggtggtggtgtagttgctgatgtttctgttaatactggtgcatacttaaaagtgagtccagctcaaacagaatatcaagcaaactctacttctgcgacatcacctaatgttaatgctaaattaaatttttctattgaaaataaaggtcattcaagttctaacaaaactcaatataaagttgtattaccagaaggggcaacttttgtaactgctgaaaatgcaactggttcatttaatgaagatacaagagaattgacacttagtattaatccaatagatgctggtacaacaagagacgtttcttatactgtatcattacctacttcagtaccaattaaaaaagattttaatgcgaatctaatctatcaaactgaaggtattaatatgaaccgaaaaaatggttcaagagaccttgctacgcaaacacctggtgataataactaccttcgatatggtggtaataatgagtttattatcgctgagagtgatcaaagacaaggtactacaaatgcaccaacacaatctgtcactgtcttcatgtataaagatgctatcaataataaaataagtgaaattgaaacagaacttgctcaagcaaatcaaaatgattattccgtagaggcttggaacaacttacaaacagcacttacaaacgcaaaagttgttaaaaatgaaactgatgcaaccccaataacagatagaaagaatcaagctgaaattaataatttattattaaacttggaaaaagcaaaagcaaaatttgatgtagataaagctgctaaagctagagaaaatgtcattaataataacactgaagctactactgaagaaaaacaagtcgctttaactaaactacaaaataaatataatgagaaaaaaggtgaaattgataatttaattagtagtagtgatatcgctcctttaaaagaaagcagtatcgcccaaattaattcaattaatgtacgtgcaactaagaaagccgctgcgaaacaagcaattgaggcagctttaacggatcgcaaagtttttatcgatagtcactatgatgctactcaggaagaaaaagatgtcgctatggctaaagtaactgaagaagctaataaagcgaaagcgttaattgatcaatctacatctaataatgacgtagatcaagctcaaactaatggcatcaacatcattaatagtattgatgctgatgtaatcaaaaaagcaaatgcaaaaaaagctatagaacaagctgcagaagccaaaaaggcgctaattaatcaaaatagtgatgcaacacaagaagaaaaagatgcagcgattcaaagagttacagatgaagttagaaatgctgatagacttattgaccaatctacaaataatgatggtgttgatgaagtacaagcgcacagtattagttcaattaataatattcaacctgaaatagttaaaaaatcagatgcaaaacaagcaattgatacagcagtcttaaaccaaaaatcattagtcaataataacaatgaagccactcaagaagagaaagatgtagctttagccaaaattgatgaagcagcaaaacaagctaaagctgccatagatgctgcaactacaaataatgctgtagatgaagcaacaaacaataatactacaattatttctggaatacttcctgatacggtgaagaaagcagcagcaagaaaagcgattgatgatgcagcaactgctaaaaaagaagcgataaataatacgtcagatgcaacacaagaagaaaaagatgcagcaatagcgaaagttgatgcagctgtaacagctgcaaaacaagcaattacacaagcaacaacaaatgataatgtagaccaagaacaaaatagcggtacttcgactattactggtatacaaccagaagttactaaaaaagcagcagcaagaaaagcaattgatgatgaagtcgttgctaagaaagcagcaattgatactgttgccgatgctacagatgaagaaaaacaggcagctaaagataaagttgatgctgaagctaccaaagcaaaagcagcgattgatcaagctactacaaacaacgatgtagagcaagccaaatcatctggtgtaacaactattgaaggaatacaacctgatacgattaagaaatcgtcagcaaaacaagcaatagatgatagtgcaaatgctaaaaaagcagcaattgacaataatagtgatgcaactcaagaagagaaagacgtagcaaaagcaaaagtagatgtcgaagctgctaaagctaaaacagcgattgatcaagcaacaacgaatgatggtgtagaccaaacgagagacttaggcaacaattcaatttcagtaattcagcctgatattgttaaaaaagcagcagcaagaaaagcaattgatgatgcagcaacagctaagaaacaagaaattgatcaacacccaacagctacacaagaagaaaaagacgcagcaaaagctaaggtagatgctgaagtacaaaaagcgaaagatgcaattactcaagcaaattcaaataatgatgtagatcaagtacaaaattctgaaactgctacaatagcaggtattcaagtagatgcagttaaaaaagcaaatgctaaacaagcaattgatgatgcagcagctaagaaaaatgaaattgaccaacatccaacagctacacaagaagaaaaagatgcagcaaaagcaaaagtggatgaagaagtagctaaagcaaaacgagcaattgattcatcgactacgaatgacgcggtagatcaagcgaaagactctggtgtaactactattaataatattcaaccagaatcaatagaaaaaattaaagcgaagcaagcgattgatgatactgttacagccaaaaagaacgccatagatcaagatggtactactacacaagaagaaaaagatgcagctaaagcaaaagtagatgaagaagctactaaagcgaaacaacttatagatcaagctagtactaatgatgctgtacacgaaactcgagataatgaaataactgctattaacaaaattcaacctgaagcaatcaaaaaagctgaatcgaaacaagcaatcgatgatgctgctacagctaaaaaagcagcaatagatcaagtttctgatgctacacaagaagagaaagatgcagcgaaagctaaagttgacgaagaagtaacaaaagctaagtcagcaatcgataaagccaacacaaataatgatgttgaccaagcaaaaacgaatggaactacaataatttcttcaatagaaccagaagctattaaaaaagctgaggcgaaacaagccatcgatgtggcagtgtcagctaagaaacaagaaattgataataatgaaaatgctatacaagaagaaaaagatgctgctaaaacaaaagtagatgaagaagcaacaaaagcaaaagcagcgattgatcaagcttctactaataatggtgtagatcaagcaaaaacatcaggtgaaacaacaatttcttcaatccaaccagaagttgttaaaaaagcagaagcaaaacaagcaattgatgatgcagtgactgctaaaaaagcagaaattgatcaaaatcaagaagctactaaagaagaaaaagacgcagcgaaagcaaaagtagatgaagaagcaacaaaagctaaaaataacattgaccaatctacaacgaataatgatgtcgatcaagctaaaacagacggtgcttcagctataacaaaaattcaaccagacgttgttaaaaagtcagaagcaaaacgcgcaattgatgatgaagtaatagctaaaaaggctgaaattgatcaaaatcaagaagcaactaaagaagaaaaagatgcagctaaagcgaaagtagatgaagaagcaacaaaagcaaaacaatctattgataatgcgacaacaaatgaagcagtagatcaagctaaaactcaaggcgttacaactattacagcaattcaacctgataccattaaaaaggcagaagcgaaacgcgcaattgacgaagtcgctaaagctaagaaacaagaaattgataataacacaaatgcaacaaaagaagaaaaagatgtagcaaaatcaaaagtagatgaagaagttactaaagctaaaagtgctattgatcaagcaactactaatgaccaagttgaccaaggtaataataatggtcatacagctattgctcctattcaacctgaaacaattaaaaaaccagaagctaaacaagcaatagatgaagtagcaaaagctaaaaaagatttaatagatcaaacacctaatgcaacaaaagaagaaaaagatgcagcaaaatcaaaagtagatgaagaagtcactaaagaaaaaaagagatagatcaagcttctacaaatagtgatgttgatcaggtcaaagataaaggtacaaatggcattaatagtgttgtagttgaagtagtgaaaaaagacgcagctaaaaaagcgattgatgaattagtgaaagctaaaaaatcagagattgataataatcacaatgcgactagagaagaaaaagactcagcaaaatcaaaagtagatgaagaagctaaaaaagctaaagataatatagataaaggagctactaataatgatgtagatcaagctaaaaatagcagtagtaacatcattaaaaaaatacaacctgatactactaagaaaactgttgtgaaacaaacacttttagat

SEQ ID NO: 35507 - DNA, 594 bp, Staphylococcus haemolyticus
atgaatttattttacaataaagatggagtaggggatgtagcttttctacaaatagaacctactgatggaccgtttgaatataaaaaacaaggcgatattgttgaaattagtaaggaaggaacaatagtcggttttaatatatttgaattttcaagatataacaaaataagtggaaacggacatattaaattaacttctgaactagtggatgctgttcagaaagccataaataaatcaggattagactatcaattaaatgcagatttatctcctaagtttgtagttggatatgttgaaactaaagaaaaacatccagatgctgataaattaagtgttttaaaagtaaatgttggtaatgagcatttacaaatcgtatgtggtgcaccaaatgttgaggcaggccaaaaggtggttgtcgcaaaagtaggagcagtaatgccaagtggtatggttattaaagatgctgaattacgtggtgtagcttctagtggaatgatttgttctatgaaagaattaaatttaccaaacgcacctcaagaaaaaggtataatggtattaagtaatgactatgaaattggtcaagcatttttcgat

SEQ ID NO: 35508 - DNA, 3891 bp, Staphylococcus haemolyticus
atgagttggtttgatgatttatttagtaataaagagaattctgatgaagaattgctcagacgcaaaagtaaacgtcgtaatggcgatctaactcaaaataaagatgattcattacttcctgaaaacaacgatatatatgatcgtccaagaggtaagtttcgtttccctatcgatgtgggtcaagacgagaattatgaagaagcaatttatcgtgacagtaatgatgatattggtagttatagaccacattctagtaatgaccatagttcatatgattcatttgattacgaaggtcatacaaatcaatctaataattatgctaagtatgatagttcagaagattcaagaagacgacgtagaagaaatcatataaatcaagatgatactggtataccttctattaaatcaagaagccctaagtcatcaaataaatatattgatacacgtgagtcacaacgctttaataaacatcaaaacaattactctagtaccaatgtttcaaattattcaaaagctaattcaaatcaccaatctagagttaagttacaatcagagagatttaaatcaaactatcatttaagttctgaacctacatatcaccgttcaagttttaaaacatcggaagtaccatctgctatttttggaactaaaaagcgtagaccaatcgaaaacggtgtaataccacctgttaaagatgatgaagattcaaaagagtctataacaaaatatagttcaagcacagttgaacatgttccccatgaaagtaatcatgctatagctgacaattcaaataaggaagatactaaacgttcctcacaattagattcatcaattaccattgaaaatgaatcaactatagaatcaagttctaatacctctaataataatgagcgtactccaaattattcaaaacgtgataacacggtgaatattgaaaatatttatgcttctcagattgtagaggaaattagaaaagaaagagagcgtaaagttcaacaaaagcgtaaatttaaagaagccttacaaaataaacgacaacaaactgatgaagaagatagtatacaaagagcaatcgacgaaatgtatgctaagcaagcagaacaatatactggtgaaagttcacttaatcaaggtgacaatgtaagcaacaaatcgaatgaaagtgaaatcgataaaagcaagcatagttatcatagtaaggacaaatcattagctgatgagcataataggctagttcaaaatcaaactgatgaacaaactaatagtgataatgttgataatcaaacagaagtttcaaatgaatctcttgaaccctacaattatgaagaaattgatttaaatcaagtttcaagcgtccaacaagttagacaggatgatgtacaagttaaagatgtattagaagaacaatcgtcaaaaattaacaataataaagtggaaagttattcaaatgaaaaatttgatgactacttagaggacaccaatagtcatgaagaaatgcttcatgatgatgatttacatgagcaagtcatggatgatgatgaaaatgaaggtattagtaataaaacaactgatgaaaacaatgatgaaaaaatagacgatgctaattatagagagattaatgaatcagaatcacttatgcaagataaagcgaatgatttaaaatttaatgatgaagtgaataactctgaaaatcaacaaaattcatctgaaaataatatcaataatgctgttcgaaatgctgtttcttctgatatagaatacgcaactaatgaagatgaagaaaatgatgaaagattggcacaagatacgaataaagaagatcaaaagttatcacaatcagaagatatacaacatgaatctttaaataacgaagatgtatcattaacgtctaataaaacagatgattcagaacatcttgaaaaagatagtttaaatgaagataaaaaagctgaaccatcatttaataaaactaataaagcaccacaaaaaatgtcaatcaagcctggtagtaaaccatttaatgtagtaatgacaccttctgataagaaacgtgtaatggatgctaaaaaaaattcagtttcaagaaacaaagttaatgtgcctgaattaaaaccagaaacaaaaaaagaagcacaagatgagaaaatgaatgcagaattcgacaatcatttaaatgagtcacaattaaattctgacgaatcatctgattttaatgtggcatcacttgaatacaatgaaagttccgaacattcggttgaaaaagacaatattattaatgacgaaaacacaagagaaaatgaacatcaagatgttgataatagtcaaaacaatgatatgcctaaaggaaatcaatttagtaaagttcaaaattcaaataatcaaaatgataataaacatgatattaatgagtttgtttctaaagagggttattccgaagttacttcaacaaagaatcataaagatggagatgacgctaatcataaggctcctataagaagaggacctaatattaagctaccaagccttgatctattagaagatcatgaagaacatgaaatagatgaatcatggattgaagaaaaaaaacaagaattaaatgacgctttttattattttaatgtacctgctgaagttcaaaatgttacagaaggaccaagtgtaactcgttttgaattggcggtagaaaagggtgtcaaagtttcaagaattacagctttacaagatgatattaaaatggctctagctgctaaggatattcgaattgaagcaccaattcctggaacaagtttagttggtattgaagtaccgaatttaaatcctacgaaagtcaatttaaaatctattttagagagtccaaaatttaaaaatgccgagtctaaattaacagtagcaatgggtaatcgaatcaataatgaaccattattgatggacatagctaaaacacctcacgcattaattgcaggggcgactggttcaggtaaatctgtgtgtatcaatagtattttaatgtcattactttacaaaaatcatcctgaagaattaagattattacttattgaccctaaaatggtagaacttgcaccatataacgatttaccacatttagtttcaccagttattactgatgtaaaggcagctacacaaagtttaaaatgggcagtagatgaaatggaaaaacgttacaaattatttgcgcaattccacgtaagaaatattactgctttcaataaaaaagcaccatatgagcaaagaatgccaaaaattgttattgtaattgatgagttagctgatttaatgatgatggcacctcaagaagtagaacaatcaattgctcgaatagctcaaaaggctcgtgcatgcggaatacacatgttagttgcaacacaacgaccttctgtcaatgtcattactggtttaataaaatctaacatacctacacgtattgcatttatggtatcttcaagcgttgactcaagaacgattttagatagtggcggtgcagaacgcttgttaggatatggggatatgctttatttaggtagcggaatgaataaaccaattcgtgtccaaggtacttttgtttcggatgatgaaattgatgatgtagttgatttcattaaagatcaaagagaacctgactatttattcgaagaaaaggaattacttaaaaagaatcaaacacaagctcaagatgaattatttgatgatgtgtgtgaatttatggttaaagaaggacatatatctacttcattaattcaaagacatttccaaattggttataaccgtgcagctcgaattgtagatcaacttgaacaattagattatatttcaggtgcaaacggttctaaacctagagatgtatttataactgaagcagacttaaagaaagaa

SEQ ID NO: 35509 - DNA, 2025 bp, Staphylococcus haemolyticus
atgggcaaaattaaagaactacaaacctctttagctaataaaatagcagcaggtgaagtagtagagcgtccaagctcagttgtgaaagaattactagaaaatgcaatcgatgctaaatcgacagaaattaatattgaggtagaacaatcaggtatatcctcaattagagtagtagataacggtactggaatagaacaagatgatttagatttagtgtttcatagacatgccacgagtaaattggatgccgatgacgatttatttcatatcagaacgttaggatttcgtggtgaggcattagcaagtatatcttcagttgctaaagtcacacttaaaacttgcactgatagtgaaaatggacatgaaatctatgcagaaaacggagagattttaagtcgtaaacctgctaaagctaaaaaaggtacagatataactgtttcatcacttttctacaatacaccagctcgcttaaaatatattaaaagcttatacacagagttaggtaaaattacagatattgtgaatcgaatggcaatgagtcatccttatatacgaatttctttaatatctgatggtaaaacgttattaaaaactaatggttcaggtaaaacaaatgaagttatgtcagagatttatggtataaaagtagcaaaagatttagtgcatattcaaggtgatacaagtgattatcaccttgaaggctttgtggctaagccagaacactcaagaagtaataaacattatatttcaatttttatcaatggacgatatattaagaattttgtacttaataaagctattattgaagggtatcatacattactgacaataggacgctacccgatatgctatttaaacatagaaatggatcctatattagtagatgtgaatgtccatccaactaaactagaagtaagattatctaaagaagagcaattatatcaattaatcgttgagaaaattcgatatgctttcaaggatagaattttaattcctcagaacgatttggatagaacacctaaaaaaaataaagtcttaaatcaatttgaacaacaaaaattagactttgaaagaagacaacagaattcaaatcaagacaaaacaaattctcattattatggtatgagtgaatctaaattacaaaatccaaatttagaaaaaaacgatttagataataatgagttaattaatgaaagtacggaaaatttcgtacataataataaacgttcagatgacaaagattacttccaaattcaaaaagaaattttgaatgacttagacaatggtgatgcatcattattaaatgacgaatctacaaacgattcagaagaagttgtaactgaacaaagcaataatgatgaagcgtcatcaaaaacttatcaaacattatacagtaagcaagataataatgatattaaaggtaaagtaagtaacacaccatctcgacgagttccatatatggaagtcgtaggacaagtgcatggcacttatatcattgctcaaaatgagaatggcatgtttatgatagatcagcatgctgcacaagaacgtatcaaatatgaatattttagagaaaaaattggcgaagtgactaatgaagttcaagatttattaataccactgacattccacttttcaaaagatgaacaaatgattattgatcaatatcaagatgaattagataaagtgggtgttcatttagagcactttggcggtcatgattatatcgttaatagttacccagtttggttcccaaaagctgaagctgaagaaattattcaagatatggttgagttagtattaaacgataaaaaagtaaatgttaaaaaaatgcgtgaagatgctgccatcatgatgagttgcaaaaaatctataaaggcaaatcactatttaaaaaataatgaaatggcggatttgattgatcagttacgtgaagcagaagatccattcacttgtcctcatggcagacctataatcatcaatttctcaaattatgaacttgaaaaactatttaaacgtgtaatg

SEQ ID NO: 35510 - DNA, 417 bp, Staphylococcus haemolyticus
atgattcaacaactctatccgtcagttgcccacccctatagttttgaacttaataaagattttaatttttcagccgcgcattacattccaagtgaagatgccggtaaatgtatgagaacacacgggcatacttactttgttaatttaacaattgcaggcgataaactcgatcataatggtttcttaatcaattttagtgatttgaaaaaactaatccacgaccaattcgatcactacttattaaatgatttacctcaatttaaagataagagtccctcaactgaagttgtagctcaaacaatatataaaatggtccaaactcatctacaaaactgtgataatcaacctgaatgtgtccaagtttatctacgtgaaacgccgactagttatgtggtatatcgcccaaaggagtataaa

SEQ ID NO: 35511 - DNA, 609 bp, Staphylococcus haemolyticus
atgtcggcgtttataacattcgagggtcctgaaggttcaggtaagacaactgtattgcaacgtgtgtctgaaaagttagctcaggattatcagttgattgctaccagagaacctggaggagtaccaactggtgaagaaatacgtaaggtagtattggaaggggcaaatatggacatacgtacagaagcaatgttgtttgctgcttctagaagagaacacctagtagaaaaagttgtgcccgcgttaaatgataataaaattgttttatgtgatagatatattgatagttctcttgcatatcaaggttatgcaaggggtataggtattgaagaagtgaagcaattaaatgattttgcaataaatggtctttatccagatttaaccatttatttagatattacggcagaagtcggtagagatagaatacttaaaaatcaacgagatcaaaatcggcttgataaagaagatattgcatttcatgagaaggtgattgaaggatatcgacaaatcattcaagaaacacctcagcgttttgcagtggtagatgcgacacgtaatattgatgatgtagtcaatgaaacttatgagataatcttaaattttttaaaa

SEQ ID NO: 35512 - DNA, 924 bp, Staphylococcus haemolyticus
atggatgaacaacaaaaattagcgaatgcgtatcattcaaataaactatcgcatgcctacctttttgaaggtgatgatgcacaatcaatgaagcatgtagccatggaatttgcaaaacttattctatgtaatgggaatcagcaatgtgaaatgaaagttggaaccttcaaccaaccagacttcatgtatgtatcttctgaagaaaattcaattaagaaagagcaaattgagcagttggtacatcgtatgaatcaacttcctattgaaggaacgcataaagtttatatcatagaagattttgaaaagcttactgttcaaggggaaaatagtatattaaagtttttagaagaaccacctgagaatacgatagccattttgctatcaacgaagccagaacaaatcttagatacaattcattcacgttgtcagcatgtttattttaaaccaagtgataaacaagactttatagatagattagttgatgaagatattaatagagctgtagctgaaatgctaagcacctatactacgcaactagaaactgcaatagatttaaatgaagaacatgatttagttacacttaggaaagtgattttacattggtgtgacttattattaacgaataaacctatggctttaattggaataatagatttattaaaaaatgcgaaaaatcgtaagttacaattactaacgctagcagccgttaacgcgttttttgaggatattatgcatgccaaaataggaattgaacgagattttacatacacagatttaaaaggtaatatagaaaaatatgcgaatcagttatcgctaaacaaagttatgacaatgtacgaccaaattacagaagcgcacaaaaaattaatgcaaaatgttaatccgacgcttgtatttgaacaaatagtaatcaaaggtgtgagt

SEQ ID NO: 35513 - DNA, 723 bp, Staphylococcus haemolyticus
  misc_feature (609)..(609): n=g, a, t or c
atgacgaatgttgaagttgctgccacagttgctcccaatcaattactggatacagtaacattagataacatcaaagaatatagtgatgatattgatataattgaattacgaattgaccaatgggaagatcgacatcttgagttgcttaaatccaatttagaacgactacaagaattaaatataaacgttaacgtcttggtaacatatcgcacggtctcacaaggcggtaaaggtgaaatgaaatatgaagcatacatgacgttattaaaagaaattattaaaaatcatcattgccaaatgattgatattgaatgggatagtgattttgacgtttttgcgcatcgtgatttaattaacctagcacaccgatataataaacaagttgttatatcttatcataattttcaagaaacacctgatatagatattttaaaattcacatattataaaatgaatcaattgaacccagattatgtcaaaatagctgtcatgccacaagacaaagaagacgtagctacattgcttgaagcagtagcaacaagtgctgacactcttgatgctaaggtgattggtatttctatgtctaaagttggcttagttagtagacangctcaaggtgtgtttggaggcactgtatcctatggatgtttaggtgagccccaagcccctggacaaatacatgttaaaactttaaaacaacaactattattttatagtaatcat

SEQ ID NO: 35514 - DNA, 402 bp, Staphylococcus haemolyticus
cgtggtgaagagaagacgcttggcactgttaatggagacattatttctgaacaaatttctatacctgcaccgctcggtggtaatggagtaggtacaaatcctgatgaattattagtttcagctgcatcgtcttgttatatcatctcattggcagcaacgttagaaagagcaaaatttaccgacatcaatctgataaataattcagtaggtactgccctattcgagaatggtaagtttaaaatggtaacaataacacattatcctaaaatttcagtgactgcggaagacaaagagaatcttgagaaacggcttcctaaattattagaaatagctgataataattgtatgatttcgaattctatacgtaataatgtagaaattaaaattcaagcgtcaattcaa

SEQ ID NO: 35515 - DNA, 759 bp, Staphylococcus haemolyticus
atgccagcagtaacttatgaacatataaagacttgtaaacaatcaggtgcacgtttaggtatcgttcatacaccgcacggttcttttgaaacgcctatgtttatgccagtaggaacaaaagcaactgttaaaacaatgagtcctgaagaattaagacaaatagaagcgaaaataatattaggaaatacatatcatttgtggttacaacctggaaatgatattatcaaacaagttgggggtctacataattttatgaattgggatggccctattcttactgattcaggtggtttccaagtatttagtttgagtaatcttcgtaagataactgaagagggtgttgagtttagacaccatacaaatggattgaagttatttttaagtccagagaaatcaatggaaatacaaaatgacttaggttcagatataatgatggctttcgatgaatgtccacctatgccttctgagtataagtatgttaaggattcaattgaacgcactacgagatgggctgagcgttgtttaaacgcacataagcgcccagaggaccaagcactctttggtattatcaaggtggcgaatataaagatttaagagaacaaagtgctaaggaattagtcgctttagattttcctggatatgctattggtgggatgtcggtaagggaacctaaaccagttatgtatgaaatggttgaacatacagtgcaaatatgccagatgataaacctcgttaattaatgggcgtaggtccccctga

SEQ ID NO: 35516 - DNA, 1395 bp, Staphylococcus haemolyticus
  misc_feature (31)..(31): n=g, a, t or c
ggtaatgcaagaactgcattatttaattatntatttgctaagcattatgatggtgattccgtagtgcgtattgaagataccgatagtaaacgtacccttgaagatggtgagtcatctcaatttgataacttaaaatggttaagattagattgggacgaatcaatcgataaagacaaaggttatggaccttatcgtcaatcagaacgtggtgatatctataatccacttattcaacaattattggacgaagataaagcgtacaaatgttacatgactgaagaagagcttgaaaaagaacgtgaagatcaaatcgcacgtggtgaaatgcctcgttacggtggtcaacatgcacatttaactgaagaagaacgtcaacagtttgaagctgaaggtcgtcgcccatcaattagattccgtgtgcctcaagatcaaacgtatacgttcaatgatatggttaaaggtgaaatttcattcgattcaaacaatataggtgattgggttatcgttaaaaaagatggcatccctacctataactttgctgtagctatcgatgatcattacatggaaatttccgatgttattcgtggtgacgatcacgtttctaacacaccaaaacaacttatgatttatgaagcatttggttgggaagcgccacgctttggtcatatgtcgctaattgttaatgaagaacgtaaaaaattaagtaaacgtgatggccaaattttacaatttattgagcaatatcgtgatttaggttacttgccagaagcgttatttaactttattacattattaggttggtctccagaaggagaggaagaaatcttttctaaagaagaatttattaaaatctttgatgaaaaacgtctttctaaatcaccagcgatgttcgatagacaaaaattagcatgggttaataaccaatatatgaaaacaaaggatactgacactgtatttgaacttgcattgcctcatcttattaaagctaatttaataccagaatctccaagtgaagatgataaagaatggggtcgcaaattagtggcactatatcaaaaagaaatgagctatgctggcgaaattatacctttatctgaaatgttcttccatgaaatgcctgaattaggagaagaagaacaagaagtcattaatggagaacaagttcctgaattgatgacacatttatatggtaaattagaagctttagaaccatttgaagcggctgacattaagaaaacaattaaagaagtacaaaaggaaacaggtattaaaggtaaacaattattcatgcctattcgtgttgctgtaactggtcaaatgcacggccctgaattacctaatacaattgaagtattaggtaaagataaagtactttcacgattgaaaaaattcgtg

SEQ ID NO: 35517 - DNA, 639 bp, Staphylococcus haemolyticus
ttgataaaaagaatgagagacgatgtgaaaatggtatttgaacaagacccagcagctcgtacaacatttgaggttattacaacatatgctggattacatgcagtttggagtcaccttattgcacataaattatataataagaaacgctatgtattggcgagaattatatctcaagtatcacgtttctttacaggtattgaaatacatccgggcgcgaaaattggcaagcgcttatttatagaccatggtatgggtgtagtaattggtgagacttgtacaattggtgataatgtgactatttatcaaggtgtaacactgggtggtacgggcaaagaaaaaggaaaacgtcaccctgatattggcgataatgtattaatcgcagctgggtcaaaagtgttaggtaatattcaaattgattcgaatgtgaatattggtgcgaattcagtggtattacaatcagttccaagttacacgactgtagtcggtattccggggcatattgttaaacaagagggtaaacgtatcggtaaaacatttgatcaccgtaatttacctgaccctttatatgaacaaattaagcaactagaaaaacaacttgaaaaagcgaagaacggagagattaaagatgattacattata

SEQ ID NO: 35518 - DNA, 1398 bp, Staphylococcus haemolyticus
atgattacattatataatacattaacgcgtcaaaaagagacatttgaacctatcgaaccaggtaaggtgaaaatgtatgtctgtggtccgacagtatacaattatattcacattggtaatgcacgccctgccataaattatgatgttgtacgtagatattttgaatataaaggatacgaagtgatttatgtttcaaacttcacagatgtagacgataaattaataaatcgttctaaggaattgaatgagagtgtaccggatattgcagatagatacattaaagcgttttatgaagatgttggtgcattaaacgttaagaaagcgacttcgaatccacgtgtaatgaatcatatggatgagattattgattttattaaagagctagttgatgaaggttacgcctatgagagtgacggcgatgtctactttagaacacgcaaatttgaaggttacggtaaattaagccatcagtcattagatgatttaaaggtaggagcaagaatagaagctggggaacaaaaagaagatgcgttagactttactttatggaaaaaagcaaaaccaggtgaaattagttgggaaagtccttttggtgaagggcgtccaggttggcatattgaatgttcagtaatggcgtttcatgaactaggcaaaacaattgatattcatgctggtggttctgacttacaattccctcatcacgaaaacgaaattgcgcaatcagaagcgcataatcatgccccatttgctaattactggatgcataatggttttataaatatagataacgagaaaatgagtaaatcgttaggtaactttatactagttcatgacatcataaaagaagtagatcctgacgtactgcgattcttcatgattagcgtacattatagaagtcctattaactataatctagaacttgttaatgcagctaagagtggtttagaacgcattcgtaatagctatcaattaatagaagaacgtgaaacaatcgcgacagacatcgttgaccaatctaaatatatcgaacaaattgatgctattatagagcaatttgagacagtaatggatgatgatttcaatactgctaatgctgttacggcttggtacgatttatctaaacttgcgaataaatatgttttagagaacaatacatctactcaagtcatttctcgattcaaagaagtttatcagatatttagtgatgtacttggagttccactaaaaggtaataaatcagatatgttacttgatgaagatattgaaaagctcatcgaagaacgtaatgaagcgcgtaaaaataaagactttgcacgtgcagatgaaataagagacatgcttaaagaacaaaacattatattagaggatacgccacaaggtgtacgctttaaacgtgga

SEQ ID NO: 35519 - DNA, 525 bp, Staphylococcus haemolyticus
atgaaagataaatatttgataattgatggctacaatatgattggacagtcaccagaactcggtaaaattgcaaaagataatttgcaagaagcacgagagcaattattagatgctatagcaaactataatgctgttgtagctgatgaaattgtatgtgtgtttgatgcatatgaacaatcaggtatagaaagagaatacatttatcatggtgtgaaaacagtatttacaaaagaaaaagagactgcggatagctatatagaacgttatgtttataatttatataacaagcacacgacacatattaccgttgtaaccagtgatatgagcgagcaacatgcaatatttggtgctggcgcatatcgtgtatcttcgagagagatgtggcgtgatttaagagaaaatgaaatcacagtgagtaagtcattagatgatttcacagaaagtaaaccgagaactcgtatttcgttatcgaatgatgtgttagcagaatttgaaaagattagacgtggaaatcataataaagat

SEQ ID NO: 35520 - DNA, 219 bp, Staphylococcus haemolyticus
gtgagtatggaggtaattttgatggctaaagataagggcacaaacaaagaaaaagacagtttcttccaaggcgttaaaagtgaaatggaaaaaacgagttggccaacaaaagaagaactttttaaatatactgtaattgtagtttctacagtaatcttctttatggtctttttctgggtattagatataggtattgggaatttgattgaactatttaga

SEQ ID NO: 35521 - DNA, 546 bp, Staphylococcus haemolyticus
atgtctgaagaggttggcgcaaagcgttggtatgctgtgcatacgtattctggatatgagaataaagttaagaagaatttagaaaaaagagtagaatcaatgaatatgacagaacagatttttagagttgtcatacctgaggaggaagaaacacaagttaaagatggtaaagccaaaaagcaacttaaaaaaacgttccctggttatgtacttgtagaactagtgatgactgatgaatcttggtatgtagtacgtaacacacctggtgttacaggattcgttggttcagctggagctggttctaaaccaaacccattattacctgaagaaatgcgattcattttaaaacaaatgggacttaaagaaaaaacaatcgatgtagaattagatgtaggagaacaagttcgtattaaatctggaccgttcgctaatcaagttggagaagttcaagaaatcgaacctgataaatttaaattaactgtattagttgatatgttcggcagagaaacaccagttgaagttgaatttgatcaaatagaaaaacta

SEQ ID NO: 35522 - DNA, 423 bp, Staphylococcus haemolyticus
gtggctaaaaaagtagaaaaagtagttaaattacaaattcctgcaggtaaagcgaacccagcaccaccagttggtccagcattaggtcaagcaggtgtgaatatcatgggattctgtaaagaattcaacgcacgtacacaagaacaagcaggtttaatcattccggtagaaatcagtgtttatgaagatcgttcatttacattcattactaaaactccaccggctccagtactacttaaaaaagcagctggcgtagaaaaaggttctggtgaacctaacaaaactaaagttgctacagtaactaaagatcaagtacgtgaaattgctcaaactaaaatgcaagacttaaacgctgcagacgaagaagcggctatgcgtattatcgaaggtactgctcgtagtatgggtatcactgtacataat

SEQ ID NO: 35523 - DNA, 693 bp, Staphylococcus haemolyticus
atggctaaaaaaggtaaaaagtatcaagaagcagctaataaagttgatcgtactaaacactatagtgttgaagaagcaatcagcttagctaaagaaacaagcattgctaactttgacgcatcagttgaagttgctttccgtttaggaattgatacacgtaaaaatgaccaacaaatccgtggtgcagtagtattaccaaacggaactggtaaatcacaacgtgtattagtatttgctaaaggtgacaaaatcactgaagcagaagaagcaggcgcagattacgtaggtgaatctgaatacgtacaaaaaattcaacaaggttggttcgactttgacgtagtagtagctacaccagacatgatgggcgaagttggtaaattaggtcgtgtattaggacctaaaggtttaatgccaaatcctaaaactggtacagtaactatggatgtaaaaaaagctgttgaagaaatcaaagctggtaaagttgaataccgtgctgaaaaagcaggtattgtacatgcttcaatcggtaaagtttcattcagcgatgaaaaattagttgaaaacttcaaaactttacaagacgtattagctaaagctaaaccatcatctgctaaaggtacttacttcaaatctgttgctgtaactacaacaatgggtcctggagttaaaattgatacttcatcattcaaatta

SEQ ID NO: 35524 - DNA, 2832 bp, Staphylococcus haemolyticus
atgaagggaccaagtattatagtaaagggtgcacgtgcacataacttaaaagacgtagacattgaacttccaaaaaataaattaattgttatgacagggttatctgggtcaggtaaatcgtctttagcatttgatacgatttatgctgaagggcaaagacgttatgtagaatcattaagtgcatatgcgcgtcaatttttggggcaaatggataaaccagatgtcgatacgatagagggattatcaccagctatttcaattgaccaaaagacgacaagtaaaaatccccgctcaacagtagcaacggtaacggagatttatgattatattcgtttgttatacgcacgaataggcaagccatattgtcctaatcataatattgaaattgaatctcaaactgtgcaacaaatggttgatcgcattttagaacttgaagaacgcactaaaattcaaattttagcgccagttgtttctcatagaaaaggtagtcatgagaaacttatcgcagatattggtaaaaaaggctatgtacgtcttagagttgacggcgatattgtcgatgtcaatgaggttcctgaattagataaaaataaaaaccatactatcgaggtagtcgtagaccgtttggtagttaaagatggtattgaaacacgtttagcagattcaattgagacaggtttagaattagctgatggcaatattactgtcgatgtaattgatggagaggaccttaaattttctgagaatcacgcttgtccaatttgcgggttctctattggtgaattagaacctagaatgtttagtttcaatagcccgtttggtgcttgtccaacttgtgatggtttaggccaaagattaacagtcgatcttgatttggtagttccagaccctaataagactctaaatgaaggtgcgattgaaccatgggaacctacgagctctgatttttacccaactttattaaaacgcgtatgcgaagtatataaaattaatatggataagccatataaaaagttgactgatagacagaaaaacatattaatgaatggttcaggtgataaagaaattgatttctctttccacagtcgtaacggtgggacacgtcatagaagaatgaaattcgagggtgttgttgccaacattgaccgtcgttatcatgaatcaccatcggaatatacacgtgaagtaatgagtaaatacatgactgaactgccttgcgaaacttgtcacggtaaacgtttaagtaaagaagcgctatctgtttacgttggtggatataatattggagaagttgtcgaatattctatcaagaatgcattaaattactatgaaaatattgagctttcagaacaagatagagctattgcaaatcaaattttaaaagaaatcatttcaagattgtcatttctaaataatgttggattagaatatttaacacttaatcgtgcgtcaggcactctttctggtggtgaagcacaacgtattcgattagcgacacaaatcggttcacgcttaacaggggtactttatgtgcttgacgaaccctctattggtttacaccaacgtgataatgatcgtctgataagtacattaaaagaaatgcgagatttgggcaatacacttattgttgttgaacatgatgatgacactatgcgagcagctgattatctcgtagatgtcggtcctggtgcaggtaatcatggtggtgaaatcgtctctagtggcacaccaagtaaagtcatgaaagataagaaatctttaacaggacaatatttaagcggtaagaaacgtatcgacgttcctgaacatcgtcgagaagtaactgatcgcaaaattagtatcaaaggtgcacgaagtaataacttaaaaggtgtagatgtagatattccattgtctgtaatgacagttgtaacaggtgtgtctggttcaggtaaaagttcactagttaatgaagtattatataaatcattagctcaaaaaataaataaatctaaagttaaaccgggcgcctttgacagtattgaaggtattgatcaattagataaaattattgaaattgaccaatctcctatcggtagaacgccacgttctaatccagccacttatactggcgtatttgatgatatacgtgatgtatttgctcaaactaatgaagcgaaaattcgtggttatcaaaaaggacgctttagctttaatgttaaaggtgggcgttgtgaagcttgtaaaggtgatggcattattaaaattgaaatgcactttttacctgatgtgtatgttccatgcgaagtttgtgatggaaaacgctataaccgtgaaacattagaagttacttataaaggtaagaatattgctgaagtgctcgaaatgacagtggaagaagcaacgtatttctttgaaaacattcctaaaatacatcgtaaattacaaacacttgtagatgttggtttaggttacatcacgcttggacaacaagctacaacactatcaggaggagaagcacaacgtgttaaattagcatctgaattgcataaacgttcaactggtcgttccatctatattcttgatgaacctacaaccggtttgcacgtcgatgatattagtcgtttgctaaaagtgcttaatcgtctagtcgaaaacggtgacacagttgtgattattgaacataatctagatgtcattaaaacagcagatcatattattgatctaggacctgaaggtggcgatggtggtggtacactagtagctactggtacaccagaagagattgcaaatgttgaatcatcatacacaggtaaatatttaaaaacggtacttgaacgagataaagtagaa

SEQ ID NO: 35525 - DNA, 933 bp, Staphylococcus haemolyticus
atgttaacgacagagaaattagtcaaattacttaaattagaattgtttacaggtgaaaaaggattacataaacctattaaaaatacggatatttctagaccaggtctagaaatggctggatatttttcacactatgctgcagaccgaattcaattactaggtactacagaattatcgttttataatttgttaccagacgaggaacgtcatggacgtatgagaaaattatgtcgtcctgaaacacctgcaattattgtgacaagaggattagaacctccgcaagagctgattgatgccgctcaagaaatggatacaccactcatcgtatcaaaggatgcaactacaagtttaatgagtcgattaacgaccttccttgaacatgaattagctaagacaacatcattacatggtgtgttagtcgatgtttatggtgtgggtgtgttaatcactggagattctggtataggtaagagtgagactgcacttgaattagtgaaacgaggtcatcgactcgtagctgatgataacgtagaaattcgtgaaataactaaagatgaattaatagggacaccacctaaattaattgagcacttactagaaattaggggtctcggtatcatcaatgtcatgacattatttggagcggggtcaatcctcacacaaaaacaaattcgtcttaacattaaccttgaaaattgggataaagataaactgtatgaccgagttggattgaatgaagaaacattacaaattcttgatacagaaatcactaaaaaaacaattcctgtaagaccaggacgaaatgttgcagtcattatagaagtcgcagcgatgaattatcgtttaaatataatggggattaatacagctgaagaatttaatcaacgtttaaatgaagaaatcttaaaaaaaggtcatcaaagcaaggagaac

SEQ ID NO: 35526 - DNA, 2675 bp, Staphylococcus haemolyticus
gtcacgcttgatggcactgattatcttgtagaacctggaacaagtttacttgagtttataaatctcgtgatactttcgtaccttcaatttgttataacgaatcaatgggaccaattcaaacatgtgatacatgtatggttgaaattgatggcaaaattgaacgtgcgtgtagtacagttgtaaatcgacctatgacagttaatactcagaataatgatgttaaagctagccaaaaggaagctttagatcgcattttagaaaaacatatgctgtattgtacggtatgtgattacaataacggtgattgtgaaatacataacgctatggacgcatggggattagaagaacaatcatacgaatacaaaacaaaaccatatgaaaaagactatggtccattctatcgatatgacccagaccaatgtattctttgtggtcgttgtgtagaagcgtgtcaagatatcgaagtaaatgaaacaatttcaattgattggaatcgtgagcatcctagagttatctgggataatgatgttcctattaatgaatcatcatgtgtatcgtgtggtcaatgtgcaactgtatgtccttgtaatgccatgatggaagtgaatatggaaggtaatgctggttacatgacagatactgaaccaggttcacttgctgcaatgattgatttaactaaaaaagctgaaccaggtgatggattactatttgcagtttctgattcagaagcggaaatgcgtaaagaacgcattaagaaaacgaaaacagtttgtacatattgtggtgtaggttgttcatttgatgtatggactaaagacagagaagtacttaaagttcaaccatcacatgattctcctgccaataaaattgctacatgtgttaaaggtaaattctcttggggtcacattaactcagaccaacgtttaacgaaaccacttgttagaaaagacggagaattccatgaagttgaatgggatgaagctttagatgttattgaaactaactttaaacgaatcaaaaatgaatatggtggcgatcatttagcatttatcgcatcttctaaaggtactaatgaagaatcatatttaatgcaaaaactttcacgacaagtcttcggatctaacaacgttgataactgttcaagatattgccaagcaccagcaacgaaaggactattcagaactgtaggtcacggtggtgactctggttcaattgaagaccttgagagagctgctatgactgttctaatcggtacaaatacagctgaagcgcatccagttattgcatctagaatgaaacgtgcacagaaattattcggacaaaagatgcatgtattcgatattagaaaacatgaaatggctgcgcgtgcagatgcattttatcaacctaagccaggaacagatttagtttggttaggtgcagctactaaatatatcattgacaacgatttacacgataaagctttcttgaatgattgggtcgataattatgaagattactataaatcattagaattgttcactatggattttgcagaagaaacaacaggtattcctaaagaacaaatcattagttttgcagaagaagctgcaaaagctgaatcaatgtcaatttgttgggcaatgggtgttacacaacaagatattggtagtgatacaagtacagctatctctaactgattgcttgtgacaggtaactatagaaaaccaggttcaggtgcttatccattacgtggtcacaataacgtacaaggtgcaagtgatatgggaagtatgccagatcaattcccaggttatcaaaaagtagctgatgatgaagtgagagcaaaatttgaaaaagaatatggtgtagaattaaatccaacacctggacgcgataatcaccaaatgatggaaggtatccataatggagatattcagtcattatacttatatggtgaagatacaggtattgttgattctaatattaattttgttcaatctgctctagaaaaagtagacttcttagttgttcaagatgagttcctaactttcacagcaacatatgcagatgtcgtcttaccagctagtccatcattagaaaaagatggtacattcacgaatacagaacgccgaattcaacgtattaataaagcattacaaccgctaggcgattctaaaccagactgggaaatcttccaattaatcgcacaacgcatgggcgctgattggaattacaaacatccaagtgaaatcatggatgaaattgcaggattaacaccatcatattcaggtgtaaattatgaacgattacaaggtttcaatagtcttcaatggcctgtagcaccagatggtacagaccaaccaacattatatatggatggctttaactttgaaaatggtcgtgctaagttattcccattaacatttgacaatttctttaaagaagatgaagtttatgatctacatgtaaataacggtcgtttactagagcatttccatgaaggtaatatgacttatcaaactgaaatgattaagtataaagtgccaaatgcgtttgtagaaatttctccagagctagctaaagatcgtgatattcatgaaggcgcagaattacgattgatttcagaaacgggtgaagcaacattaattgcaacagtaactgatcgagttaaaggcagagaaatttatattcct

SEQ ID NO: 35527 - DNA, 471 bp, Staphylococcus haemolyticus
atggctgaaagaataactaaaattaaacgtttagagaaatcagaagaacaaattaaaatcgagagtatcaatgaagtaacagatgctattgcagaaaataaagatagtattttaaaagcaatacgtttagtaaaagcattagatgaagctaaaattcttgatttaatgaacggtggcattagaggacgtcaagttattatcaataaatttatgacagaacttaacaaagatttatatgcgggtctaattacaaatttagcaccaatggtctttatgttaggtgagcttaatgttcaagagttaagtcaattcttaaataaattaaataaaggattgcacgttgcaaatcaagctaatcctaatgctaaaacaagtattcgtagtctaatgggcgtactcaaagacgatgatatgaatcgcagcttaacttatatacttaatttacttaaagggatgtctagagaagataaa

SEQ ID NO: 35528 - DNA, 546 bp, Staphylococcus haemolyticus
atgacaattgaaccaaaaggcaagtacatggaatctagaggtatctttctatatattaatcacaatactagaacaactaaaggttattattatgtgaggaaaacaacagatgacagtaaaggtagactaaaagatgatgaaaagagatatcctgtaaaaatggaacacaatcaaattattccaacgaagccgatacctaatgacaaactaaaaaaagaaatagaaaacttcaaattttttgtacaatatgccaactttaaagatattaatgattataaaaacggggatatttcatacaatcctaatattcctagttattctgcgaaatatcaactgaataataatgactataacgtgaaacaattaagaaaaagatatgatattccaaccaatcaagcccctaagttattgttaaaaggggatggcgacttaaaaggatcatccgtaggttctaaaaatttagaatttacttttgtagaaaataaagaagaggatatattttttacagatgcagtacaattcactcctagcgaagatgatgaatca

SEQ ID NO: 35529 - DNA, 816 bp, Staphylococcus haemolyticus
atgaaaaatttagcaaaattagttgaaatgaaacaagacaaaacgaaaatttcgatgattacagcatatgactttccaagtgccaaacaagcacaggatgcaaatatagatatgattttagttggtgattcacttggaatgacggtactaggttatgaaacgacaacacaagtgacattagaagacatgattcatcacggcaaagcggtacgtagaggtgctgatgatacttttgtagtagtggacttaccaattggcacagttggtgtaagtgatgaacatgatttgaaaaatgcgataacactttatcaggaaacgaatgctaatgcgttaaaagcagaaggtgcacatttagttaatttcattaagaaatcaacacaaattggaataccaattgtagcgcatctaggattaatgccacaaagcgttggtgttatgggctatcgtttacaaggtagtacgaaagatgcggctgaacaattaattcaagaagctcatgcagttcaagaagcaggcgcagtggctttagtattagaagcgattccaagtgacttagctggtttaattagtgagcaattagatatacccgttattggtattggagcaggaaaagacacagatggtcaagtattggtttatcacgatatgttaaattatggcgttgatcgctatgctaaatttgtaaaacaatttggcgatttttcagtaggaattgatgccattaaacattatgacgaagaagttaaggcagggacttttccagctgaagcccacacatataagaaaaagatattgaatgaggtaaacagcaatgac

SEQ ID NO: 35530 - DNA, 1488 bp, Staphylococcus haemolyticus
atggaacttgtagagaaattgtctaatcgtcaatatatcgatggtgaatgggtagaaagttcaaataaaaatacaagagatattattaatccttataaccaagaagttatctttacggttgcagaaggtactgctgaagatgcagaaagagcaatacttgcagcacgtcgcgcatttgaagatgccgagtggtcactagaaacaagtgaagtcagaggtaaaaaagtaagagcaattgcggataaaataacagaaaaccgtgatgaattagccaaattagaaactttagatactggtaaaacgttagaagaatcatatgcggatatggatgatatagctaatgtatttacttattttgcaggtttagcagataaagatggtggtgaaatgataaattcaccaattcctaacactgagagtaaagtagttaaagaacctgtaggtgtagttactcaaatcacaccttggaactatccattacttcaagcctcatggaagatcgcaccagcattagcaaccggatgttcactcgttatgaaaccaagtgaaattacgccattaactaccattcgtgtattcgaattaatggaggaagttggcttccctaaaggcgttatcaacttagtattaagtagcggtgaagaaattggagatacgttatcaggtcatgaagaagtagacttagtttcattcacaggcggaattgaaacaggtaaacatatcatgaagaatgccgccaatcatgtaactaacatcgctttagaacttggtggtaagaaccctaatattatttttgatgatgctgactttgaagttgcagtagatcaagcgttaaatggtggttacttccacgcaggtcaagtatgttcagcaggttcacgtatattagtacacaacgatattaaagctgactttgaaaaggcattaatcgatcgtgtaggcaaaattaaacttggtaatggtttcgatgatgatacagaaatggggccagtgatttctacagaacatcgcaataagattgaaggttacatggaaattgcaaaagaagaaggcgctacaatcgcgatcggcggtaaacgtccagaacgagaagatttacaagctggtttgttctttgaaccaacagtgattacagattgtgatacttcaatgcgtatcgttcaagaagaagtctttggaccagttgtgacaattgaaggatttgatagtgaagaagaagcaattaaattagctaatgattctatttatggtttagctggtgcagtattcactaaagatatcggtaaagcacaacgtgtagctaataaattaaagcttggtacagtttggattaatgatttccatccatactttgcacaggcaccttggggtggctataaacaatcaggtattggacgtgaactaggtaaagaaggcttggaagagtacttaactagtaaacacatcttaactaacacaaacccagaaccagtcaacttctttagtaaa

SEQ ID NO: 35531 - DNA, 1704 bp, Staphylococcus haemolyticus
atgagtaaaaagaattcatatgattacgtcattattggcggcggtagtgcaggatcagtattaggaaatcgtttaacagaagataaagataaagaggtattagtgttagaggcaggacgtagtgactatccttgggatttattcattcaaatgccagcagcattaatgttcccatcaggtaatcgtttttacgattggatttatcaaacggaagaagaaccgcatatgggacgtaaagtagaccatgcacgtggtaaagtgcttggtggctctagttcaattaacggtatgatttaccaaagagggaatccaatggactatgaaggatgggctgaaccagaaggtatggaatcatgggacttcgcacattgtttaccatactttaaacgtttagagaaaacatacggtgctacaccatttgatcaattcagaggacatcacggtccaattaaattaaaacgtggacctgcaacaaatccattgttcaaatcattctttgatgccggtgtagaagcgggttatcataaaacaaaagatgtgaacggatatagacaagaagggtttggaccgtttgatagccaagtgcataatggtcgtcgtgtttcagcatcaagagcttacttacacccagcaatgaaacgtaaaaacttaacagttaagactcgtgcatttgtcactaaaattcattttgatggtaacaaagcaacaggggtaacatttaaacgtaatggtagatatcatactgttgacgccggtgaagttatcttatctggtggagcgttcaacacgccacaattattacaattatcaggtattggtgacgcagaattcttgaaatctaaaggtatagaaccacgaatgcatttaccaggtgttggtgaaaacttcgaggaccacttagaagtatatattcaacacgaatgtaaagagcctgtgtcactgcaacctagcttagatgttaaacgtatgccatggattggtttacaatggatattcgcgcgtaaaggtgcagcagcatcaaatcactttgaaggcggtgccttcgtaagatcaaataatcaagttgcataccctaacttaatgttccacttcttaccaattgctgtaagatatgatggacaaaaagcaccagtagcacatggttaccaagttcacgtaggtcctatgtattctaattcacgtggtagcttaaaaattaaatcaaaagacccgtttgaaaaaccaagtattgtctttaattacctttcaactaaagaagacgaacaagagtgggtagaagctattcgagtagctagaaatatattagcgcaaaaagcaatggatccatttaatggaggtgaaatttcaccaggaccatcagtacaaacagacgaagaaatcttggattgggtacgtagagatggtgaaacagcattgcatccatcttgtagtgctaaaatgggacctgcctcagatccaatgtctgttgtagacccattaacaatgaaagttcacggtatggaaaatttacgtgttgttgacgcttcggctatgcctcgtacaacaaacggtaatattcatgcaccagtattaatgcttgctgaaaaagcagcagatatcatccgtggtaagaaaccattagaaccacaatatgtagattattataaacatggcgtaagcgatgaaaacgcaggtgcaatggaatttgatccatattaccaacac

SEQ ID NO: 35532 - DNA, 1659 bp, Staphylococcus haemolyticus
atgaatattattgaaaaagtaaaatcaactttaatagaagaaattaaagcaagtattgaaaaagctaatctggctgaagatattcctgaaattaaagtagaaataccaaaagatactaaaaatggagattattcaactaatattgcaatggttttaacaaagattgcgaaacgtaatccacgtgaaattgctcaagcaatcgttgataacttagacacaagtaaagcgaacgtgaagcaagtagatatcgcgggccctggtttcattaatttctacttagataatcagtatttaacgacagttatcccagaagctatcaataaaggtgacaaattcggttatgctgaagaatctaaaaatacgaatattttattagaatatgtatctgctaacccaactggtgatctgcacattggtcatgctagaaatgctgctgtaggtgattcattagctaatattttaattgctgcaggttataatgtaacacgtgaatattatattaatgacgcgggtaatcaaattactaacttagcacgttctattgaaacacgtttcttcgaggcacttggtgatacaagccatgaaatgccagcagatggttataacggtaaagatattatcgaaattggtaaagatttagctgataaacaccctgaaatgaaagactactctgatgaagaacgtcttaaaacattcagaaaacttggtgttgattatgaaatggataaattgaaaaaagatttagctgatttcaatgtccactttgataattggtttagtgaaacatcattatatgaaaatggtgccattgataacacattagctaaaatgaatgaactcggctatacgtatgaagcggatggcgcgacatggttacgtacatctgattttaaagacgacaaggaccgtgtattaattaaaaaagatggtaattacacttatttcacaccagacactgcataccactacaataaaattaatcgtggtaatgatatcctaatcgatttaatgggtgccgaccatcatggttatattaatcgtttgaaagctagtcttgaaacatttggtgtggatagtgatcgtcttgaaattcaaatcatgcaaatggtgcgtttaatgcaagatggcgttgaagtgaaaatgagtaaacgtacaggtaatgcgattactttacgtgaaatcatggatgaagtaggtattgacgctgcacgttatttcttaacaatgcgtagtcctgactctcactttgactttgatttagaacttgcgaaagaaaagtcacaagacaatccaatttactatgcacaatatgcgcatgcacgtatttgctcaatcttgaaacaagcaaaagaacaaggtgttgaagttactgctgatgctgacttttcaacaattacgaatgaaaaagcaatcgatttattgaagaaggttgctgaatttgaaccaactattgaaagtgcagcggaaagtcgcgcaccacatcgtttaacgaactacattcaagatttagcatctgcattccataaattctataatgctgaaaaagtattaacagacgatgcagaaaaaacgaaagcacatgtagctttagtagatgcagttagaattacactacacaatgctttatcattagtaggtgtatcagcacctgaaacaatg

SEQ ID NO: 35533 - DNA, 681 bp, Staphylococcus haemolyticus
gtgagggtattgttatgtgaagaatggagtgagagcatgccaacgcttacgacagaagcactttataaaatattattagacaatatggggcctcaacattggtggcctgctaaaagccctgaagaaatgatgctcggggcgatattagtacaaaatacaaattggaagaacgcagatatggctttaatgcgtttaagagaggaaacacaatttgatccacaaaaaattttatcgttaccattagctgaactacaggaaatcatccgttcaagtggtttttataagaataagggaaaggcgattcatgcattatttcagtggttaaatcaatttaattttgattatgaaaatattgctcaacattatggagataatttaagaagagaattactaaaaattcgaggcatcggtagcgaaacagctgatgttttactcgtctatatctttgaaggtatcgagtttattcctgatagttatacgagacgtttgtatagtaagttaggttacgcccatacagaaagttacgataaatttaaaaagcaaatttcattgcctcctcattttacgaatcaagatgctaacgagtttcatgccttattagataattttgggaaaaactattttaatggaaaagggactcaaaaatacacatttttagaagattattttaataagaatgat

SEQ ID NO: 35534 - DNA, 777 bp, Staphylococcus haemolyticus
gtggagaataaaataatgttaaatcatggatattttacacctaatgaagtgagcaaagtgacgtcggttagtacaagaactctacgttattatcatgagattggtttacttgtgcctagttatattgatactaacgggtatcgctattaccattctcaagatataacaaaattacaaacaattttatttcttagacaactcaatttatcgcttgagaacattcaagactattttcagcaaagtattactgataaaaatgcaatattagaagaaaattatgctcaaattattcatcaacgaaatcacctgaatcaaatcattgattacctcaatcatcatctaattaatcatagaaatgaggagattaatatggacaaatttaatcaatttgatgtgaatgaacaatatgataaagaagcggcgctaaaatatggtgatacagattactatcagtcatataaagataatagaactcaattcaatgattcagagaagcaggataatgatgaccatactaatgaacaatttaatcaattttttaatgagatgaatcaattattggaagatggttattcagcggatgacgcatatacgtatcaaaatattgaaacgttaaaaaagatattacaacgacaagtacctaatgcagataaccaatttttaaattacatggcactgacttatgaaaatgatgaacgttttgcgaaaaatattaataaaggacgcaatgataacctaaataaatttattgcagatgcaattcaagcttatattaaa

SEQ ID NO: 35535 - DNA, 909 bp, Staphylococcus haemolyticus
gtgaacgtgttaaataaaaagttatggatcctacttagtttagtcatgttgattcttgtcgcttgtggacaaaatgaccaacataaacaagaagataaacaaagtaatcaatctgattccaattcgaaagagcattcatacaaacgtatcgtgtcgcttatgccaagtaatacggaaattctttatgaattaggtctcggaaaagatattgtgggtgtttctacagtggacgattaccctaaagatgttaaaaaagggaaaaaacaatttgatacaatgaatttaaataaagaagcattattaaaagtcaaacccgatttaattttagcgcatgaatctcaaaaaggaacgtcaaagaaagtattagatagtcttgaaaaaaatggcgtaaaagtagtttatgtgaaagatgcacaatcattggatcaaacgtatgaaacttttaaacaaataggtaaagtaacaggacgagaacatgaagctaacgaacttgttgatgagacgaagcacaatgttgaaaaagtaataaagtcggtgccaagacatcatagatcacaatctgtttttatggaagtatcttctaaacctgaaatatatacagcaggcaaacatacattttttgatgacatgttagcccaattagatgctaaaaatagcttttcaaatatagaaggttggaaaccagtggataaagaaagtatcattaaaaagaatccagatatcctcatttctacagaaggactatctaaatcagattactataaagtgattaaaaaacgtgatggtttccgtcaaattaaagctgtgaaaaatggacgtattgaaacagtgaacggtgacgaaatttcacgtccaggccctcgtattgatgaaggtttaaaacaattaagagacgctatttataaaaga

SEQ ID NO: 35536 - DNA, 849 bp, Staphylococcus haemolyticus
gtgaagagttattatcaatattaccgattcatattaaacaaggaggagattcataagatggatttatttactagaaaaggtggtttatccttacattacaatacgatgggtgagggatatcctgttgtcttagtacatacggcatatgaaaatgcttctatatttcaaaatttagcaaaagaattggcaaaatcttttcaagtagttttactagatttgagaggacatggctattcagataaaccaagacaaattgatttcaaagaatttgccgatgatatcatacaattactagattatttgtatattgatgaatcagcattaataggtcatgaaatgggtgcagccataattgcggatttggcagaacgatatcctaattatgtgtcatccctcataatggtaacaccaacatctattgagggtgaattacctgaagaacgtttattcagaaaatattcacataaaattagaaactgggatgacgaaaaacaaaataagtttttagaaaagcatcgttattataagccgagaaaagttgataagtttttaaaacatgttgaggatacgaacgtaatttctacaaaggaggagacacaagcgattgaagatgtgttcaaagaaactgcgatttcaagcatatttaaacatgtaacgaaaccgacgttaattattgcgggagaacatggtgagcgtattacaacacttgaatctaaagaagtagctgatttagttaaagagtcacaatttgatgtgtatgctcaatcaagtttatatccttttgaggaagagaaagataagtttattaaagatgtaacaccatttattaagaaatatatgcctgagcac

SEQ ID NO: 35537 - DNA, 792 bp, Staphylococcus haemolyticus
atgaatattaaacatttcatggcagtaatcgtcacattagttattattttagcaggatgttcaaattctggtagcaatgatagtggcaataaatcatctgattcaaataaaaaagataatgacaaaaagcaagaattacaaatttcggctgcagcgagcttaggtgatgttagtaaagcattagaaaaagaatttaaaaaagatcacaaaaatgttgatgtaagctttaactatggtggttcaggcgcattaagacaacagattgaaaaaggtgctccagctgacgtattcatgtctgcaaatactaaagatgttgacatgttaaaagacaaagataaagcacatgatacatataaatacgctcataacaaacttgtcttagtcggagataaaaatagtgataaatcatcagttaaagatttaaaagataatgaaaaattagcgattggtgaagttaaaacagttccagcaggtaaatatgcgaaacaatacttagaagatcaaggtttatacggcgaagttaaagataatttagtttacgctaaagacgttaaacaagtattaaattatgttgaaaaaggcaacgctgaaatgggctttgtttatgaaactgatttatatactgataaaaagaaaacagataaagtaaacgaaattaaagaagctaagcttaaaaaaccaatcacttacgaagcaggtgctacttcagataagaaacttgcaaaagagtggatggatttcttaaaatctaaaaaagcaaaagatatcttgaaagaatatcattttgaaatt

SEQ ID NO: 35538 - DNA, 1002 bp, Staphylococcus haemolyticus
atgacgagtgaacgttattctagacaaactttgtttaaaggaataggatacgaaggacaacagaaaattagtcaaaaacatgtactcattgttggtatgggagcgttaggaactcatgttgctgagggtctcgttcgtgcgggaatcaaaacactttcaattgtagatagagattatattgaatttagcaatttacaacgacaaacattatttactgaagaagatgctaatactatgttgcctaaagttgtagcagcggaacgccatttaaaagcattgcgccatgacttgaaactaaatacttttatcacacatgtcgattattattttttagataagtatgctaaacatgtagatcttattattgatgcgacagataattttgaaacaagacaattaattaatgactttgcttttaaagagaaagtaccttggatatatggtggtgtcgtgcagagtacttatatagaagcagcatttattccaggagagacaccttgttttaactgtttaatgcctcaactaccagcaattaatttaacttgtgacactgtaggtgttatacaacctgctgttacgatgactacaagttttcaattgcgagatgcctttaaattattaactgagcaatcagtgcctactaaattaacttatggagatatatgggatggtcaacattttacatttggttttagccgtatgtttagaaaagagtgtccaacatgtggttcaaatccatcctttccttatttaaataaacagcatacattatatgcaacgttatgtggtagagatacagtacaatatgataatgataaaatttcccaggaaatggtacgtgaatttcttaagcaacatcaccttaattatcgagaaaacaaatatatgataatgtttgaatataaaggacatcgaattgttagttttgagggtggacgaatgcttatacatggtacaacgaagacgttagatgccattcatttaatcaatcaattattcgga

SEQ ID NO: 35539 - DNA, 513 bp, Staphylococcus haemolyticus
gtggaattaatgcatcaacatgatcatgcgaaagtagatagaatgattcaatgtgcagttttgactgtatctgatactagggataaagagacggataaaggtggtcaacttgtccaaactttaatacaagatatcaatgtcgaagtattaaattcaaactatgctattgtcaaagatgataaagtagctattcaatctcaaattgaacaatggttggcatctgatattgatgtcataattacaactggtggaactggcattgcacaaagagatgttacgatagaagcggttaagccacttttggataaagaaatcgaaggttttggagaattatttagatatttaagttacacagaggatgtcggaactaaagcattgttatctagagcagtcgctggttcagtgaagaacaaattaatttatactctaccaggatctactggagctgtgaaattggcaattgaaaagttaatcaagccagaattaaaccatatgttgcatgaattgaataaa

SEQ ID NO: 35540 - DNA, 1257 bp, Staphylococcus haemolyticus
atgtcagttgaaaaaagaaacccaataccagttaaagaagcgataaatcgtgttgttcaacaggatatatatttgaatactgcagaagtgaagttagaagatagcttaggatatgtacttgcggaggatattgttgcaacttatgatattcctcgttttaataaatcaccttatgacgggtttgctattcgaagtaaagattctgctggtgcatactcagaaaatcgtaaacaatttaaagtgattgatcatataggcgcaggttcagtttcagagaaaatactaggtcaaaatgaagcagtacgtattatgacaggagcccaaattccagaaggtgcagatgcagtagtcatgtttgaacaaacagttgaggatggagatacgtttacaatacgtaagtcatttgaagcaaatgaaaatgtatctcttaagggtgaagaaacaacaacaggtgatattgtcttgaaaaaaggtcaagtcattaatccaggtgcaatagccgttcttgcaacatatggttactctaaagttcctgtgacacaacgcccaagtattgcagtcattgcaactggtagtgagctattagatgtggatgatgaattacaaccaggtaaaatacgcaattcaaatggtccaatgatcaaagcactatctgaaaaagctggattaaacgttgaagcatataaaattcaacaagatgatttgcaaagtagtatttcagttgtcaaagatgccatgtcaaaacatgacatcgtaattactacgggtggcgtttctgttggagattttgactatctacctgaaatttacaaagctgtaaatgcagaggtattatttaataaagttgcaatgagaccaggtagtgtaacaaccgtagctgttgcaaatgggcaatatttatttggtttatcaggtaatccatcagcttgtttcactggatttgaattatttgtcaaacctgcgattcaacatatgatgggggcaactgcctattaccctcaagttgtaaaagctaccttaatggaagattttactaaggcgaatccctttactcgttttattcgagcatctgctacattttcacagagtggtgcgacagtagtgccatctggatttaataaatctggtgcagtagtagcaattgcacatagcaattcaatgattatgttgccagggggtactagaggatttaaagcaggtcatacagttaatgttattttaacagaatcgaatgtctatgaaacggaaatgacacta

SEQ ID NO: 35541 - DNA, 1020 bp, Staphylococcus haemolyticus
atggttgcacaaatcaaagataaattaggtcgacccattcgcgatttgcgtatctcagtaacagaccgttgcaattttagatgtgactattgcatgcctaaagaaatcttcggtgatgactatgtgttcctacctaaagatgagttattaacgtttgaagaaatggttagaatcgcgaaagtttatgcagaacttggcgtgaaaaagttacgtataactggtggcgaaccactacttagacgaaatttatatcaacttatagctgagttaaatcaaattgatggtattgaagatatcggtatgaccactaatggtctattattaaaaaaacatggacaaaaattatacgatgccggtttgcgtcgcattaatgttagtttagatgccattgataacgaagtgttccaagcgataaataatcgcaatatcaaagcaactaccattctagatcaaattgattatgccgtttctattggtttccatgttaaagtaaacgttgtcattcaaaaaggtattaatgatgatcaaattattccaatggtagattactttaaagataagaatattgaaatcagatttatcgagttcatggatgtaggtaatgataatggttgggattttagtaaagttgtaactaaaaatgagatgctagatatgattgagtctcattttgatattgaaccagtccccccaaaatatttcggagaagtagcgaagtactataagcacaaagataatggcgctcaatttggtttaattacaagtgtgtcagcatcattttgttctacttgcacgagagcacgattatcatctgatggaaaattttatgggtgtttattcagcactgttgagggctttaatattaaatcatttatacgatcaggcgtaaccgatgatgaattaagagaacaacttataaccttgtggaatgttcgagatgatcgttattcagatgaacgtacagagcaaacggttaaaaatcgacaacgcaagaaaattaatatgaactacatcggtggt

SEQ ID NO: 35542 - DNA, 1329 bp, Staphylococcus haemolyticus
atgactcatattcaattagattatggaaaagcattggaattctttggtcaacatgaaattgatcaacaacaagatatcgttaaaacaattcataaaacgattcacgaaggtactggtgcaggtagtgatttcttaggttgggtgaatcttccggaagactatgataagaaagaattttcaagaattgtggaagcatcaaaacgtataaaatctaattcagatgtattagtagtaattggtatcggaggttcatatttaggtgcgcgtgctgctattgaaatgttaacttcatcattccgcaattcaaatgaataccctgaaattgtattcgtgggtaatcatttatcatcaacgtacactaaagaattagtagactacttatcagataaagatttttcagtaaatgttatttctaaatctggtacaactacagaaccagcagtagcatttagattatttaaacaattagttgaagataagtatggtaaagcagaagctaaaaaacgtatctttgctactacagataaagcaaaaggtgcattaaaacaattagcagataatgaaggttatgaaacgtttgtagtaccagatgatgttggtggtcgttattctgtattaactgctgtgggtctattaccgattgcaacagctggcataaatattgaatcaattatgattggtgcaaacaaagcgcgtaaagaattatcatcagataaattagatgaaaatattgcttatcaatatgcgacaatccgtaatattttatatagcaaaggatacactactgaaatgttgattaattatgaaccgtcaatgcaatatttcaatgagtggtggaaacaattatatggtgagtctgaaggtaaagactttaaaggtatatatccatctagtgcaaactatacaactgacttacattcattaggtcaatatgtccaagaaggacgtcgtttcttatttgaaacagttgtaaaagtaaacaaccctaaacacgatattacaattgaagaagatagtgatgatttagatggattaaattacttagcaggtaaaacaattgatgaagttaatactaaagcatttgaaggtacactattagctcacactgatggtggcgttcctaatgttgttgtgaatattccacgcttagacgaagaaacatttggttatgttgtatacttctttgaattagcgtgtgcaatgagtggatatcaattaggtgttaatccatttaaccaacctggagtagaagcatacaaacaaaacatgtttgcattattaggtaaacctggatttgaagataagaagaaagaattagaagagcgttta

SEQ ID NO: 35543 - DNA, 1407 bp, Staphylococcus haemolyticus
atgcatatcttcatggaggttatagtaatgagtagtaaagcatggggtggccgttttcaacaacagccggaagattgggtagatgaatttaatgcttccatagatttcgaccaaacattgttggatgaagatgtccaaggtagtattgcacatgctaccatgttagctaatcaaaatatcatttcacaagatgataaagacgcaatcattaatggcttaaaagagattcaacaagactttcataatgggaagcttgcgtttaaaaaatcgcttgaagatattcatttaaacattgaacatgaactcattcaacgtgtcggtgacgctggaggtaagttgcatacaggtcgtagtagaaatgaccaagtggctactgacttgcatctatacgtaaaaaaagaagtacttgaaattcaagaccttattcgatcattccaaacatccattcttaaactagctcaatcacatgtggatacaatcatgccaggatatacacacttacaacgtgctcaaccgatttcttttgcacaccatgttatgacatatttctggatgctagaaagagactattcacgtttcgttgatagtatgaaacgtattgatatttcaccattaggtgcagctgcattaagtggtacaacacaccctatcgatagacacgaaacgcaacaattattagaatttagttcagtttatgagaatagtttagatgcagtgagtgatcgtgattacattattgaaactttgcataatatttcattaactatgattcatttatcacgttttgctgaagaaattatcttttggtctacggatgaagcgaaattcattaccctatctgatgctttctctacaggttcatctattatgcctcagaagaagaatccagatatggcagaacttattcgtggtaaagtaggacgtgctacaggacatttaatgagcatgcttgtaacattaaaagggttaccacttgcatataataaagacttacaagaagataaagaaggtttatttgactcagtacgtactataaaaggttcactacgaatttttgaaggtatgttagatacaatgaccgttaatacagaccgtttaaacgaaactgtgcatcaagacttttcaaatgcaacggaattagctgattatttagtagctaaagatgtaccatttagaaaggcgcacgaaattgttggtaaaattgtctttgagtgcattcaacaaggtatctatttattagatgtacctcttgaacgttacaaagaattaaattcaaatatagatcaagatgtttatgattatcttaaaccggaaaactgtcttagccgaagaaaaagttatggttcaacaggccaagacgcagtacgtcatcaactgaaagttgctgaaaaattattaaataacgat

SEQ ID NO: 35544 - DNA, 969 bp, Staphylococcus haemolyticus
atgagtttgttgaaagcaagtaataaaggtatcatttcatgtttaacagtagccagtttgagtctagcgattatacatacgcccgttgaagcaagtggtggtgaatcatcaaacactacaactacgaacctaactaatgcatctaaaactcaaaacaatcatactaattggtcaagaaatttaacaggagagcgccatactactattgcacatcgtggtgctagtggctatgcaccagagcatacttttgcagcgtacgataaaagtcataatgaattaggtgcctcatatattgaaatagatttacaacgcactaaagatggtcatttagttgcaatgcatgacgaaacagttgatcgtacaacaaacggctcaggacgtgtcgaggattatacattagctgaattaaagaaattagatgcaggttcatcatttaatgaacaaaatcctcaattagccaaagatagttataaaggtgctacagttccaacattagatgaaattttgacacgttatggtacagatgccaattattatattgaaacaaagcagcctgatgtttatcctggcatggaacaacaactgctagacacactaaaccgacataacatgcttacttcaaattctctagaaaatggacatgtcctggtacaatcattttcagaagctagcttattaaaaatgcatcaattaaattcaaatgtgccattaatacgcctattggataaaggtgaattagctcaacaaagtgaagcagatttacaacgtattcgttcttatgcaattggtgtcggtcctgaatatagcgatttaaatgcacaaaatacagctcatttaaaagacttaggttttctcgtacatccatttacggtgaatgaaactgccgatatgcagcgcttgaaccaatacggtgttgatggtgtctttacaaactatgctgatcaatataaagcaataagttcacaaaag

SEQ ID NO: 35545 - DNA, 1248 bp, Staphylococcus haemolyticus
gtgatcatgactgagaataataatttagtgacttctacacaaagtatcattaaagaagctttacacaaattgggatttgacgatggtatgtatgatttaatcaaagaaccattaagatttttacaagttcgtatcccagtacgcatggatgatggtactgttaaaacatttacaggttatcgtgctcaacataacgatgctgttggtccaactaaaggtggggttcgtttccatcctgaagtagatgaagaagaagttaaagcattatctatgtggatgactttaaaatgcggtattgttaatttaccatacggtggtggtaaaggtggtatcgtatgtgacccacgtcaaatgagtattcatgaagttgaacgtttatctcgtggatatgtacgtgcaatttctcaattcgttggtcctacaaaagatattccagcaccagacgtatttactaactctcaaattatggcttggatgatggatgaatatagtgctttagataaatttaactcacctggttttattacaggtaaacctatcgtattaggtggttcacaaggacgcgatcgttcaactgcattgggcgtagtgattgctattgaacaagcagctaaacgtcgtggtaaggaaatcaaaggttctcgcgtagttatccaaggatttggtaatgcaggtagtttcctagctaaattcttatatgacatgggtgcaaaagtcgtaggaatttctgatgcttatggtgcattacatgatccagaaggtttagatatcgattatttattagatcgtcgtgatagtttcggtacagttacaaacttattcgataacacaatttctaacaaagaattgttcgagttagattgtgacattctagtaccagctgcgatttctaaccaaatcactgaagataatgcgcatgatattaaagccgatattattgttgaagcggctaacggacctactacacctgaagctacacgaattttaactgaacgtggtatcttattggtaccagacgtactagcaagtgctggtggtgtaacagtttcatacttcgaatgggtgcaaaataaccaaggttattattggtctgaagaggaagttaacgataaattacgtgaaaaattagtagatgcgtttgatacaatctacgaattagcacaaaatagaaaaattgacatgagactagcagcttatattgtaggtattaaacgtactgcagaagcagctcgctaccgtggttgggca

SEQ ID NO: 35546 - DNA, 1188 bp, Staphylococcus haemolyticus
atgactaagtcagaacaaatcattgaattaacaaaccattatggagctcaaaactacgtaccactaccaatcgttgttgcagaagcggaaggtatttgggtaactgatccagaaggtaataaatatatggatatgctttcagcttattcagctgttaaccaaggacaccgtcatcctaaaattattcaagcacttaaagatcaagctgacaaagtaactttggtttctcgtgcttttcatagtgataatttaggtgaatggtatgaaaaagtttgtaaattatcaggtaaagataaagcactaccaatgaatactggtgcggaagcagttgaaactgcattgaaagctgcacgtcgttgggcatatgatgtaaaaggtcttgaaccagataaagctgaaattatcgcatttaatggtaacttccatggtcgtactatggcgccagtatctttatcatcagaagctgagtaccaacgtggttatggtccgttattagatggtttccgcaaagtagatttcggtgatgttgataaattaaaagaagctattaatgagaatacagctgctattttagttgaaccgattcaaggtgaagcaggtattaatatcccacctgaaggttatttaaaagctatcagagaattatgtgatgaacataatattctatttattgccgatgaaattcaagctggtttaggacgttctggtaaattatttgctactgattgggataatgttaaacctgatgtttatattttaggaaaagcgcttggtggcggcgcactacctatttctgtagtcttagctgataacgaagtactggatgtatttacacctggttcacacggttctacgtttggtggtaatccattagcttgtgccgtttcaatcgctgcgttagatgtcatattagatgaagatttacctggccgttcacatgaattaggggaatactttaaatctgaattacaaaaaattaatcacccagctattaaagaagtacgtggtcgtggtctatttattggtgttgaattacatgaaaatgctagacctttctgtgaagcattaaaagaaaaaggactattatgtaaagaaactcatgatacggtgattcgatttgctccacctttagttatttctaaagaagaattagatgatgcattagatagaatcagaagcgtatttaat

SEQ ID NO: 35547 - DNA, 897 bp, Staphylococcus haemolyticus
atgaagcaattcttaataactggcggaactggaatggtaggaagtcaattagtaaatgaattaaagaatcgcgatgtacatattacaatactaactcgtagtgataagcaaagtgatgatccaaagatttcttatgttaattggtcaaaagacggttggatgtccctagttccagatatagatgttgttattaatttggctggtgcaactttaaataaacgctggacaccatcatataaacaattgattatgactagtcgtattcagtcaactcaagcacttgtcgatttatttagcgaccgagaacataaacctgaagtgctctttaatgctagtgcgatgggttattatccacctagtttatatcatacttatacagaaaaatatcaaacacatccgtttgattttctatctgatgtggtttatcagtgggaacgttttgctaaacgctttgagtcatttggtacgcgagtaatacttggcagatttagcatgattttatctgatgatggaggcgccttacagacgatgaagcttccttataaattcttcgtaggtggtaaattaggatctggattccaatggtattcatggattcacattaatgacttagtacgcgcaattctattcacaatcgataatcctaaagcaaaaggtccattcaatatggctgcaccaattgctgaacgccaaaatttatttgggtacacacttgcgcgtgtcatgcatcgccctcacgaaacgtgggtgccatcattcctaatgcgattagcacttggtgaaatgtctacggttgttttagatacgcaaaaggtattaccaaataaactggatgcgctcggttttacatttaactatcctaatctaaaaattgctttcgaagatttaatagatgca

SEQ ID NO: 35548 - DNA, 1131 bp, Staphylococcus haemolyticus
atgaggaggagtaatatgtctgaccctacactatttgattattcaatgattaaaggtactgtagatgctattttatttcaaaataatgataatttctatacagtcattaaagtggaaacaattgaaactaatgaatcatttggtaatttaccaacagttgtagggttctttccaaatattgtggaaggagatgtatacacttttaaaggacaagtggtagagcacccacgttatggcaagcaattgaaagccgacacttttgaaaaagaggtccctcaaactaaggatgctattattacatatttatcaagtgacttattcaaaggtataggtaaaaaaactgctcaaaatattgtaaatacacttggtgaaaatgcgataaatgatattatgacagacgcatcagttttagagaaggtttcaaatttaccgaaaaagaaacaaaagcaaattgctgatcaaattaatgccaatcaagagtccgaaaaaattatgattcgattacatgatttaggcttcggacctaaattatcaatggcgatttatcaattttaccaatccgagactttaaatgtgctcgaaaataacccttatcaactcgtttatgatattaaaggaattggttttaataaagctgatactttagctagaaataatggcatcagttttaatgatccagaacgattgaaagcaggattattatatacgctagaagaagaatgtataaaacaaggtcacacctatttatcactagattatgccattgaagtgacattagacatgctaatggatgctcattccagtgatagtatcgattcaaaacagcttgaaaatattctcgaattattaaatgaggaacaaaaaattattgtaaacaatgagcgagtcgccattcctagtctttattactccgaactcaaaagtgttcaaaatttatatcgaattaaaacatacaaacataagctaaaagaaatagaacaatctgatttacagatacatataggggatatagagactagtaataatgtacattatgcaccatctcaagaagaggccttacaaactgcaattaattctaaaattatgcttttaaccggtggtcctggtacaggtaataacacagtaatcaag

SEQ ID NO: 35549 - DNA, 1011 bp, Staphylococcus haemolyticus
gtgaaggacttgattaaaattcaacagaagttgatacctgatctaattgataaaatgtatcgacgcttttctatcttaactactatctcaaataatcaaccagtaggtagaagaagtttgagtgagcacatggatattaccgaacgtgtcctaagatctgaaactgatatgttgaaaaagcaagatttgattcaagttaaatcgactggaatggaaatcactgaagaaggcaagtcagttttgaatcagcttaatgaatatttcaatatttatactgatgataatcaattagctgatcaaattaagtcaacttttggtattaaagaagttcacgtaatacctggtgatgcagatgctcaagaaaatgttaaatctgaaatgggaagacaagctggacaattattggaaaacatcttatatgaagacgctattgtttcggtaacaggtggttcaacaatggcaaatgtaagccgagccatgcatcttctaccattcaatgtatttttcgtaccagctcgtggtggccttggtgagaatgttatttatcaagctaacacgatttcagcgagcatggcgcaacaaacaggtggttattatacaacactttatgtaccagataatgtaagtgaatcaacgtataatacacttctgatggaaccctctgtggttcatacattagataaaattaaacaagcaaatataacaattcacggtattggtgatgcgctgaagatggcgtatcgtagacaatcgtcagaacaggtgattgaaagccttcaacatcatcaagccgtcgcagaagctttcggttactattttgacactcaaggaaatgtagtctataaagtaaagacaataggactacaacttgaagatttagaaaccaaagattttattttcgctgttgcaggtggacaatctaaaggtgaagcaattaaagcttacttaagtattgcacctaaaaatacagttttaattactgatgaagcagcagcaaaggtaatattaaat

SEQ ID NO: 35550 - DNA, 1005 bp, Staphylococcus haemolyticus
atggcagtaaaagtagcaattaatggttttggtagaattggtcgtttagcatttagaagaattcaagacgtagaaggtattgaagtagttgcagtaaacgacttaacagacgacgaaatgttagctcatttattaaaatatgacactatgcaaggtcgtttcacaggagaagttgaagttgttgatggtggtttccgcgtaaatggtaaagaagttaaatcatacgaagaaccagatgcaagcaaattaccttggggcgatttagatatcgacgtagtattagaatgtactggtttctatacagataaagaaaaagcagaagcacacatcaatgcaggtgctaaaaaagtattaatctctgcaccagctcaaggtgatgtaaaaacaatcgtattcaacactaaccacaatgacttagatggttcagaaacagttgtttcaggtgcatcatgtactactaactcattagcaccagttgctaaagtattaagtgatgaatttggtttagttgaaggtttaatgacaactattcacgcatacactggtgaccaaatgactcaagacggtccacataaaaaaggtgacaaacgtcgtgcacgtgcagcagctcaaaacatcgtacctaactcaacaggtgctgcaaaagcaatcggtaaagttattcctgaaatcgatggtaaattagacggtggtgctcaacgtgtaccagttgctacaggttcattaactgaagtgacagttgtattagaaaaagacgttactgttgaagacgttaacaaagcaatgaaaaacgcttcaaacgaatcatttggttacactgaagacgaaatcgtttcttctgacgtagttggcatgacttacggttcattattcgatgctactcaaactcgtgtaatgtctgttggtgaccgtcaattagttaaagttgcagcttggtatgacaacgaaatgtcttacactgctcaattagttcgtactttagaatatttagcagaattatctaaa

SEQ ID NO: 35551 - DNA, 1188 bp, Staphylococcus haemolyticus
atggcaaagaaaattgtttctgatttagatttaaaagggaaagttgttttagaacgtgctgatttcaatgtacctttaaaagacggtaagatcacaaatgataaccgtattgttcaggctttaccaacaattaaatatatcatcgaacaaggtggtaaattagtactattttctcacttaggaaaagttaaacaagaaagtgataaagaaggtcttacattaaaacctgttgctgatgctttatctgaaaaattaggtaaagaagttactttcgtacctgaaacacgtggtgaaaaattagaatcagctatcaaaaacttaagtgaaggcgatgtattattagttgaaaatacacgtttcgaagatttagatggaaaaaaagaatctaaaaatgattctaaattaggtaaatattgggcatcactaggcgatgtatttgtaaatgatgctttcggtacagctcaccgtgaacatgcatctaacgttggtatttcaactcatttagaaacagcggctggttatttaatggaaaaagaaattaaatttatcggtggtgttgttaacgacccacataaaccagtagttgcaattttaggtggcgcaaaagtatctgacaaaattggtgttattaaaaacttagtaaatatcgctgataaaattcttattggtggtggaatggcgtatactttcttaaaagcacaaggtaaagaaattggtttatctttactagaagaagacaaaatcgactttgctaaagaattacttgaaagtaacggcgatcaaattgttttaccagtagatgcgaaagttgcgaaagaattctcaaatgacgctgaaattactgaagtatcaattgataacatcccttctgatcaagaagcaatggacgttggccctaaaactgttgaattattctctaaagaattagaaggtgcacatacagtagtatggaatggacctatgggtgtatttgaatttagtaactttgctcaaggtacaatcggtgtatgtaaagccattgctaacttaaaagacgctactacaattatcggtggtggtgactcagcagctgctgcaatttctttaggttttgaagatgacttcacacacatttctactggcggcggtgcatcattagaataccttgaaggtattgaattaccaggaattaaagcaattaatgataaa

SEQ ID NO: 35552 - DNA, 523 bp, Staphylococcus haemolyticus
atgccaattattacagatgtttatgctcgcgaagtcttagactcacgtggtaacccaacagttgaagttgaagtattaactgaaagcggtgctttcggtcgtgcattagtgccatcaggtgcttctacaggtgaacacgaagcagttgaattacgtgatggagataaatcacgttatagcggtaaaggtgttactaaagctgttgaaaatgttaacgaaattattgcaccagaaatcgttgaaggtgaattttcagtattagatcaagtatctattgataaaatgatgattcaattagacggtacacctaacaaaggtaaattaggtgcaaacgctattttaggtgtatctatcgcagttgcacgtgcagcagcagacttattaggtcaacctttatacaaatatttaggtggattcaacggtaaacaattaccagttcctatgatgaacatcgttaatggtggttctcactcagacgcaccaatcgcattccaagaattcatgattttaccaacaggtgcag

SEQ ID NO: 35553 - DNA, 2166 bp, Staphylococcus haemolyticus
ttgaataaattatcgattattattacgtattttaataatgaagattatattagtgagtgtattcacagtttaaaaagccagagaaatcaagattttgacattattgttgtcgatgatggttcaactgatcgctcaacagaaatcttacaagaagcattaaaatcatatgataaagacgttcacttcattcaattgcaagagaatactggacacgcacatgcacgaaatgtagctttggaacaagcacatggtcaatacgtactattcctagatgccgatgatcaattggcctcatatgctgttgattactatcttcaacatgtgaatggtttagatacactgattgcaccaattcataaatttagaagtcaacgaccacagtatgtagataaagataaagtacgtttgcaatatgcttctcatcaaaaaagtccaaatgcaattttgagaaaagaatcagcatgtaatattctatttaaaaatgccattattaaagcgcatcagattcaatttaatgaatcattagatatttatgcagatacgtcatttgtgcttgagtatttaaaatatgcggagcgttttgttagaattaccaacttcccattctattatcgtggtgaggtatacgatccattttatggtaatacattaagtgatcaagattttacaaataaatttgaagatcatgttaatagtttctttgatgctatgcaaagaacgaatgataagcgaattaaaaattttctcattcaacgaatgaaaaatgaaattaaaagtggatttgatcctgcacttagagatataaaatctcgatatgtgtcacttgaagatgcgcttattaaaattgttaaagctttaaaatggaacatcctaaaagatgggaaagtattatataatttagaaatattattcttatcaatggatgatgttgaaaatgccaaatatgttaatgacttacgtaataaaacacgtttagttaaaaatattgtgttaaatagcaagatgaaagaacgctcaaaatatcaactgagtgataatgaagacttagttgacccgaacacaattgtatttgaagcgtttggtggtaaaaattatagcgatagtcctaaatatatttatgaatacatgcaaaaacattatcctcatttaaattatatttgggtcttttcaaaaccagaaaataacaatattccaggtaatgctactaaagttaaaaagggatctcaagcttattatgatgcctatgctaaagcgaaatattgggttacaaatgctagattacctttatatttaaataaaaaagagaatcaaatgtatatccaaacttggcatggaacaccattaaaacgtttagctaatgatatgaaagtggttagaatgcctggcacgacaactgcaaactataagaagaacttctatgctgaagcatcacgttgggatcgcttagtatcaccaaatagatactcttctgatatttttaaatctgcattttggatggatgaagaccgtatttgggagattggttatccgagaaatgatgtattagttaaccgtcaaaatgacactgaatatattgaacaaattaagcgtgacttgaatttacctgcagataagaaagttatcatgtatgctccaacttggagagacgatgagtttgtgaaaaagggacaatacttatttgatttgaaaattaatttagctaatcttcaaaaagaaataggagatgagtatgtcatcttattaagaatgcattatctaattgctaatgctttagatttacatggatatgatgactttgcaattgatgtatcaaattataacgacatttcggagttatacttaatttctgatgcattaattactgattattcttctgttatgtttgactttggtatcttgaagcgtccacaatttttctttgcatacgatatagaaaaatatgataaaggacttcgtggtttctacatggattacatgaacgacctaccaggtgaaatcattacagacgagtttaaattagctgaagagttaaaacaaattgatcaacataaagtgaaatatcaagataagatagaagcattttataatgatttttgttctatagaaaatggaaaagcatctcaatatattggtgattatatttataatgatattgagaaaaattca

SEQ ID NO: 35554 - DNA, 795 bp, Staphylococcus haemolyticus
atgaatcgtttaaaagcgcaacaagtggaaattggatatggggatcattcgattattaacaatttagatgtagaaatacctgatggcaaggttacgtctatcattgggcctaatggttgtgggaaatctacattattaaaagcattgtcacgcttattaacaatcaaaaatggtgaaattcaattagatggtcaaaatattcatacgcaatcaactaaagaaattgctaaaaaaattgctatattaccacaaacaccagaagtagcagatggtcttacagtaggagaattagtatcttatggtcgttttccacatcaaaaagggttcggccgtctatctgctgaagataaaaaagagattgattgggctttaaatgttactggcacatctgaatttagacatcgttctattaatgatttaagtggtggtcagcgtcaacgagtttggattgcaatggcattggctcaaaaaacagacattattttcctagatgaacccacaacatatttagatatctcacatcaattagaaattttagaattagttcaacaattaaataaagaacaaggttgtaccattattatggtcttacacgacattaaccaggctattcgtttttctgatcatcttatcgcaatgaagaaaggtgaaatcattgcttgtggcgctactgaagacgtgttgactaaagatattctagaaaaagtgtttaatatcgatgtcgtacttagtacggaccctcgtacaggtaaaccactgttagtgacatatgacttattcgaacgtaattattca

SEQ ID NO: 35555 - DNA, 1014 bp, Staphylococcus haemolyticus
atgattcatcctaaattaagacgaaaacaaatcgttactttagtaattttttcaatattattattagccgcatgtacatggagtgtgtcttcaggagaatataaaattccggttgatcatttttttaagacgctcataggtcaaggtgaatattatgatcaattaatcttaatggaatttcgtttcccaagaatgttaattactattttagcaggtgctgcgttaagtttaagtggcgctattattcaaagtgtcactaagaatccaattgcggagccaggtattttaggtattaatgctggcggtggtttcgcaatagcattatttatttcaataggacaaattaaccctgataattttgtgtatgtgttaccagtgattagtgtcattggtggtgtagctactgcaattgttatctttttatttagtgtgaataagaaagatggcattacaccttcaagtatggtgctaattggtgtaggcatgcagacagccttatatggtggttctattacgcttatgtctaaatttaatgaagatcagtcagaatttatagctacttggtttgctggtaatatttggggcgatgactggacatttgtcattgcaactattccatggctaatcattataattccatttctattatataaatctaatgtattgaatttaattaatacacatgaacacattgctaaaggtctcggtgttaagattgaaaaagaacgtgtagttctattctttattgctgttgttttatcatcaattgccgtggctgttgcaggtgctattgcatttattggtttaatggggccacatattgcaaaatcaattattgggccacgtcatcaactctttttaccaatttcaattatcgtaggtgctttcttactcgttttatcagatactattggtaaagtcatccttgaaccgacaggggtacctgctggtattgtagttgctattataggcgcaccttatttcatttatttaatgtataaatctaagagtatt

SEQ ID NO: 35556 - DNA, 1373 bp, Staphylococcus haemolyticus
gaaacgataactagtatttcaacaccttgggtgaaggggcaatcggtattgtccgtttatctggaccgcaagccgttgaaattggagataagctatataaaggttagaaaaagttagaagacgtagattcacatacgattaattatggtcatatcgtagatcctgaaaaaatgaagttgttgaagaagttatgatatctgtgctaagagcaccaagaacatttacacgcggacataattgaaattaattgtcacggtggtattttaacgattaatcgaatattagaacttacaatgacgcatggcgcaagaatggcagagccaggtgaatatacaaagcgtgcattcttgaacgggcgtatcgatttatcacaagctgaagctgttatggactttattcgttctaaaacagatcgtgcttctaaagttgccatgaaccaaatcgaagggagactaagtgatttaattaaacgacaacgtcaatccattttagaaattctcgcgcaagtagaagtgaatattgattatcccgaatacgacgatgttgaagatgctacaactgagttcctattagagcaatctaaaaagattaaaaacgaaattaatctattattagagactggcgcacaaggtaaaattatgagagagggtctttcaaccgttatcgttggtaaaccaaatgtagggaaatcgtcaatgctaaataaccttattcaagataataaagccatcgtaactgaagttgcaggtacaactcgtgacgttttagaagaatacgtcaatgttagaggtgtaccattaagattagtagatactgcaggtattcgtgacactgaagatatcgttgaaaaaattggtgtcgaacgttcacgtaaagccttaagtgaagcagatctaattttatttgtattaaataacaatgagccattaacacaagaagatcgtacattatatgaagttattaaaaatgaagatgccattgtaattgttaacaaaactgatttagagcaaaacttagatataaatgaagtaaaagaaatgattggtgatacaccacttatccaaacatctatgcttaaacaagaaggtattgatcaactagaattacaaatacgagatttattctttggtggcgatgttcaaaaccaagatatgacttatgtatctaattcaagacatatctctttattaaagcaagctagaaatgccattcaagatgcgattgatgcagctgaatcaggtattcctatggatatggttcaaattgacttaacgcgtacatgggaattactaggtgaaattattggtgaatctgctagtgatgaattgattgatcaactatttagtcaattctgcttaggaaaataatagttt

SEQ ID NO: 35557 - DNA, 1875 bp, Staphylococcus haemolyticus
gtggttcaagaatatgatgtaatcgtcattggtgctggacatgcaggtattgaagcaggtttggcatctgcaagacgtggtgcaaaaacactaatgctaacaattaatctagataatattgcattcatgccatgtaacccatcagtaggtggtccagcgaaaggtattgtcgttcgagaaattgacgcattaggtggacaaatggctaaagcgattgataaaacacatatccaaatgcgtatgttaaatactggtaaaggaccagcagtacgtgcgttacgtgctcaagcagacaaagtgttatatcaacaagaaatgaaacgtgtcattgaagatgaagataatttagacatcatgcaaggtatggtggatgaattaattattgaagacaatgaagtaaaaggtgtccgcacaaatatcggtactgaatatcgcgctcaagcggttgttattacgacaggtacattcttacgtggtgaaataatcttaggtaacatgaaatattcaagtggtccaaatcatcaacttccatctatcacgctagctgataatttaagagaattagggtttgaagttgtgcgctttaaaacgggtacacctccacgtgtaaacgcgaaaacaattgattattctaagacggaaattcaacctggtgatgatgtgggtcgtgcatttagttttgaaactacagaatatatcctagaccaattaccttgttggttaacatatactaatgatcgtacacataaagtcatcgatgataatctacatttatcagctatgtattcaggtatgatcaaaggaacaggtcctcgttattgtccatcaattgaagataaatttgtgcgtttcaatgataaacctagacatcaacttttcctagagcctgaaggtcgtaatacaaatgaagtttacgttcaaggcctttcaacaagtttaccagaacatgtacaacgtcaaatgttagaaacaattcctggtcttgaaaaggcagacatgatgcgtgcaggttatgccattgaatatgatgccattgtaccaacgcaattatggccaacattagaaactaaaatgattaaaaatttatacacagctggacaaatcaatggtacttcaggttatgaagaagcggctggacaaggtattatggcaggtatcaatgctgcaggtaaagtgcttggtaccggagagaaaatcttaagtcgttcagacgcatatatcggtgttttaattgatgacttagttacaaaaggtacgaatgaaccttaccgcttattaacatctcgtgcagaatatagattattactacgtcatgataatgctgacttgcgtttgacagatgtaggttatgaattaggtatgatttcggaagaacgttacgcgcgttttaatgaaaagcgtcaacaaattcaagatgaaatccaacgtttaactgatattcgtattaaaccaaatgaacacacacaatccgtcattgaggcaaatggtggttcacgtctaaaagatggcattctagcaattgatctattacgacgtcctgaaatgacatacaatacaatcttagaaattctagaagaaagtcatcaattacctgaagcggttgaagaacaagttgaaattcaaacgaaatatgaaggttatatcaataaatcattgcaacaagttgaaaaagttaaacgcatggaagagaaaaaaattccggaagacttagattatagtaaagtggatagtttagcgactgaagctcgtgaaaaattagctgaagttaaaccattgaatattgcacaagcatcacgaatctctggtgttaacccagcagacatctcaatcttacttgtttatttagagcaaggtaaattgcaaagggtgaaaaat

SEQ ID NO: 35558 - DNA, 720 bp, Staphylococcus haemolyticus
atgaacggcatagaatggctagctaaagaattaagtgaacatggaattgaattgtcagataaacaaaaagaacaatttcaaacatattatcgtttacttgtagaatggaatgagaaaatgaatctcacaagtattacagatgaacatgaagtttatttgaaacatttctatgattcaattacaccaagcttttattatgatttcaatcaacctttaaccatctgtgatgttggtgctggtgcaggttttccaagtattccattgaagattgtttaccctgaattgaaagtaaccattgtagattctttgaataaacgtattcaatttttaaatcatctagctgctgaacttggcttaactcaagttagctttgtacatgatcgcgctgaaacattcggtaaaggcgtaaacagagaaacgtatgacgtagttacagcacgtgcagtagccagacttacagtgttaagtgaattgtgccttcctttagttaaaaaaggtggtcagttcatcgcattgaagtcttctaaaggagaagaagaattagaagaagcacaatttgggattagtatattaggtggcgtctttagtgattcttatacatttgatttaccagaagatgctggtgaacgacaaatgattattatagataaacgtcgtcaaacatctaaaaaatatcctagaaaacctggtacgcctaataaatctcctttactagaaaat

SEQ ID NO: 35559 - DNA, 213 bp, Staphylococcus haemolyticus
gtggaaagtgttaatgttattaaaaaacaccaaaaaccaactcaattaaatcctgaaggtggaatcttagaaacagaggcagcaatccatgtttctaacgtacaattattagatcctaaaacaaacgaacctactcgtgttggttacaaatttgttgatggtaaaaaagttcgtatcgctaaaaaatctggcgaagaaatcaaaactaataat

SEQ ID NO: 35560 - DNA, 714 bp, Staphylococcus haemolyticus
ttggttgcgaatatattagtggcacatggcatgagaaaaggtgatcaaaataaagcgttgggagaattcttagatcgtttattaagtgatgaatcgtatgaatatgaattagcgtttattgaaagtgaagaaaagagtattgaaaaaacgattggtcgcttaataaagcaaggtgaaactcaatttaaagttgtacctcttttgatcttttcggcaatgcattatatcgtcgatgttcctgaaattttatcaaatatcaaaaaagatcatcctgaaataagttacgaaattagtgaaccgcttggtacgcatgactatatggtggatttagttgaaaaacgtattcaagatgttgaaatttctacctcctctaattatgcgattgtattaatcgcacatggtagcttctcatatacgaaagcacatgatgagttaaaggaatttagtgaaaaaatgaatcaacctgtacctatctattgtcgtacgctatatggtgacattacttttagaaatgacttggatcaactttcgaatgaatatgatgaacttattgtagtgccaatgtttttatatgatgggcgactagtaaataaagtaaaacgactcatttcagaaatggatatacagggtacgcttcacattacaccatctattaatttcgataacatattaaagagaattattagtgaacgtttaaagcaattaacatttaat

SEQ ID NO: 35561 - DNA, 2405 bp, Staphylococcus haemolyticus
aaacaaaaattagtgatgattggaaacggcatggcgggattaagaacgatagaagaaattctagagcgttcagattcacaatttgacattacaattattgggaaagaaccttatccaaactataacagaataatgttatcaaatatattacagaagaaaatgactgtagaagaaacaataatgaatccatatgaatggtatgaagagaacaacattcagctcatcgtcaacgacccagtagagacggttgatcgttcagcacaaacagtaacaacatcaaaaggtgttgaagtgaattatgacatttgtatatttgcaacaggctctagtgcattcgtattaccgatacctggatcagatttaccaagtgttataggttggagaacaatcgaagatactgaacgcatgattgaaatcgctaaaacgaaaaagaaagctgtcgttattggtggcggattattaggacttgaatgtgcacgtggtttaatggatcaaggtatggaagtaactgtattacacttagcagaatggcttatggaaatgcagttagaccgtaaagctggaggcatgcttaaagcagatttagaacgtcaaggtatgaatatcgagttacaagcgaactctaaagaaattattggtaaagatgatgtagaagcgattaaattggcagatggaagaataatcgaaacagacttagttgtcatggcagtcggtatccgtccatttactcaagtagcacgtgatgcaggtctagaagtaaatagaggtatcgttgtaaatgattatttacaaacatcagaccctaatatttatgcggttggcgaatgttcagagcatgacggcaaagtatatggcttagtcgcaccgctctatgaacaaggtaaagtgttagctgactacctaactggaaaagaaacagaagggtacaaaggttctacaactttcacttcattaaaagtgtctggttgtgatttatatagtgcgggacaaattgttgaaaatgaaaatgtccatggtattgaaattttcaacagtgtcgataatatttataaaaaagtctatttgagtgatggtcaagttgtcggagcagtattatatggtgatacagatgatggctcaagattctataatatgatgaaaaaacatgaatcattagaagactatacattagtatcattattgtacaaaggtggagaagaagcggtaacttctatcgctgatatgccagatgatgaaacgatttgtggttgtaacggtgtagataaaggtacgattgttaatgcgattacgactaaaggattaacttcagtggaagaagtaacgaaagcaactaaagcgggtaattcatgtggtaaatgtaaaggacaaattggcgagttattacaatgcacattaggtgatgactttgtagcagcgaaacctaccggaatttgtgcttgtactgatttaacacgtgatcaaattgttacgcaaataagagctaaaggactaaaaacatcaaaagaagtacgtcacgtactagactttaaagataaaaatggctgtccaaaatgtcgtccagcaataaactactatttaaatatggtatatccacatgaccatcaagatgaaaaagaatcacgcttcgcaaatgaacgttatcatgcaaacattcaaaatgatggtacattctctgttattccacaaatgcgtggaggcgtaacagatgctgaccaattaataagattaggtgaagttgcaaaaaaatacaatgtaccattagttaaagtaacaggctctcaacgtgtaggtttatatggattgaagaaagaagaattacctaagtatgggaagatttaggtatgcgttcagcttcagcatatggtaagaaaacacgttcagttaaaagttgtgtaggtaaagaattctgtcgattcggtactcaatacactacacgcttaggtattcgcttagaaaaaacattcgaatacattgacacaccacataaatttaaaatgggtgtatctggttgtccacgtagttgcgttgaatcaggagttaaagatttcggtgttatctcagtagaaaacggttatcaaatttacatcggtggtaatggaggtacagatgttacagttggtaaattattaactaccgttgaaactgaagatgaagttattcaattatgtggtgcgttaatgcagtattatcgtgaaacaggcatttatgcagaaagaactgcaccatggttaaatcgtttaggctttgaaaatgttaaagaagtactactggatcctgaacgtcaaaaagaattattcgatagaattatggatgctaaaaaagcgattgatggacatggcgaaccttgggaagcaatcgttgaagataaagaagctcgaaaaatctttgaagttgagagggtgtaa

SEQ ID NO: 35562 - DNA, 312 bp, Staphylococcus haemolyticus
atgaaatctatggaaaaagttaaagtaacgacattagaagaattaacaccattgattggaaaaaaagtgattgttgatggtaaagaaattggcattttcttaactgaaagtggagacattcatgcaattaataatatttgtcctcacaaacaagggccattatcagaaggaacagtaagtggcgattacgtttattgccctctacatgatcaaaaggttgatttgagaagtggcgaggtacaagaacctgatactggatgtgttgaaacatatcaagttgaagtcatcgatggagacgtttatgtatgtctg

SEQ ID NO: 35563 - DNA, 942 bp, Staphylococcus haemolyticus
atgtctgtagatgaaaaatcaaaggtttacttgataggtgctggacctggtaatcctaatcttttaacgaaaaaagcagaacgatgtattaagaaagctgaagttattctatatgatcgtttagtaaacccactcatacttcaatatgcacccgctgatgcggaattcattgatgtaggtaaaaagccttacgctaaacatatacaacaagacgaaattaatttaaaaatcgttgaagcggctaaaaagtaccaaacagtcattcgtctcaaaggtggcgatccagcaatatttggtcgtgttactgaagaagtcaatactttaaaagactatggtattgaatatgaaattgttcctggtgtaacttcagcaagtgcagctgttgcaacaatggatttagggttaacaatgagatcagtagcgcctagtgtgactttctcaacaggccatttcaaagattcaatcaatcaagaaacagatatacgtaatttgattaatggtgggacattagccatctatatggggataaaacgattgggccgtatcattgatcaaatcacagcttatacttcagaggactattcgatagcaattgtgtttaatgctacgtgtcataaccaacgcgtcatcattggtaaattaagcaccattgagcatcaattacagcaacacgaacttgaaggcgaaccaggcatttgcattttaggtgcgattgttgactatattgataaagataaagtgttgaaacaagagcatgaaagaaatttagatgattcattatatgttataaaaggttcgaaagaagatgctttattgaaagctgaagaattatctgaaacaggatatcgttgtatagtacacgttgatgaaagttaccatccatcacaacaacaattatacacacaaataatcaataacaataaaattaaatatattaattta

SEQ ID NO: 35564 - DNA, 3681 bp, Staphylococcus haemolyticus
atgggaaaatttggattaaactttttcaaaccaactgagacatttaatggtaactggtcagttcttgagagcaaaagtagagaatgggaaaaaatgtaccgtgaaagatggagtcacgataaagtagttagaacaacacatggtgttaactgtacagggtcatgttcatggaaagtatttgttaaaaacggcgtaatcacttgggaaaatcaacaaattgattatccaagttgtgggcctgatatgcctgaatttgaacctcgtggatgtccgcgtggtgcgtcgttctcttggtatgaatatagtccacttcgtgtgaaatatccatacattagagggaaattattagatttatggaatacagcgttagaagaaaataatggaaatcgtattgcagcgtgggcatctattgttgaagacgaagagaaagcaaaagcatataaacaagcacgtggtaaaggtggacatgttcgagctaactggaaagatgtaacagatattattgctgcacaaattctttatacaattaaaaaggatggtccagatagaatcgcaggatttacaccaattcctgccatgtcaatgataagttatgctgcaggggcaagatttatcaacttactcggtggagaaatgttaagtttttatgattggtatgctgatttaccgcctgcgtcaccacaaatttggggtgaacaaactgacgtacctgaatcaagtgattggtacaatgcttcatatattattatgtggggttcaaacgtaccacttacacgtacacctgatgctcattttatgactgaagtgagatataaagggactaaagttgtttcagtagcacctgactatgcagaaaacgttaaattcgcggataactggttagcacctaatcctggtactgatgcagcagtagcacaagcaatgacacatgttattttacaagaatactatcaagataatcctagtgaaatgttcattaactattcaaaacaatattcagatatgccttttgtgattatgttagatgaagatgacaatggctataaagcaggacgattcttacgtgcaagtgatttaggtatggaaagtgaaaatagcgaatggaaaccagtcattcacgatatgaatagtcatcagtttgtagtacctaatggcacaatgggtcaacgctgggaagaaggcaagaagtggaacttaaaattagaaaatgaagatggttctaagattgatccagcgatgtcaatggcagacgacacatacgaactaaaaacaattcaattcccttactttgatagtcaaggtgacggtatttttgaaagaccaatagcagctagaaaagtaacattagctgatggaaaagaagtgtatgtagcgacagtatatgacttaatgacaagtcaatatggcattaaacgatttaatcatgaattagaagcaacttcatacgacgatgctgaatcaaaatatacacctgcatggcaacaacgtgtaactggtattaaaccagaattagtaacacaagtagctagagaatttgcgcaaaatgcaatcgatacaaaaggacgctcaatgataatcatgggtgctggtattaaccactggttcaattcagatacgatttatcgagcaattttaaatcttgttcttttatgtggctgtcaaggtgttaacggtggtggatgggctcactacgttggacaagaaaaatgtagaccaatagaaggttggaatacggtagcctttgccaaagactggcaaggaccaccacgtctgcaaaatggtacaagttggttctattttgcgactgatcaatggaaatatgaggaatctaatgttgataaattaaaatctccattagctaataatattaaacatcaacacccagctgactataacgttacagctgctagattaggttggttgccgtcataccctcaattcaataagaatagtttattattcggagaagaggcaaaagatgccggtgatgactctaatgaagcgatattaaatagagcaatcgaatcagtcaaaaatagagaaactcaatttgcgatagaagatccagatttaagaaagaaccatccgaaaacattattcgtatggcgttcaaatttaatttcaagttctgccaaaggacaagagtactttatgaaacatttattaggtacacgttcaggactaatggctgaacctaacgaagaagacaaaccagaagaaattcaatggcgtgaagatacagaaggtaaattagacttattagtgtcactagatttcagaatgactgcgacaccattgtactcagatatcgtattaccagctgcaacatggtatgaaaaacacgatttgtcatcaacagatatgcatccattcattcatccatttaatccagcgattgatccattatgggaatcacgttcagactgggatatttataaaaccttaagtaaagctgtttctgaaatggcgaaagattacttaccaggaacatttaaagatgttgtaacgacaccacttggccatgattccaaacaggaattaggttcagaatacggtattgttaaagattggtctaaaggagaagttgaagccattccaggtaaaacaatgccaaacttcgcagtcgtagatagagattacactaaaatctacgataaatatgtgactttaggtccattacttgaaaaaggaaaagttggtgcacatggcgtaagcttcagcgtgaaagatgaatatgaagaacttaaaagtatgataggtacttggaatgatgaggaccctgaatcagtcagaaataatcgtccacgtatcgatactgctagaaaagtagcagatgcaatcttaaatgtatcatcagctactaacggcaaattatcacaaaaatcatacgaagatttagaaaatcaaacaggaatggaattaaaagacatttcaaaagaacgtgcatctgaaaagatttcattcttaaacattacatcacaaccacgggaagttataccaacagctgtgttccctggttcaaacaaaaatggacgtagatattctccatttacaactaatatagaacgactcgtaccatttagaacattaacaggtagacaaagttattacatcgatcacgaagtattccaacaattcggcgaaagtttaccagtatacaaaccaacattaccgccaatggtatttggtactagagataaacaagttaaaggtggacaagatgcattagtattacgttatttaacacctcatggtaaatggaatatacactcaacatatcaagataacgaacgtatgttgacattatttagaggtggtccagtcgtttggttatctaatgaggatgctgatgagcatggcatcaatgacaacgattggttagaagtttataacagaaatggtgttgtaactgcaagagcagtcacatcacaccgtatgccaagaggaacaatgtttatgtatcatgcacaagataaacacattgaaacaccaggatcagaaattacagatactcgtggcggttcacacaatgcaccaacaagaattcatttgaaacctacacaacttgtaggtggttacgcacaaattagttatcactttaactattatggaccaataggaaatcaacgtgacgtatatgtagcagtgagaaagatgaaggaggtaaattggcttgaagat

SEQ ID NO: 35565 - DNA, 291 bp, Staphylococcus haemolyticus
atgacaatgacagatccaatcgcagatatgcttactcgtgtaagaaacgcaaacatggtgcgtcacgagaaattagaattacctgcgtctaacattaaaaaacaaattgctgaaatcttaaaaagtgaaggtttcattacaaacgtagaatacgttgaagatgataaacaaggtgttattcgtttattcttaaaatatggtcaaaacaatgaacgtgttatcacaggattaacacgtatctctaaaccagggttaccgtgtatatgctaaaggcaacggagtacctaaaag

SEQ ID NO: 35566 - DNA, 1428 bp, Staphylococcus haemolyticus
atgaatgaatcagacacaaacaaacttggtaaaacgtcacttattggtttagtcattggttctatgattggtggcggtgcgttcaatatcatttctgatatgggtggtcaagccggtggtttagcaattatgattggatggattattaccgcaatcggaatgatttcactcgcatttgtcttccaaaacctcactaatgtaagaccggacttagaaggtggaatttacagttatgcacaggctggatttggcgactttattggtttctcaagtgcttggggctactggtttgctgcgtttctaggtaacgtagcctatgcaacattattgatgtcagcagtaggtaacttcttcccaatcttcaaaggtggtaatacgctaccaagtattatcgtcgcttctttcttattatggggtgtgcacttcttaatacttagaggtgttgaaaccgcagcttttatcaatagtattgtaactgttgcaaagttaattcctatattcttagtcatcatttgtatgattgtagtatttaatttcgatacatttaaagcagggttctacggaatgacaagcggtggtacaggtatatttagttggggcgatacaatgtctcaagttaagagtacaatgcttgtaaccgtatgggtgttcactggtattgaaggtgcagtggtattctcaggtcgtgctaaatcgaaaaaagacgtaggtactgctacagtaattggacttgtttcagtacttgttatttacttcttaatgactgtattggcacaaggcgtcattcaacaaaatcaaattgctgatcttgcaagcccatcaatggcacaagtgttagaacatatcgttggtcattggggttcagtactcgttaacattggtttaattatttctgttttaggtgcatggcttggttggacattactagctggtgagctaccatttatagtggctaaagatggcttgttcccgaaatggtttgctaaagaaaataaaaataaagcaccaatcaatgcattattaattacaaacattctagtacaaatattcttaattagcatgttatttacagatagtgcatatcaatttgcgttttcacttgcatcaagcgcgattttaattccgtatatgtttagtgccttttatcaattaaaatacacaattgagcataaaggacacgctacagtgaaacaatgggcaatcggtattattgcatcaatctatgcgatatggcttgtgtacgctgcaggtattgattacttgttattaaccatgttgctctacatccctggtctatttgtttatcgtttcgtacaacgtaataaccataaaccattaacgaaaggtgactatatcttgtttgcagtcattatcatacttgcaataataggtatcactcgcttagcgatgggaagcgtttcagtattc

SEQ ID NO: 35567 - DNA, 1392 bp, Staphylococcus haemolyticus
atggagtcttcaaaacaatttaggggagataataaattactaattggtattataatcggggtactcacattctggttatttgcacaatcattagttaacgttgttccaacgttacaatcttcatttaacacagacatgggtacgattaacattgccattagtttaactgcattgttctctggactatttattgtaggggcaggagatattgcagacaaattaggtcgagtaaaaatgacatacatcggcttagcattaaatattattggttcattatgtttaatcatcgcacctgtcgcatggttgctattagtaggacgtgcgttacaaggtttatcaggtgcattaattatgccgtcaacacttgcaataataaatgaatattacataggaaaagaaagacaacgcgctgttagttactggtctatcggttcttggggcggtagtggtatttgttcattatttggtggtttcatggcctcaacgattggatggcagtggatttttattgtttcaattgcactttcaattttagcctttttcttaattaaacatacacccgagactaaagttgaacctagtgtagatgaaactaaaacaaaatttgatgtgactggtttaatactattggttattacactattaagtgttaacgtgatggttacgcaagctgcagatcgaggactgttctcgccaatgatcttatcacttggtgctgtattcttagttgcaggaatcttatttattattagagaattaaaaacagagaacccgttagttgattttcatattttcaaaaataagggttatagtggtgcgacattatccaactttatgttaaatggtgttgccggtggtacacttattgttgttaatacgtattatcaaagtcaattaggttttagctcattacaagcaggtttaatttcaattacgtaccttgtagctgtactaatcatgattcgtgttggtgaaaaattattacaaaaacttggtgctaaaaaaccattattagtaggtagtggttttgcattcttaggattactactattatctttaacattcttaccaaatgttgcttatatcatttcaagtattataggttacttattatttggtatcggtttaggtacatatgctactccttctactgatacagcggttgcagaagcacctgatgataaagtaggtgtagcatctggattgtataaaatggcgtcatctttaggtaatgcttttggtgttgctatgtctagtaccatttatggttttggtgcatcattcatgaatttacaactcggcggcgctgctggcgtattattcaatgccggaattgctttaactgcatttatagtaattttaattttagttcctaagaaattaagaacaaat

SEQ ID NO: 35568 - DNA, 1752 bp, Staphylococcus haemolyticus
atgtttaatttatttatattattgcttgaacgtgtagggttaatcattattatcgcctatatgttaatgaatattaatcactttaaaacgatgatgggcgaacgcgaaaaattgcgttctcaatggcaattaacaattttgttcgctctatttgctataacttcaaatttcactggaattgaaattgaaaatggacatattgtatctagtaatatttattaccacctaaatgacgatgcatctatggcaaatacacgtgtattaacaatagggatgtctggtttaattggcggacctttcgtcgcaattatagtaggcattgtatcagggttgtcacgcctttatattggcggtgcaaatgcatacacctatctcatttcatctattttcatcgcacttatatcagggttttatggttatcgtacaatgcgtcgctatacttacccaaccgttttaatgggtgccattattggtgcaattaatgaagcaattcaaatggcatgcatactcatctttgccaacgatacagcttctgcatggtcgcttgttcaatttatcgccttacctatgattttaatcaatagtattgggacagctatcttcttatctataatactttcaacattaaaacaagaagagcaaacccgtgctattcaaacgcatgatgtcttcgaaatagcgaataaaacgttgccgtattttaggtctggtttaactgaacagtctgcacgttccgttgctgaaatcattctgaaattgatgaacgtatcggcggttgctatcacaaatagaacagatattttaacacatgtgggcgctgcaagtgaccaccatgttgctaaaaaagcaatcattaccgatttatcaaaagaagtcataaaaacgggtcatttaaaagaagcacactctaaagaagaaatcggatgcaacaatccaaattgttctttaacatctgctatcgtcatccctttaatgattaatcaagaagtagccggcacattaaaattttattttacaaatgaatatgaaaacacaacatcgacgaaacaactcgcacgtggcctagcagatatcttctcaagtcaattagaattgggtcaggccgaaatgcagagtaaacttttaaaagatgctgaaatcaaatcgttacaggcacaggttaatccgcacttcttctttaatgcgattaataccatttcagccctcgtacgtattgatagtgaaaaggcaagaaagttattattgcagttaagccaattctttagatcaaatttgcaaggagctcgaaataacaccattactttggaaaaagaattgcaacaagtagaggcctatttggcattagaacaagcacgcttccctgatcgattcacaattcaatatcatattgattcatcatgtaagcatgtgcttatcccacctttcgtcattcaaattctagttgagaatgctatcaaacacgcctttaaacaccgtcgcaaagataatattattgatgtagttgcacaccatgacaatgaagaattaacattaactgttcgtgataatggaagtggcattgatgatgataagttaccattgattggacaaatgagtgtcgattcagagacaggaactggtagtgccttagaaaatttaaacagacggttaattggactttacggcacaaaggccgccttacattttgaatcaacagaaataggaacgacggtaagttgccatataccatcacacacaataaaggaggatatt

SEQ ID NO: 35569 - DNA, 768 bp, Staphylococcus haemolyticus
gtgaagacgttaatcgttgatgatgaaccattagctcgaaatgagcttcattacttattaaatgagatatctggatttaacgtgattgatgaagctgaaaacatagaagaaacgttagaaaaacttttatcagaaacatatgatttagtctttttagatatcaatcttatggatgaaagtggtatagatttagcacaaaaaataaagaaaatgaaacaaccaccacacattatttttgcaacggcacacgatacatttgcagttaaagcctttgaacttgatgcaattgattatatactcaagccttttgaacttgaacgtatagagcaagcagtcaataaagttaagcatcaaatatctaatagcaatgagatagatcatataacaagtgaaccatctacgctatcaatgcaacaagatgatcgccaagaaaatgaagaccaaaccgtactaccaattgaaatgaatgaacgtatctatgtgatccgaaaagatgacatcacagcagtttcagtcaacaatgggataacaacgataaataccactcatcgcacatatcaaactaatgaaccacttaactactatgaaaagaaattatcgaataacacatttattaaaattcatcgtgcgactatcattaataaaacgcatatcgatagcgttgaacattggttcaattatacctatcaagtaaccatgacatcgggagataaatttcaagttagtcgatcatttatgaaggcatttaaacatgaaattggccttgct

SEQ ID NO: 35570 - DNA, 498 bp, Staphylococcus haemolyticus
atgtctgctattatcgaagctaaaaaacaacaagttgatgttattgctgaacaacttaaaaattcagtttcaactgttatcgttgactaccgtggcttaacagttgcagaagtaactgaactacgttcacaattacgtgaagctggtgttgagtacaaagtttacaaaaacactatggttcgtcgtgcagctgaacaagcaggtatcgaaggcttagatgaattcttaacaggtcctacagctgttgcaacttcaactgaagatgtagtagcaccagcgaaagttatcgcaggatttgctaaagaacacgaagctttagaaatcaaaacaggcgttatggaaggtagcgttatttcagcagaagaagttaaaactgttggttcattaccttcacacgatggtcttgtttctatgcttttatcagtattacaagctccagtacgcaacttcgcttatgcggttaaagctgttggagaacaaaaagaagaaagcgctgaa

SEQ ID NO: 35571 - DNA, 366 bp, Staphylococcus haemolyticus
atggctaatcaagaacaaatcattgaagcaattaaagaaatgtcagtattagaattaaacgatttagtaaaagcaattgaagaagaatttggtgtaacagcagcagctcctgtagcagcagctggtgcagctggtggcggagacgcagcagcagaaaaaactgaatttgacgttgagttaacttcagctggatcttcaaaaatcaaagttgttaaagcagttaaagaagcaactggtttaggcttaaaagatgctaaagaattagtagataacgctcctaaagtaatcaaagaaggcgttgctaaagaagaagctgaaaaacttaaagaacaattagaagaagttggagctactgtagaattaaaa

SEQ ID NO: 35572 - DNA, 606 bp, Staphylococcus haemolyticus
atgggacactattatgatgaaaatccagatgtacaaagtgatgaaagagtcattcaatatcattatcattcccatcaattaaatttaactacagatgcaggtgtgttctcaaaagcacaagtagattttggatcagatacgttagtacaaacatttttaaacgagcatcctcctggaccaagtaagacgattgctgatgttggatgtgggtatggtccgataggattaatgattgcaaaagtttcaccacatcatcaaattactatggttgatgtgaataagcgtgcgttaaatcttgctgaaaagaataaaaaagcaaatcaaattgataacgtcattatcaaagaaagtgatggtttatcacaactaaaggatagtcattttgattatgtactaaccaatcctcccattagagctggcaaagaagttgttcatcgtatttttgaagaagcatatcaacagttaaattcacaaggtgagttgtacgttgtgattcaaaagaaacaaggtatgccttctgctaaaaagaaaatggaagaaattttcaataatgtcgaagttgttaacaagaataaaggatactatatattgaaaagccgaaaaggt

SEQ ID NO: 35573 - DNA, 3405 bp, Staphylococcus haemolyticus
agacatcgtaaacgtagaaattatgcgagaatttcagaagtattagaattaccaaacttaatagaaattcaaactaaatcttacgactggttcctaaaagaaggtttattagaaatgttccgtgatatttctccaattgaagatttcacaggtaacctttctttagaatttgtagattatcgattaggtgaaccaaaatatgatttagaagaatcaaaaaaccgtgacgctacttatgctgcacctcttcgtgttaaagtacgtctaataatcaaagaaactggcgaagttaaagaacaagaagtatttatgggtgacttcccattaatgacagatacaggtacattcgtaatcaatggtgcagaacgtgtaatcgtgtctcaattagtacgttcaccatccgtttatttcaatgagaaaattgacaaaaacggtcgtgaaaactatgatgcgacaattatccctaaccgtggtgcatggttagaatatgaaacagatgctaaagatgtagtttatgtacgtattgatagaacacgtaaattaccattaacagtattattacgtgctttaggcttctcaaacgatcaagaaattattgatttattaggagacagtgaatatttacgtaatacgcttgaaaaagatggcactgaaaatactgagcaagcattattagaaatatacgaacgtttacgtcctggtgagccaccaacagttgaaaatgcgaaaagtttactttattcacgctttttcgaccctaaacgttatgatttagcaagtgttggtcgttacaaagctaataaaaaattacacttaaaacaccgcttatttaatcaaagattagcagaaccaatcgttaatagcgaaactggtgaaattgttgccgaagaaggtacagttctagaccgtcgcaaattagacgaaattatggaagttttagaaacaaatgctaatagtgaagtgtttgaattagaaggtacagttattgatgaacctgttgagattcaatcaatcaaagtttacgtaccaaatgatgaagaaggtcgtacgactactgtaatcggtaatgcgttaccagattcagaagttaaatgtattacaccagcagatatcattgcttcaatgagttatttctttaacttgttaaatggcattggttacacagacgatattgaccacttaggaaaccgtcgtttacgttcagttggtgaattattacaaaaccaattccgtatcggtttatcaagaatggaacgtgttgtacgtgaaagaatgtcaattcaagatacagactctatcacaccacaacaattaattaatatccgtccggttattgcgtcaattaaagagttcttcggtagctctcaattatcacaattcatggaccaagctaacccattagctgagttaacacataaacgtcgtctttctgcattaggacctggtggtttaacacgtgaacgtgctcaaatggaagtacgtgacgttcactactctcactatggtcgtatgtgtccgatcgagactccagagggaccaaacattggtttgattaactcattatcaagttatgcacgtgtgaatgaatttggtttcattgaaacaccatatcgtaaagtagacttagacactaactctattacagatcaaatcgactacttaactgctgatgaagaagatagctatgtagttgcccaagcgaactctcgcttagatgaaaatggtcgtttcttagatgatgaagtcgtatgtcgtttccgtggtaataacacagttatggctaaagagaaaatggactacatggacgtatctcctaaacaagtagtttcagctgcgacagcatgtattcctttccttgaaaatgatgactctaaccgtgcattaatgggtgcaaacatgcaacgtcaagcagtaccattgatgaacacagaagcaccatttgttggtacaggtatggaacatgttgctgcacgtgactcaggcgctgcaattacagctaaatatagaggtcgcgttgaacatgttgaatctaaagaaatcttagttcgtcgtttagtagaagaaaacggtactgaacatgaaggtgaattagatcgttatccattagctaaattcaaacgttcaaacactggtacttgttacaaccaacgtccaattgtttcagttggcgatgtcgttgagtataatgaaattttagctgacggaccatcaatggaattaggtgaaatggcattaggtcgtaacgttgtcgttggtttcatgacttgggacggttacaactatgaggatgctgttattatgagtgaacgtctagttaaagatgacgtttatacttcaattcatattgaagagtatgaatcagaagctcgtgatactaaactaggacctgaagaaatcactcgtgatattccaaatgtttcagaaaatgcacttaaaaacttagatgatcgtggtattgtctacgttggtgctgaagttaaagacggtgacatcttagtaggtaaagtaacgcctaaaggtgtgactgaattaacagctgaagaaagattattacacgctatcttcggtgaaaaagcacgtgaagtacgtgatacatcattacgtgtacctcacggagctggtggcatcgttctagatgttaaagtatttaaccgtgaagaaggcgatgatactttatctccaggcgttaaccaattagtacgtgtatacatcgtacaaaaacgtaaaatccatgttggggacaaaatgtgtggtcgtcatggtaacaaaggggttatctctaagattgtgcctgaagaagatatgccttacttaccagatggacgtccaattgatatcatgttaaacccacttggtgtaccatctcgtatgaacatcggacaagtattagaattacacttaggtatggctgctaaaaacttaggcatccatgttgcatctccagtattcgatggtgcgaacgatgatgatgtatggtcaacaatcgaagaagcaggtatggctcgtgacggtaaaacagtcttatacgatggtagaactggtgaaccattcgataatcgtatttctgttggtgttatgtacatgcttaaacttgcacacatggttgacgataaattacacgctcgttcaactggtccatactcactagttacacaacaaccgcttggtggtaaagcacaattcggtggacaacgtttcggtgagatggaggtatgggcactagaagcatacggtgctgcttacacattacaagaaatcttaacttacaaatctgacgatacagtaggacgtgttaaaacttacgaagctatcgttaaaggtgaaaacatctctagaccaagtgttccagaatcattccgcgtattgatgaaagaactacaaagtttaggtttagatgtcaaagtt

SEQ ID NO: 35574 - DNA, 3618 bp, Staphylococcus haemolyticus
ttgattgatgtaaataatttccattatatgaaaatcggtttagcctcacctgaaaaaatccgttcatggtcatacggtgaagtaaaaaaaccagaaacaatcaactatcgtacattgaaaccagaaaaagatggtcttttctgtgaaagaatttttggacctacaaaagactgggaatgtagttgtggtaagtacaaacgtgtacgctacaaaggcatggtctgtgacagatgtggtgtagaagtaattaaatctaaagtacgtcgtgaaagaatgggacacattgaattagctgctccagtttcacatatttggtatttcaaaggtattccaagtcgtatgggtcttttattagacatgtctcctagagcattagaagaagttatttatttcgcttcatatgttgtagtagatccaggtccaacaggcttagagaaaaaatcattattatctgaagctgaattcagagaatattacgataaatacccaggtcaatttgtagctaaaatgggtgctgaaggtattaaagacctattagaagaaattaacttagacgaagaattaaaatcattgcgtgacgaattagaatctgcaactggtcaaagattgacacgtgcgattaaacgtttagaagttgttgaatcattcagaaactctggtaataatccagcgtggatgattttagacgtacttccaattattccacctgaaatccgtccaatggttcagttagatggtggacgtttcgcaacaagtgatttaaatgatttataccgtcgtgtgattaaccgtaataatcgtttaaaacgtttattagacttaggtgctcctggcatcatcgttcaaaacgaaaaacgtatgttgcaagaagcagttgatgcattaatcgataacggtcgtcgtggtcgtccagttactggtccaggtaacagaccattgaaatcactttcacatatgttgaaaggtaaacaaggtcgtttccgtcaaaacttacttggtaaacgtgttgactattcaggtcgttcagttatcgctgttggtccaagcttaaaaatgtatcaatgtggattacctaaagaaatggcgcttgaattgttcaagccattcgtaatgaaggaattagttcaacgtgaaattgctactaacatcaaaaatgctaaaagtaaaattgagcgtatggacgatgaagtatgggacgtattggaagatgtaatcagagaacaccctgtattacttaaccgtgcacctactcttcacagattaggtatccaagcattcgaacctacattagttgaaggtcgtgctatccgtctacacccacttgtaacaacagcttacaacgcggactttgacggtgaccaaatggccgttcacgttcctttatctaaagaagcacaagctgaagcacgtatgttaatgttagctgctcaaaacatcttgaaccctaaagacggtaaacctgtcgtaacaccatcacaagatatggtattaggtaactattacctaacattagaacgtaaagatgcaatgaacactggtactatctttaatgatacaaacgaagtgcttaaagcttatgcaaatggctatgttcatttacacactcgtattggtgtacatgcgaaatcatttaacaaccctacattcacagaagctcaaaacaacaaaattttagctacttcagtaggtaaagtgattttcaatgaaatcattcctgattcattcgcattcatcaatgaacctagtcaaacaaatcttgaaggtaaaacacctgacaaatactttattgattcaactcaattgggtgaaggtggacttaaagcatactttgaagaacaagaacttattgaaccattcaataaaaaattcttaggtaatattattgccgaagtcttcaatagattcagtatcactgatacatctatgatgcttgaccgtatgaaagatttaggtttcaaattctcatctaaagctggtatcactgttggtgtagcagatattgttgtacttccagataaacaagacattttagatgagcacgaaaaattagtagaacgtgtatctaaacaatttaatcgtggtttaattactgaagatgaacgttataatgccgttgttgaaatttggacagatgccaaagatcaaattcaaggcgaattaatgcaatctcttgagaaaacaaacccaatcttcatgatgagtgattctggtgcacgtggtaacgcatctaactttacacaattagctggtatgcgtggtttaatggccgcaccatcaggtaaaattattgagttaccaatcacatcttcattccgtgaaggtttaacagtgttagaatacttcatctctacacacggtgcgcgtaaaggtcttgccgatacagcccttaaaacagctgactctggttaccttactcgtcgtcttgttgacgttgctcaagacgttattgttcgtgaagaagactgtggcacagaccgcggcttactagtttctgatatcaaagaaggtgcagaaatgatcgaaccattcatcgaacgtattgaaggacgttattctaaagaaacaattcgtcatcctgaaactgatgaaatcatcatccgtccagacgaattaatcactgctgaaatcgctaagaaaatcactgatgccggtattgaacaaatgtacatccgctcagcatttacatgtaacacacgtcacggtgtttgtgaaaaatgttacggtaaaaaccttgctactggtgaaaaagttgaagtgggtgaagcagttggtacaatcgctgctcaatcaatcggtgaacctggtacccaacttacaatgcgtacattccatacaggtggtgtagcaggaagcgatatcactcaaggtcttccacgtattcaagagatcttcgaagcacgtaatccaaaaggtcaagctgtgattactgaaatcgaaggtgtcgttgaagatattaaattagcaaaagatcgccaacaagaaattgttgttaaaggtgctaatgaaacaagatcttacttagcttcaggtacttctagattaaaagtagaagtcggtcaatcagttgaacgtggtgaagtattaactgaaggttcaatcgaacctaagaacttcctagctgttgctggtttaaatgcgactgaaagttacttacttaaagaagttcaaaaagtttatcgtatgcaaggtgtagaaattgatgataaacacgttgaagtaatggtaatacaaatgttacgtaaagttagaatcatcgaagctggtgatactaagttattacctggttcattggttgacattcatagctttacagatgcaaacagagaagcgtttaaagaacgtaaacgtccagcaactgctaaaccagtattgcttggtattacaaaagcgtctcttgaaactgaaagcttcttatcagcagcatcattccaagaaacaactcgtgtacttacagatgcagcaattaaaggtaaacgcgacgacttacttggacttaaagaaaacgttattattggtaagttaattccagctggtactggtatgagacgttatagtgacgttaaatatgataaagctgaaacaccagttacagaaactgaagaagcagaaatcattgaa

SEQ ID NO: 35575 - DNA, 411 bp, Staphylococcus haemolyticus
atgccaactattaaccaattagtacgtaaacctagacaaagcaaatctaaaaaatcagattcaccagctttaaacagaggttttaatagtaaaaagaaacaatttactaacttaaattcacctcaaaaacgtggtgtttgtactcgtgtaggtactatgacacctaaaaaacctaactcagcgttacgtaaatatgcacgtgtgcgtttatcaaacaatattgaaatcaacgcatacatccctggtatcggccataacttacaagaacacagtgtagtacttgtacgtggtggacgtgtaaaagacttacctggtgtgcgttaccacatcgtacgtggtgcacttgatacttcaggtgttgacggacgtagacaaggccgttcattatacggaactaaaaaacctaaaaat

SEQ ID NO: 35576 - DNA, 174 bp, Staphylococcus haemolyticus
atgtctaaaacagtagtacgtaaaaatgaatcacttgaagatgcattacgtagatttaaacgttcagtatctaaaagtggtactatccaagaagtacgtaaacgtgaattttacgaaaaaccaagtgttaaacgtaaaaagaaatcagaagcagcacgtaaacgtaaattcaaa

SEQ ID NO: 35577 - DNA, 687 bp, Staphylococcus haemolyticus
atgaatattggtattataatttttataatatccataattgttacaggtattagtgcgatgagggataaaagtcatgaacatagaaaaaatcaaagaccccctcatccaaaaaagtcaacttctgacaaaaaagaaactcatgaaaaagggttttttgagcaaattgaagaagcatttagtgagttagaaaaggaatttacaaacgaagataaaacaactaaccaacaaaagaaagataaacaaactaacactaaacgtgtttatcaggatcaaaaacttgaaaaagaaatcgaaaaagagagcgtaccagaggaattagagcgttctgcaagacaacgtggcagagttgaaagagaaacacgtcaatctgccaattcacgcgagagcaatagagactcgaataaacttcaaaaagaattagaaaaacaacttgtagacgatttatataacgtacgtacagaaatcgaccgtgaaaaagaaaaacaactttctagaattgaaaataatgcaagagctattatcaatgataaaaatctatctgaacgtaccaaacgctatagattaaaacaattgttaaatagtaaagcaatagaacaagatatgacacatcaaagttttcagtttgataatgatcctgttgtaaatggtattctatggcaagaaattctcaataaacctaaacaatta

SEQ ID NO: 35578 - DNA, 216 bp, Staphylococcus haemolyticus
ttgagtgctatagaatggttatttatattattagccatctttttagtattaaccttagaagcagttaatactgcaattgaatgtgtagttgatttagttacaatggattatcatgaacttgctaaacaagctaaagatattgccgcatttagtgttatgttggtatcaatatttgctttaataactggattagttgtatttttacctcatattttc

SEQ ID NO: 35579 - DNA, 897 bp, Staphylococcus haemolyticus
atgacagaacataagtcaggatttgtatcaataataggaagaccgaatgtaggaaaatctacatttatgaatagagttattggccataaaattgcaattatgtccgacaaggctcaaacaactcgaaataaaattcaaggtgtaatgactagaaatgatgcgcaaatcatatttttagacacaccaggtattcataagcctaaacacaaattaggtgattatatgatgcgtgttgcaaaaaatactctatctgaaattgatgcaatcatgttcatggttaacgtcaatgaagaaattggtcgtggcgatgaatatatcatggaaatgctaaagaatgttaagacacccgttttcttagtattaaataaaatcgatttagttcatcctgatgctttaatgccaagaatagaacaatatcaaaaatacatgaattttactgaaattgtaccaatatctgcattagaaggactaaatgtcgaccattttatagatgtgctaaaaacatatttacctgaaggtccaaaatactatccggatgatcaaatctcagatcaccctgaacagtttgtagtcagtgaaatcatacgtgagaaaattttacatttaactagtgaagaaatcccgcatgcaataggcgtaaatgtagatagaatgattaaagaaaatgacgagcgtgttagagttgaagctactatttatgttgagagagactcacaaaaaggtattgttatcggtaaaggcggcaaaaaactaaaagaagtcggtaaaagagcaagacatgatattgaaatgttactaggctcaaaagtttatttagaactttgggtaaaagttcaaaaagattggagaaataaagttaattttattcgtcaaatgggatatattgaagatcaagat

SEQ ID NO: 35580 - DNA, 1389 bp, Staphylococcus haemolyticus
atggttaaagatatggaaacaattgtatcattagcgaaacacagaggatttgtatttcctggtagtgatatttatggtggattatcaaatacatgggattatggcccattaggtgttgaattaaaaaataacgtaaaaaaagcatggtggcagaagttcataactcaatcaccatttaatgttggtattgatgctgcaattttaatgaatcctaaaacttgggaagcttcaggtcacttaggtaactttaatgatcctatgattgacaataaagatagtaagattcgttatcgagcagataaattaattgaagattacatgcaaaaagaaaaaggcgacgaaaactttatcgctgatggtttgagtttcgatgaaatgaaacgtattattgatgatgaaggtattgtgtgtccggtaagtggaactgctaattggacagatattcgtcaatttaatcttatgtttaaaacattccaaggtgttacagaagattctacaaatgaaatcttcttaagaccagaaacagcacaaggtatttttgtgaattacaaaaacgtgcaacgttctatgcgtaaaaaattaccatttggtattggccaaattggtaagtcattccgtaatgaaattacaccaggaaacttcatcttcagaactagagaattcgaacaaatggaattggaattcttctgtaaacctggtgaagaaattgaatggcaaaattattggaaaacatttgctagtcaatggttaaaagatttaaatatcaatgaagaaaacatgagattacgtgaccatgacgaagaagagttatctcattactctaatgctacgacagatatcgaatatcgcttcccatttggttggggtgaattatggggtatcgcaagccgtactgactttgacttgaaaaaacatagtgaacattcaggtgaagactttaaatatcacgaccctgaaacaaacgaaaagtatgttccatactgtattgaaccatctcttggtgctgatcgtgttacattagcattcttatgtgatgcatatgaagaagaaggtgttgaaggaagcaaagatgctcgtacagtgatgcatttccaccctgctctagcaccttataaagcggctgttttaccattaagtaaaaaattatctgaagaagctattaagattttcgaacaattaagttctaaatttgcaattgattttgacgagtctcaatcaattggtaaacgttaccgtagacaagatgaaattggtacaccatattgtattacatttgattttgactcattagaagataatcaagttacagtacgtgaccgtgattcaatggaacaagtgcgtatgcctatttcagagttagaaacatttttagcagaaaaagtggcattc

SEQ ID NO: 35581 - DNA, 1717 bp, Staphylococcus haemolyticus
cgtattgaacaatcagtaattaatgaaattaaagataagaccgatattttggatttagtaagtgaatatgtaaaattagaaaagagaggacgcaattacattggtttgtgtccttttcatgatgagaagactccttcgtttactgtatctgaagataaacaaatttgtcactgctttggttgtaaaaaaggtggtaatgtctttcaatttactcaagagataaaagatttatcatttgtagaggctgtaaaagagttaggagaaagaattaacatttcagttgatattggtaatagtagtgactatacaagtcaaatagcatcgaatgatttaacaatgattgagatgcatgaattaatgcatgaatactatcaatatgctttgcttaagacagtagaaggtgaagaggcattaaattatctaacaaaacgtggttttactgaagagcttattaaatcacgtggtattggttatgctcctaatcatactcacttttgtcatgactttttacaacaaaaaggttatgatatagaactcgcgtacgaagctggtcttttatcgcgaaatgaagaaaatttcagctattttgatagatttagagatcgcattatgttccctttaaataatgctcagggtcgtattgtgggctattcaggtagaacatacaataatcaagaacctaaatacttaaacagcccggaaacacccatatttcaaaagagaagattattatataatcttgataatgctagaaaacatatacgaaaaaatgatgaagccatattattagaaggatttatggatgtaattaaatccgattcatcaggactaaaaccagtcattgcaagtatgggaacagctatatcagatgaacacattactgttcttaaaaaattaacatctcatattactctaatgtttgatggtgatttcgctggtcaagaagcaacaattaaaactgggcaacaccttctacaacaaggattcaatgtttttgttgttcaattacctaaagatatggatccagatgagtatataacaaaatatggtaatgaaaaatttcttgaatatgtaaataatgaaaagaaatcatttatcatttataaagtaaataaacacaaagatgaaattgctaataatgacttagcttatgaacgctatcttaaagaagttacccaagatattgcattaatgaattctcaaattttgcagaataagataatcaaagatgtagcacatttatttaatgtggattctaatactctaaatagcaatgtattgaatcaacaacaatatattcctagcgagccttatattaatgattatcaatcatatgatattgaaatacaaaataactcaaataatttatttagtcatttatcaaaacatgaaagtgctgaaagagccttacttaaacattttatgaatgtaaagacttattcttaaattatcataagcaacttgaaagtgatgactttgataatcaatttttcaaacgtatatatagtgttttagaagatttttacgctgaaaatgacagctatacaattagcgatatgatacttacacagataatgataatttgagagatgcaattatcgctttggataattatgatataaatcaagaaccttatgatagtgaaatagaagattacatgaatgtcatcaatgaatcaaagtatggagatacacttgaagaattaaatcataattac

SEQ ID NO: 35582 - DNA, 2336 bp, Staphylococcus haemolyticus
acaccgatgatgcaacaatatttaaaaattaaatcgcaatatcaagattgcttattattcttcagattaggcgatttttatgaaatgttttttgaagatgctaaagaagcttcaagggtattagaaattacattaactaaaagagatgctaaaaaagagaatccaatacctatgtgtggcgttccgtatcattccgctaatagctatattgagacattgataaataatggttataaagtagcaatttgtgaacaaatggaagatcctaaacaaactaaaggtatggtaaaacgtgaagtagttagagttgtaacacctggaacagttatggaacaaggtggtatggatgaaaatcaaaataactacattttaagttttattaaacaagatagtaactacgcccttagttattgtgatatttctacaggagagttaaaagccactcaaattgaagatgaagatacattgattaatgaaattgtaactataatcctaatgaaatcgttgttaaccaagaaattgatgaaaatcttaaaaagcaaatctatttaactacagaaactataacaattagagaatctatttccgatgcaagctatgaagtgaatcaattaactaataatcatatgtatctagcaacacaactattactcgattatgtttatcatactcaaaaacgagatttgtctcacttagaaactgcaataacgtatgctgcagtggattttatgaagatggactactatgctaaaagaaatttagaattaaccgaaagtattagactaaaatctaaaaaaggaacacttttatggttaatggatgaaactaaaacgccgatgggagcacgtcgccttaagcaatggatagacagaccattaatcaataaagaaagaattgaagaaagactaagtatagtagaatcattcatgaatcactttattgagagagacacattacgaggatatttaaatcaagtatatgatatagaaagacttgttggccgtgtcagttatggcaatgtcaatgcgcgtgatttaattcaacttaaacattcaatttcagagatacctaatattaaatctttacttgaaagtatgaatgacgtagcatcaaatcaatttagttcccttgaaccattagaagacttattacaagtgttagaagatagtttaatcgaagaaccgcctatttccattaaagatggtggtctatttaaacaaggctttagtaaacaattagatgaatacctagaagcttctaaaaatggaaaagattggttagcacaattacaagctaaagaaagagaacgtacaggtattaaatctcttaaaattagttttaacaaagtgtttggttattttatagaaattacaagagcaaatttacaaggatttgaacctagtaaatttggctatcaccgtaaacaaacattgtccaatgccgaacgcttcattacagatgaattgaaagaaaaagaagatattattttaggtgcagaagataaagcggtagatcttgaatatcaactgtttgttcgactaagagaacacattaaaacatatactgaaagactacaaaaacaggctaaaatcatttctgaacttgactgcctacaaagttttgctgaaattgcacaaaaatacaactatgttaaacctgaatttagtgataataaaacgctaagcttagagaactctcgccatcctgttgttgaacgtgtgatggactacaatgactatgtacctaatgactgtaaattagataaagataactttatatatctaataactggtcctaacatgtctggtaagtcaacttacatgaggcaagtagcaatcataagcatcatggctcaaatgggggcttatgttccttgtaataaagcagaattaccaatatttgatcaaatattcactcgtataggtgctgcagatgatttagtatcaggaaaaagtacatttatggtagagatgttagaagcacaaaaagcattaacttacgcaacagaagatagtttaataatcttcgatgaaattggtagaggaacttcaacatatgatgggctagcgttagctcaagcaatgattgaatatgttgctcaaacatctcatgcgaaaactttattctcaacacactatcatgaacttacgactttagatcaagaactaccaagtcttaaaaatgttcatgtggctgcagatgaatatcaaggtgaattaatctttttacataaagtaaaagatggcgctgtagatgatagttatggtattcaagtagcgaaactagctaatttgccagatgaagttattaaccgtgcacaagttatattagatgct

SEQ ID NO: 35583 - DNA, 570 bp, Staphylococcus haemolyticus
ttgaagaaagaaatagttgaatggattgttgccatagcggtaggtttattacttgtatgggtaatggttaacttcgtagctaaatcatatactataaaaggcgattcaatggatccaacactaaaagatggcgaacacgtcatggttaacattctaggatataaagttggagacataaaaaaaggtaatgtaatcgtatttcatgcgaatcaacaagacgattatgttaaacgtgtcattggtgtacctggcgataacgttatttataaaaatgataaactatatgttaatggtaaaaagataaatgaaccttatcttgattacaatgaaaaacgtaaacaaggtgaatatattacgggttcatttgaaactaaagatttactaaatgcaaatcctaaatcaaatatcataccaaaaggtaaatatttagttttaggtgataacagagaagtcagtaaggatagtagggcgtttggtttaattgatagagatcaaattgttggtaaagtatcatttagattttggccattcagtgaatttaagtttaattttaatccagataatgaaaaa

SEQ ID NO: 35584 - DNA, 3495 bp, Staphylococcus haemolyticus
gtgggcataatggagttgaacgcatacattggcagagcagggacaggcaaatctcatcatatgattgataatattaagcaacaaatgaaagaggatcctctaggcgatccaattgttttaatagcaccaacacagagtacttttcaattagaacaagcatttgttaatgataaagaattgaatggaagtctaagaactgaagtgcttcactttgaacgcttaagttatagagtttttcaagaggttggaggattaactgaagaacgactaacgcaagcggctaccgagatgatgatttatgatttagttcaacaacataaatcggaattaaaactatatcaatcacaagtaaattattatggttttagtgagaagttaagtgaacaaattcaagattttaagaaatattctgttacgccagaacatttacatacatttttgcaagataatgacttgaagacgagaactagacataaattagaagatatatcgcttatttatcagtattttgaggaacgcataaatggcgaatttattacttcagaggatagtttaaatcattttattgatattttaagtcaatcagaatggattaaaagagcagaggtatacatagatggattccacaacttctctacattggaatatcaaattattaaagcactcgttcaaagcgccaaaaaagttactgttcttttaacaactgatggtaatgaagatccatttagtttattcagaaaaccctcagaggtattaacacatttaaaggaaattgctaaagatttaaacatagaattacaacaacaattctttaaacaacaatatcgttttaacaataaagatttaatacaactggaacaacaatttgacgcattgcaaattaatcctatcgcttacgatggcagtattaatattttagaatcctcaagtatacgtgaagaagttaatgaagtagctcgccaaattattaaagatacacgtgataagcaatatagatatcaagacattgctatcttgtatcgtgatgaagcttatgcatatttatttgactctgttcttccacagtacgatattccatttaatattgacactaaaagatcaatgacacaccatccgatcatggaaatggtacgctcacttttggaagttattcaaacaaactggaatattagtcctatgatgcgtttaattaaaaccaatattctaactaatcactttaaggatagtgcatatttaattgatttattagagaactttgtcgttgaacgtggtgtttatggcaaacgttggcttgatgaaaaactgtttagtattgataactttacgaaaatgggacgtaaagaacataaattaactactgaagagcgagaagatttcgagcaagtagttcatttaaaaaatgatattattgataaaatattaacttttgaaaaagcaatgaacgaagcagaaaatgtgagaggttttgcgacagctttctatgagacaatggaggcatttgatttacctaaatatttaatgactcaccgtgaccaattggacgtcgatggtcgtcatgaagaagctgaagaaatagatcaaatttggaatggacttattcaaattttagatgatttagtcactgtatttgataatgaagaaatgactcttaaacgctttttagaggtatttgatattggtttagaacaattagaatttgtaatgattcctcaaaccctcgatcaagtgagtatagggacaatggacttagcgaaagtagacaataaaaaacatatttatatggttggaatgaacgatggtgctatgccgcaaccggtttcttcttctagtctaataacagatgaagaaaagaaagtgtttgaacaacaagcacaagttgaattaagtcctacatcagatatcttacaaatggatgaagcgtttgtttgttatattgcaatgacacgaggcagtgaacaagttacattttcatatagtttaatgggtgcacaaggtgaggataaagaaaaaagtccatttatagaccaaatacaagggttgttcaatgggttagaagtaatgaatattcattatcaacataatgcacaacctttatcgttaatggagcatccacatcaaactaaagtcgtcttattcgaatctttaaaagcttggctagaggcagagatggtcgctgatgtatgggttgatgcttatcaagtcatgcgtgataatgacaaattgaataacggtttagagtacctattaactgcgttgacatatgacaacgaaacagtgaaattagatgaaccattggctgcatctttatatggttcaacaattaacgcaagtgtatctagatttgaagggtataatgattgtccgtttaaacattatgcgaatcatggtttaaggttaaatgagcgtacgaaatataagcttgaaaattttgatttaggaaatattttccatacagcattgaagtatatttcggataaggtagatggagactttaaaaatcttgataataagaagatacatgctttaactgttgaagctttagaaaatgttttacctcaagtccaatttaatctcatggattcaaatgcatactatcggtatgtgtcaaaacgaattggtgtcattgtcgaaagtactttgaaagcattacgctatcaaaataaaaatacaaagttcaaaccacaacgtttcgaagcagggtttagaaagacaccgaacaacagtgaagaacttattgcacaaccattaattacaaaacaaggcattccagttaatatacgaggacaaattgatcgtatagatgcttacactaaagatgataagagctacattaatattattgattataagtcatctaatcccagtgcgaaattagatttaaaaaaggtttattatggtaaacaaatgcaaatgatgacttatatggatattgctttgcaaaatgcccaacgtctgggattatctaatgaaattaaaccaggtggcctattgtatttccatgtacatgatgaacgtctcagttttaaagactggggagaattggaagatgatgctttaacacaggacaaacttgaacaagcatttttaaaagaatataaattacgtggcttagttaatagcgatatggatgtagtagacgcattggatattcgtttagaagaaattggtaaatccgacattgttccagttagcctgaagaaagacggaagtattggaagtagggggagcagtgtcgctgatgaaacaacaattcataaatttatcaaacataataaagacaactttataaagactgctacaaatattatggaaggtcataccgaagttgcaccacttaagttcgatgaccaattaccatgccaattttgtaattttcaatcagtgtgccatgtggatactattattgatagtaaacattatcgccatgtagatgaaactatagatcctatcaaagcaatacaagatgtcgagttagaaagcggtgatcataatgaa

SEQ ID NO: 35585 - DNA, 3684 bp, Staphylococcus haemolyticus
gtgatcataatgaataacatccccatcaaacctaaagatgctcaatggacagatgcacagtggaagagtatatatgctaatggtcaagatatattagtagctgcagcagcggggtctggtaaaactgcagtattagtagaaagaattattcaaaaaatcattagagatgaaatagatgttgataagttactcgttgttacttttactaatttaagtgcgagagaaatgaagcatcgtgttgatcagcgtattcaacaagcggcaatagaaaatcctaacaatgaacatttaaagaatcaacgcattaaaattcatcaagcacaaatttcgacattacatagcttctgtttaaagattattcaacagcattatgatgtcattgatttggatcctaattttcgcacaattagtgatgtagagaatgtgctgttacttgaacagtctattgatgaagttttagaaaaacattatgatacaccggatattgaatttcttactttagtagaacaattatcaagtgatcgtaatgatgataattttagagatttgttaaaacgtttctataatttcagtatagccaatccttcaccgtttgagtggttggattcattagttgaaatttacacggacgataataaacataaattatatctagacgaattagaaagattatcgaaaatttatatcaaagctgcatatcatactttgttagaagcggaaaataactttctaaattgtatagaggcggaaaagcatttagatgttatcaagctagaaaaatttaaatgcgaaaaaatgattgagggtaatgtgataaattttgaagaaatcattaattatacctctgaaaaattgcctacaataacaaaaaaattaaaagatactaatgaagatgaaggtataagttctcagtttttaacaaacgctaaagatttttatgatgattataaaaaactattatcggaagtaaaaaataagtatctaatgcgttcttatgaagatttaaaagtagatatgaaacgtttggctcctagaattcaataccttgtacaaatcgttaaggatattattaatggctttgctgaaaaaaaacgtagtcgcaatgtactggatttttctgattatgaacacttcgctttacaaatattaactgaccaagagggcaatgcttcgcctattgctaaagaatatcgatcacaatttgaagagattttagtagatgaataccaagatacgaaccaagtacaagaagcaatcatatctaaaattaaacgtggtgacgaatctaatgggaatttattcatggtaggtgacgttaaacaatctatctataaatttagacaggctgatccaacgttatttatggataaatatcatcgtttcacaaaagatggcgatcaatcagggttacgtatcgatttatctaagaatttccgttcacgtaaagaagtactcgccacaacaaactacttatttgaccatatgatggatgaagaagtaggtgaaattgagtacgatgctgatgcgagactttattttggtgctactaaatattctgataaatctatgcctcttgaactacatgcattaattcaagataaaagtagcgataatgatttagaaaagtcagaacaagaagctcgctatattgctgagcaagttaaatatattattgagcataaacaagtttatgatatgaagtcagaaacttatagacaagctactttcaaagatatcgtcatacttgaaagagggttgaaaaatgcgcgcaatttacaacatgtatttaaagactataatattccgttccatgtaaatagtaaggaagggtactttgaacaaactgaagtacgtctcgtcttatcatttttaagaaccgttgataatcctttacaagatatatatttagtaggattgatgagatcggttatataccaatttacggaagatgaattagcaaacattcgagttcaaagtatgaacgatgattatttctatcaatctatattgcattatatgaaagatcaagaagcgaaccctttgttagttgagaaattagaacattttatggatgatataaacatgtatcaagaatatagtcaatctcatcctgtgtatcaactaattgataagttttataatgatcattacgttattcaatattttagtggtcttattggtggtaaaggtagacgcgcgaatctatatggattgtttaataaagcagtagaatttgaaaattcaagttttagagggctgtatcaatttataagatttattgacgaactaatagaacgcaataaagactttggtgaagagaatgttataggtcctaatgataatgtggtacgtatgatgacagttcatagtagtaaaggtttagagttcccatatgttatttattcggaactttcaaagaattttaataaaggcgacttacgtaaaccactcatcttaaatcaaaaatatggtctaggtattgattattttgatttagaacaaaatgtaacctatccgtcattatcgtcagttgtcattaaatcaattactgaaaaagaacttatttctgaagaaatgcgattgatgtatgtagctttaacgcgagcgaaagagcaactcattcttattggtactattgataaggaagaaacattagaaaaacttgagcgattgccaatttcaggtaatcaaattgcattgcataagcggttatcagcagatcgaccttttgatttaatatatagtattttggctaaataccaatctacatctttattaccagagtatcagtttgagaaatccattgataatttagatgagagtctgcgtcctactgtagatattaaaattgcacaatttgaagaactttcgattgaggacagtgaatcagaacaagaaagtcgcgatgtttcagatttagaagtagaaggctcgcatgataagacattaaaacaacaaattaatgatcaattgtcatttaaatatccgtatttaaaagatacggagaaaccatctaaacagtctgtttcagaattaaagcgtcaattagaaacagaagaaagtggtacaagttacgaaagggtaagacagtaccgtataggtgtatcaacttatgagagacctaagtttttacgtgaaaataaaaagcgtaaagcaaatgaaattggtactttaatgcatacagtcatgcaacatctaccatttaaagaaacgcgtataactgaaacagaattgaatgactatattaatgaattaattgaaaagcatattattgaagaagatgctaaaaaagatattcaatttgaagcagttatgaattttattagaagtgacttgtatatgactattacacaagctgacaaagtttatagagagttaccatttgtcgtaaatcaagcgcgtgtagatgaaatgcctgaatcagatgaagatgtgtcaattattcaaggtatgattgatttaatatttttaaaagacgatcaatattactttgtagattacaaaacagatgcatttaataagcgtagaggtatgacagatgaagaggtaggtatacaacttcgtgataagtataaaattcaaatgaaatattataaaaacacattagaaacgattttaaattctaaagtatacggttacctttatttcttccaatttggtcaaatgagtattgaagaagatgtt

SEQ ID NO: 35586 - DNA, 903 bp, Staphylococcus haemolyticus
atgaaatttctatcattcaattataaagacgctgaatcttacggcgtaaaagttaagcgtgaagacgcagtttgggatcttaaaaaggtatttgcggaatttggagaaggtgatttccaccctcaaacattattagagggattacaacaaaaccaaacattagatttccaagaacaagtacgtaaagcagttgtagcggctgaagatagtggtaaagcagatgaattcaaaatcgcctttaatgacattgaattcttaccaccagttacaccaccaaataatgttattgcattcggtcgtaattaccaagatcacgcaagtgaattaaatcatgaggtacaacgattatacgtatttaccaaagcagcatcatcattaacaggtgatgaatcaacaattccaaatcataaagatatcactgatcaattagattacgaaggtgaattaggtatcgtaatcggtaaatctggagaaaaaattccgaaagcattagcattagactacatctacggatatacaattattaatgatattactgatcgtaaggcgcaaaatgaacaagatcaggcatttctatctaaaagtttgacaggtggttgcccaatgggaccttatattgtaactaaggatgagttaccaacacctgaaaatgttaatatcgtaactaaagttaataatgatattcgtcaagatggtaatacaagtcaaatgattaataaaattgatgatttaattgaagaaatttctaaatatgtagcattacatccaggagatatcattgctactggcacaccagctggagtaggtgcaggtttacaaccgcctcagttcttgcaacctggtgatgaagtaaaagttactattgataatattggtacattaactacttatattgctaaagat

SEQ ID NO: 35587 - DNA, 1935 bp, Staphylococcus haemolyticus
atgagtttacacaaaaagaaaataagtctttttgcgtttttcttactgactgtttttacagtgacattgaagacgtatttttcatattatgttgatttttctttgggtgttaaaggactagttcaaaacttaatactattgatgaatccatatagtttaatcgcgcttattttaagtgtgttcttattctttaaaggaaaaaaagcatattggttcatctttattggaggatttttactatcattcttgctatatgcaaatgtagtttattttagattcttctcggactttttaacatttagtacacttaaccaagcggggaatgttgagtctatgggtggtgctgttggggcatcatttaaatggtatgactttgtttactttatagatactattgtttatctattcatccttattttcaaaggaagttggttagataagcgggtcttcagtaaaaagtttgtaccggttgtaatggctgcttcagtagcattattcttcttgaacttagcttttgctgaaacagatcgtcctgagttattaacacgtacgtttgaccataaatatttagtgaagtatttaggtccatataactttacagtttatgatggcgttaaaacaatccagaataaccaacaaaaagcattggcttctgaagatgacctaactaaagtattgaattacacgaaacaaaaaaatacaacaccaaattcagagtattttggtgctgctaagaagaaaaatattattaaaatacatctagaaagtttccaaacatttttaatcaataaaaaggttaatggtaaagaagtaacaccgttcttaaataaattatctacaggtaacgaagattttagatactatccaaacttcttccatcaaactggtcaaggtaaaacatcagacgctgagttcacaatggataacagcctttatggtttaccacaaggttctgcatattcattgaaaggtgataatacttaccaatcattacctgctattttagatcaaaagcaaggttatacttctgatgttatgcacggtgactataaaacattctggaaccgtgaccaagtttataaacattttggtattgataaattctacgatgcaacatattatgatatgtctgacgataatattgttaacttaggtttaaaagataaaccgttctttaaagagtcagcagaatatcaatctaaaatgaaaggaccattctattcacacttaattacattaacaaaccactatccattcacattgagtgaggaagatgcagatattgataaacctaatacaggtgattcaactgttgatggttacattcaaacagcgcattatttagaccaagcacttgaagagtacgtaactgatcttaagaagaaaggtttatacgacgattcagttattatgatttatggtgaccattatggtatttcagagaaccataataatgcgatggaaaaattattaggtgaaaagattacgccagcgaaatttatggacttaaatcgtacaggtttctggctaaaaattcctggtaaagaaggtacagtagataagacatatgctggtcaaatggatgttatgcctactatattacatttagtaggaattgactctaaaaacttcttaatgtttggtactgacatgttatctaaagatcataatgatgtaattccattccgtaatggtgatttcatcacgaaagattacaaatatgtaaacggtaaagcatattctaataaaactaacgaattattagagacgcaaccaaaagatttagataagaataagaaacaggttgagaaagatttagaaatgagtgacaatgtcttaaatggtgacttgttcagattctataaaaaccctgatttcaaaaaaattgacccatctaaatatgaatataaaactgggccaaaaggtaaccaaaaa

SEQ ID NO: 35588 - DNA, 1878 bp, Staphylococcus haemolyticus
atggaagcgtataaaatagagcacttaaataaatcatatgcggataaaatcattttcgatgatttaaacctatctatttctgaacatgaaagaataggattggttggaataaatggtactggtaaaagtactctacttaaagttatcgggaatatagatgatgattatacagctgatattacgcatcctaatcaatatcgtatacggtattcttctcaaaagcaggatttagatggagatatgactgtttttcaagctgtacttagttcagacacatcgactcttcaaattataaaagcttacgaagaagcagttaatgcttattcacaacaacaagatgacgcgcattttcaaaagatgatgaaagcacaagaggctatggaccaaaatagtgcatgggattataatgcagaaattaaaaccatattatctaaactaggtattaatgacacgaccaaaaaggtgaacgaactgtcaggtggtcagcaaaaacgcgtagtgcttgctaaaacgcttattgaacaacctgatctattattattagacgaacctacaaaccacctagactttgaatctataacatggctaatcaattatgtaaagcagtatcctcataccgtattgttcgtaactcatgatcgttactttttaaatgaaattgcgagtagaatcattgaattagatagaggtaaattaaaatcttatccaggtaattatgaagattacatagcaatgcgagcagaaaatgaaattattgaacaaaaacaacaagaaaagcaaaaggctttatataaacaagaattagcttggatgagagctggcgctaaggcaagaacgacaaagcaacaagcacgtatcaaccgttttaatgatttagaatcagaagtgcaagatcaacacgttcaagataaagggcaattgaatctagcgtattcaagattaggcaaacaagtgtatgagttagaaaaactttcaaaacaaattaacggcagaacattatttgaagatattactgaaattattcaaagtgggcaacttattggtattgttgggccaaatggagctggaaagacaacattattaaatattttaagcggagaagacaacgattatacaggcacacttaaaattggccaaactgtaaaagtagcatactttaaacaaacagaagaaacgttagatagagatatacgtatgattgattacctacgagaagagagtgaagtggctaaagagaaggatgggacttcaatttctgtaactcaattactagaacgtttcttgttcccaagctcaacacatggtaagaagatatacaaattatcaggcggagagcaaaaacgcttatatttattaagattactcgtgcatcaacctaatgtactgttgctagatgaaccgacaaatgacttagatacagaaacattaactattttagaggactatattagtagttttggtggttcagttataactgttagtcacgatcgctattttttaaataaagtcgctcaagagtactggtatattcatgacggaaagatggaacgtattgtagggacctttgaagattatgagacttataagaaagagcaggataaattagctgcactagagaaacaagcacaacaaccaaagcaaaaaacaacggcgcgaaaaaaatcagggttgtcttataaggaaaaacgagaatatgaaactttgatggaacgtattgaacaaactgaaacacgcttagaagaaatagatgaagagatgattgaggccagtgctgattatggcaaaatcaaagaattaaatgaagagaaagaacatttagagctaacatatgaaacagacatcacgagatggagtgaattagaagaactaaaagagcaa

SEQ ID NO: 35589 - DNA, 1776 bp, Staphylococcus haemolyticus
atggaagcaacattatcgcattattttgggtatgacaagttcagacctggtcaaaaagaaatcataactaaaataatggatcatcataatgttttaggtgtattacctacaggtggtggtaaatcaatttgctaccaagtgcctggattaatgttaggtggaacgacaattgtaataagtccactaatatctttaatgaaagaccaagttgatcaacttaaagcaatggggattaaagcagcattcttaaatagtagtttaactaagaagcaacaaaaagaaatcgaagatgatttaaggaaaggtcatattcagtttttatatgttgcaccagaacgtttcgataatcaatattttttaagtttattaagtcgaattgatattcatcttatcgcatttgatgaggcacattgtatatctaagtgggggcatgactttagacctagctatcaaagtgtcattaaaaaagtattcacattacctcaaaactttacaatcgttgcattaacggcaacagctactgcagaagtacagcaagatattatggaaaagttaaacatagatagacgagatgaagtaaaaacaagtacgaaacgtcggaatcttatttttaaagtgaatcctacctatcaacgtcagaaatttgttgtagattatgtgcagaaacataaagaacaagcaggaattatctattgctctacacgtaagcaagttgaggagttacaagaagcattagatgttatcaatgtttcttcggcaatttatcatgctggtttaacaaacaaagaacgcgaggccgctcaaaatgaatttgtatatgataaagtgaaggttgttattgcgacaaacgcctttggtatggggatagataaatcaaatgttagatacgttatacactataatatgccaggtgatttagaatcatattatcaagaggcaggtcgtgcaggtcgtgatggattagaaagtgaatgcattcttttatttagtgaacgtgataaaggattgcatgaatattttattacagtttcacaggctgatgaagattataaagataaaatgggtgagaaactcactaaaatgattcaatacacgaaaacaaaaaaatgccttgaagcgactgtagtacattattttgaacctaacgaaaaattagaagagtgcggacaatgtagtagctgtattcaacaaaataaaacatatgatatgacgcaagaagctaaaatgattattagttgtatcgcacgcatgcgtcaaaaagaaagctatagcgtaatcattcaagtcttgcgtggagaaacaagtgattatattaaatataatgattatgataagttgacgacacatggtttgatgaaagattataccacttcagaattaaatcatttaattgatgaattgcgtttcaaagggtttttaaatgaaaatgatgaaatcttaatatgtgatgaaagtgttaaaaagttacttaacaataaagagaaagtatttacgacaccatttaaacaaaaatccaaagaaaaagtctatatcaatacagttgaaggtgtagatcgagcattatacagtgaattagttgaagttcgacgtaagttaagtgagaaattgaatattgcaccggttagtattttttcggattacacgttagaagagtttgctaaacgcaaaccagaatccaaacaagaaatgatatctatagatggtgttggtagctataaattaaaacattattgtccgaaattcttagagattatacattcatataaagcgagtata

SEQ ID NO: 35590 - DNA, 1076 bp, Staphylococcus haemolyticus
atgagcgaattatttagcacactcaatgatcgtaaaggcgaagtacttacgaccatcttagaacatatccaaatttcatttattgcactactaatcgcaattttaatcgctgtgccattagggattgctttaacaaagacgaagcggttatctgaggtcgttatgaatatagctgctatattacaaaccattccatcattggcattattagggttaatgattccaatatttggtattggtcgcgtgccagcaattattgcattagttgtgtatgcattgttgccaattttgagaaatacatatacgggcattaaagaagttgatccgtctcttattgaagctgcaaaaggtattggcatgaagccgatgcgtcgtttgactaaagtagaattgccaatagcgatgccagtgatgatggccggtattcgtactgctatggttctaattatcggtacagcaactttagccgcattaattggtgccggtggactaggagatttaattttactaggtattgaccgtaacaacacgtctttaatccttatcggagcgattcctgctgcactactcgcaattatgtttgatttaatactacgttatatggagaaattatcttataaaaagctactaatcactgtaggtgcaatgattcttattatactattagtcattgttgtaccacttttcggtaaaaaaggtgacacaattacgcttgcaggtaaattaggttcagaaccttcaattattacgaatatgtacaaaattttaattgaggatgaaacggatgatacagttgatgttaaagatggtatgggtaaaacatcattcctgtttaatgcattaaaatctgacgacatcgacggatatttagaatttacagggacagtattaggtgaattaactaaagaagatttaaaatctaaaaaagaagatgcagtatatcaacaagctaaacaaagtctagagaagaaatatgacatgacgatgttaaaacctatgaaatataataatacggtatgctttagcggtgaagagagactttgctaaagaaaattaatattaaaacaatttggtgt

SEQ ID NO: 35591 - DNA, 1038 bp, Staphylococcus haemolyticus
atgatgacgcaaaaagtattgaaaacaataaaagaacttacagaaataaatagcccatctggtaatgctacggaagcaattaattatgttaagaacaaagttgaagcgttaggttatgatactaagacaacaaataaaggtgccttaattatcgaagttcaaggtgaaaatgatgaacaacaaagatgcattaatgcccatgtagatacactaggcgcgatggtcaaagaaattaaagaagatggtcgattatctattagtttaataggtggatttacatataacgcgattgaaggggagtattgtgaaatacaaactgattcaggacaagtatatacaggaacgatttgtttgcatgaaacaagtgtccatgtttacagaaataatcatgaaatacctagagatggcgaacatatggaaattcgtatcgatgaaaaaacaacgtctgatcaagagacaagagatttagggattgaagtgggagattttgtaagttttgatcccagaactgaaattacatcatcaggatttattaaatcaagacacttagatgataaagcaagtgtagcaatgatactagaactgcttgaaaaacttaaacaagaagaaacgcaattgccacatacgactcagttttatatttctaataacgaagaaataggatatggtgcaaatgcatcaatatcggataagatagtagagtttattgcatttgatatgggagcgctaggcgatggtcaaacctcagatgaatatactgtatcgatttgtgctaaagatggatcaggtccttatcataaagaattaaaatctcatttaataaatttatgtaaaatcaatgacataccttataaagttgatatttatccttattatagctctgatgcatcagcagcactaaaagcaggtgcagacattcgtcatggtttatttggtgctggtatagagtcatctcacgcgcttgaaagaactcatattgagtctattgatgcaactcaaaatcttttatacgcatattgtttatctccaataaattta

SEQ ID NO: 35592 - DNA, 1014 bp, Staphylococcus haemolyticus
atgagattattaaaacaattggataataacataactttaacgcaatcagagacaacacaattcataacctatctaacaaaccctgaaattaatgtggaagacaaagtcgacttattaacgcaatttacgaaaaaggaaattaaacaacaagaattaacctatgtcgtcaatagcttaattcaaaccatgtatcctaatcaaccaacatatgaaggaagtatatgtgtatgcggtacaggaggggataagtcaaacagtttcaatatttctacaacagtatcgtttatagtagcaagcgcaggtattccagtcattaaacacggaaatagaagtataacatcccattcaggaagtactgatttgttaaatgaattgggaataaagacgacaaaagtttcagaagtcccattacaaattgaagaacagggattggcatttattagcgcaatggagtcttatccaataatgaaatatattcaacctgttagaaaaatgatttctacaccgaccatctttaatatagttgggccacttatcaatccatttaaattgacctatcaagtgttaggagtgtatgacccaagtcgattgtacatgatagcacaaacattgaaagatttaggacgacggagggcaatagtgttacatggagcaaatggtatggatgaagctacactttcaggaaacaatgaagtttatgaattaaatgaaaatggagacataacgcattattttataaatgctaaagattatggtttaaaggttgcaagtaatcaagatttacagggtgggagtccgaaagaaaacaaaatgattacattagatattttaagtggagatgataaaacttgtagaagagatgttgttgtattaaatgctgcacttgcgttatacgtttctgaaaaggtagatacgatagcatctggaataagtttagctacgatcttaattgatagtggtcgagcgatggtacaatttatgaaaatgagaggtgatatctgtgacgatattaag

SEQ ID NO: 35593 - DNA, 780 bp, Staphylococcus haemolyticus
gtgacgatattaagtgaaatagtggattataaagagcaattattaaaagacggctattatcatgataaattacaaaatttgaaaggggtaaaacataaaaataaatcgcgattaacggatgctttaattaaaaatgacaatttaacattaattgctgaaattaaatcaaagagtccatctgtaaaagcttttcaacaaacaaatataattaaacaagtgagtgattatgaacgttatggagcaaatgctatctccgtattaacagacgaacgatatttcggtggtagctttgaaagattacagcaaatatcagaaacaacacaattacctgttttatgtaaagatttcatcattgatccgcttcaaattgatgttgcacaaaaagcaggtgcttcaattattttactcattgtaaatattcttaccgacgaaaagttacgacaactctatcaatatgcaagttctaagggactagaagtgttagtagaggtacatgatggtattgagttacaacgtgcctatcagttaaatccacaaatcattggggtaaacaatcgtgatttaaaatcattcaacaccgatgttaaacatactaatcaaatacttaagtgtaagaaagagaactatttatatatttctgaaagtggaattcattcacaacaagaggttaagcaaatagtaaaaagcgggatcgatggtttattagttggtggagccttaatgaattgtaatgagttagaacattttataccctcacttaaattaaaaaaggtgaaacaa

SEQ ID NO: 35594 - DNA, 1209 bp, Staphylococcus haemolyticus
atgtataatatacaaactgaagcagatgaattaggttttttcggagaatatggtgggcaatatgttccagagacattaatgccagcaattatagaattaaaacaagcgtataacaaggctaaacaagatcaatcgtttcaagatgaattaacttattatttgaaagaatatgtagggagagaaacctcattgacttatgcaaaatcatatagtgaagcgttgggtggagctcaaatatatttaaaacgtgaggatttgaaccataccggcgcacataaaattaataatgcgatagggcaagctttattggcaaaacgtatgggcaaaaataaattagttgctgaaacgggcgcaggtcagcatggtgttgctagtgccacagtagctgcattatttgatatggaattaatcgtatttatgggaagagaagatatcaaacgtcaacagcttaatgtatttcgcatggaattattaggagctaaagttgaagcagtggatgaaggtcaaggaacactttctgatgcggtaaacaaggcattacagtattgggttagtcatgttgaagatactcactatttactaggttcagcattaggacctgatccttttccaacgatggtcagagattttcaaagtgttataggtcaagaaattaaagaacaattacttcaaaaaactggtcgattaccagatgcagttgttgcatgtataggtggagggtctaatgcaatagggaccttttatccatttattaaagataaggtcaaattatatggtgtagaggctgcaggacaagggattgatactgttaagcacgcacttgcaattggaaaaggacgtccaggcgtacttcatggttcaaaaatgtacttaattcaagatgaaaatggacaagtagaattagcacactctatatctgcaggtttagattatccaggtataggtcctgaacattcatattatcacgatattggacgtgtgcaatataaacatgccactgatacagaagcaatggaggcgctcatccgcttcagcaaaatggaaggaatcatacctgccattgaaagtgcacatgcacttagttatgttgaaaagttagcacctaaaatgaataaagatgaaattttagtagttactatttcaggtcgcggtgacaaggatatggaaacaattagacactatatgcaaacaagaggtgagtcacatgac

SEQ ID NO: 35595 - DNA, 1178 bp, Staphylococcus haemolyticus
atgaaatttacagagttaacagttaaagaattcgaaaactttgtacaaaacccatcattagaaagccattacttccaaatgaaagagaatattcaaacacgtgaaaatgatggctttgaagtagtgttactaggtgtaaaagatgaaagcaataaagtattagctgctagtcttttctctaaaataccgaccatgggaagttatgtatattactcaaatcgaggcccagtaatggactattctgatttaggcttagttgatttttacttacgcgaattagaaaagtatttacatcaacaccaatgtttatacgttaaaattgatccatactggatttatcaaatttatgataaagatattaatccacttgaagatagagagaaaaatgatgctataattaatttgtttaaatcacatggatatgaacaccatggatttactactgaatatgacacatcaagtcaagcaagatggatgggtgttagctatctaaaaggggaaacacctgcttcattaagaaaacaatttgatagccaacgtaaaagaaatattaataaagcgataaactatggggtgaaagtaagattccttggtagagatgagtttcatatattcttagacttataccgtgaaacagaagcaagaacaggtttcgtatcaaaaacagacgaatatttctataacttctttgatacttatggagataaagtgcttgttccacttgcgtacattgatttagatgaatacataaaatcattgcaagacgctttaaatgataaagaaaaccgtcgtgatcaaatgatggcaaaagaaaacaaaaatgataaacaacttagaaaaattgcagaattagataagcaaattgaacacgataaaaaagaactcttacaagcaagcgaattacgtcagacagatggccaaatcttgaatttggcatcaggaattttctttgcaaattcatatgaagtgaattacttctctggaggttcatctgaaaaatataataattatatgggaccatatatgatgcattggcatatgatgaactattgcttcgatcacggatatgatcgatataatttttatggtttatctggtgattctaagaggtcagtgaagatttatggtgttatcgctttaaaagaggatttaatgtttacatttgagagctaatcggg

SEQ ID NO: 35596 - DNA, 987 bp, Staphylococcus haemolyticus
atgtctagtttattagatgtattacaagaaaaactttcaggaaaaaatgtcaaaatcgtattacctgagggtgaagatgagcgtgtgttaacagctgctacacaattacaagcaactgactatgtaacacctgtagttttaggtgactatgacaaaattaacttattagctaaagataaaggattagatgtttcagacatcgaagtcattaatccatctacaagcgaattaaaaccagaattagttaaatcattcgttgaacgccgtaaaggtaaagcaactgaagaacaagctgatgaattattaaataacgttaactatttcggtacaatgttagtttacgctggtcatgctgacgggttagtaagtggtgcagcacattcaactggagatactgttcgtcctgcattacaaatcattaaaacgaaaccaggcgtatctaaaacttctggtatcttctttatgattaaagatgatcaacaatatgtattcggtgattgtgcaattaacccaacattagaatcatctgatttagcagaaatcgcagttgaaagtgcgaaatcagctaaaagtttcggcatggacccacgtgttgctatgttaagcttctcaactaaaggttcagctaaatctgacgatgttgacaaagtagcaaatgcagttaaattagctcaagaaaaagtagaatctgaaggcttaacagacgttgtaattgatggtgaattccaatttgatgctgctattgtaccttcagtagctgagaaaaaagcgccaggcgctaaaattcaaggtaatgcaaatgtctttgtattcccaagtttagaagcaggtaatattggatacaaaattgctcaacgtttaggtggttttgacgcagttggtcctgtattacaaggtttaaactcacctgttaacgacttatcacgcggttgctcaactgaagacgtttataaattatcaatcattacagctgctcaaacattacaa

SEQ ID NO: 35597 - DNA, 840 bp, Staphylococcus haemolyticus
atggacttagcgagtaaatactttaatgatatcgattggcgctatgtagaccattcgtctggtttagcgccaatgcaatcatttgcttttgacgatacgttttcagaaagcgtaggtaaagatttatcatgcaatgtggtcagaacatggattcaccaacataccgttattctcggtattcatgattcgcgcttaccattccttaaagatggtattcgatatttaactgatgaaataggttataacgcaattgtgaggaattcgggtggtcttggtgtcgtgttagatcaaggagtattaaatatctcacttattttcaaaggtcaaacggaaacgacaattgatgaagcatttacagtaatgtatttattgatttgcaaaatgtttgaaaatgaagatgtagagattgatacacgagagattgagcactcatattgtccaggaaaatttgatttaagcattgatggtaaaaagtttgccggcatttcacaacgtcgtgtacgtggtggtattgcagtgcaaatatatctttgtgttgaaggatcaggttcagaacgcgcggaaatgatgcgtgtcttctatgaacatgcacttaaaggcgaagtgactaaatttaaatatccggatatacaacctgaatgtatggcatcactggaaactttgtttgggcgagagattaaagtccaagatgtgatgttccaattattacacgctattaaagatttaggtggtaatctgaatatggatccaatcactgaagatgaatggacacgttatgaaggttacttcgacaagatgatagatcgtaatgagaagatgaatcgttcaatagaagctgat

SEQ ID NO: 35598 - DNA, 981 bp, Staphylococcus haemolyticus
ttgaaaaagagtggtaaagcacgcgcacatacgaatattgcactgattaaatattggggtaaagccgatgaggcattaatcataccaatgaataatagtttgtcagttacactagaccgtttttacactgaaacgcgtgtaacatttgatgaaacattaacagaagatcagttaattcttaacggggaagctgtaaatgctaaggaaagcgctaagattcaacgttatatggaaatgattcgtaaagaagctgggatttcagaacatgcgcttattgaaagtgagaattttgttccaacagctgcaggtttagcttcgtcagcaagtgcatatgctgcattagccggtgcgtgtaatgaagctctacaattaggtttgtctgataaagatctttcacgattagcgcgtcgtgggtctggttcagcatctcgcagtatttatggtggatttgctgaatgggaaaaaggaaatgacgatgaaacttcctttgcacaccgtgttgaagcggatggctgggaaaatgaattggctatggtttttgttgttattaataacaaatctaaaaaggtatccagtcgttcaggcatgtcacttacacgtgatacatcacgtttttatcaatattggttagataacgttgaaccagatttgaaagagactaaagaagccattgctcaaaaagatttcaagcgtatgggtgaagttattgaagctaatggtttacgcatgcatgcaactaatttgggagcacaacctccatttacatatttagtaccagaaagttatgatgctatgcgcatcgttcatgaatgtagagaagcggggttaccttgctactttacaatggacgcgggtcctaacgttaaagtattgattgaaaagaaaaatcaacaagctatcgtagataaattcttacaagaatttgatcaatcacaaatcatcacaagtgacattacccaatcaggagtcgaaataattaag

SEQ ID NO: 35599 - DNA, 642 bp, Staphylococcus haemolyticus
atgattcaggtgaaagcaccaggaaagctttatgtagcaggtgaatatgcagtgactgagccaggatataagtctgtcttaattgcggtcgatcgatttgttacagcttcaattgaagcttctaatgcagtaacaagtacgattcattccaagacattacattatgaacctgtaacgtttaatcgcaatgaagataaaattgatatctccgatgctaatgctgctagtcaattaaagtatgttgtaactgcaattgaagttttcgaacaatatgcgagaagttgcaacgtcaaattgaagcattttcatttagaaatcgatagtaatttagatgatgcttcaggtaataaatatgggcttggttctagtgcggcagttttagtgtcagtcgtcaaagcattaaatgagttttacgatatgcaattatctaacctatatatttataaacttgcagtcatttctaatatgcgattacaaagtttaagctcatgtggtgatatagctgtaagtgtatacagtggctggctagcttatagtactttcgatcacgattgggtcaaacaacagatggaagaaacatcagttaatgaagtattagaaaaaaattggccgggtcttcatattgaacctttacaggcccca

SEQ ID NO: 35600 - DNA, 1134 bp, Staphylococcus haemolyticus
cttttcggtttaatcatggtttatagtgcgagtatggttgctgcaactaaagggacgttaacaggtggacttgaagtatctggcacgtatttttataatagacaactcatttacgttattatgagttttattgtcgtattttttatcgcttttatgttgaatattaaaatattacaacaacccaatattcaaaaatggattatgattataatcttcatattactatttttaacacttattataggtaaaaatattaacggatctaaaagttggataaatcttggatttatgaacttacaagcatcggaattattgaaaattgcattcatattgtatatttcatatgtaataagtagaaaattaccgcaagtaagagagaaaattaaagtaattgctgcgccactatttttaataggcgtatgcttatttttagtattattgcaaggtgatattggtcaaacgttgttaatcatgattattattgtttcaatgtttatttttgcaggtatcggtgtccaaaaattagtaagaggaccggttttgcttattgcaggaagtttcatcgcgattgcatcgctctttattgtaagtggaatgatgccacattatttaaaagcgcgttttagtacattaatgaacccatttagttcagaagccggtacaggttatcatttaactaactcattgatggcaattggtaatggtggattatttggtcgtggtttaggcaatggaattatgaaacttggttatttaccagaagcacatactgactttatatttgcagtcatttgtgaggaacttggtttagtaggtggattattcgtcatttgcttattattcttcatagtttatcgtgctttcgtattagctactaaaacaccatcatatttctataaattaatttgtgtaggcgttgctagttatattggcagtcagacttttgtcaatttaggtggtatttcagcaacgattccattaactggtgtacctctaccatttataagttttggtggttcatctatgttgagtttaagtatcgcaatgggtcttctattattagtcgcaaaacaaataaaaattgatgaaaaacgatcacaaaaagctagaaaacaaaaactaggtataactaga

SEQ ID NO: 35601 - DNA, 1837 bp, Staphylococcus haemolyticus
gttactgatactacttttcgtgatgcacaccaatcactcttagcaactcgcgttcgtactaaggatatgatgaatattgcttctaaaactgctgaagtgtttaaagatagtttttctttagaaatgtggggaggcgcaacatttgatgtcgcttacaactttttaaaagaaaatccatgggaacgacttgaaagattacgtaaagcaattcccaatattttattccaaatgttattacgtgcttcaaatgcagttggctataaaaattatgctgataatgtgattgaaaagttcgtgaaagaaagtgcgaatgcaggcgtagatgtctttagaattttcgactcacttaactgggtagatcaaatgaaagttgcaaatgaagcggttcaaaatgcaggtaagatttctgaaggtgcaatctgttataccggtgatatattaaatcctgaacgttcaaatgtatttacacttgaatactatgtaaaattagcaaaagaacttgaacgtgaagggttccatatcttagctattaaagacatggcaggattgttaaaacctaaagcagcatatgaacttatcggagaattaaaatctgcgataaatttaccgatacatttacacacacacgatacaagtggaaatggtctacttatctataaagaagcgatagatgcaggtgtagatatcattgatacagctgttgcttcaatgagtggtttaacaagtcaacctagcgccaattcgttgtattatggattaaatggttttaatcgaaatctaagagcagatattgaaggattagaagaactcagtcactattggagtactgtgcgtccatactacagtgactttgaaagtgacattaagtctcctaataccgaaatttatcatcatgaaatgcctggaggacaatattcaaatttaggacaacaagcaaaaagtttaggtttaggtgaacgtttccacgaggtcaaagatatgtatcgtcgtgttaatttcttatttggcgatatcgtaaaagtaacgccatcatctaaagttgtaggagatatggccctttatatggttcaaaatgacttggatgagcaatccagcctccaaagagggccataagttagatttccctgaatcggttgtatcttatttcaaaggtgatataggtcagccagtcaatggctttaataaggaattgcaagatgtcatcctcaaaggtcaacaaccactaacagaacgtccaggtgagtatttagatcctgtgaattttgatgaaatcagacaagaacttgaagcaaaagattatggtgaagtgactgaacaagatgtaatcagttatgtattatatccaaaagtatttgatcagtttatgcaaacaaaacaacaatatggtgacttatcattattagatacaccaacgttcttcttcggtatgcgtaatggtgaaacagttgaaatagagactgatactggtaaacgattaattattaaacttgaaacaattagtgagccggatgaaaatggttatcgaacaatttattatgttatgaatggtcaagcacgtcgtatttctataaaagatgaaaatattaaaacaaatacgaacttgaaacctaaagctgacaaatcaaatcctagtcatattggtgctcaaatgcctggttcggtaactgaagttaaagttacagttggtgaagaagtaaaagtaaaccaacctttattaattacagaagcgatgaagatggagacaacgattcaagcaccattcaatggaactataaaacaagtaacggttgtaaatggcgatgcgattgcaacaggggacttacttattgaaattgaa

SEQ ID NO: 35602 - DNA, 1578 bp, Staphylococcus haemolyticus
ttgatttctatacttacagttatgcagtttattgttaacatcatgatatttattgtgattctttcaataatcggcttagtacttgtgttgctatttaaagataaagggcagaatcaacacagtgtcttacgtaattatcctgttctaggacgtgtacgttactttgcagaaaagattggaccagaattacgtcaatacttatttgctaatgatacagaggggaaaccattttcaagaaaccagtacacaaatattgtgctagcaggtaaatacaactctcgaatgtctagttttggaacacaacgagagtataaggatggattttacatacgaaatacaatgtttcctttacaacgtaatgaattacaaattgataatcaaactatgatttcaacatttatctataaagtagacaacgagcgtttatttcaacgtgatgaacatagagatcaaacagatattgatccgtattacttaacagacgataacgctattattctcggaaacaatctaagacatccatataaaatcaaacgtctagtcggtcaatcaggaatgagctacggtgcacttggtggtcgagcaatcactgcattatctcaagggttagctcgtgcaggcacatggatgaatacaggtgaaggtggattgtcagaatatcaccttaaaggtggtggcgacattatcttccaaatcggaccaggtcttttcggtgtccgtgataaagatggcaactttagcgacgagcaatttctgaagacagccaatcataaagaggtaaaagcatttgaaattaaactcgcacaaggtgctaaaacccgcggtggacatatggagggcaataaagttacagaagaaatagccaaaatcagaaacatcgaaccctataaaaccgtgaattcacctaaccgatttgattttatagactcacctgaagacttattacaatttgtagataaactacgtcaactaggtcaaaaacctgtcggctttaaaatcgtagtgagtaaagttgaagaaattgaagcgctagttcaatcgatggttgatatgaatatttacccggatttcatcacaattgatggcggcgaaggtggtacaggtgcgacattccaagaattacaagatggtgtcggtttaccactatttacggcgctgcctatcgtatctggtatgttagagcaacatcaaattagagataaaatgaaaatctttgcctcaggtaaattaatcacgccagataaagtagcaattgctttaggattaggtgccgatttagttaatattgctcgtggcatgatgattagtgtaggttgtattatgagtcaacaatgtcacttaaatacatgtcctgtgggtgttgcgacgacagatcctaagaaagaaaaagcactcattgtcgatgaaaagcaatatcgagtaacgaactatattacaagtttacatgaaggactatttaacattgcagccgcagttggtgtcaaaagtccgaatgaaattacaagtgaccatattgtaattaaacgcattgatggttcaatagaaaatatcattgactataaattgaaattaatacgt

SEQ ID NO: 35603 - DNA, 816 bp, Staphylococcus haemolyticus
atgaaacgtttagaaaataaaattgcagtcatcactggtgcaagtacaggtatcggtcaagcatcagcaaaagccttggctaatgaaggtgcacatgtactagcccttgatatttcggatgaattagaaaaaacggttgaagaaataaatcataatggaggtaaagctactgcgtataaagtagacatctcagatgataaacaagtccaagactttgcggataaagctagagatgagtatgggcgtgtagatgttatctttaataatgcgggtgtagataatagcgcaggccgaatccacgagtatcctgttgaagtattcgataaaattatggcagtggatatgagaggtacattcttagtaaccaaattcttattaccgttaatgatggaacaaggcggttctattattaatacggcatcattctcaggacaagcggccgacttatatcgttctggatataacgctgccaaaggtgcagtcattaactttacgaaatctatcgctattgaatatggtcgtgagaatattcgtgcgaatgctattgcaccaggaacaattgaaacaccattagtagacaatttagctggtacttcagaagatgaagcgggtaaaacgttccgcgataatcaaaaatgggtcactccattaggtcgattaggtaaacctgaagaggtaggtaaacttgttgcatttctagcatctgacgatagttcatttattactggtgaaacggttcgaattgatggtggtgttatggcttatacttggccaggagaaatgttaagtgatgatagatggaagaattcagtagaa

SEQ ID NO: 35604 - DNA, 1542 bp, Staphylococcus haemolyticus
atgaccactaatacaaaagaaagaacatctttagttaataaatttctaaatggtgttgaaaaagctggtaataaattaccagaccctgcaatgcttttcttcttaatgtgtgttggcttagccgttatcacttggattgtgtctctttttgacgtatcagtgaaacatccagggaatggagaaaccatacatataaagagtattcttagtactgaaggtatcgctatgattatgaatgatgccgttaagaacttttctgaatttcctgcactaggacttgtattagcagtgatgattggtgtcggtgctgctgagaaatcaggatattttgataagttaatgatttcagttgttaaccgagcttcaaatcaaatcattgtaccgactatcattttaattgggatattaggaagtctagctggggatgcagcaacagtcatcttacccccacttgctgcaatgatctttattaagattggctatcacccaatcgccggtcttgcaatggcctatgcttcttcattaggtggttttggtgcaaactttttaattggtatgcaagatgcattagtctatgcctttactgaaccagcgacgaagattgtttcagatagcgtcaagattaatgtggctatgaactggtactttattgccgcaagtgtcatcttagtacttcctgttatctatttcactacaacaaaggttgttataccacgtttaggtgaatatgatgcgagtcaagcaaattatgatgaagaagaggaaacgtcatctcatattacgccaactgaaaagaaagcattgttctgggcgaacatgtcatttcttttactgattgttgccctaatcatttgttgtattccagaaggaagttggttaagaaacgcgaaaacaggcagtcttattgacgactcccctttaattaatggggttggtttagtaattcttgttattttcttaattcctggtatggtctatggcattttgagtaaacaaatcaagaactcgaaagatttaggtagtatgattagtgactctcttggttcaatggggtctttcatattaatcgtattctttgcagctcaattattagcgttcttacaatggagtaatcttggtattattgtatcagtctatggcgccaaattacttcaacatcaaaatggtatcgtacttatcataggcatcattattcttagtggtttgattaatttaatcattggtagtgcatcagcaaaatggggtattttggctccaatctttgtaccgatgatgattttactaggttatcatcctgcatttactcaaatgatttatcgtgttggtgattcaattacaaacccaatcactccgatgatgccttatatgccactcgttctatcttacgcgcaaaagtatgataaaaatatgaaactaggttccctactttcaagtttaatgccatacacctttgcgttaggtgtcgtatggacattattcgttatcgcttggtacttactaggtattccattaggaccaggtggacctgttaaaattccgaaa

SEQ ID NO: 35605 - DNA, 936 bp, Staphylococcus haemolyticus
gtggtaaggatgagtaaagtagcaattattttcccaggtcaaggtgcacaaaaagttggcatggcaagtgatttgtttaatgaggataagaaagcgacaaatattctaaattcagctcaagaagcaatggactttgatttattggaaacgatgtttacagataatgagaacaaactaggtgaaactgaacatacacaaccagctttattgacgcatagtatagcgttatatagtgcattagataatattaatgctgattatactatgggacacagcttaggtgaatattctagtttagttgctgcgggagtattaaaatttgaggatgcagttaagattgttcgcaaacgtggtcaattaatggctcaagcttttccaaatggtgttggtagtatggcagcagtattaggtttgagttatgaagaagtagaccgaatttgtaaagaattatctacaaatgatgaattggtcgaaccagcaaacattaattgtccaggtcaaattgtagtgtcaggtcacaaatcacttattgataaatttgttgaagaaggtaaatcgttaggtgctaaacgcgtcttacctttagcggtttctggacctttccattcttcaatgatgcaagtgattgaaaaagactttgagtctttcattaatcaattcgagtggcatgatgcatcgttcccgatagttcaaaatgttaatgcacaaggtgaaactgatgcaacaacaattaagtctaatatgattaagcaattatattcacccgttgaatttatcgattcagcagaatggttaattgctcaaggtgtagatcattttatagaaattggtcctggtaaggtcttatctggtttaattaagaaaataaatcgcgatgttaaattgacatcaattcaaacattagaagatgtgaaaggatggaataatcatgacgaa

SEQ ID NO: 35606 - DNA, 735 bp, Staphylococcus haemolyticus
atgacgaataaaaatgcattagtgactggtgcttcaagaggtataggtcgtagtatcgcattacaattggctgaagatggtttcaatgtagccgtaaactatgcaggtaataaagaaaaagctgaagcagttgtctctgaaattaaagctaaaggtgttgaaagttttgcgattcaagcaaatgtagctgaaggcgacgaagttaaagctatgattaaagaagtcgttagtcaatttggttcgttagatgtacttgtgaataacgctggtatcactcgtgataacttattaatgcgcatgaaagaacatgaatgggatgatgttatcaatactaaccttaaaggtacatttaattgcattcaaaaagctacacctcaaatgcttcgtcaacgtggtggtgcaatcattaacttatcaagtattgtaggtgccatgggtaatccaggacaagctaactatgttgctactaaagcaggtatagaaggtttaacgaaatcaagcgcacgtgaacttgcatcacgtggtattacagtcaatgcggtagcacctggtttcattgtttcggatatgacagacgcactgagtgatgatttaaaatcacaaatgttggaacaaataccactatctcgatttggtgaagatacagatatagcgaatacagtagcatttttagcatctgatagagcgaaatatattactggccaaacaatccatgtcaatggtggcatgtacatg

SEQ ID NO: 35607 - DNA, 231 bp, Staphylococcus haemolyticus
gtggaaaacttcgataaagtaaaagatatcatcgttgaccgtttaggtgtagatgctgataaagtaactgaagacgcatctttcaaagatgatttaggcgctgactcacttgatatcgctgaattagtgatggaattagaagatgaatttggtactgaaattcctgatgaagaagctgaaaaaatcaatactgttggtgatgcagttaaatacatcaatagtcttgaaaaa

SEQ ID NO: 35608 - DNA, 3564 bp, Staphylococcus haemolyticus
gtgtatttaaaatcaattgatgccataggttttaaatcatttgcagatcacacagatgttcaatttgacaagggtgtaactgcaattgttgggcctaatggtagcggaaaaagtaatatcactgatgccattaaatgggtattaggtgaacagtccgccaaatcattacgtggctctaaaatggaagatattattttttcaggagcagaacatcgaaacgctcagaattatgcagaagtacaattgaaacttgacaataaagctagaaagttacaagttgattcagatgatatcgtcgtgacacgtcgtttatatcgtagtggtgagagcgaatactatcttaataatgataaagcgcgtttaagggatatcactgaactattcctggattctggtttaggaaaagaagcatttagtattatatctcaaggtagagtagatgaaattttaaatgctaaacctattgatagacgacaaatacttgaagaatcagctggtgtattaaaatataagaagcgaaaagctgaatcattacaaaagttagaccacactgaagataatcttacgcgcgtagaagatattttatatgatttagaaggacgcgttgaaccattaaaagctgaagcatcaattgcaaaagagtatttaaaattgtctgaagagatgaaacaaagtgatgttattgttactgtaaatgatatcgaccaatattcagaggataatcgtcaactggatcaaaaattaaatgatttaaaaagccaacaagcggataaagaagcaaaacaagctcagattaataaatatattcaaaagcaaaagtctcaacgtcaacaaattgataatgacattgaacaattaaactataatttaatcaaagctactgaagaatatgaaaagttcacaggtcgattgaatgttttagaagaaagaaaacgaaatcaatcagaaacgaatgctcgttttgaagaagagttagataatttacatcaagaattaaaaaatgctcataatgaaaaagctgatattactcaacaaattactgctttaaaagaaaaacaaaaagagttgaatagtagtattcatcaattagaatcacaactgtatgtttctgatgaacaacatgacgaaaaattggaatcaatcaaaaatgaatactatgaattaatgtctgaacaatcagatgtaaataatgatattcgctttttagagcatacgattaaagagaatgaagcgaaaaaatcacgcttagattctcgcttggttgaagctttcaatcaacttaaagcgttgcaaagtgaaatttctaatacagaacgcaaccatcaagctactgttaaacaattgagcgatattgagactcaaataagtcaactagaacagcagttatcaaaagctaaacaaactcaaactgaatatgaagataaactttatcaggcttatcgatacactgataaaatgagagctagaatagagagtttagaaactcaagaagaggattatacttatttctttaatggtgttaaacatgtgttaaaagctaaaaatgataacctacaaggtattcatggtgctgttgcagaagtgataaatgtgccatctgaattgactcaagcgattgagaccgcattaggtgcttcattacaacatatcatagttgatagtgaaaaagatggacgccaggcaatacaatttttaaagcaaaagggtcttggtagagccacattcttaccattaaatgttataaaatcgagacaattatctaataatattaggcacatcgctgaaaatacaaatggatttatcaatgtagcttcagatgcgattaaagttaattcacaatatcaagctgtagttgaaaatttaataggtactactattatcgtagacaatttgaaacatgctaatgaactggcaagagctatccaatataaaacacgcattgtaactttagaaggagatattgttaatcctggtggttctatgaccggtggtggtgcgcgcaagacgaagagtattctatcacaaaaagatgaactgacaactatgcgtaatcaattaaaagattatgaatcacaaacacaagatttcgagaaacagttacaaaaacacaaaaatgaagttgaacatctcagcgaaacttattttaaaatgagtcagcaatataacgaagtaaaagaacaatctcataatgaagcgttagaattagatcgacttaaaacacaagaagcgcacattaaagatgaacatgaggaatttgaattcgagaaaaatgatggctaccaaagtgaaaatagtcgcattactttaactgaaaaacaagagcgattaactattattcaaggtaagttaaaacaacttgaaacagatattgaacgttatactcaattatctaaagaaggtaaagagaataccactcaagtgcaacaacaattaaaccaaaaacgctctgacttagctgtaattaaagaacgaataaatgctcaaaaagcgtcattagaacgtacagataaacagatagagacgattaacaaacaattaacaaatgttgacgataaaattaaactcttcaattctgacgaaatgatgggggaacaagcatttgaaaaattacaacaacagataaaatctaaagaaaatgaccgacaatccatcactgatcagttaaaacaattgaaaaaagaacgtattgatgtcaatgaagatgttgagtcacatgaagctacattgcaagaatgtcatcaagatttattgtcaattgaaagtttttatcaagatataaaagcacaacaatcgaaattagatgtattgattaaccatgcaattgatcatttgaatgatgaatatcaactaactgttgagcgggctagaagtgaattctcttcagaaacgccaattgatgcgctgagaaagaaagtcaaactaactaaaatgtcaattgaagaactagggtcagtaaatattaatgctattgagcaatttgaagaattaaatgagcgttatactttcctcgatgaacaacgtacagacttgcgtgaagcgaaacaaacacttgaacaaattataagtgagatggaccaagaagtgaaaggtcgttttaaagaaacgtttttacaagtgcaagctcattttacgacagtatttcagtcgttatttggaggtggacatgctaaattagagttaacagatgatgattatttatcagctggtgttgatattattgttcaaccacctggtaagaaattgcaacacttatctttattaagtggtggtgagcgtgcattaagtgctattgcactactatttgctatcttgaaagtaagatctgctccatttgttatactagatgaagtagaggctgcactcgatgaagcgaatgtaattcgatatgctcaatttttaaaagaattatctattcaaactcaatttattgttattacacatcgaaaaggaactatggaatattcagaccgtttatatggtgtgacgatgcaagagtcaggtgtttcaaaattagtaagtgtcaacttaaatacaattgatgaggttatgaaggaggaacaagca

SEQ ID NO: 35609 - DNA, 1221 bp, Staphylococcus haemolyticus
atgagtttctttaaacgattaaaagacaaattttcaacgaaatctactgaagatatagaacaagaattatcagaagaagaaggcaatcagagtagcacaattcatgatgacaatgatgaagcacagatagaaccgaagaaaaaaccgcgtaaattaagtgaagcggattttgatgacgatggattaatttcaattgaagattttgaagaaattgaagcacaaaaaatgggggctaaatttaaagcaggtcttgaaaaatcacgtcagaacttccaagaacaacttaataatttgatcgcacgttatagaacagtagatgaagatttcttcgaagcacttgaagaaatgttaatcactgcagatgttggtttcaacacagtaatgcaattaacagaagaattacgtactgaagcacaacgtcgaaatatacaagaaactgaagatttacgtgaagttattgttgaaaagattgttgaaatctatcatcaagaagatgaccaatcagaagcaatgaatcttgaagacggccgtttgaatgtcattttaatggttggcgtaaatggtgttggtaaaacaactacaatcggtaaattagcacacagatataaaatggaaggaaaaaaagtaatgcttgtcgctggagatacatttagagctggtgcaattgatcaactacaagtttggggtgaccgtgtaggtgttgaagtaattcgtcaaagtgaaggttcagatcctgctgcagttgtatatgatgcaattaatgccgctaaaaataaaggtgtcgatatattaatttgtgatactgcaggacgtttacaaaacaaatctaatttaatgcaagaattggataaaatgaaacgtgtcattagccgagctgtgccagatgcgccacatgaagctttattatgcttagatgcaacaacaggtcaaaacgcattatctcaagcacgttcatttaaagaagttacaaacgtatcaggtatagtattaactaaattagatggtactgctaaaggtggtattgtacttgcgattagaaatgaacttcacatacctgtgaaatatgtaggattaggtgagaaacttgatgacttacaaccatttaacccagaaagttatgtatatggcttatttgcagatatgattgaacaaaatgaagatattccagatgaagttgctgaattagattttaataatgaggataatccaaatggggaaaaa

SEQ ID NO: 35610 - DNA, 330 bp, Staphylococcus haemolyticus
atggggaaaaatgatttagttaaaactttgcgaatgaattatttgtttgatttttatcaaacattattaactgaaaaacaaagaaattatttggaactgttttatttgagagactattcactaagtgaaattgcagagacatttgatgtgagtagacaagcagtttatgataatataagaagaactggcgatttagtagaagattatgaagctaaattgaatttgtatgaaaaatttgaacaacgtcgtaaaatttatgacgatatgaaacaaacattaaatgattctaagaagttagaacaatacattaatcaattagaagaattagaa

SEQ ID NO: 35611 - DNA, 2100 bp, Staphylococcus haemolyticus
gtgacatgcatgaagaagcttagacaacattctaaatttaattcgtatttaaaagtgtcatgttcagtgttgttaatgagtggaacattagtgggttatggatttaccaaagatggatttgcacaatcaaatgaccgcattgacaacgtttcaagtgaaatgacatctgttcaaaataaacttgataaagcgatagataaagcgaaagcaaaaattgaccgtttgaagtacctacaagccactgatattaagagttataaagaagatattgaagatgcacgtaatcagtctgaaattgatcaaattttaagggatgcacaggaagaagaccgtatatcaaatgaggaaagtactaaagaaactggtgaaaaagcaagcacttcaaatgaatcttcactctcaactgctaagcaatcatcaacgaatgaagaaaataagctagatgaattagataaagtaatagccgatttagattctttatctgaaaaggttgatacccatcaacaaaatggcgatatgaagtcggaacaagattccacaaataataatgaaaatagccaaataagtagtggacaatcagcgtcttctcaaaacaataagaatcaaataaatgataaaaatgatgatacctcaatattggatgaaatggataatgttaaaaatgacatagaatcaactaaagaaagtgcacattcatctgtagaagatattcgagatcaaactgactcatccattcaagacgacaattcaacagaatcgcaatcaaaaaataatactaatactgcatcagataaaagtattctaagtggtatcaaacagatagataaagatgaagacagccataagtcaaacaagattgattcaaaagagggtcatgttgatgcattaactgacgaattatctgctaatcaaaaaattgaccaagccattacaaaagttgaaaatcaacaagataacacatcgaaacgttatagtgaccataaacttgagcaattgagacagttagaacaacaagtaaagcaaaacaacaatttgactaatgagcaaaagcaaaatgttgaaaaagatattaaaattgttcgacaaaatgttaaagcgaaccgagatgaaataagtggtcgcttagaacaatcttcaaataagcaagcaacagtcgaacaaatcttaggaagtgtctttagtaaaaacgaagctcaaaagatagccaagaagattaaaactaacggtcagtcagataagcaaataacagatcaaatgatgaaacatatcgacaacctcaaaacgacaacaagtgatgatattttggcatccatgtttgatcaagcgcctgataaagaggctttaatcaaaacattgctttcaacacgtttaggaaataatgaggcatcacaaatagctaaacagcttgctaaagagaacttatctagctcagaattagtaaatcaagtgaagcaaaaaattaacgcaaatcaaaaaataacagctgatgatattcttaaagacgtacttgacaaatcgtcagaccctaaacaaaccatcgaaacgttattagctacaaagttaaatcaaacacaagcgaaggcgttggcagatcttattgctagagcgcaaaacgataaagctaatgcgttagatttagtgaaaaacgcattaaacggtactgctagtgatttattacagttgcaaaataaactcgacactgcaaaaaataatttgagttatatcttagatcctattacaaatagaccttcgctatttgatcgcattaatggtagtgcatcaagttctaactctcttaatcaagggtctcatttactagatggactaactggtagtagtttattagatggtcttaattcaggaggaagtctgttagacaatattgaagatattcctaatcctgtacaaggattatcattaggacaattaggcgatgatgatggatttttaagtggtttatttgatgatgaagggaatctatctttaccaaatactggggaagtagttaaaaagtcttggctaccagtaacagtgttattagtgattgctgggggcacattaatagggttaggtcgtcgtaaacaacaaaaaacaaaacaa

SEQ ID NO: 35612 - DNA, 1164 bp, Staphylococcus haemolyticus
atgagatatttaacatctggagaatcacatggtcctcaattaacagtaattattgaaggtgtacctgctaatttagaaattaaagcggaagatattaataaagaaatgtttaaacgtcaaggtggctacggtagaggacgtcgtatgcaaattgaaaaagatgcagtagagattgtatcaggagtcagaaatggatatacacttggtagtccaattacgattgttgtcacaaatgatgatttcacacattggagaaatattatgggaattgagcctatttctgatgaagaaagagataatatgaaacgtacgattacaaaaccccgtcctggacacgcagatttaatcggtggtatgaaatataatcatagagatttaagaaatgttttagaacgttcatcggctcgagagacagcagcacgtgttgcagtaggtgcagtatctaaaattcttctagaacaattagacattcacatgtatagtcgtgttgttgaaattggtggtattaaagatgaaggtttatatgatactgaaacattcaaacaaaatattgataagaatgacgtacgtgtaattgatgaaacgatcgctcaaaaaatgagagataaaattgatgctgctaaaaaagatggcgattccattggtggtgttgttcaagttatggttgaaaatatgcctgttgcagtcggtagttatgtgcaatatgatcgtaaattagatggtcgtatagcacaaggtgttgtaagtattaacgcatttaaaggagtaagctacggtgaaggatttaaagctgctgaaaaaccaggtagcgaaattcaagacgaaattttatatgataatgaaattggattctatagaggctccaatcatttaggtggctttgaaggtggaatgacaaatggtatgccgattattgttaatggtgttatgaagccaattcctactttatataaaccacttaattccgttgatattaatactaaagaagactttaaagccacgattgaacgttctgacagttgtgcagtgcctgcagcaagtgttgtttgtgaacatgttgttgcttttgaagttgctaaagccattacagaagagtttcaatccaatcatatcgatcagctaaaagcccaaattgatgaacgaagacgccttaatattgaattc

SEQ ID NO: 35613 - DNA, 1128 bp, Staphylococcus haemolyticus
atgaaaataggtatcacatgttatccatctatgggcggttctggtattattgctactgaattaggaataaaaatggcagagagaggccatgaagtacattttataacttccaatattccttttagaatacgtaaacctttacctaatattacttttcatcaagttgaagtaaatcaatatgccgtctttcaatatcctccatatgatattactttgagtactaaaatttcagaagttataaaagaatatgatttagatgtattacacatgcactatgcagtacctcatgcagtttgtgggattttagcacgtcaaatgtctggaaaagatattaaaataatgaccacgttacacggtactgatatcacggtactaggttacgaccactctctcaaaggcgccattaaatttgggattgaacaaagtgatattgttacgagtgtgagtcactctttagcacatcaaactaaatctatcattgaaaccgagaaagaaattgttcctatttataattttgtgcgtgaaaatgaatttccaacgcgtcatgatgaaacgcttaaagaagtatatggtattaaacctgatgaaaaggtacttatacatgtatctaattttagaaaagtgaaacgcatagatactatattagagacatttgctaaagttcgtaaaaacatacctagtaaattaatcttgttaggagacggtcccgaattattagacatgagaaagttagcgcgtcacttaggtatcgatagtgatgtactattcttaggcaagcaagaccaagttagtgaattttaccaaatgtctgatttagtacttctattaagtgaaaaagaaagctttggattaactttgcttgaggcaatgaaaacaggagtagtgccgataggttctaatgctggtggtattaaagaggttattaaacatgatgagactggtttcattgtggatataggagatagcactagtgcaagtgagtatgcgttacaactgctttcaaataaagaattatataataaaatgcaaactgctatgttaaaggatattgacgaacgatttggttcagaattaataacagatcaatatgaacactactatagaaaaatgttaaatcaaaaagaggat

SEQ ID NO: 35614 - DNA, 1200 bp, Staphylococcus haemolyticus
atgggaacagaactatttaatcaagcaaaacccattttagaaaaaatagaacaacatggatttgaagcatatttcgttggtggatcggtgagagattacttaatgaacagacacattcacgacatcgatattactactagtgctacaccagatgaaatagaatcaatatttgaaaagactatcccaatcgggagagagcatggcactataaatgtggtgtatcaaggaactaattatgaagtaacaaccttcagagctgaagcagagtatgttgatcatcgtagacctagtgaagtctatttcgttcgtgatttaaaagaagatttacaacgtcgtgactttacaattaatgcaattgccatggataaaaattttaatatttatgactattttgaaggtgatgtagcattaaatcaacatattattaaaactgttggtgatgctaaagaacggtttaaagaggatgcattacgcattttaagaggcttacgctttcaatcccaattgaattttactatagaaggtgatacttttgaggcgatgaaacatcaaatcgcagatgtagaacatttatctatagaacgcattgtcgtggaattaaaaaaattaattaaaggccaaaatgtaagccaaagctacttaaacctaatagatttgaatttctttaattatgtacctttctttagaagtcttgatatgaagcaaactaaagttaattcaccaataagctttgaattatggatagcaatattattgactgttgaacaaacaaacacttcactttctgacttaaaaataagcaacaatgagaaaactaaaatcaatcaatatcataaaataatgatagagatgcctcaagtttcatctaaagaacaattaaaattattcgtttatgactatggtataaataatatcatagatatcattgctattaattcaatacttgaagacaataacattaaaatagcctctccgttaatatttaatcttcaatcaataaaagaaattgatcaacatttacctattagaagtcgtagagagctaaatattaatggtggagatatacttagaattacgtctaaaaaaagtggtccttggctgaaagaagttcttagacaaatagaaattgatgtgttaacaaataaagttccaaatttaaaagatgaattattgaagtgggtgaaagagaatgtcaaaata

SEQ ID NO: 35615 - DNA, 606 bp, Staphylococcus haemolyticus
atgaaatttgatagacatagacgattacgctcatcagagtcaatgcgtaatttagttagagaaaaccatgttagaaaagaagatttaatttatccaatattcgtagttgaaaaagataacgtaaaaagtgagattaaatcacttccaggcgtttaccaaataagcttgaatttattagatgatgaaataaatgaggcatatgaactaggtattagagcaatcatgttctttggtgtaccaaatgctaaagatgacgtaggttctggtgcatatgatcataatggtattatccaagaagcaacacgaaaggctaaagaattgcataaagatttattaattgtagcagatacatgtttatgtgaatatacagatcatggacattgtggtgttattgatgatcacactcatgatgtagataatgataaatcattacctttacttgttaaaacagctatctcacaagttgaagcgggagcagacattatcgcaccaagtaatatgatggacggttttgttgcagaaattcgtaaaggtctagataatgccggctattacaatattccaattatgagttatgggatcaatatgcatcaagtttctttgggc

SEQ ID NO: 35616 - DNA, 561 bp, Staphylococcus haemolyticus
ttgaaacaatttatcaaaatagttatgactatactgatatgtgtaggtatcggtgtatccgtaacttatttaattcgtgaaattgatattcaaccatctcaaatgactttaaatgatgataatcaatttggtgattggaagcgtgatggacgattgacgcatggttatggcacttataatcatggcctagaatttgaaggcaatgacaaacattatggtaacgattatgatttacctgaaaataccgaagttctagcagcgacagatggggttgtcacaagattatttgaagatgaattaggtggaaaagtgatacaaatatcagaatcaaatggacaatatcatcaatggtatatgcacttaaacgattttaaagtaacccaaggtcaaaaagttaaagctggagatgttatcgcattatctggtaatacaggtgaacagacaacaggctcacatttacattttcaaagaatgaaaggtggtataggcaatgattatgctgaagatccacaaccatttataaatcagttaccagaaaaggaaaagagtttattcaatata

SEQ ID NO: 35617 - DNA, 1506 bp, Staphylococcus haemolyticus
atgtcgcaaaagaaaatcatcattataggtggaggactaggtgggatatcagctgctattcgtcttgctcaaagtggctttgatgtctcgctttatgataagaataaccacattggtgggaaagtaaatcgtttagaaacagagggattcggttttgatttaggtccatctattttaacgatgccatacatatttgaaaacttgtttaactatagtgataagcaaatgaaagactatgttactattgaacgattacctttgcaatggcgtagtttcttcactaatggtgaagtgatagatttatatgaagacctgtctcaaatgttaaatgccaatacctatcttaataatgacgatattcagcaacttcatcaatttttaaattatgcagaaaaaatccatcgatttacggaaaagggctactttgcactaggacttgataaagtgtcagagataattaaatatcagggactattgcgttcacttaaaggtgtggattacttctcaacaatgcaacaagctattaatcgttatattgagaaacaaaaattaagagatatgcttggctactttataaaatatgttgggtcttcttcttatgatgctccagcagtgcttacactattaattcatatgcaatacgaacaaggattatggtacgttaaaggtggtattcataaacttgctcaggcattggaacaattagcgattgaagaaggcgtagctatacatactggtatggatgtatgtagtattgatacgtattttaatcacataactggtgttagattagatgatggttcacatgtgagtgcagattacattgtttctaatagagaagtgatacctacgtatcgtgacttactgcacttttcaaataaaaaaatagcgcaattagagaaagtttatgaacctgcagcatctggctatgtaatgcatttaggagtagacaaagaatatgctcaactggcacatcataatttccttttctctaatgattctaagcgtaattatcgagaagtgtttcatgataaagtattgccacaagatccaacaatttatctagttaattcaaataaatccgacccaactcaagcaccagaaggacatgagaacttaaaagtattgccacatattccgtatattcaaaaccaaccgtttactgaagaacaatatagtgatttccgggagcgtgtcttagataaattagaaaaaatggggcttacagacttacgtcaacatatcatatatgaagatatttggacgccacacgatattgaacgcacttatggttcaaataaaggtgccatttatggtgtagtggcagacaagaagaaaaataaagggttcaagtttcctaaacaaagtgaatactttgataatttattctttgttggaggatctgttaatcctggtggcggtatgccgatggtgacgttaagtggacaacaagtagcagataaaattaatgcacttgaatgtaaggttaccactgattcaagagaa

SEQ ID NO: 35618 - DNA, 1158 bp, Staphylococcus haemolyticus
atgacaatttctaataaactagccaatattcctgatagttattttggtaaaacgatggggcgtaaggttgagcatggaccactaccgttaattaatatggcagttggtatcccggatggcgaaacgcctaaaggcattgttgatcactttgctgatgctgttcgaattcctgaaaatcaaaaatatggtgcatttcatggtaaggaatcctttaaagaagcaattgttaatttctatcaacgacaatatggtgttgaactgcataaagatgatgaagtgtgcatactttatggtactaaaaatggtttagtggctttgcctacatgtattgttaatcctggagaaaacgtgctacttccagacccaggttatacggattatcttgctggtgtcatgcttgctgatgccaatccagtaccacttaatttggagccaccacattatttgccagattggagcaaagtagatgcacaaacattagcacgtacgtcactcgtttatttgacttacccaaataatcctactggatcaacggctactaaagcagtgtttgatgaagcaattcaaagatttaaaggtacgcatacaaagatcgttcatgatttcgcgtatagtgcttttggatttgatgcaaagaacccaagtatacttgcttctaaagatgcaaaggaagtagcaattgaaattttttcattatctaaaggttataatatgtcaggatttagagtaggattcgcagtaggtaacaaagacatgatacaagcgctgaagaaatatcaaacacatactaatgctggtatgtttggtgcccttcaagatgcagcaacatacgcacttaatcactatgatgactttctagatcaacaaaatgaaacattcaaacgtcgtcgtgacacgtttgagaaacaattaaaagatgccaatttaccatttgtacattctaaaggtggtatttactcatggcttcaaacaccaccagggtatgatagtgaatcatttgaacagtatttgttgaaagaacaatcgatcttagtggcgcctggcattccatttggtgaaaatggtcgtcattacgtccgtatttccctagcattagatgaccaattattaactgaagcggctaaacgattagcttctttatcttatttatataacgag

SEQ ID NO: 35619 - DNA, 204 bp, Staphylococcus haemolyticus
atgattaataaagttattaatgttgaaggtatgagttgtgatcattgtagaaatgctgttgaatcagcactagcgaaattaaacggtgtgacttcagcagaagtagacttagataaaaatcaagttcgcgtcgattacgacgaaaatagagtatcagttgaacaaatgaaagaagctattgaagaccaaggctacgatgtaaaa

SEQ ID NO: 35620 - DNA, 1278 bp, Staphylococcus haemolyticus
atggtacaaagacaaaagaaaagtagtattcgttggtttttcgcattagcattttttatcataggtgttattgcctacatggatagatctaacatctcatatattgccccacaaatgatggaagatttacatatgacaaagcaacaatttggtctgttagcttcattcttctcattaggttacgcgttaatgcaagtaccttctggtatgctagctgagaaatttggacctcgtaagatgattacaatcgctttagtatggtggagtgctttcactatctttacaggtatgattaaacatcacggtttattatatttagtacgtttcttattcggtattggtgaagcgccaatgtatccatcaaacgctgtgtttaatgcaaactggttctctaaagatgagaaaggtagagcatctagtatgttactcgctggttcttattttggacctgtattagcgcctgtgattactattgctattgtaaatgcatttaattggcaagctgtattttacattttcggtgctgtaggtattttaattgcaatattatggggaatcattgcgaaagacttaccagagcaacaccgtatggttaatgacgctgagaaacatttcattatggagaatcgtgaccttgttcaaacaagtaaatcactaccaccttggaatcaattcttccgtcgtgtaagtttctatgcgattgcaggtcaatactttgtagtacaattcgttatttcattattcttaatttggttaccaacttatttaactgagcaatatcatgttgaatttaaagacatgacaattagttcattaccttggtttatcatgtttattttaattttatctgctggtgcgatttcagataaaattttacgtagcggacaatcaagattcgtttcaagaggtttaattgccattgttggtttcatcgtgttcgcagtttcaattttctttgcagtacatactgagaatttatacgtaacgattttctggttatcacttggtttaggtggtatgggtgtatcaatgggtatgagctgggcagcagcgaatgacattggtagaaactttgccggtacagtatctggttggatgaacttatggggtaacattggtgcattattaagtccgttcttagctggtgcgttggttgcatcacttggttggacaatgactttccaattattaattattccagcagtcatcgcagcaattttatggttgtttgtatcaccagacaaaccattgattaaagatgaaagtcgtgaattaaaa

SEQ ID NO: 35621 - DNA, 1591 bp, Staphylococcus haemolyticus
atgaaaggtgtcagacaaggcttgttattaataatcccagcactcttaggttatttcctaggcaatttcgcattaggattgctcgtatcaacagggacattggcgcatatctatgtgttcaaaagttctccgcgttcaatgattagaacagttattttatgttcgatatcattcgcgatatgtatgatactgggaacgctaacggtgactgaaccgatattatatggcgtaacattattattagttacagttatcccttattacatcttcagtgcattgaagattgcaggaccatcttcaacattctttcttgtaacgttttgtttaccaagtaacttgccaatagcaccaaatgaagcgttataccgtggtttagcaattcttgttggtggtgcgattgctacattagtagtcatcttgacaatacttttccaaaaacaaaaaatcgaaaatagagcgattaattcggactttaacatgattaaagaattaatgcacaattataatgatgttgataaatttaaagaaagtgcaaaaacagcggtaacgcagtttaaaaattcagatgaattgttaatcactgcaacggctggagtgaaccagaaattgagtccgcgcttccaaagactgttattactccacacatcagcacaggggttatattcagagttattggaactacatgaaaaaggtatacgccctataccaaacgaactagttgaaatgatggatgttgcgatacgaaatgcatatcgaacaacagcctctcgtgaaaagtggataaaagaagttcatgtagatgaagcgtttgatgatttattacaatatatcttgaaaatcgatgaaattacgaacttagattcaagtcaaattgaacatgaagcaagtgttcgtaaaccgttatatagtcaacgaatcattcataatttaacgttagattcgatagtatttcgaaatacattaatttatgccgtcattatggcagtagcaatatttatttcgttagcctttaatatccaaaaatcttactggataccattaacagcacatacagtcttattaggtatgacaactcgacgtatgttaaaccgttctgttgctcgtggactaggtacaatcttaggaacacttgtcttatcaactatattgtatttcaatccacacttaatcattgccgttatcataatgggtattgcagcgatggtcactgaaacatttgtaggttcaaactatgcgttcgcagttatatttatcacgatccaagttatattattaaatggtttagcatcagataatctttcaatttcaattgcctatacacgtatctttgatgtgttgatcggtatagtaattgcagttatcggaattttacttattaatcgtcaaacggcgtctgccatgttaccacgaacgattgcagaagtggttcgtaaggaagcggtcatcttccaatacttattctcagagaatcactatcaagacgatttacgtgaaagagatgaaagcctagctttatcagtgaaaatgagtaacatgactcaaatcaacaattcagcaagtggtgaattgttctctaatcaagaagtgattc

SEQ ID NO: 35622 - DNA, 876 bp, Staphylococcus haemolyticus
atgactgaatttgatttatccacacgtgagggtcgttggaagcactttggctcagttgacccaatcgaaggtacaaaaccaacaactaaaaatgaaatgactgacttacaaagtacacataaaaatttcttatttgaaatcgaagaagtcggtattaaaaatttaatttatcccgttaatatcgatcgtttccaaacggcgggacgatttagcttttcaacgagcttaaataaagatgaaaaaggcattaacatgagccgtattctagaaagtgtcgaaaaacattataacaatggtttagagttgaatttcgatacactgtatcaagtattacgtacactacagacgaatatgaaacagaactcatcaggtgttgatgtttcgggtaaatggttctttgatcgctttagtccagtaacgaacattaaagcagtaggcaatgccgatgtcacttacggattagccatcgaacaagatcaaattacacgtaaagaaattacaattgaagcaactgtaacaacactatgcccatgttctaaagaaatcagtgaatattcagcccataaccaacgtggcgtagttacagttaaagtttatttagataaaaacaaccaggttgttgatgattataaagataaaattctagatgctatggaagcaaatgcaagttcaatcttatacccaattttgaaacgtccagatgaaaaacgtgtcacagaacgcgcttatgaaaatccacgattcgtcgaagatttaattcgtcttatcgctgctgacttggtagaatttgattggatagatggttttgacattgaatgtcgtaacgaagaatctattcaccaacacgatgcatttgcgaaattaaaatatagaaaa

SEQ ID NO: 35623 - DNA, 1491 bp, Staphylococcus haemolyticus
atggcaaaagtaaatgttagagattttttagatgaacaatatgatttatttataaatggtgaattccaaccaagtgaaagtggagaaacacttacggtaactaacccagcaaatggtgaagaattagccaaagttgctaaagcaaatgaaaaagatgttgataaagcagtgcaatcagcacatgaggcatttgatagttggagtaaaatttctaaagcagaacgtgcagattatttattagaaattagtcgtcgtattgaagaaaataaggaacacttagcaacagttgaatcacttcaaaatggtaaaccttaccgtgaaacatcaacaattgatgttcctcaagtagctgaacaatttaaatattttgcaggagtattaacgactgatgaaggttcggttaaccaaatagatcataacacgatgagtttagttgtaaatgaacctgtgggagtagtaggtgcagtagtagcatggaacttcccaatcctacttgcatcttggaaattaggtccagcattagcagcgggtaatacagtggtaattcacccttcttcttctacaccattaagcttaattgaattagctaaaattcttcaagatgtgttacctaaaggtgtagtcaacgtcattactggtaaaggttcagaatcaggcgatgcgattttcaaacatgaaggtgtaaataaattgtcattcactggttcaacaagtgtaggttatggtgttgctaaagtaggcgctgaacgtattgtgccaactacattagaacttggtggtaaaagtgctaatattatctttgatgatgcaaatttagatcaagtcattgaaggcgttcaatttggtattctattcaaccaaggtgaagtatgtagtgccggttcacgtttattagtacaatcatctttatatgataaattattaccaaaattaaaagaagcgttcgaaaatattaaagtgggtgacccattcgctgaagatacaaaaatgggtgcacaaactggtccagaacaaattgaaaaaatcgaaagttatattaaattagcagaagaagatgacaaagcaaatatcttaacgggtggacatcgtattactgataatggtttagataagggctacttcttcgaaccaacaatcattgaactttcagataatagtcataaattagctcaagaagagatttttggacctgttattgttgttgaaaaattcgaagatgaagaagaagcaattaacattgctaatgattcagaatatggtttagctggtggtgtcttcactacaaacttacttcgtgcattaaatgttgcaaaagcaattcgtactggtcgtatttgggttaatacgtataatcaaattccatctggtgcaccatttggtggttataaaaaatctggtatcggccgtgaagtttataaagatgcaattaaaaactatcaacaagttaaaaacatctttattgatacaagtaatgaaacaaaaggcttatac

SEQ ID NO: 35624 - DNA, 258 bp, Staphylococcus haemolyticus
cgtattttagaagatgctagagttcaagcacgtaaacaccatgaagaaatcattcatgaagcaaatattcgtgcaaacggtatgattgaaactgctcaaagtgcaatcaatagcgagaaagaacgtgcattagcggatattaacaatcaagtgtctgaattatcagtattgattgcttctaaagtacttcaaaaagaaatttcagaacaagatcaaaaagaacttgttgataagtatttaaaagaggcaggcgataaa

SEQ ID NO: 35625 - DNA, 393 bp, Staphylococcus haemolyticus
atgaataaagaacaattagaaaaaatgacaaatgggaaaggttttatcgcagcattagaccaaagtggcggtagtactcctaaagcattaaaagagtatggtgtaaacgaggacgaatatagcaatgatgacgaaatgttccaacttgtgcacgatatgcgtactagagttgtaacttcaccttcattctctccagacaaaattttaggtgctatccttttcgaacaaactatggatcgtgaagttgaaggcaaatacactggtgactacttagcagacaaaggtgttgtacctttcttaaaagtcgacaaaggtttagctgaacaacaaaacggtgttcaattaatgaaacctatcgatgatttagacgatactttagaccgtgcagttgaa

SEQ ID NO: 35626 - DNA, 813 bp, Staphylococcus haemolyticus
atgaaaaaatggttaagtgttataagtattttagttttagttattgtattagctggatgtggcaaagataaagagggtaataaaaaaattacggttgctgcttcacctgcaccccatggagatgtgttgaagaaagctaaagaacaattaaagaaaaaaggttatgatttagaaattaaagaggtaaatgattataaagtgccaaataaactattagataaaggtgatatagatgcgaacttcttccaacatgtaccttatttaaaagctgaaaagaagagtcatggatataaaatagaagaattaggtaaagtatttacaactccaatgggcgtatacagtaaaaaatataaaaatctaaaagatattcctgaaggttcaacgatttatgtttcaaataatccagcggaagaaggacgatttttatcattctttgtagatgaaggtctcattaagttgaaaaaaggtgtcaaaattgaagatgctaagtttgaagatatcgctgaaaataaaaagaatttaaaattcaatcatcaacaaggggctgagtttttaccaaagacatataaaaacggtgaaggagcagcagtgattatgaattctaactatgccatcgataatggtttgaaaccttctaaagatgcaattgttatggaaggtaaatcatctccgtttgccaatattattgctgtacaagaaggacataaaaaagataaaaagttccaagaattattaaaagttatgcaatcgaaagaaattaaagattatattaagaaagaatatggagacgatgtaattccatacgaaagtaaa

SEQ ID NO: 35627 - DNA, 1449 bp, Staphylococcus haemolyticus
atggccagttttttcaaaaatttaactcgaaaagaagatcccacaatctatcaaaataaagatggtcatttaaaacgtacattacgcgttcgagattttcttgcattaggtgttggtacgattgtatcaactgcaatttttacattgtctggcgttgtagccgctgaacatgcaggccctgctgttgcattatcattcttacttgcagcgattgttgcaggtttagttgccttctcatatgccgaaatggcatcaacaatgcctttcgccggttcagcttattcttggattaacgttttatttggagaattttcaggttgggtcgcaggttgggcacttttagctgaatactttattgccgtagcctttgtagcatccggattctctgccaatttaagaggactcgtatcaccattaggtatcgtattgcctaaagcattatcgaatccattcggagctgatggtggtgtgattgatattatcgctgctgttgtaatcattattactgcaatcattttatcacgtggtatgactgaagcagcacgtgtagaaaacgtcttagttatcttaaaagtatttgcaatcgtattgttcattatcgtaggtttaactgctatccaagcatctaactatgttccgtttattccagaacataaagtgactgaaaatggtgatttcggtggttggcaaggtatttatgctggggtttctatgattttcttagcttatattggatttgattcaatcgcagccaactctgcagaagctatcaacccacaaagaacaatgcctcgtggtattcttggttcattagctgtcgctttagtattattcgtaggtgtagctttagtattggttggtatgttccattattctaaatacgctggtaatgctgaacctgtaggttgggcacttcgtcaaagtggccacggtattattgctgctgtcattcaagctatttcagtaatcggtatgttcaccgctttaattggtatgatgttagcaggatcacgtttattatattcatttggtcgtgatggtttattaccaccttggttatcaaaattaaaccataaacatctaccaaacagagcacttttaatcctaactattattggtgtattaattggttcaatgttcccatttgcattcttggcacaacttatctcagcaggaacattagtcgcatttatgtttgtgtctcttgcaatgtatcgtttaagaaaacgtgaaggtaaagatttacctgaaccatcgtttaaagtaccgttcttccctgtactaccaataatcacatttattttagtattacttgtattctggggattaagtttcgatgctaaactatatactttaatttggttcgttgttggtatcataatctatttaagttatggtgttcgacattctaagaaaaatgaagaagaggactacgtcgtaccaaaagat

SEQ ID NO: 35628 - DNA, 1662 bp, Staphylococcus haemolyticus
atgactaaagaaaactattctgctgcaaacatggtcattgatactttaaaaaataataatgtagattacgtatttggtattccaggagctaaaatagactatctctttaatgctcttgaagatgatggtccagaacttattgtgacacgtcacgaacaaaatgctgccatgatggcacaaggtatcggtcgtttaactggtaaaccaggtgtggcattagtaacgagtggccctggagtaagtaacttaacaactggattattaacagcgacttcagaaggtgatccagtgttagctatcggtggtcaagttaaacgtaacgatttattacgtatgacgcatcaagcagtagataacgcttctcttttaagatcatctacgaaatatagcgcagaagtacaagatcctgagtctctatctgaagtaatgacaaacgctattcgtacagcgacttcaggtaaaaatggtgcaagttttattagtatcccacaagatgttattgagtctccagtaacatctaatgcaattgatttatgtgaacaaccacaactaggtgttccaaattcagaagacattcaagacgttatcaaagctataaaacatgcgaaattcccagtgttgctagtaggtatgagaagttcaagtgagaaagaaacagaagcaattcgtcaattagttgctaaatcaaatttaccagttgttgaaacattccagggtgccggtgtacttaaccgtgaattagaaaatcacttcttcggaagagtcggtttattccgtaaccaagtaggtgacgaattattaagaaaagctgacttagttgttgcaattggttatgatccaattgaatacgaagcaagtaattggaataaagaattagatacagaaatcattgttattgatgaagtacaggctgaaatcactaactttttacgccctaaaaaagaattaattggcaatattgcagggacaattcaactcctatctgaaaatgtgcatgaacctattattaatcaaaatcgtttagatgacttagaacgtttgagagcagaagtcattgaagcaacaggtatcaagtacacacatgaagatggcgtaatgcatccattagaaattattgaaacaatgcaaaaaacactaactgacgatacaactgttactgtagacgtaggtagccattatatttggatggcacgtaaatttagaagttacaatcctagacatttactatttagtaatggtatgcaaacacttggtgttgctctaccttgggcaatcgcagctgcattagttcgcccaaatactcaagttgtgtcagtagctggagatggcggtttcttattctcaggtcaagatttagaaacagccgtacgtaaaaatctaaacatcatccaattaatttggaatgatggaaaatataatatggtagagttccaagaagaaatgaaatataaacgttcagctggagttgaatttgggccagttgattatgtgaaatatgctgaatcattcggtgcaaaagggttacgtgttactaatcaagaagaattagaagccgctttaaaagaaggctatgcaactgaaggccctgtattaattgatatcccagtgaattataaagacaatatcaaattatcaacgaatgtattaccagattctttaaat

SEQ ID NO: 35629 - DNA, 702 bp, Staphylococcus haemolyticus
atgagtcacgtattatatcaacatggtactttaggtacattaatggcaggtctattagaaggaactgcgtctatcgatgaactattagaacatggtgattcaggactagctacattaacaggttctaatggtgaggttatctttttagatggtgaagcattccatgctaacgagcacaaggagtttaagaaactaaatggtgatgaaatgacgccatatgcaacaattacacgttttgaagcagatcaaacatatcaaacttcaaataaagactctgaaacagtgttaaacgaagttaaagaacatatgttaagtgataacttattctctgcagtgaaaataagcggtacatttaaaaaaatgcacgtacgcatgatgcctaaacaagagccaccttacactagattaattgattcagcacgtagacaaccagaggaaacgcgtgaagatattaaaggaacagttattggattctttactccagaattattccacggtattggatcagctggcttccatattcactttgctaatgacgatcgcaactttggtggtcatgtattagactttgaagtagacgatgtaactgttgaaatacagaatttcgaaacattcgaacaacatttcccagttaataataaaacatttacagaaacagaaattgattatgcagatgtagatgcagagattagagaagctgaa

SEQ ID NO: 35630 - DNA, 1350 bp, Staphylococcus haemolyticus
atggattccgttgaaattagtcgtttcctaacaggtatgactctagcagtacatatcatctttgcgactgtcggtgttggtatgcctttaatgttcgcaatcgcagaatttttaggaattaaaaacaaggatcctaaatatatagcactagctaagcgttggtcgaaaggttataccattactgtggctgttggtgttgtaactggtacgattatcggtttacaattatcattaatttggccaacatttatgaaaatgggtgggcatgtgattgctttacctttatttatggagacttttgcattcttctttgaagccattttcctaagtatttatttatacacatgggatcgctttaaaaataaatggacacacttcattattagtataccagtcatcattggtggttcattctccgcgttctttattacctctgtaaactcatttatgaatacaccagcaggttttgaaatgaaagatggcaaaatggttaatgtacaaccacttgaagcaatgttcaattcatcattcctagttagggcgtttcatgtagtagctacagcaggtatgacaatggcgtttattcttgcatctattgcagcttttaaattattgaaaaataaatacaacaaagatgcagaatatcataaaaaggccttaaagatgactatgattgttggtttcatatcaacattattgtcaatgttagctggagacttatctgctaaattcttacatcaagttcaaccagaaaaacttgcagcttacgaatggcattttgatacacaatctaaggctgatttagtatttttcggagttctaaatgaaaagactcaagaagttgaaggtgcaatcaagattccaggtatgcttagtttcttggcggataacaatgtaaatactaaagtagagggtcttaatgacttccctaaaaatgaattacctccattaatcgttcattatttctttgacttaatggtaacgatgggtgtgttatgttttgttatttcaggagcctttattttaactttaatgattaaaaaactgcgtaaatacgttacgcataaaggtatgttatatgctgttcttctcacaggaccagctgcaatgttagcaattgaatttggatggtttttaactgaagtaggccgtcaaccttggattgttagaggatatatgcgagtaagtgaagctgctacacaggcaggaggaataacacttgtaacaattctattcgggctactttatctagtattactttttacatctgcatatgttttaattcgcatgttcaaagacaagcctgctcaagatgatgtagataaagtcattgaaaaaggaggtcatgct

SEQ ID NO: 35631 - DNA, 1242 bp, Staphylococcus haemolyticus
atgactgagaataaacgagttgtaattactggtatgggtgcattatcacctattggcaatgatgcccagacaagttgggaaaatgccttgaaaggtgttaatggaatcgatactattactagaatagatacagaagattataatgttcatttagcaggtgaacttaaagattttaatattgaagaccatattgaaaagaaagaagctcgacgtatggaccgtttcacacaatatgcggtagttgcagcacgtcaagcagttgaagatgctaaattggaaatcaatgatgaaactgctaatcgcataggtgtatggattggtttcaggattggtggtatggaaacgtttgaaacagcacatacaacacttcaaaataagggtccaagaagagtaagtccattcttcgtacctatgttaattcctgatatggcaaccggccaagtatcaattgatttaggtgcaaaagggccaaatggttctacagttacagcatgtgcaactggtacaaactcaattggtgaagcatttaaaatcatacaacgtggcgatgcagatgcgatgataacaggtggtacagaagcgccaattacacacatggcacttgcaggattcagtgctagtcgtgccttatctacaaatgatgataaagaaacagcttgtcgtccattccaagaaggtcgagatggcttcgttatgggtgaaggtgctggtattttagtgattgaatcattagaatcggcacaagcacgtggtgctcaaatttatgctgaaatagttggttatggttcaactggtgatgcatatcatattacagctcccgctcctgaaggtgaaggtggttcacgtgcaatgcaagcagcacttgatgatgcaggtattgaagcaaaagatgttcaatatcttaatgcacatggcacaagtacacctgtaggtgatatgtatgaaattagagcgatcaagaatacctttggagatgctgctaatcaactaaaagttagctctactaaatcaatgactggtcatttattaggtgctactggtggtttagaggctatcttctcagcattatctattcgtgactctaaagtcgcaccaactattcatgcgaatacaccagatcctgaatgtgatctagacatcgttccaaatgaagcgcaagatttagaaattacttatgcaatgagtaacagtcttggatttggtggtcataatgctgtattagtatttaagaaatttgaagat

SEQ ID NO: 35632 - DNA, 2409 bp, Staphylococcus haemolyticus
gtgagtttgttacatattgcggtcattttaccgttaatatttgcactcattattccaattctatatcgattctttaaaaagattcatttaggttggtttgtattacctattcctgttgtcttatttatctatttctcatctcttatttcgactactcagtcaggtaatacagtaataaaaacattaaactggatgccacatataggtatgaattttgatttatatcttgatggcttaagcattttatttagtttacttataacaggtataggatcgttagtggttttatattccattggttacttaagtaaatctgaacaacttggtaatttttattgttatttattactatttatgggtgcaatgttaggcgttgtcctttcagacaatttaattattttatatctattttgggaattgacttcgttttcaagttttttacttatctctttctggagagaaaaaaaggcatctatttatggtgcacaaaagtcattaatcattaccgtatttggtggattaagtttattagggggattcattttaatttctctagcaggtgattcacttagcttacacgagctaattgctaatgcatctgaaattcaacatagtccattatttatcttcgcaatggtacttattatgttgggtgcattcactaaatctgcacaagttccattttatatttggttgcctgacgctatggaagcacctaccccagtcagtgcatatctacactcggcaacaatggtgaaagcaggattatatttagttgctcgtgttacaccgctttttgcgatatcacaaggatggatttggacaattactttagttggtctaatcacgcttttctgggcatctttaaatgccacaaaacaacaagatttgaaaggtatacttgccttctcaacagtatctcaacttggcatgattatgtcgatgttaggtattggtgccgtaagttatcatttcgagggaagtcaaagccaattgtacattgctggatttactgcagcagtgtttcatctagtgaatcacgccacatttaaaggtgcgttattcatgattacaggtgctgtagatcatgttacaggcacaagagatgttaaaaaacttggtggtttactaacgattatgcctatttcatttacaattactgttattacagcattaagtatggcaggcattccaccgtttaatggcttcctttctaaagaaaaatttcttgaagccatgattgagatttctcacgctaatgttttcagtttagatacattaggtattgtttttcctattttagctattgtgggtagtatatttacatttgtttattcaattaaatttattatgtatattttctttggtaaacatcaaccgaatgctttacctaaaaaagcacatgaagcttcaatattaatgttattatctccaatcattttagcagtactcgttgttgtctttgggttattccctggattattaacgcaatctattgtagaaccagcgacaactgcaattagtggtatgagtaatgttaatgcggaattccacttattccatggtattacgcctgcatttatttcaacattaattatttggatattaggtattcttttattactaacatttagttattggatccgactcttacacgctcagccaacacgtttaacgttaaatcattggtatgattctactggaaaatacttgcctaattattcagcgaatatgacgaatagttatgtaaatggttatgttagagatagcttagtcattatattcggtatgcttattgtcgttacgattgtgacgctactaagcgttccttttgactttaattttaaagatataaataatattcatatttatgaaatagcgattttaatattattaattatcgcagcatttatggttgttattgctaaatcacgtttatttagcgttatcatgctaggtgtggtcggttattcagtatctgtgttatttgtatttttcaaagcaccagaccttgccttaacacagttcgtagtagaatcgatttctacagcgttattcttattatgtttctatcatttacctaatttaaatcgttataatgaaacacgatcatttaaattaacgaacgcacttatttcaattggtgtcggacttgttgtcattatcttaggtttaattgcgtacggaaacagacattttacatctattggagaatactataaagcacatgtttatgatttagctcacggtaagaacatggtaaatgtcatacttgttgacttccgtggtatggatactttatttgaatcatctgtattaggtattgcaggtttaggtgtgtatacaatgattaagttgcgtcgtaaacatcaatcaagtgaggtgaaaagtgatgaacagacagaacaa

SEQ ID NO: 35633 - DNA, 429 bp, Staphylococcus haemolyticus
gtgatgaacagacagaacaataatttaatgtttcaatatgccgctgttattatcgcctttctaatcgccttatttggggtcactttattctttgcaggacattatacacctggtggtggcttcgtaggtggcctactattatcatgtgcactaactatcatcgcaattgcgtttgatattaaaacgatggaaaaggtattcccgtgggattttaaaattttaattggaattggcttattattctgtgttggtactccattagcgagttggttctatggtgaaaactttttcacacacacggaatttaatataccgttgcccctacttcaacctgttcatatgaacacaccgatgttctttgatttcggagttctttgcgcagtagttggaacgattatgacaattattataacgattggagagagcgaa

SEQ ID NO: 35634 - DNA, 447 bp, Staphylococcus haemolyticus
atggatagtaataaaaatgattatgagcatatgttattttacttcgcatataagacatttataaaaacggcagatgaaattattgaaaaatacgacatgagtcgtcagcaccatcgctttttattctttattaataaattgcctggtattaccattaagcaattattaaagacattagaaatctcgaagcaaggatcacatgcgacgttgcgtaaattgaaggaagaagggttaattgttgaacaaacatctgaagaagatcgacgtgtgaaacaattatttccaacgcctaaaggcagtaagttagttgataaattaaataaagcacaaaatgaattaatgcagagtacgtttcaaaaggtaggacatgattggtatgacatcatggaagaattatcgaattacagagaaggatttcaagatattcagcatttgaaagatgagaag

SEQ ID NO: 35635 - DNA, 765 bp, Staphylococcus haemolyticus
atgatagacattcataatcatatattaatagatgttgatgacggcccaaaaaataaagaggaaatgcttaaattacttaaacaggcaaaaggtgaaggggttactaaaattattgcaacccctcatcatttaagccctacgtttaataatgagtatcaaatagtagaaagtaaactacatgaattattggatttaaaagaagttaaagaattagggattaagatttatccagggcaagaaattagaataagtgatcagatcattctgcaactagaaaaagacgaggctattgggttgaaccattcgaagtacttgttaatcgagtttccttctggaggggttccacactatacgaatcgtcttttctttgaattacaatcaaaaggctatgtaccaattattgctcatcctgaacgtaataaagagattagtcaaaacttggacgttttatttgatttagttaacggtggagcgctaagtcaacttacttctgcttccttaataggtaaacatggtaagaaattacaaaaggtttcaattcaaatgattgaaaacaacctagttcattttatagcttcagatgcacatcacgataccaatagacccttcatattggagagtttatttaatgataaaaagctggacaagtatcaagagcaaattaagcaattaatcaataacgctcaacaagttattgaaaataaagaaataagaaaaaaacaaccaacccaagattataagcaaaagaaactatttggcctgttt

SEQ ID NO: 35636 - DNA, 1809 bp, Staphylococcus haemolyticus
gtggataaattaagtgcaagaggacgtcttctaatattaattataatcgattcattaattgtagctttttcagtttttatctgctataccattttacaaccttattttgaagggtattcacataaaattttgattttaacatcattaattttattggtttctcatcatgtatttgcatatatatttaatttgtaccatcgtgcttgggagtatgccagtgttaatgaattgctactaatagttgaagctgtgacatgttcaatattagcgactatagttttaataccaattttcacaggacatcctccgttcttcagattatatctaattacatggatgatgcatttaattttaattggtggctcacgaatatcatggcgaattggacgaagttttgtagtaggtaaacaaaaaaagaaaaaaccaacacttatcgtaggggcaggccgaggaggttcattgctaataagacaaatgttaagaagcccggaaatgggacttgaaccagtattggcagtagatgatgacccacaaaagcgtaaattgacgattgctgaaggcgttaaagtgcaaggtaaagttgatgatattcctaacttagttaataagtttagaattaaaaggattatcattgcaattccaactttaagtcctacgagactaaaagaaattaatgatatttgtaatagtacagggatagagttatttaaaatgcctagtatagaacaagtactatcaggtgaattggaagtaaaccaacttaagcgcgtagaagtcgaagacttacttgggcgtgaaccagttgaacttgatatggctatgatttctaaggaattaacacataaaacaattcttgtcacaggtgcaggtggttcaattggatcagaaatttgtagacaagtttgtaaattccaaccagaacgtattttattattaggtcatggtgaaaatagtatttatttaattcatcaagaacttagcaatatgtataaagataaaattgaaataataccgttaattgcggatgtgcaaaattctacgcgcatgagtgagattatgaacgaatataaaccatatgcagtctatcatgcagcagcacataaacatgttccgttaatggaatataacccacctgaagcatttagaaataacgttctaggaactcgaaatactgcatatgctgctaaaaaagcaggcgtaagaaaatttgtcatggtatcaacagataaagcagtgaatcccccaaatgttatgggagcatcaaaaagaatggcagaaatggttattcagaaccttaatgaagaaaatggatatactgactttgtagcagttcgattcggaaatgttttgggatctcgtggctcggtgattccgttgtttaaaaagcaaattgctgctggtggtccagttactgttacacatccagatatgacaagatattttatgactataccagaagcatctagactagtactacaagcaggtgctttagctcagggaggcgaagttttcgtgcttgatatgggtgaacccgttaaaattgttgatttagcacgtaatttaattagattaagtggtaaatcagaagaagaaataggaattcagttttcaggtattagacctggagaaaaactttatgaagaattattaaatgaaaatgaaatacatcctgaacaagtgtatgaaaaaatatatagaggtaaaacaactacacctcctaaagaggaaatagatgaagctattgattatttagaaacacataacactgaaattaaagacaaattaattaatttagcgaatgggaagtat

SEQ ID NO: 35637 - DNA, 483 bp, Staphylococcus haemolyticus
atgaattttaaagaaataaaagaattaatcgaaattcttgatcaatcaagtttaactgaaattaatattgaagataacaaaggtagtgtagtcaacctaaaaaaacagaaagagacagaaataatcacaccacaatatacacaacaagcaccattagcaccagcaacatcaacgatggcaacaccaaatcaaagtgcaacagaatcacctgttccacaaaataatgatcaaatcgataaagatgattcatcatatcaaacaatcaatgcacctatggtgggtacattttataaatcgccatctccagaagaagatgcatatgttcaagtcggagataaagttaccaatgaatctacagtgtgcatcttagaagcaatgaaattatttaatgaaatacaagctgaagtttctggagaaatagttgaaatattagtagaagacggacaaatggtagagtatggccaaccgttatttaaggtgaaa

SEQ ID NO: 35638 - DNA, 1290 bp, Staphylococcus haemolyticus
atgaaaacaacgattaaacaagctaaacaacatcttaaccaagaagtgactattggtgcttggttaacaaataaacgttcaagtggcaagattgcctttttacaattacgtgatggtagtggctttatgcaaggtgtagtggttaaatcagaggtttctgacgaaacattccaactagctaaagaaattacacaagaatcatcactttatgtgactggtgttataacagaagataaccgttcagatttaggctacgaaatgcaagtgaaatcaattgaagttattcacgaagcacatgattatccaattacacctaaaaatcacggtactgaatttttaatggatcatagacatttatggttgcgttcaaaaaaacaacatgctgttatgaaaatcagaaatgaaattattagagcaacatacgaattctttaatgaaaatggattcactaaaattgatcctccaatcttaacagcaagtgctccagaaggaacaagtgaattgttccatactaagtactttgatgaagatgcattcctttctcaaagtggtcaattatatatggaagcagctgcaatggctcatggtcgtgtattctcattcggaccaactttcagagctgaaaaatctaaaactcgacgccatttgattgaattctggatgattgaaccagaaatggcatttacaaatcacgtggaaagtttagaagttcaagaacagtatgtatcacatgtcgttaaatctgtacttaaaaattgtcaattagaacttaaagcactagatcgagatacgagcaaacttgaaaaggtttcagcacctttcccaagaatttcttatgatgatgcaattaagttcttaaaagaagaaggtttcaatgatattgagtggggcgaggatttcggtgcaccacatgaaactgctattgcaaatcattatgatttaccggtatttattacaaattatccaactaaaattaaaccattctatatgcaaccaaatccagagaatgaagaaactgttttatgtgcagatttgattgcaccagagggttatggtgaaatcattggtggttctgaacgtattaatgatttagaattattagaacaacgtatagatgaacatcaattagacgctgaaagttataactattatttagacttacgtcgttatggtagtgtgccacatagcggatttggattagggttagaaagaactgttgcttggatttctggtgtggaacacgtaagagaaactgctccattcccacgattattaaatcgtttatatcca

SEQ ID NO: 35639 - DNA, 2277 bp, Staphylococcus haemolyticus
atgacggaaaataaaggatcttctcaacctaaaaatggtaaaaatgggaagtccaaagcaaaaaagaataagaatgtgaaaagaacgattatcaagattattggctttttattaattgcctttatcgttttagttctattaggcattttattatttgcgtattatgcatggaaagctcctgcatttaccgaatctaaattacaagatcctaaaccggcagaaatttacgacagaaatggtgacttagtaaaaaaattagataacggcgcaagaagagaacatgttgagttaaaagatgttcctaaaaatatgagaaatgctgtgttagcaactgaagataaccgattctatgaccacggtgcaattgactataaacgtttatttggtgccattggtaaaaacttgactggtggatttggttcacaaggtgcatctactttaacacaacaagtagttaaacgagcattcttaagtgaagagaaatctatcggacgtaaagcacaagaagcttacctatcctaccgtctagaacaagagtacagtaaagatgaaatcttccaaatgtacttaaataaaatttattattcagatggtgtttatggcgttaaagctgcagctaaatattacttcaataaagatttgaaagatttaaatcttgcggaagaagcatatttagcaggtttaccacaggtgcctaacctttataatatttacgacaaccctaaacaagcggaaaatcgtaaaaacactgtactctacttaatgcattatcacaacagaatttctgataaagagtataatgctgctaaaaaaattaacttaaaagctaatttagtagatcgtacagctaaggaacgtcaaattggcactgataactctgattcagaatacgattcatatgtaaactttgttaaatctgaattgatgaataataaagaattcaagaataaaaacttgagtgatgttcttcaaagtggaattaagatttacacaaatatggacaaagatgttcaaaaaacattacaagatcgtatagataacggtaattactataaaaatgaagaccaacgtgttggttctacaattcttgatagtaagactggtggcttagtcgcaatttctggaggtcgtaacttcaaagacgttgttgacaataacgctgcaactgatgcgcatttaactggttcatcattgaaaccgttcttagcttatggtccagctattgaaaacatgcaatgggctacgaatcatgcaattcaagacgaatcaagctattcaattgatggtggtacattccgtaactatgatggaaatggacatggtactgtaactgcgtatgatgcgttaagacaaagtttcaacattccagcgcttaaaacttggcaacaagttaattcacaagctggagataatgcagttaagaaattcgcatcaaaagttggattagattatcaaagtgacatcggtccttctgatgtacttggtggtggcgcttctgagttctcacctactcaattagcatctgctttcgcagcaattgctaacggtggtacttacaataacgcacattctatccaaaaagttgtaacagctgatgatgacacaattgagtttgaccatacaagtcataaagctatgaaagactacacttcttatatgttagctgaaatgcttacaggtacattcaaagcctatggttcagcctatggacatggcgtatcaggcgttactatgggtgctaaaactggtacaagtacttatggtactgaaattaaccaacaatataacctacctgataacgctgcaaaagacgtttggattaatggtttcacacctaaatacacaatgtctatctggatgggcttcagtgaaattaaagaaggtggcgttaactcattcttaggtcactcagaacaagaatatccacaatatttatatgaggatgttatgtctgatattacttcaagtgatgatggtgacttcaagaaaccagattcagttaacggctcaagtgctgataatttatcagtaagtggtcatccagataacaacacgactaatcgtgaagtaaatggtagcagtggctcaagttcatcaaatagctcaaataattcaaataactcaagtaattctaatactagtaacactaataatagtggcaatactaattcaggaactacaaacaataattcaacaacacaaggtactaatactgtcggaagtacactttcaaacatctttaatttaaatagtattttcgattttaaaaagtcctca

SEQ ID NO: 35640 - DNA, 1029 bp, Staphylococcus haemolyticus
atgcaagatgtaactattattggtggcggacctgctggattatttgcgagtttctatgctggcttacgaggtatgtctgtgcgaattattgatgtacaagataaattaggtggaaaaatgcaaatctatccagaaaagattatttgggatattggtggtgtagcgcctaaaccatgcaatgaaatcattaaagatatgattaaccaaggcttacattttaaccctaaagttaatttaaacgaacgagtaacagatattcgaaaaatagcagaaagacactttgaagttgaaacagatagcggacaaatttatgagtcaaaagcagtaatatttgctgtcggaggagggattattaatcctaagcctcttcaaattaaagatgcagagcgttatcggttaacaaatttacattatgttgtgcaatctttctcaaaatttaagggaaaagatattctaatttctggtgggggtaacactgctttagattgggctagagatttagccaatattgcaaattcgattacacttgtttatagaaagtcagacattaaaggctatgaagcaatgataagtgtacttaaagcgttaaatgtgaacctgttgcctaaaacacaaattaaagagttaataggtgacaataaatgtgaatgtattaaagaagtaaaacttgaaaatattgagactggagaagttacgacacaagcgtttgatgatgttattgttagtcatggttttgatcatgagaatccactacttaaagactgtacatctaaacttgatttatacgatgaatatcgcgttaaaggctttggcaacacgacaacaaatattcctggcatctttgcttgtggggatattgtacatcatgatgctaaagtacacctcattgctagcgcgtttagtgatgctggaaatgcagcaaacttagctaaaacttacattaatcctgatgcatacaaagaaggatatgtttcaagtcacaatgatgtattcaaagaatcaaataaaaaagttattaatcagtatata

SEQ ID NO: 35641 - DNA, 399 bp, Staphylococcus haemolyticus
atgattagatattctaatgagccaccagaggttcaagcgtattgtgacttaagagttaaagcaggaatgagtcctaaatcagtagctgcagctcgaaacggtttaccaaatggctgtttcaatattacgatttatgaagatcaacaattgattggaatgggcagagttataggtgatggtggaacgacatttcaaattgtagatatagccgttgatccagattatcaaggacaaggttatggtagggttattttggaaaaaataatggaatatattaattccatagctgaaaagggaacttatgttagtttgatagcagactatccagctgacaaactatacgaaaaatttggattcaagactaccgagccaaaatcaggtggcatgtatatcgtgttt

SEQ ID NO: 35642 - DNA, 1224 bp, Staphylococcus haemolyticus
atgagcaaagtagataataatcaaaacgaccaagtatctcgtcgttcatttctaaaaatgctagggataggtggcgctggtgtggttatcggtgctagcggggcaggcagtattttttcatttaaatcgatgttcgatacaccagagaatgaagataaagatgcatttgagttttatggtcgtgtacaagcaggtattacaacaccgacacaaaaaaattgtaacttcgttgcattagagttaaagaccaaagataaacaagcaatcaaagacatgtttaagaaatggacgcaaatgtcagtaaatatgactgatggtgcacctgctgaaaaagatagtcaaaatgcgttgttaccacctgtggacactggtgaatcaattggattaggtgctagtaaattaacactgacatacggtattagtaaatcttttttgaaaaagattggtatgtcatcaaaaatcccatctggatttaaagatttaccacattttcctaatgaccaattagatgatgaatacagtgatggggatatcatgattcaagcgtgttcaaatgatccacaagtaacattccatgcgattcacaacttaattcgaccatttagagatgttgttaaaatgaaatggtctcaaaatggttttgtctctggcaaactagaagaaacgcctagaaatttaatggcatttaaagatggtacagttaatcctcgtaaaaatgacgagcttaaaaagtatgtcttcattgacgatggttgggctaaaaatggaacgtattgtattattcgacgcattcaaatccatatagaaacatgggaccgtacatcattagaagagcaagaagctactttcggacgtaaacgagcatccggtgcaccattaaccggtaaaaaagaattcgacaatatagatttagacgctaaagatagcagtggtcaatatgttatcgatccaaacgcgcatgcgcgactagcacgtgaagtgaaaacatcaatcaagcgacgtgcatataattataatgatggaacaaatgccaaaacgggtgcgttggaaacaggattaatgtttatttgtttccaaaaatcaactcaacaatttattgatattcaaaacaatttaggacacagtgataagttaaatgaatatattacgcatcgaggttctgcatccttccttgtgttaccaggtgtaaaaaagggaggctatataggtgaaaccttatttaac

SEQ ID NO: 35643 - DNA, 1743 bp, Staphylococcus haemolyticus
gtgaaaccttatttaactaaattagtcgttgtgctagtccttattctcacggttattagaattgtcccagcacatcaagtaaatgctgcagatgatagcaaaataagtgatgtgtatgtagcgataactgatgcaaaatcaactatagaagataaaaataaaagtaataaagaaaaacaaagtgcacttgctgacattaaagagaaagttaaatctttaaatataaaagataataaagaaggtaaagatgttaagtcaaaacttgaagcggtggataaagcttcttcaatgaatgctaaagctgataaattatcacaattaactaagtcattaatcgcttatgaagatgcagtttctacaaaagatatcagtggtgaaattaaaacattgaagcaacaagttgatgcgaaagatgactctataaaaaaagcaataaaaagtaaaaacgagtcagaattacaatctataaataatagtttaaatcaaatttggacgactcatgaaactgctataagaaattatgacgaaggtaaatacggacaaattgaagttaacttaatgcaactacgtgttgctatccaaaaagaaccattagatactaagaaagttgacaatgcgtggacgacgtttaaatcaagtattgatacggtcgatcaaaaacaatccagctcagataatggaaaatataaagtaactcaattaaatgacgagttagataaggcgattaaaggaatagaagataataatttagatcaaactgatgcggcgttatctaaatttgttcaaatttggccttatgttgaagggaaaattcaaacaaaaaacggttcattatatactacaattgaagataaaataccgtattatcaaagtattttagaccaaagtaacaaagatcgcgttaaagacggattaaatgacatcaataatgatatcaaagacactgtaggtcaagatggttatacatttgtagatgttatgattatctttttacgtgaaggtttagaggtattgttagtcattatgacattaactacaatgacacgtaaggttaaagataataaaggtacagctagtgttatcggtggttcaatattaggtttaatactaagtattacattagcagttggattcatacaaacgctaggcaataatggattactacgagaaggaatggaagcaacactaggaataattgcagtggttctaatgtatatcgttggtatttggatgcatagacgatcaagtgctaagcgttggaatgatatgattcaaaatatgtatcaaaatgcgattagtaatggcaatctagtattgttaggtacaattggattaatttctgttttacgtgaaggtgtagaagtgattattttctacatgggtatgataggtagtattacatcaatggatttcgttattggtattgctttagcgattgtaattttaattatcttcgcattattatttagattcatagtgaaacttattccaatttattacatctttagagtactttctattctaatatttattatggctttcaaaatgcttggtgtaagtattcaaaaacttcaattgttaggcactcttccacagcatggtattgaaggtttacctacaattggctttattggattttatcctaatattgaatcaatagtagctcaattaatatatatagtgtttattgtgttcttcattttaaaaaatcgccaaaacaaacaaaagaatactaatctaaaa

SEQ ID NO: 35644 - DNA, 438 bp, Staphylococcus haemolyticus
atgagtcaacaagatgtagtaaaagaattaaatcaacaagttgcaaactggacagtagcatatactaaattgcacaatttccattggtatgttaaaggacctaatttcttctcattacatgagaagttcgaagagttatacaatgaagctagtcaatatgtagatgacttagcagaacgtattttagcaattggtggaaatccagtaggtacattgaaagaaagtcttgaaatttctatcgttgatgaagcgggtaaaaattactcagctgaacaaatggttgaagccttctctaatgatttaactcatatctcagagcaattagttaaatctatagaagtagctggagaagctggcgatgatgtttcagaagatatgttcatcggtatgaaaaattctgttgataaacacaattggatgttcaaatcatatttagtt

SEQ ID NO: 35645 - DNA, 660 bp, Staphylococcus haemolyticus
atgaattatgctaaatttattgatcacacattattgaaacctgaatctacacgtcaacaaatcgatcaaattattgatgaagccaaagagtataactttaaatctatttgtgtaaatcctacacatgtaaaatatgcagcagaacgattaaatgattctgatgtattggtttgtaccgttataggtttcccacttggtgctactacaactgctactaaaatctttgaaactgaagatgccataaaaaatggcgcaactgaacttgatatggttatcaatatcggcgcacttaaagatggaagatttgaagatgttcaaaaagacattgagggcgtagttggagcagcaaatggaaaaacagtaaaagtgattattgaaactgtgcttttatcagatgaagaaaaagttaaagcaagtgaattagcgaaagcagctggtgctgatttcgttaaaacatcaactggttttgctgggggaggcgctacacctgaagatgtgaaattaatgaaagatacagtgggagacgaattagaggttaaagcatcaggtggcgttcgcagtttggaagatttcaacaaaatgattgatgcaggtgctacgcgtataggtgcgagtgcaggtgttcaaattattcaaggcttagagtcagattctgattat

SEQ ID NO: 35646 - DNA, 1182 bp, Staphylococcus haemolyticus
atgagtaataaacaaggaattttagattatatagagaataataaatatgattatgttgaaattagtcatagaatacatgaacgccctgaattaggcaatgaagaaattttcgcgtctagaacgcttatagataaattgaaagagaatgatttcgatatagaaacggatattgctggacacgctactggatttatagctacatatgattctggacaagaaggcccagttattggctatttagctgaatatgatgcattgccaggcctaggtcatgcgtgtggtcataatattattggaactgctagtgtacttgcgggttcagcattgaaacaagttatagaccgcatcggtggtaaagttgtcgtgctcggttgtcctgcagaagaaggtggcgaaaatggtagtgcaaaagcttcatatgttaaggctggtattatcgatgatatcgatatagcattaatgattcatccaggtaatgcaacttatccaaccattgatacactagcggtggatgtattagatataaaattttatggcaaaagtgcacatgcttctgaaaatgctgacgaagctttaaacgcattagatgcaatgatttcatattttaacggtgtagcacaattaagacagcacattaaaaaaagtcaacgcgtacatggtgttatcttagacggaggaaaagctgcaaatattatacccgattttacacatgctcgattctatacacgtgcaaccactcgaaaagaactagatattttaacagaaaaagttaatcaaattgctaggggtgctgcaattcaaacaggttgcgattatgaatttggccctatacaaaatggtgtgaacgaatttattaagacacctaaattagatgaattgtttgagaagtacgcgctcgaagttggtgaagatgtaagtcatgatgattttggttttggatcaacagatacgggtaatgtcagtcatatagtacctacgattcatcctcatgtgaagataggatctagaaacttagttggtcatacacatagatttagagaggctgcggcaagtgtacatggtgatcaagcgttaattcatggtgcgaaaatcatagcattaatggggttagaactaattgaaaataagggaatgtttgatgaaattgttcaacagcactctcatataaaggggcagtcaaaa

SEQ ID NO: 35647 - DNA, 1605 bp, Staphylococcus haemolyticus
atgacaaaatttatttttgtaacgggcggagtagtatcatcattaggaaaaggtatcacagccgcttctctaggtagattgttaaaagatagaggcttaaaagtaacaattcaaaaatttgatccatatttaaatgttgacccaggaactatgagtccgtatcaacatggagaagtatttgttacagatgatggtgctgaaactgacttagatttaggacactatgagcgttttattgatattaatttaaataaatattcaaatgttacagctgggaaagtttattcacatgtactcaagaaagaacgtcgtggtgattatttaggtggaacagttcaagttattccacatattactaatgaaattaaagaacgtttattacttgctggtgagagtacaaacgcagatgtagttattactgaaatcggtggtacaactggtgacattgaatcacttccatttatcgaagcaattagacagattagaagtgatttaggtcgtgaaaacgtaatgtatgtacattgtacattgcttccatacattaaagctgctggtgaaatgaaaacaaaaccaacacaacacagtgttaaggaactacgtggtttaggtattcagccagatttaattgtagtgcgtacagaatatgaaatgacacaagatttaaaagataaaattgcattattctgtgatattaataaagagagcgttatagaatgtagagacgcatcatctttatatgaaattccattacaattaagtgcacaggatatggatgatattgttatcaagcgattagatttagatgctaaatatgaaactcaattagatgaatggcaatatttactagatactgttaattcacttgatggtacaatcacgattggattagtaggtaaatatgttagcttacaagatgcatacttatctgttgtagagtcattgaaacatgctggctacccattgaagaaagacgttgtagttaagtggattgattctggcgaagttaatgataataatgttgaagactatttaaaagatgtagatggcattctcgtgccaggtggttttggatttagagcaagcgagggtaaaattgctgcaattaaatacgctcgtgaaaataatgttccatactttggtatttgcttaggtatgcaattagcgactgttgagtttgcacgcaatgtactaggtttagagggagcacactcagcagaacttaatcctagcacaccttatccaattattgatttattgcctgagcaaaaggatattgaagatttaggtggcacgttacgtttaggattatatccatgtaaaatcaaagaaaacacattagcacatcaaatttatgacgcagttaatattgaggaaagacaccgtcatagatatgaatttaataatgaatttagagaacaattagaagctaatggtatggtgttttctggtactagtccagatggacgattagtagaaatggtagaaattccagagaatgacttctatatcgcatgtcagttccatcctgaattcttatcaagacctaatagacctcagcctatttttaaatcgtttgtagaagcggcctataaacatcaaaataaa

SEQ ID NO: 35648 - DNA, 1050 bp, Staphylococcus haemolyticus
atgctaggtttctcagtctatttaggtcaaccattaaacaaatcatacatattaaatatggttgatctcggttacgacattattttcacatcactacaaatacctgaggaaaacgatcaaactaaattgacatatttgggagaattatgccaattgctaaaagataaatcggtaacctacattattgatataaatccatcattactgaatcagaatgtttatcgttttttcgatcaattttctaatggtgactttgttattagaattgatgatcattttaattatgatttaattgcagatttgtttcatcataatttacagtgttgtctaaatgccagtactatcactactgaaattttggatacactttataatcaaaaatcattatctaaagtttatttttgtcataactattatcccagacctgatacaggtttagctttaaacctttttgaacaacgaaataacctcattagaaaatatgatgaacatgcctcaattatggcttttattcctggaactacattaagaggtccattgtataaaggacttcctaccattgaacaacatagacacatgacattacttcaatctgcacattcactattaaaatataacttggattatattcttattggtgatactgcaatcaactatgcagaagcagttgcattacagcagatgatttatcaccgtcatttcaaacttcggctatcatattttgataaatcatatgaacaactcattttcaagcaacatacatctcgtttggatgcacctgagaatgtaatacgctccaagtattctagattaactaaagtaaatattcctccaaccaataacttcaatcaatatcgctataagggagacgtcacggttgataattcgcttaatcaacgttacgaaggtgagctacaagtgattaaagcagatttgcctaatcataaggcgattaatcatgtagcatctatatgtgatgaagataaagtcgttattgatttaatacaacctggtgacacatttgaatttattactgaaaaggagaaacgc

SEQ ID NO: 35649 - DNA, 855 bp, Staphylococcus haemolyticus
atgccattagtttcaatgaaagaaatgttaatcgatgcgaaagaaaatggttatgcggttggtcaatacaacttaaataacttagaatttactcaagctattttagaagcttcacaagaagagaacgcgccagttatcttaggtgtttcagaaggtgctgcacgttatatgagtggtttctatacagtagttaaaatggttgaaggtttaattcatgacttaaacattactgtacctgtagctattcacttagaccatggttcaagctttgaaaaatgtaaagaagcgattgatgctggattcacttcagtaatgattgatgcttctcatagtccttttgaagaaaatatcgaaatcacttcaaaagttgtagagtatgctcatcaacatggtgtatcagtagaagctgaattaggaacagttggcggacaagaagatgatgttgtaggtggcattatttatgctgaccctaaagaatgccaagaattagttgaaagaactggcattgatactttagctccagcattaggttcagttcacgggccatataaaggtgaacctaaattaggatttaaagaaatggaagaaattggtgcatcaactggtttaccattagttttacatggtggtactggtatcccaactaaagacattcaaaaagcaatcccttatggtactgctaaaattaatgttaatactgaaaaccaaattgcttcagctaaagcagtaagagaagtattaaataatgatcaagatgtatatgatccacgtaaatatttaggacctgctcgtgaagcgattaaagaaacagttaaaggtaaaattagagaatttggtacatctaatcgtgctaaa

SEQ ID NO: 35650 - DNA, 1269 bp, Staphylococcus haemolyticus
atgactcaagaggtaataaaaattcgcggtggtcaaacactaaagggagacgttacgataagtggtgccaaaaatagtgcggtagcaattatcccagcaacattattagctcaaggccaagttaaattagatggcttaccacaaatttccgatgtagagacgctagttagtttattggaagatttaaatattaaagcccatttaaatggaaaaactttagaagtagatacttcagaaattgaaaatgcaccactgcctaacaacaaagttgaatctcttagagcatcttattacatgatgggagcaatgttagggcgttttaaaaaatgtgtaataggtttacctggtggttgtccattagggccacgtccaattgatcaacatattaaaggttttaaagcattaggagcagaaatagatgaatcaaatgatacatctatgaaaattgaagctaaagaactacatggtgctaatatcttcttagatatggttagtgtaggcgcaacaatcaacattatgttggcagctgttcatgcaactggtcaaacagtcattgaaaatgcagctaaagaacctgaagttgtagatgttgctaatttcttgaacagtcttggcgcagatattaaaggggcagggacaagtacgttaaaaattaatggtgttgatagcttacatggttctgaatatcaaattatccctgatcgtattgaagcagggacatacatgtgtatagcggcagcagttggagaagaaattactattaataatattgttccaaaacatgttgaagcacttactgttaaattaaaagaacttggtgtagacattcaagtagatggtgatgctgaaaaagcaatcatcaaacgcaaatcatcttataaaaatgtagatattaaaacattagtataccctgggtttgcaacagatttacaacaaccaatcacgcctttattgtttatggcagatggcccttcatttgtaacagaaacaatatatcctgcgcgatttagacatgtcgatgagttaaaaaatatgggtgctaatattgaagccgatatggaaactggaactgctacaattaaaccatcatcacttaatggtgctgaagtatatgcaagtgatttgcgtgcaggtgcatgtttaattattgcaggtcttttagctgaaggcgttactacaatttataacgttagacatatttatagaggctatactgacattgttaagcatttaaaagaattaggtgcaaatatttggactgaagaagtc

SEQ ID NO: 35651 - DNA, 1497 bp, Staphylococcus haemolyticus
atgttaagttctggttttttactaacattatttttcgtaacgcttgtcattgcagtgttaagtggcttaatttttttagtgccatcggttcctgtaaaatacatacgtttacatttaactttacttctattacctgtcattgtaggagtaattggattaatcactattaatggcagagaagttataggtatctttgctctagataaactagcttggttagtaggtgcctttgtattagctttaggttttattattcagaaattttctgcacgttacttattaggcgatcgtaattatcgcaaatacttcccgttatacacatttacaacagtatttgcgtctattggttggttaagtaatgatttacgcttgatggttatttgttggggactaacattattttgtctaacacaacttatacgactaaaccgttcttggaaagtgccggctgaagcagcaaaagtatctgcgcgttcatttatcattggatgggttgctttattattagctgtagttgtatttttcatcggtactggcgattgggttatcgatccatcacaagattacgatgtttcaatgagttatggactgaaattaattgtagatttattacttgttattgctgttattattccagcagcacaatatccatttcaaagttggttaattgagtctgttgttgcaccaacacccgtatctgcaattatgcatgctggtattgtaaatgctggtggtattattttaacgcgtttttcaccagtatttgataataatattgcattaacgttattacttattatttcaagtatttcagtacttattggatcaggaattagtttggtgcatgttgactacaaaagacaacttgttggttcaacaatgagtcaaatgggtttcatgcttgtgcaatgtgctttgggtgtttattctgctgcgattattcacttgattttacatggcatatttaaagcaacgctatttttacaatcagggtcaatagttaaacgattcaatattccaacaccaccaaatgttaagcgttcttatgcttggacagtattaggaagaacattagccgttgttattgctattatcttctttttaacaagttcgcatacaccttacacattaattagtgcctttatcctagcatggtcattatctgtatcatggaatcaaatggttgcactaaatagaggtatgatgggaagagtaattggcattgctatgcttatcattgtggcactcgtttatgttgtgacacatgaagtatttgttaatattttaaatagtgtatatatggtaacgccacatccaccattaattagcgttatcatttgtgtggccattctagtattaggtagtatctttagcatttgggtagcacgtcgtcgttcatcaacagctttcgctaaagtatatttatggcttgtaaaaattggagaagcaaaatttaaatcggttgaaagtcatccgaactacttaaagaattattta

SEQ ID NO: 35652 - DNA, 2580 bp, Staphylococcus haemolyticus
gtgaaatctaacatgacaataactaaacataacatagaagaaacagttaaatcggcacgtcgtgtgattacaccactatctcctatatctatctttgcagcacgtaatccatgggaagaaatggaacatggaacgtttgatcaagtagctcaatggtttaaacatgttcgtgatatagatttatacccaagtcatgcgtcagtgatgactgctttagaaaatggagagatagaccagaaacttgtagaaacagaagtacaacaagctattaaagactacgacacttcagtgccaaaatcacatattgatatttattgtaaaaatgcgatgcgcatcaaagatttgcctacaaacctaattactaaagaagcatacttaaagattgaagtatctaagctcaaacgtgtatttgaaaatgagccttttaaatatgcacgatcaaaaagtgcgaatgcatttaatgctaaaggtgaatctttaatggatgaacttaatacacatattattaagtggtccaaattatatttagataatttccaatcaagttggactatgcctaaaagagaagaaggattctatatttcttggctacatttagcacagcatgatccaatgcttactaaaacacaacgtaaaatgattaagacattgcctcaagattatagagaggctttaatcatggcattaaatcatttagatatagctgaagatgaacgtgaatcatatttaacaggtcatttcctatcattaccaggttgggcaggcatgatgtactaccgtgctgaacaacatgaacatgaagcggatttgttaacacagtatcttgctataagattaacgatggagtgtattttactagatactgaaaaaatgagccgtccggcagtcttaaatgttgaaagacgaatcaaagagcttgtaagtaaatggttatattatggagaaatgtcaattgatgattgggcctcaatgtctatagaagaccaactggaacatttgagatttgctcacgattttaacccactctatttcaaaaaattatggcttgaagcgtgggaagaaacacatgaacgtgagttagtcgaagcgatttatgataaatctgttaaaccagtagagcaagaaactcaagtccaattagctttttgcattgatgtgcgttcagagccttttcgtcgtcatttagagagtgaaggaccgtttgagacgataggtattgcaggattctttggtcttccaattagaaaagaagtgttagatgaacaatttacgcataattcattacctgtcatggtaccaccagcctatgccattaaagagtatgccgatcgccatgatttaaacacgtataaccaacaacaacattcggttacatccatgttttatacattcaaattgatgaaacataatgtcttaccgagtttactcttaccagaattaagcggaccatttttaagcttaaatacgatagcgagtacattaatgccgaagaagacaggccactttgttcgtaattttacgaagaattggttgaagaaacccgaagctaaattaacaatagatcgtgagcatgaaatttatagtgatttaccaataggatttacagaagaagaacaagttgctttcactagacaggcactacagttgatggatttaacgacaaactttgcacctttaattgtattaggcggtcatggaagtgtgtctaataacaatccttatcatgcttcgttagaatgtggcgcttgtggaggcgcgtcaagtggattcaatgctaagctattggcaatgatgtgtaatttaccacatgtacgtgaagctttaaaaaatgagggtatagtgattcctgactcaaccgtctttgttgctgcagagcataagacgtctatcgatgaattagaatttatttatatgccagaattaactaaggaagctcaaaatgcattggatatgttaaatgaagctatgccacgtataagttataaagcgaattcggaacgtctcgctaatcttcctggcttagatcaagatgatttgaaagacccggttgcagaagcgcatcgctttgcgaatgactggagtgaaatccgtccagaatggggcttagctcgtaatgcagaatttattattggtcagcgtaatattactgcaggtaccaatttagaaggacgagctttcttacataattatgattggaagaaagacactgatgggcaattattaaatacaattatttcgggtccagctttagtagcacagtggattaatctacaatattacgcgtcgactgttgcaccacatttttatggaagcggaaataagactacccaatcagtaacatctggtgttggcgtcatgcaaggtaattcaagtgacttattggctgggttaccttggcaatcggttatggctgcagataataaaatttatcattctccaattcgattgttagttgttatccaagcgccagatcaatatattaaagacttacttgagaataatattaaattcaaacagaaagttgataatcaatgggtacgtttggctagtattgatgaaaatggtagttggaaagactgg

SEQ ID NO: 35653 - DNA, 684 bp, Staphylococcus haemolyticus
gtgtacataaatcaaagaacgaaaggactttcagctatgttaaccaaagaattcgctcagcgtgtcgaactaagtgaaaaacaagtccgtaagatagtccaacacttagaagaacgtggctatcaacttagtaagacagaatatcgtggccgtgaagctactgactttaaagaagaagatatcgaacttttccaagatatcgctgaaaaagtaaaacaaacgaatagctatgatttagcttttgaagagcttgaaaaagaaaaagacttcttacaagtgattgtcaaagaagataatgaacaactacctgctgatcaaggtgctacacaattggtagaagaattgcgcacagaaattcaaaaaatgcgtgaagaacgtcaaatgctcggtcaaatgatcagccaagttcaccaacaacaaacggaattaaaagaacttcaaaatcaaatcactgaaaaattagatactcacaatcaatcattattagctattcaaaattcacaagaagccatccaaacagctcaaaaagagcaatctgaatacactaaaaataatttagttaaagaaattaatgataataatcaacaatctatcgatactttaaaagaagatattaaaacgcaatcttctcttaatagacctaatgatgagaagaaaggtttctttgcgagattatttaattta

SEQ ID NO: 35654 - DNA, 567 bp, Staphylococcus haemolyticus
atgtcattaatcaataaagaaattctaccattcatagcgcaagcttatgatcctaaaaaagacgaattcaaagaagtaagccaagatgatttaaaaggttcttggagcgtagtatgtttctacccagctgacttctcattcgtatgcccaactgaattagaagatttacaaaaccaatatgataagttacaagacttaggtgtaaatgtattctcagtatcaactgatactcatttcgtacacaaagcttggcatgatcattcagatgcaatcagtaaaatccaatatcaaatgatcggtgacccttctcaaacaatcactcgtaattttgatgtattagatgaagaagctggtctagctcaacgtggtactttcatcattgatccagacggcgttgttcaagcagctgaaataaatgcagatggtattggccgtgacgcaagcacattagtaaataaaatcaaagccgctcaatatgtacgtcaacatccaggtgaagtatgcccggctaaatgggaagaaggttctgaatcattacaaccaggattagacttagtaggtaaaatt

SEQ ID NO: 35655 - DNA, 1476 bp, Staphylococcus haemolyticus
atgagttcagaacatagcaaaacagatgtcatcttaataggtggcggtataatgagcgcaacactcggtacattattaaaagaattatctccagacaaagaaattaaaatatttgaaaaattagaacaatctggtgaagaaagttcaaatgtttggaataatgctggcacagggcattctgcactttgtgaattgaattacactaaagaaggcaaagagggctctgttgatattacaaaagcaattaaaatcaatgaacaattccaagtatctaagcaattttgggcacatttagtaagaactggacaattagaaaatccatctaacttcattcaatcagtgccacatatgagtttcgtaaaaggtatcttcaatgtaaaattccttaaaaacagagtagcagctttaaaagaaaatatactatttgaaaaaatgggtattactgaagatcgtgaaaaaattaaagaatgggtacctttaatggttgaaggaagaacatcacatgttccaattgcattatctcgtgatgaaagtgggacagatgtaaactttggtgcattaacaaaaaaactcatctctaatttaaaagaaagaaatgtagaagtctcttataaacaagaagttgaaaatattgagaaactggataatggtaactggaaagtgactgttaaagatcttaattctggacaaagtcatacgtatgaatctgaatttgtatttattggggccggcggtgcaagtttaccgttacttcaaaaaacaggtatcaagcaatcaaaacatatcggtggtttcccagtaagtggtttgttcttacgttgtactaataaagacgttatcgaaaaacatcatgctaaagtttacggtaaggcaagtgtaggtgcaccaccaatgtcggtacctcatttagatacacgatttgtaaatggtgaacgtgctttattattcggcccatttgcaggcttttcacctaaattcttaaaaacaggttcaaatttagacttaatacgttcagttaaacctaataatttattaacaatgttatcagcaggtgttaaagaaatagatttaactaaatatctcgtatcacaacttatgttaaaacatgaagatcgtatgaatgatttacgtgtatttgtacctaatgcaaaagacgaagattgggaagttattgttgcaggtcaacgtgtacaagtgattaaggatactgaagatagtaaaggtaacttacagtttggtactgaggtaattacatctgatgatggttctcttgcagcattattaggtgcttcacctggtgcatcaactgcagtagatattatgttagatttattacaacgttgttatggtaatgaatttaaaaattggattccgaaaattaaagaaatggtaccttctttcggacttaaattaacagagcatgaggacgtctatcgagctgttaataaagaaattcaaaaatatttaaatgtaaaa

SEQ ID NO: 35656 - DNA, 663 bp, Staphylococcus haemolyticus
atggcattgcaactcaaacacattactaagacatttggcaatggagatgcacaaacagaagtattaaagaatattaattttagtgtgaatcaaggtgaattcatcatactaagtggcgcatctggatcaggtaaatctacacttcttaatattttaggtggattactaagtccgtcaagtggagatgttttgtataaaggcgagaatttattttcaaaggaagttgataaaacaagtctaagactaaatgatataggttttatttttcaatcatctcatttagttccttatctaacagttagagaacaattaatgattgtagctaaagaagcgggtataaagcgtaaagaggctaaagataaagcacaaagactattaaatgagataggtctgagtcatcgtttagatgtttatcctcatttgttatctggaggagagaaacaacgcgtcgctataatgagagcttttatgaatgaacctaaaatcatattagcagatgagccaactgccagtttagatgcagatagagcgacatctgttgtgcaaatgattaaagcacatgttcaaactaaaaatatgattggtattatgattacgcatgataaaagattatttgaatatgcagatagagtgattgaaatacaagatggtaaaatcgagtta

SEQ ID NO: 35657 - DNA, 1206 bp, Staphylococcus haemolyticus
atggatatagagcaaaaacaaaagaaaaattcaccgttatttattattatattgggtgctttaactgctataggtgctttatctatagatatgtttttgccagggctaccagaattaaaaaatgattttaatacgactactgcaaatgcacaactaactttatctttatttatgataggtttagggttaggtaatctgtttgtaggtccaatatccgatagtattgggcgaaagaaaccactagttatatctatgattatatttgctttagcaagtttaggaattgtcttcgttgaaaatatttggattatggtatttcttagattcgtgcaaggcttcactggaggtgctggagcagttatatcaagagcgattgctagtgataggtatcgtggaaatgaactaactaaatttttagcactgctcatgctagttaatggtgtagcacctgtgattgcgccagctttagggggcttaattttaagttttgctgtttggcgaatggtttttgtcattttaacgctatttggtgtgttaatggtgttaggttcattgtttaaagttcctgaatctttatcggtaaaaaatcgtgatagcagtggagtgaatgtgatttttagtaactttaaaagtttactcacaacaccacgatttgttttacctatgctcattcaaggcgttacattcatcatgttatttagttacatttctgcatcaccatttttagttcaaaaaatatatggtgtttcgccattacactttagttggatgtttgcaggagtgggaatcacacttattattgcgagtcagattgctggaaaattagtagactattttcacccacaagtgctactacgtgcatttacaattatccaaatcattggcgttgtgattgtgtcattaacattaataaatcattggcattttgcgttattagttataggttttatcgttttagtggcacctgttacaggcgtcgcgacattaggattttcaattgcaatggaagaacgtacaaccggaagcgggagcgcatcaagtttattgggattattacaatctttattaggtggccttgtgacaccacttgttaatctaaaaggtgaatataacagtatgccttatatcattattattagtctcacagcaattttacttatcattttacaattattaaatattaaagtatttaagcatgacaaagta

SEQ ID NO: 35658 - DNA, 645 bp, Staphylococcus haemolyticus
atgaagaaaatggtgttaattaatatcatcacaatcgttgttctagttgtagttggtattgtaggtttctacttatatcataatgctacaagctttgtaacaactgataatgccaaagttgatggagaacaaattcaaatctctagcccaacttcaggtcaagttaaatctcttgatgtaaaacaaggggacaaagttaaaaaaggtgacaaagtagcagaagttagtggtcaaagccaaagcggtgagtcacaaacaatggatatcaaaatgccacaaaacggaactatcgttaaaacaagtggtatagaaggttcagttgcacaagcaggttcaccaattgcttatgcttacaatttagatgatttatatattacagcaaatattgacgaaaaagatgttagcagtgtagaaaaaggcgacaaagttgacgtaacaatcgacggtgaagattctgacgttgacggtaaagttgaagaagtaggccaagcaactgcagctagcttctcattaatgccatcatctaacactgacggtaactacactaaagtatctcaagtagtaccagttaaaatttctttagattctgcaccatctaaaaatgttgttcctggaatgaacgctgaagtaaaaattcataaagac

SEQ ID NO: 35659 - DNA, 1941 bp, Staphylococcus haemolyticus
atgatactcttgcaattaaacgatatttcgaaatcatttgatggcgaagatattttcacgcgtgtgaatttcgaagtaaaaacaggcgaacgaattggtgtcgtaggcagaaacggtgctggtaaatcgactttaatgaaaatcattgccggtgttgaagactatgatagcggtcatatatcaaaaatcaaaaatttacgtatgggttatttaacacagcaaatgacacttaattcatctgcttcagtcttcgaagaaatgtcaaaaccgtttgaacatttaaaaaaaatggaacttctaattagagaagaaacgaattggctagctgatcatgcatctaactactattccgaagaatatcaacaacatatggaacgctatgaatctttaactaatcaattcgaacaacttgatggttatcagtatgaaagtaaaatcaaaactgttctacatggtttaaatttcaatgaagatgatttcgataaacctatcaatgatttcagtggtggtcaaaaaacgcgattatccttagcccaaatgctattgaatgagccagatttattactactagacgaacctacaaaccatttagatttagaaacgacgaagtggttagaagattatttaaaatatttcaaaggtgccattgttattatcagtcacgatagatatttcctagataaaatagtcactcaaatatatgatgttgcacttggcgatgttaaacgttacgtcggaaattatgaacaatttattgagcaacgtgataaatattacgaaagcagaatgcaagaatatgaacgtcagcaagatgaaattaaaagattagaaacatttgtagagaaaaatataacacgtgcttcaactagtggaatggcaaaaagtcgtcgaaaaacactagaaaaaatggaacgtattgacaaacctatgttggacgcaagaagtgctaacattcaatttggctttaatcgtaatacaggtaatgacgttatgaatatacgtaatctgaaaattggttatgactcgcctattacatctcctattaatattgaagtaagtaagggggatcatattgccattattggcccaaatggcgtaggtaaaactactctaatcaagaccatcgctcaacgtcaaaatcaattagaaggtgaaattacctttggtgcaaatcttcaaattggttattacgatcaaaagcaagctgaatttaaatctaataaaacaattatcgactatgtttgggatcaatatccaacaatgaatgaaaaagatattcgcgctatactcggacgtttcttattcgtgcaagatgatgtaaagaaagtaatcaatgatttatctggtggagaaaaagctcgtttgcaattagcgctacttatgcttcaaagagataatgtattaattcttgatgaaccaacaaaccatcttgatatagattctaaagagatgttagaacaagcgctaaaagattttgaaggaaccattctttttgtatcacacgatcgttactttattaatcaattggcaaataaagtattcgacttaaattatgacggtggccaaatgtatttgggagattatcaatattacatcgagaaaacagaagaagcagcggcacttgaagcttttaaaaatgagcgcaatgattttagtaaagaggatacttcaaatcaaaatgaagctaatgaaaatgtaaatacctatgattctcaaaagcaacaacgtcgtgagcaaagaaaattagaacgtctcattgagaactgtgaagccaaaattgaagcatttgagaatgaaatagcacgcattgatgaacaactcactcagcctgacgtattcaataatcctgaaaaagcctcatcattagcgaatcagaaacttgaaaccgaacaaatgttagaacaggttatgtcggaatgggaaaatttacaagaaaatatc

SEQ ID NO: 35660 - DNA, 957 bp, Staphylococcus haemolyticus
atgaaaaatatatcagatatcgcaaatttagcgggagtatctaaaagcacggtctcccgctttttaaatggtggctcagtaagcccccaaactaaagaaaaattaagtcgaattattgaagaacatgattatcagccaaatcagtttgctcaaagtttaagagctaagcatacgaatctaattggtgctatcattccaaggatgaattcacatgcggttgatgaaactgtgaaaggaattgtatctgtatgccatcaacatcaatatcaattattacttaactatactggtttagatatacgtgctgaaatagaggccttggagacattttcaagaagtaaagtggatggcatcatattaatggctactactttgactgatgaacacttggaagtaattgaaaaattaaatgtaccggtaattctagttggacaatcctatcccaatttacatagtataattcatgatgattatcaagcaggttttatagtaggggaacagatagggagtaaaaagcataaaaacgttgtattctttggtgtaagtgaggaggacgttgctgtaggcgtcaaacgtaaacaaggtattattgatggtttaaaaaaatacgatgtttatcctgaaatttatttaacttcttttaaatatgaagaggcaaaaaatgatgtttctgagaagttaaaaaatgctagtggtatcgatgcgttaattggagcaacagatcctattgcattagcaattcataaattttattctcaacaaaacaatgctactggaaattatcaaatttttggatttgggggagacccaatgacacaacttgttacacccgctattacgacagttaaattcaattattttaaagctggcacgtatgctatgaaccaattgaatgaattaattttttctaaaaatgcagtatctaaaactgtcattcctgttgaaatagagaatttt

SEQ ID NO: 35661 - DNA, 958 bp, Staphylococcus haemolyticus
atgttaaattcctttgattcagcttatcatgctttatgcgaagaaatattagaaattggtaatcaacgggatgatcgtactcataccggtactatttctaaatttggtcatcagttacgatttgatttatctaagggtttcccattacttacaacaaaaaaagtatctttcaaacttatcgctacagaattattatggtttattaaaggcgatacaaatatacaatacttactaaaatataataataatatttggaatgagtgggccttcgagaaatatgtgcaatctaatgattatcatggtcctgatatgactaattttggtcatagagcactacaagatgatgaatttaatgaactgtataaagaagaaatgtctaaattcaaacaacacattttaaatgatgactcatttgcaaaaaaatacggagatttaggtaatgtatatggtaaacaatggagagattgggtagataagaaggtaaccactttgatcaacttaaaaccgttattgaacaaattaaaaatagtccaaattctcgccgacatattgtctcagcatggaatccaacagaaatagatagcatggctttgccaccatgccatactatgttccaattttatgttcaagatggcagattaagttgtcaattgtatcaacgaagtgcagatattttcttaggtgtaccatttaatattgctagctatgcattatttacacattgaatagcagaagagtgtaatcttgaagttggagaatttgtgcatacttttggtgacgcacatataactctaatcatattgaagcaataaaaacacaattgtctagaaacagttttgatccgccaactttaaaaattaattcaaatgcatctattttcgatatcaattacgaagatttagaattaattggatataactcacacccagcaattaaggcaccaattgcagtataatat

SEQ ID NO: 35662 - DNA, 5774 bp, Staphylococcus haemolyticus
atgaatctttttaaaaaacagaaatttagtattcgtaaatttagtgtaggaatattttccactgtcatagctacactgactttcttatcacatccaggtcatgcagcaactcaagaagaagaaagtaattcttcgcaagctacctcgcaaaatgttaaatctcaaactgatgataaatcaatacataataatgataattacatagaaaacgaaaaaaatagtaatgattctataaaagaaatagcaaccgctattaaaattaataatagcgaaattaattctaaagtagataatgctaatggtacatatagaatagataatgaagagattaaggaaaattctatagagacaaatcaagacgaaaaaactatagaaccagaattatcacatcaaaatatttcgaaaaatgatagcaataatacatttaatgaaaataaatcaattcataaaagaacaaagcgatctactgataacaatgttgataataaccaagaccaaatgagtataaatgaaactaattctggtcaaattattaacggtacttttacagatacgtctaatggtgcagttattcctactaatcaaacagtgtctgaaatgaaccaagcaggtaaaatcactggatggcatgtgaaagataatgatcaaacagaaattcctcttgtgtggggacctaaagcattaccaccatataatccatacgtttttgataaaacaaacaataaaattgctgcagtactttcaaaatacccaaataatttaggtggcgtagcgggagataaaactgtaggtccaatttatcaagatgttgatgtaacaccagggtcagaagttcaattatattttattggtacttcaatgggtaacacaaatggtataaatggtgttaaagtttcaatttatgattctaataaccctacagatttactttattctggtagaccaaacacagcaagtaaatcctttggtgtgttcacaggtgtttttaatgtgcctaataatgtatcgagattaagatttatgtttgaaacatttgaaaagagaagttatgaaagtgccaatggaggtagaattttaaaagggaagaataactttggaggaagtggattagcagatgtgaaagtcaatagtggtgcttatttaaaagctactactacgcaaacaaaatacactgttacatcaccatcaacttctacctcattaataaatgctacattagaagtttctctagaaaataaaggtcattcccgttcaaataaaacacagtataaagttgttttacctgaaggagtacaattcatatcagctcaaaatgctagagcaaattataattcatcgaacagattattaacattaaatgtagatagaattgaaccaggaacaattaaaaacattacgtatacagtttctttaccaacttcagaacccatcaaaaaagattttgatgctacactagtttatgttacagatggcataaacatgaatagaagaaatggaagtcgtgattttggatctaatgctgatgataattatttcagatatggcggttataacgaatatgttaaaactgaatctaatcaaagaagaggaaatgttactgtcgcaacacaatctgttacggtggaaatgtataaaactgatttgcaacaaaaatataatcaaataagtgctcaaatagagcatctgaacccaagtgattattcacaagaggcttggtcatcgatgcaaaatgtgcttaatgcatcaagacaaattttaaatgaaaatgataatacacctatcaatgatagaaaaaaccaagcaacgattaacgatttgactttaagattggataaagaaagagcaaaattagatgttgatcaagccgcaaagtcacgtaaagaggtaattaataacaataatgacgctacaagagaagaaaaagatactgcattaacacttttaaaggctacttttgatgaaaaagttagagatattgaaagcgcaacaaatataaatgaaatttctgaaagaaaaaagcaagcaatcgttgatattagtcccatagatgttattccgacaattaagcaacaagcgatacaatctttgaatgataaagctgatgaaaaacttattgaaatagaaaatgacacgaatgctacttttgaagaaagagaagaagctaaaacaagtgttaatgaagctctaactaatgctaaaaatgctgtaagaaatgctacaactaatcagttagtagaaacagttttaacttctaatagtaacaacattagtcaaatttcaacgcatgcgattgctagagataaagcaagacaggaattagatagagttattgcttctaaaatgtcagaaattgataatgatcatagcgcaactattgaagaaaaaaatgaaactaaagccaaaattgatgaaattgcaaagcaagcacgattaaatattgaacgaggcgttcacaatgatgatgttaaggttgctaaagacaaagcattaaaccaacttcacaatgttcaagttgatgctattaaaaagaatcaagcgaaacaaataataacagatcaagctaactctaaaaaagcagaaattgatcaaacgcctaatgcaacagacgaagaaaaagcagcagcaaaagcaaaagtcgatgaagcagtgacaacagctaagaatgcgatagaccaagcaacgaataatgacggtgtagacactgcaaaaacaaacggtgtagatacgattaacaatgtgcaaccaacggttgttaagaaagacgaagcaaaaacagcgatagacaaagcggccgaagctaagaaagcagaaatcgatcaaacacctgatgcgacagatgaagagaaggcagcagcaaacgcgaatgtcgatgaagccgtaaataatgcgaaacgtcaatagatcaagcgacaaataacaatggcgtagacactgcgaaatctgaaggaacggacgcaattaatcacgttcaaccagtggttgttaagaaagatgaggcaaaagtagcgatcaataaagccgcggaagctaaaaaaacggaaatcgatcaaacacctaatgcgacagatgaagagaaggcagcagcaaaagctaaagttgatgaagcagtaacaatagctaagaatgcgatagatcaagcgacaaataataatggcgtagacactgcgaaaacaaacggtgtagatgcgattaacaatgtacaaccaacggttgttaagaaagacgaagcaaaaacagcaatagaaaatgcagctagagctaaaaaagcagaaatcgatcaaatgcctaatgcgacagatgaagagaaggcagcagcaaaagcgaaagtcgatgaggcagtaaataatgcgaaagtgtcaatcgatcaagcgataaataacaatggcgtagacactacgaaatcaaacggtgtagattcaattaacaatatccaaccaacggttgttaagaaagacgaagcaaaaacagcgatagacaaagcggccgaagctaagaaagcagaaatcgatcaaacacctgatgcgacagatgaagagaaggcagcagcaaaagcgaaagtcgatgaggcagtaaataatgcgaaagcgtcaatagaccaagtaacaaataacaatggtgtagacactgcgaaatctgaaggatcggacgcaattaatcacgttcaaccagtggttgttaagaaagacgaagcaaaaacagcgattgataaagccgcggaagctaagaaagcagaaatcgatcaaacgcctaatgcgacagacgaagaaaaggtagcagcaaaagcgaaagtcgatgaagcagtaacaacagctaagaatgcgatagaccaagcaacaaataacgcaggtgtagacactgcgaaatcaaatggtttagattcaattaacaatatccaaccaacggttgttaagaaagacgaagcaaaagcggcgattgataaagccgcggaagctaagaaagcagaaatcgatcaaatactaaatgcgacagatgaagagaaggcagcagcaaaagcgaaaatcgatgaggcagtaaataatgcgaaagcgtcaatagatcaagcaacaaataacgcaggtttagacactgcgaaaacaaacggtgtaggtacgattaacaatatccaaccagtggttgttaagaaagacgaagcaaaaacagcaatagacaaagcggcggaagctaagaaagcagcaatcgatcaaacactaaatgcgacagatgaagagaaggcagcagcaaaagcgaaaatcgatgaggcagtaaataatgcgaaagcgtcaatagatcaagcaacaaataacgcaggtttagacactgcgaaaacaaacggtgtaggtacgattaacaatatccaaccagtggttgttaagaaagacgaagcaaaaacagcaatagacaaagcggtggaagctaagaaagcagcaatcgatcaaacactaaatgcgacagatgaagagaaggcagcagcaaaagcgaaagtcgatgaggcagtaaataatgcgaaagcgtcaatagatcaagctacaaataacaatggcgtagacactgcgaaatctgaaggaacggacgcaattaatcacgttcaaccagtggttgttaagaaagatgaggcaaaagtagcgatcaataaagccgcggaagctaaaaaagcggaaatcgatcaaacacctaatgcgacagatgaagagaaggcagcagcaaaagcgaaaatcgatgatgcagtaaataatgcgaaagcgtcaatagaccaagcaacaaataatgcaggtgtagacactgcgaaaacaaacggtgtagatacgattaacaatatccaaccaacggttgttaagaaagacgaagcaaaaacaatgattgataaagcggcggaagctaagaaagcagaaatcgaccaaacaccaaacgcgacagatgaagagaaggcagcagcaaaagcgaaagtcgatgaggcagtaaataatgagaaagcgtcaatagaccaagcaacaaataatgacggtgtagacactgcgaaatcaaatggtttagattcaattaacaatatccaaccaacggttgttaagaaagacgaagcaaaagcggcaatcaataaagcggcggaagctaagaaagcagaaatcgatcaaacgcctaatgcgacagatgaagaaaaggtagcagcaaaagcgaaagtcgatgaggcagtgacaacagctaagaacgcaatagaccaagcaacaaataacaatggcgtagacactgcgaaaacaaacggcgtagatgcgattaacaatgtgcaaccaacggttgttaagaaagatgaagcgaaaacagcgatagacaaagcagcggaagttaaaaaagcagaaattgatcaaacgcctaatgcgacagacgaagaaaaagcagtagcaaaagcgaaagtcgatgaagcagtgacaacagctaagaatgcgatagatcaagcgacaattaaccatggcgtagacactgcgaaaacaaacggtgtagatgcgattaacaatgtccaaccaacggttgttaagaaagacgccggtacaacagcaatagacaatgcagctggagctaaaaaagcagaaatcgatcaaatgcctaatgcgacagatgaagagaaggcagcagcaaaagcgaaagtcgatgaagcagtgacaacagctaagaatgcgatagaccaagcaacaaatagcaatggcgtagacactgcgaaaacaaatggcgtagatgcggtcaacaatgtgcaaccaatggttgttaagaaagacgaagcaaaa

SEQ ID NO: 35663 - DNA, 1199 bp, Staphylococcus haemolyticus
aaacgtttgttcgatatagctgtgagtggttcaggattaatattatcagcgcctatcacattaactgcagctatagttattgcaaaaaaattaggcaaaccggttttatttagacaaacacgccccggtcaatatggagaaccattcgagatatataaatttcgtactatgtctgataaaagagatgaaaatggagaattacttccagacgatcaacgcatgacacctgtaggcacttttataagaaaatctagtattgatgaattaccacaattgattaatgtgttaaaaggagacatcagtttgataggtcctagacctttattgatggaatatttacctttatacaatgatgaacaaaaaaagcgacacaatgttaaaccaggaattacaggctgggctcaggtcaatggacgcaacgcaattacttgggatgcaaagtttaaattagatgttttgtatgctgaaaatcaatcgtttaaattagatatgtatattatttataagacaataattaatatattaaaacgtaaagatatcaatgcgccgaatcatgtaaccgccgaaaagtttaagggtaatgtatgatgagtaaaccaattattatcattggcaaaggcggccattcaaaagtcatcaaagatataattgagacgacaaatcaatatcatgtcgcaggttatcttgataacgctattgatgaatattacacagataatgatatattttatgacaacttagataacatgaaacaatataaagatttgtattcatttattattgctattggaagtaatcatattcgtcaaaaactttttcataaattagaagttaaaattgatcaatatgcaacattaattcatccaacagcagttgtgagtcctagtgcgaagattggttacggaacggttgtaatgcctaatgcggtgataaatgcggactctataattggaaagcatgtcataatcaacacaggcgcaatagtcgaacacgataatcaaattggtgattatgttcatatttcacctaatgctacattagcaggtggtgttaaagtaggcgaggcatcacacattgcaattaatgctgctgtaataccgttgattgaaattggtgaaagatgtattgtgggagcaggtgcaacagtcataaataatgttaaaacagaatcaacagtcataggaacgccagcaaaaatt

SEQ ID NO: 35664 - DNA, 933 bp, Staphylococcus haemolyticus
atgaaaaaaaagaaatcaactacttttaaagtaattattacaatactgattatattattagtacttattgttgctgcagctatttttgtctttacgaaattacattcattaaataattcaattaatgaatccttagatagagatcattcccaattaagaaaaaaggcagcaaaagagggagaccctatgacggttgtgctttacggtatagatgacgatgctgaaagacagcaagaaaatctcgggcaacgtagtgactctatcgtcttgatgtcaattaacccagaggataaaaaaactgtaatggtaagtgtgcctcgtgatacacgtgctaaaattgttggacatggaactaccgaaaaaattaaccatgcttatgcatatggtggtcctaaaatggctgtaaattcattagaagaattaatggatgtgccagttgatcattatatagctatcaatatggatggagttaaaacagttgttgatgaattaaatggcgtagatattacaagtaatgctacgttcacattccatgggtacaaatttgaaaaagggcaaaaatatcatatggatggagataaagcacttacttacatgcgtagtcgtaaggaagatggtgctggtggcgatgaaggtcgtcaattgcgtcaacaacaagtgattactgcagttgctagagaagcattctctgttaactcagtaactaaattaaacggtatattcaaagctgctcaagataatttgaaaacagacctaagcttcgtacagttaaatcgcttcaaatctgactatgataaagcacaagacaatgtagaacgtttaacaattaacggtcaaaacgcactgggtgatgacaatctatactacttctatcctgataaaaatagtctaaaagaagttaatgagaaattaaaagaaaacttaaatcttaac

SEQ ID NO: 35665 - DNA, 1473 bp, Staphylococcus haemolyticus
atgagtttcatcaacaaatttggtaaaacgacagtagcaagttcaatcttagctgcatctgtattagggacaacacacgtgtcattcgcgtcaggttctggcgaaggtaaccaaggccaacaaggacaaaatgaagattacatggccattggtaacacaaagaatcctaaaaacgttattttcatggtcggcgatggtatgggacctgcatacaattcagcttatcgttactatgctgacaatccaaatactaaagaattagatcaaactgcatttgacaaatatttaaagggtactaaccgtactaaccctaatgaccctaaagagaacgtaacagattcagctgcaggtggtacagcctttgcaactggttacaaaacatataatggtgcaatttcagtagataataataaaaagccattaaaatccgttctagaaaaagcgaaagaacttggcaaatcaactggtattgtgacaactgctgaagtaactgatgcaacaccagccgtgtatgctgcacacgttgatgaccgtgataagaaagacgaaatcgcgcaacagttttacaatgacaaaattaatggtcaacataaagctgatgttattttaggtggcggttctaaatacttcggtaaagaaaatggtaatttaacggataagttccaaaaagacggttatgattatgtaacaaacaaagatgaacttgctaattcacaaagtgatcaagtattaggtttattctctgaaaaaaatatgcctttacaaatcgatgcaccacaaagtaatccattattagtagatatggaaaacagtgccttatctaaactagaaaagaatgataaaggtttcttcttaatggtcgaaggtgcgtctatcgataaatcaggacaccctaacgacattactggtgttatgtcagaaatgggcggatttgaaaaagctttccaaaatgcaatagactactcaaacaaacacaaagacactttagttgtagcaactgccgatcattcaactggtggtttatcaattgctaaagggaaagattacgtatggaatccagaagcaattcataaaatgaaacactctggtagctacatgactaaacaaattgctgatggcaaagacccagaaaaagttattaacgacggctatggtttcgaattcccttctaaacaaatggataaagttaaagacgctgctaaagaattgaaagaagctcaagataaagctaaaagtgaagacgatgaaaaagtagctgcagcaactactaaacttcaagatgcgattcaaaaaccaatcaacgatgaatctcacactggttggactacttatggtcatacaggtgaagacgtaaacacatatgcacatggaccaagtgaaaataaatttgctggtaataatgataatacagatagtgcaaaaaatatctttgatttctttaataacgatgtaacatctaatcaaaaccaacaa

SEQ ID NO: 35666 - DNA, 312 bp, Staphylococcus haemolyticus
atgccaaaggtttatggctcacttgtagacaatgaaacacgatgcacacattaccatacttttttagatgttatagcaataaaattcaaatgctgcaataaatattatccgtgttatcaatgtcacgaagaacacgaaacacaccctatcaaaagatggtcagaacaagaatttgatgaaaaggcaattatgtgtggtgtatgtaaacatgaaatgtctattcaagattatatgatgacagagctatgtcctaaatgccaagcacattttaatagtcgttgtaaattccactatcatttatattttgaatta

SEQ ID NO: 35667 - DNA, 921 bp, Staphylococcus haemolyticus
atgttaaagcaagaagacatcttacaagatttaaaatccttaatacctgaagatattattaaagtaaatgaacctttaaaacgatatacatacaccgagacaggtggaaatgcagacttttatttatctcccactaaaaatgaggatgtacaagctattgtaagatacgctaaagaaaaagatatcccggtcacatacctcggaaatgggtcaaacattattattcgtgaaggcggcattcgtggtattgttattagcttattatcattaaatcatattaatgtttctgatgatgctattattgctggaagcggttctgcaattatagatgtttcacgtgctgctagagaccatgtgttaacaggtttagaatttgcttgtggcattccaggttctgtcggaggagctgtttacatgaatgctggcgcatatggtggtgaaatcaaagattgtatcgactacgcgctttgtgttaatgaagaaggtgatttaattcaatttactaataaagaattagaattagattacagaaatagtattgtacaaaagcaacatttagttgtacttgaagctgcattcacacttgaaccaggaaaattagacgaaattcaagcgaagatggatgacttaactgaacgtcgtgagtctaaacaaccactagaatatccatcatgtggtagtgtgttccaaagaccacccggtcattttgcaggaaaattaatacaagattctgatttacagggttatcgcgttggtggcgtagaagtttctaaaaaacatgcaggattcatggttaatgtagataatggaacagctactgattatgaagatttaattcatcacgtacaaaaagtagtgaaagaaaaattcgatgtcgaacttcatcgtgaagttcgtattattggagagcatcctaaagaa

SEQ ID NO: 35668 - DNA, 120 bp, Staphylococcus haemolyticus
  misc_feature (93)..(93): n=g, a, t or c
atgcctcgtaaaggatcagtacctaaaagagacgtattaccagatccaattcataactctaaattagttacaaaattgatcaacaaaatcatngtagatggtaaacgcggaacagcacaa

SEQ ID NO: 35669 - DNA, 1119 bp, Staphylococcus haemolyticus
atgaaaatattagtagcaatggatgaatttaacggtataatctcaagttatcaagcgaatcgtttcgttgaagaagcggtagccagtcaaattgaagatgctgatattgtacaagtgccattatttaatgggcgtcatgaattaatggattcggtgttcttatggcaatcaggtacgaaatatagagtgaatgtgcatgatgcggatatgaaggaagtcgaaacagtttatggtcaaactgaacaaggattaactataattgaggggaatttatttataaaaggacaaaaaccggttgaacaacgttcaagttacggtttaggagaagtaattatagatgcactgaataatggagccgataacattgttatttcacttggtggcatcgatagtttcgatggtggtattgggatgatgcaagctttaggtgctcaattctataatgatgaaggagaacttctagatgcacgtgaaggtgctcaagtgattaaatttattcgtcgaattgatttttctgcaatacctcaaaatttcaaggatgcacatattcaattgatgtctgatttttctagtaaattatatggtaagcatagtgaaattatgaagacgtatgaaacacatcaattgacacgagaaaaagctgcagaaatagataatttaatttggtacttcagtgagcttgttaaaaatgaaatgaaaattgctatgggtcctatcgaaagaggcggcgctggtggtggtattgcagcattattaaatggattgtatgatgctgaaatattaacaagtcatgaattggttaaccaaataacacatttagatgatttagtttctcaggcggatttaatcatctttggtgaaggtgttaaagaagaggatcacttacttgaaacaacaactttaacaattgcagaattagcgcaaaaacatgataaacctgcgattgctatttgtgcgactgatgacaaatttgatgtctttgatcagtaccatgttacagcaatgtttaatactttcgttgagatgccagaaagatacacagactttaaaatgggtatacaaatccgacactttactgttcaagcacttagattattaaaaacgacattaaataatgca

SEQ ID NO: 35670 - DNA, 1227 bp, Staphylococcus haemolyticus
atgaaagcacagcttatagatagattatcacgttacgtaaaaatcgatacacaatctaatccggaatcttcaactacaccttcaactgagaagcaatgggatttattgcgtttattacaacaagaacttgaaggttttggcttagaaacgaatctcgacgacaatggatatttatttgcgacgttagaaagcaatgtatctttcgacgtccctaccgttgggttcctggcacatgttgatacatcaccagattttaatgccagcaatgtgaatcctcaaattgtagaacaatatgatggtaaaacaattaaattaggtgatactggtcgagtattgagccaagaaacttttccagaattaaaaaaacttataggtcatacgctaatgattactgacggcacatcactgttaggtgcagatgataaagctggagttgtcgaaatcatggaagcagtaaaatatttaatagagcacccagaaatcaagcatggtcgaatccgtatcgcattcacgccagacgaagaaattggacgaggtcctcataaattcgatgtggaacgtttcaatgcagatttcgcttatacaatggacggcagtgaatttggagaattacaatttgaaagttttaatgccgctgaggctaagataactacacatggtgtgaatgtccatccaggatctgctaaaaacatcatggtcaatgctatctcattaggccatcaatttcatagtctactacccgctggcgaagttcctgaacgtacggaagactatgagggattttatcatttgatgaaattcgaaggtaatgttgaaaaagcaacattacaatatatcattcgtgatcatgatagagaatcattcgaattacgtaagacaaaattattagaaattcgtgacgatattaatgtccattatgaagatttcccagtaaaagtagatatagaagatcaatattataatatggctgaaaagattgaaccacatccatatattattgatattcctaaaaaagtgttcaatgatttaaatatagaaccaaacactgcacctattcgtggtggaactgatggttcacaattatcatttaaaggcttaccaactcctaatatatttacaggttgcggtaatttccatggaccttttgaatatgcatctatcgatgtaatggagaaggcagtgcaagtcatcattggtattgctcaagaagtcacacatcaccataaa

SEQ ID NO: 35671 - DNA, 1083 bp, Staphylococcus haemolyticus
atgtatactttactacttattgctgtaacattggtaatcagtttaatattaacacctatgattataaaggtctctattaaatttgatttagtagataggccaaattttagaaaagtacatacaaaaccagtttcagtattgggtggtactgttatactactttctttcttaataggaatctggcttggacatccgattgaaagagaagttaagcccttagttatgggggctatagttatgtatttagtaggactaattgatgatatttatgatttgaagcctattttaaagttgattggtcaaattgtcgcagcttcaatcgtagcattttatggaattacaatagattttatttcgtttcctatgggcccgacaattcattttggaatattaagtataccgattaccattatttggattgtggcgataactaatgctatcaatttaattgatggtttagacggactggcttctggagtatctgcaattggtctaattacaattgcttttattgcgattttacaagctaatgtatttattatcatgatttgtagtgtactaataggatcattattaggatttctatgtttcaactttcacccggctaagatctttttaggggatagcggagcgctactgataggatttatcattggttttctatccttacttggttttaagaacattacatttatttcattgtttttcccaattgtgattttagctgtaccatttattgatacgttatttgcaatgattcgaagaatgcgaaatggtcagcatattatgcaagcagacaaatcgcatttgcatcataaacttttagctttaggatatagccatagacaaacagtattattaatttattcaatagcgattttatttagtttatcaagtatcattttatacttatctcaacctttaggtgtactcctaatgttcattttaattgttatcacaattgaattgattgttgaatttacaggtttgattgatgatagttaccgtccgatacttaatttaataacaaaaaagaatgaacaacatcacggtgataatggtgttgatcaacatgataaaaaa

SEQ ID NO: 35672 - DNA, 426 bp, Staphylococcus haemolyticus
atgacagttattattggttcagatgtagacggtaaacgactcaaagaagtagtaaaagcatttttaaaagaaaataatcatgaagtagtagatgtgacagaaggcaaggatgtagactttgttgattcaacattagccattgctcaagaagtacaaaagaatgacgaaaatttaggcatagcaattgatgcatttggcgcaggaagtttcatggtagctacgaaagttaaagggatgattgcagcagaagtttcagacgaaagatctgcttacatgacacgtggtcacaataatgcacgtatgattacgatgggttcagaaatagttggagatacacttgctaagcatgtcgctaaagaatttgtaaatggacactatgacggtggtcgtcatcaaatccgtgtagatatgttaaataaaatgtgc

SEQ ID NO: 35673 - DNA, 513 bp, Staphylococcus haemolyticus
atgaaaatagctattggttgcgatcatattgtaacagacacaaaaatggcagtttcaaaacatttaaaagaacaaggacacgaagtaattgatgtaggaacttacgatttcacaagaacacactatccaattttcggtaagaaagttggtgaagctgtaacaagtggagaagcggatttaggcgtatgtatttgtggaacaggagttggaataagtaactctgctaataaggtgcctggcgtacgtactgctttagttcgtgatatgactacagcactatattctaaagaagaattaaacgcaaatgtcgtaagttttggtggaaaaattgtaggtgaacttttcatcttcgatattgtagatgctttcataaaagctgaatataagccgacagaagaaaataaaaaattaatagctaaaattgaacatttagaagcacataacgaaaaacaagctgatcctcatttcttcgatgaatttttagaaaaatgggacaaaggtgaatatcacgat

SEQ ID NO: 35674 - DNA, 975 bp, Staphylococcus haemolyticus
atgacaaaatcacaacaaaaattagcatcaatagaacaattaagtactaaagatggggttatctcagctttagcatttgaccaacgtggtgctttgaaaagaatgatggcagaacatcaaacagaagaaccaactgttgaacaaattgaacaattaaaagttctagtttcagaagaattaactaaatatgcgtcatcaattttattagaccctgaatatggacttccagcatcagatgctcgtaataaagactgtggtttattattagcctacgaaaaaacaggttatgacgtaaacgctaaaggtcgcttacctgactgtttagttgaatggtcagcaaagcgcttaaaagagcaaggagctaatgctgttaaatttttactttactacgatgttgatgatgctgaagaaattaacattcaaaagaaagcatatattgaaagaattggatctgagtgtgtagcagaagatataccattcttcttagaagtactaacatacgatgataatattccggataataagagtgctgcgtttgcaaaagtaaaaccacgtaaagtaaatgaggcaatgaaattattctctgaagaacgatttaatgtggatgttctaaaagttgaagtacctgtaaatatgaattatgtagaaggatttgctgaaggtgaagtcgtttatacaaaagaagaagcggctcaatatttccgtgatcaagaggcttctacacaattaccttatatctatttaagtgctggtgtatctgcagaattattccaagaaacattaaaatttgcacacgaagctggtgctaaatttaacggcgtactttgtggtcgtgcaacgtggtcaggtgcagtgaaagtatatatcgaacaaggtgaagaggctgcacgtgaatggttacgtacaactggtttcaaaaatattgatgatttaaataaagtactagaaacaactgcaacatcatggaaatcaaaa

SEQ ID NO: 35675 - DNA, 312 bp, Staphylococcus haemolyticus
atgaatagagaagaagtgcaattacttgggtttgaaattgtagcatatgctggcgacgctcgttctaagttgttagaagcactaacagcagctaaaaatggcgagttagataaagctgaagaattaactgaagaagccaatgaatgtattgcaaatgctcacaaagcgcaaacaagtttattagctaaagaggcacaaggagaagacattgcttatagtgtaacaatgatgcatggtcaagaccatttaatgacaacactactgttaaaagatttgatgaaacatctattagaattatatagaagagagagt

SEQ ID NO: 35676 - DNA, 1718 bp, Staphylococcus haemolyticus
atgaacaaattaattgcttggattgagaaaggtaaaccgttctttgaaaaaatatctcgcaatatttatttaagagcaattcgtgatggatttattgcggcaatcccaattatcttattctctagtatttttattttagttacgtatgttcctaacgtgtttggttttacatggagtaaaactatggaaggtatcttaatgaaaccatataactacacgatgggaattgttggttttattgtagcaggtactactgacaaatcgttaactgattcatttaaccggaaactagataaaacaaatcaaattaactttatctctacgatgatggcagcaatgtgtgggttcttattcctagcagctgattctgctaaagatggcggatttttaagtgcatttatgggaactaaaggtttattaacagcctttctttcagcatttattactgtaattgtctataacttctttatcaaacgaaatattacaatcaaaatgcctaaagaagttccaccaaatatttcacaagtatttaaggatatattcccgctatcagcagtaattattattttatatgcgctagatttaattgttagatcaacagcacatactaacgtagcaaatggcatattaaaattattcgaaccattatttacagcagcagatggatgggtcggtgtaacaattatctttggtgcctttgcattcttctggtttgtgggtatccatggtccatcaattgtagaaccagcaattgcagcaattacttatgctaacttagaagcaaacttacatttaattcaagctggagaacatgctaataacgttattacaccaggtactcaaatgttcgtagttacgatgggtggtactggtgcaactttagtcgtgccatttatgttcatgtggttaacgaaatcgaaacgtaataaagcgattggtagagcatctgtagtacctaccttctttggtgtaaatgaaccgattttattcggtgcacctttagtgttaaacccagtattctttattccgtttatctttgcaccaattgcaaacgtatggatatttaaattcttcgtcgatgtattaggaatgaatagttttagtatcttcttaccttggactacgccaggtcctttaggtatcgtgatgggtactggttttgcattctggtcattcgtattagcaatcgtcttaatcgtagtagatgttatcatttactacccatttgtaaaagtttatgatgaacaaattttagaagaagaattaggaaataaagaagctaataatgaattacaagacaaagtggcagcaaactttgatactaaaaaagcagatgccatcctagcatcagctggagcatctgaagctagtcattcccaaacagatcaaggtaaagaagtagcgcaacaaagtaacattacagaacaaacaaatgtacttgtattatgtgctggtggaggaactagcggattattagtaacgctttaaataaagcagcagaagaatacaatgttccagttaaagctgcagcaggtggttatggtgctcacatggatattatgaaagattatcatttaatcatattagcaccacaagtggcttcaaattatgaagacattaagcaagatacagatcgactaggtattaaattagctaaaacacaaggtgttgaatatattaatttaactcgagatggcaaagcagcattagacttcgtt

SEQ ID NO: 35677 - DNA, 1407 bp, Staphylococcus haemolyticus
atgaaaaaattaccagaagattttatattcggtggtgcgacagcagcttatcaagcagaagggtcgactcaaacagatggaaaaggtcgtgtagcatgggacacttatcttgaagaaaactattggtatacagctgaaccagcaagtgatttctataataaatatcctattgatttagaattaagtgaaaaatttggtgtgaatggcattcgtatttcaattgcatggtcacgcatatttcctaaaggatatggtgaggttaatcctaaaggtgttgaatactatcataatttatttaaagaatgtcatagaagacatgtagaaccatttgtaacattacatcactttgatacaccagagacactacatagtgatggcgacttcttaaatcgtaaaacaatcgattactttgttgagtatgcaaaattctgtttcgaagaatttgaagaagttaattattggactacatttaatgaaatcgggcctattggtgatggtcaatatttagtgggtaaattcccgcctggaattaagtatgactttgctaaagtatttcaatcacatcacaacatgatggtagcacatgcgaaagcagttaaattatttaaagacaatggctatagtggtgaagtaggtgttgtacatgctttaccaactaagtatccttatgatccaacgaatcctgaagatgttagagcagctgaattagaagatattattcataataaattcattttagatgcaacttatcttggtaaatattctcgtgaaactatggaaggcgttcaacacattttatcagtaaatggtggtaaattagatataccagaagaggattataaagtattggaagcggctaaagatttaaatgacttccttggtatcaattactatatgagtgattggatgagaggttacgatggtgaatctgaaattacacataatgccactggtgataaaggtggttctaaatatcaacttaaaggcgtaggtcaacgtgaatttgatgttgatgtaccacgtactgactgggattggatgatttatccaaaaggattgtatgatcaaatcatgcgtgtagttaaagattatcctaattaccataaaatttatattactgagaacggacttggatataaagaccaatttgatgaggaacgtaaaactgtagatgatgatgcacgaatagattatgtgaaaaaacatttagaagtcatttctgatgctattcgtgatggtgcgaatgtgaaaggttacttcatttggtcactcatggatgtattttcttggtcaaatggttatgaaaaacgatacggtctattttatgtcgattttgaaacgcaagaacgttatcctaagaagagcgcatattggtacaaagaactagcggaaagtaaggaaataaaa

SEQ ID NO: 35678 - DNA, 1008 bp, Staphylococcus haemolyticus
gtgaaagcaatcggatttgaacaaccgtttaaattatcagatggaaatttatttaaaacttttaatttagatataccagaaccaaaagtacatgaaatattagttaaaattcagtctattagtgtcaatcccgttgatacaaaacagcgattaatggatgtatcaaaagcacctcgagtactaggatttgatgcgattggtgtggttgaatctgttggaaatgaagttactatgtttaatcagggtgacattgtatattactctggttcacctgatcaaaacggatcaaatgcagaataccaattgattaatgagagattagtagctaaggcacctaaaaatattagcgctgagcaggcagtaagcttaccattaaccggtataacagcatatgaaacattgtttgatgtgtttggtatttcacgcaaccgtaatgaaaatgaaggtaaaacgttgttaattataaatggcgcaggtggcgtaggaagtattgctactcaaattgctaaggcctatggtttaagggttattactacagcatcgcgtaatgaaacgattgagtggactaaaaaaatgggtgctgatattgtactcaatcataaagagagtttactaaatcaatttaagacacaaggtattgaactggttgattacgtattctgtacatttaatacggatatgtactatgacgacatgattcaattagtgaaacctagaggtcatattgctactattgtagcttttgaaaatgaccaagatttaaatgctttgaaaccaaaaagcttaagtttctcacatgaatttatgtttgctagaccattaaatcaaactgatgatatgataaaacatcatgaatatttagaagacataacaaataaggttgaacagaatatttatcaacctacaacaactaaagttatagaaggattaactactgaaaacatctatcaagcacaccaaatattagaatccaatacaatgattggcaaattggtcattaatttaaat

SEQ ID NO: 35679 - DNA, 534 bp, Staphylococcus haemolyticus
gtgaaaaggttaaaaaactttatcctcggcctattaatagttgctattgttggattcctattgtttatgtacataaaagatagtcgtatatctaagtatcaagacttcttcttacaattcaattggttccaaccactattaattggtttagctgctctacttatattgataggtttaatattagtattcagcatctttaaaccaacatatagaaaaccaggattatacaaagattatgatgacggtcatatttatgtatctcgtaaagcagttgaaaaatcagcttacgatacacttactaaatacgaccaagtaagacaacctaatgttgtagcgaagctttataataagaaaagcaaatcttacattgatatcaaggctgacttcttagtaccaaacgatgtacaagttaagtcactaactgaaagtattcgttcagacattaagcataatgtagaatattttactgaattaccagtgagaaaacttgaagtaaatgtcagagatcaaaaaactgctggacaacgcgttctg

SEQ ID NO: 35680 - DNA, 1947 bp, Staphylococcus haemolyticus
atggataatttaatttcaatagacaatatagatttacatttaactgatgaagaattaggagctttatcgtttttaaaacaagaaatgccccatttagtaaactactttaaaaatgaattgctcgttgcacgagataaaatttctcaacgcttaattacatccctttacagagaaaatttagtcaacgctaaatcaaatagtacctttgtctcgtcatgtgatattaaaaactttccaataaatggagaacaccaaattatgcgcgtgcattttcccgaaagcgataaatatttattcgcaaaagtttccagtactcatgcatttggtcgtgtagatgttgaaggtccattttactattgtgatagtgatggtagacaatgtgttcgtatacttcatcctaatgaagtattagctgatatcttaaaggaaaatccagagcttgataatgaggcaagttcacaattcaaagacgatatggaaaacagtgttgcaaatatggcgttagcactttcatatcaagcatatgagatgcaacattcaaaggaacctttattggaaataattattaatgaacaagatagttatttgcgttcagagcaggcagttatagagggacatccgcttcatcctggagctaaattgcgcaaaggccttaatgctaatgagaatattaaatatagttcagaatataataaagaaatccatttaaagtgtgtgcttattcaccaaagtatcgctagaacacaatctttatcttttacttatgatgctgaattagaagcgcaatttccagaactatatagtcaaattaaaactgaatgtgataacttgagtaatctgagtgaatatcatttaatgatcgttcatccttggcagttagataatgtattattaagtcaatacgaagaggaaataaataataatttaatgattccactaaagatagaaataccttattacgctggtttatcttttagaactttaatgccgaaattcccaagcacgttgccacatattaagttatctaccaatgtacatattactggcgaaattagaactttatctgatcaaacaactcacaatggtcctttagttactcaaatcttaaatgacattttaaagcaagataaaaatttcactcattatagagttggtattttaaatgaatttgctggtattcacttttataattcaaatgacgaagaagctattcaaacagatctaagtgaacaattaggaacgctttttagggacaatgtgtacaatctaactgaaaaagatagtattcctatgattccatcaagtttagtggttacctataaatataatgaagaaccaccaatcattagtttaattcaacgttataaacatcactacgacaaatctaatcttgatatcgcagctcaagaatggttgtcagattacatttctcaattgttaggcatagtgattcctttatatgctaaatatggcattgcacttgaagcacatttacaaaattcaatttcaacgtttaacgctgatggacgattaaacactatttatattcgtgattttgaaggcttacgtattgatgaacaacttttaaatgaagctggatatacgacaaaacattttcacgaaaaatctagaatcttgaccgactctaaaacaacagtatttaataaagtcttttactcgacagttcaaaatcatataggtgaacttatattaactgtttcaaaattcattgaagatgaggaatttgaatctaaactgtgggatagcgtaagcgaaattattcataacattttaaatagcttaacggatattaacacaagccgcatttcagaaattaaacaaattatgtttgatagagacattgattataaatgcgtgacaacgatgcgtttagaagatgaagcacatcactatacttatattaaagtaagtaatccactacatggt

SEQ ID NO: 35681 - DNA, 1758 bp, Staphylococcus haemolyticus
atgactcaaaacgcatggcaaaatgcggataccaatatacaatatcgtattttaaatgctttaataaaagaaaacatttggcaagaacaaactattattacaactaaagatgatcaattagatatacaatatcatggatgtatactttctactcattttaatcataacagtgtaatgtcaaggtatgaatttgtaggaccaattacatttcgatgtggcacaaacataatggaagtatcaacagtagaagctttattagatatgttaagtaatcattttgatattaatatacatcagcaattaatagatgaaataatacatagtagagatagctttgttgaaatttataaacaattttatcaacgtcaacataatgtgcaatctagtatgcaattttctggtatgccaacaactttaaatttttttgcatggttacaacatttgaatgacgcgaatgaaatcaatgatttgttatattcagaaagcttagtattagaaggtcatcctacacatccacttactaaaacgaaactgccattaactatggatgaagttaaaatgtattcacctgagtttgaaaaagttataccgttaaaaattatgttaatccataaagactgtgcacaagctacgtgtatagataatgatgaagatttcatattgaagaaagtaatacctgaatatcaaacaagaattagaaaatatgcacagtctattcatatttcgttagaagactattttgtgatattagtacatccatggcaatacaaccatactatctacgataagtttgcgaattggattgctaataagtttttattaacaacaccatttgatgtcgattcgaaagcaacactatcatttaggacgatggcgctcatcaataagccatatcatataaaattacctgtcaatgtacaagcaactagtgctgtcagaacagtttcaagtgttacaacggtagatggacctatattgagtagcgctttacaaaatgtattaaatcaatatccacaactaaatgttgcattagaaccttatggtttatgtgcgaaaacaaatgacgaggatgctagacagttagcatgtattgtcagagaaacaccttatattgcaaacaatggggtgactattgttactggtgcattggttaatcctaatccaattgatcgacatattacagttgatagttatatcgaatgggttaatggtgagttaaataatagaggtatattaacctttattcaaaattatagtcgacaacttattacgcctttaatcaatttaattcaagagtatggcatagctttagaagcgcatatgcaaaatactatagttaatttaggacctaattatcaaatgaattttattgtgcgtgatttaggtgggtctcgtatcgatttaaatacacttacgcataaactgaaaaatatcaacgtgtccaatcaaagtttattggcaaattcaattgaagaagttattgcgaaatttcagcatgctgttattcagaatcagttagctgaattaattcatcacttttcaaaaacggaatttgtaactgaagaagaattgttcactctagttcaagatgaagttaaattagcaataaatgataataaaccacatgctcaagctttaaaagatgtactctttggttcaaagattactgttaaggcattattacgcatgcgtatgagcaatagagtgaaaaaatatttaaatatcgaacttgataatccaattagagatgaggtgaga

SEQ ID NO: 35682 - DNA, 4527 bp, Staphylococcus haemolyticus
gtgggcatcatgtttgatgaaagattaaaaagaggattatacgattaccgtgaggaacatgatgcatgcggtattgggttttacgcaaacatgaataatttaaggtcacacgatatcatcgaaaaatcacttgaaatgttacgccgtcttgatcatcgtggtggagttggcgcagatggtataacaggtgatggtgcaggtattatgaccgaaataccatttcaattttttaaagcacatgtcaatttagacttacctaacgagggagactatgcggtaggtctttttttctctaatgaaaagattcaaggtacgaaacatgaaacgcaattcaatgactactttcaaagtgaaggtttaaaggtaattggctatcgtgatgtgcctgtcgatgttaatgcagtggcacctcatgttgcgtctacgatgccacacattcaacaagtgtttattgatattagattaattgaaacacccgctaaaccattgtatatagcgagaaagcaaatagagcaatatgcagaacgacaagatttagggctttatttcacaagtttatcgcataagacaattgtttataaaggttggttacgttcagatcaaattaagaaactatatctagatttaaatcacgaagactatcaatctaaactaggacttgttcattcaagatttagtacgaatacgttcccgagttggaagcgtgcgcatccaaaccgattattaatgcacaatggtgaaattaatacgattaaaggtaatgtgaattggatgagagcgcgtcaaagacaattaattcaaacattatttggcgaagaacatactaaaattcaaaacattgttgatgaagatggaagtgattcagcgattgtagataacgcgttggaatttttatcgttggcaatggaacctgaagaagcagcgatgttgcttattcctgaaccatggttatacaacaaagaaaatgacgacaatgttcgtgcgttctatgagttttatagctatttaatggaaccatgggatggaccaacaatgatttcattctgtaacggagataaaattggtgccttaactgaccgaaatggattacgaccaggtcgttacacaattacaaaagataattttattgttttttcatctgaagtaggtgtagtagatgtacctgaagtcaatgttgcttataaagggcagctcaatcctgggaagttgctactcgtagattttgactctcataaagtggttgaaaataatgaattaaaagctcgaattgccaatcaatatccttacaaagaatggttggataaccacaaagtggacctaaacttagaaggacaaacctatcaccaacctttattaaatagtgagacattatttgaattacagcgtcaatttggatatacgaaagaagatatctataaatatatggctgaattagtaaaaggtaagaaagatccaattggtgctatgggctatgatgcgccactcgcagtattaaatgaaagaccagaatctttatttaattactttaaacaattatttgcacaggtaactaacccacctattgatgcttatcgcgaaaagatagtaacaagtgaattatcttacttaggtggagaggggaatttgttccatcctgatgaaacagtattagatcgtattcaattagcaaagcctgtcttgactttaactcaattagataagataaaacagagtaagtttaacgtgaaacacttatctacactatatcaagataaccttaaagaggcattggaaagactgggtgaagcggcgatacaagctactcgagatggtcatactatattagttcttgatgatagtgaacttattgataatgatgatgaaagtaaattgaaagaacaacgctacgctatgccaatactattagctatcagtcatattcatcagttattaatcagagaaggtctacgtatggatactagtttagtggcattatctggagaaacacgtgaagttcatcatgtagcgtgtttattaggttatggtgcaaatgctgttattccatatttagctcaacataccattgcacatttaactgaaacacatcgtttagaaggcaccgtttccgataacgttgaaacttatacacgtgtgctatcagagggtgttattaaagtaatggcgaagatgggtatctctactgttcaaagttatcaaggtgctcaaatctttgaagcggttggtctatctcaagaagtcattgatgactatttcactggaacacagtctaagttatcagggctaagcattcaacaaattgatactgaaaataaaatgcgtcaacaaagacataatgagtacctagattcaggaagtgtcttccaatggcgacaacaaggtcaacatcatgtgtttaatcctacaacaattcatttgttacaacatgcatgtcgtgagaatgattatacacagtttaaaactttttcgaatgctattcatgagcaaagaaatgatcatctacgcgatttattagaattcaaagcacagcagtcgattcatattagtgaggttgagtcagtagaaagcattgttaaacggtttaatacgggtgcaatgagttatggttctatttctgaagaagcacatcaaacattagcacaagctatgaataaaattggtggtaaaagtaatagtggcgaaggtggagaaaatcctaaacgttatgaaatacaagaagacggtactgtgttatcaagtgctatcaagcaagtggcttcaggccgttttggtgtgactagtaattatttacaacatgcaaaagaattacaaattaaagttgctcaaggtgctaagccgggagaaggaggacagttaccgggcacaaaagtatatccttggattgctgaaacacgaggttcaacgccaggtatcggattgatttcacctccacctcatcatgatatttattcaattgaagacttaggacaacttattcatgacttaaagaatgcaaacagaagtgctgatgtagcagttaaattagtttcgaaaacaggtattggaaccattgcatctggtgttgctaaagcatttgcagataaaatcgtcgtgagtggatatgacggtggtacaggcgcatcgcctaagacgagtattcaacacgccgggttaccttgggaacttggtttagctgaaacgcatcaaacattgaaattaaatcatttacgtagtcgtgttcgtttagaaacagatggaaagttgatgacaggtagagatgttgcgctagcatgtgcactaggtgccgaagaatttggattcgcgactgcaccattagttgttttagggtgcatcatgatgcgcgtttgtcataacgatacatgtccagtaggtatcgcgactcagaacaaagatttaagagcgttatttagaggtaaggctgaccacgttgttaactttatgcatttcatagctgaagagttaagagaggtcttagcatccttaggaataagaacagttgaagaattggttggacgtaccgacttgttacaacgctcaagtcgaattgatgaacaatcaaaagcagcaacactagacattgagaagttattggattcagatgatggccctaactcaaaagaaattaatcaaaatcatcatttagatataggtttcgatttaaattatctatataaagatgctaaacaaagtattgaggatggaaaattatttaaagggaattatgtgattaataatgaacaacgagatgtaggtgttatcacaggaagttacattactcagtgtcacggtattaaagggttaccagaggggacaattgtagctaaaacacatggtcatgctggacaaagtttagcggcattcgcaccatcaggattgttagtccaacatacaggtgatgcaaatgattacgttggtaaagggttatcaggtggtactgttgtgattaaggcaccaaataaacaacgcgaacgtgaaattattgctgggaatgtatgtttctatggtgcttcaaaaggtaaagcctttattaatggtagtgctggcgaacgtttttgtattagaaacagtggtgttgatgtagtagtagaaggtatcggtgatcatggtttggaatatatgactggaggacatgtagtcaatttaggagatgtaggtaagaacttcggtcaaggtatgagcggaggcgtttgttacgtatttccaagtaatctcgaattattcaaacgtaaaaaccaattaccaaccctagcttttgagagagtgacacacaaagaggagaaagcgttacttaaaacaatgttagaggaacattatcgttatacacaaagtacaaaagcagcgtcaattttaaatgattttgaacatgtggcagacaaagttattaaagtgattccaaaagattatgaactaatgatgcaaaaaattgaattacaaagtcgtcatttgccacaacttgatgatgctaaactggcagcattctatgatgaacgcacgacaattgaacaagaattacagccagcagttatttat

SEQ ID NO: 35683 - DNA, 723 bp, Staphylococcus haemolyticus
atggcaacacaaaaattcataacaatatatgaacaacttaaacaacgaatacatgagggtgaatacacatacggacaacagctaccttcagaacatgaattattaacgctgtacggagcgtcacgtgagactgttagaaaagcattggatttattagcaaatgatggcatgattcaaaaaattaggggtaaggggtccgttgtaatagatcaaggtattacggagtttccgttctcagaattgattagcttcaaagaagtgcaagaggaacttggtctcaagcatgaaacggaagtgctcattaacgaattggttaaagcaagctcagttcttcatgttaaaaaacaattgaatattagtaatgatgatgtactaatccatgtagtacgcacgagaaacgtcaatcaaaaggtcaaaattttggatgaagattactttttaacttcaatagtgtccaatatttcggattcagtagcaaaagattctatatatcattacttagaaacgcaattaggattagatatcagttattcaagtaagtcgattacctttgagccttttactgaaagagaatataatgtttttgggaaaatacaaccgccatataccgcaacagtgagaagtgtcgtttatttaaaaaatacgatgccattccaatacaatgtgtcgaagcatttagcgacagagtttaaattccaagaattttcaagacgacacaaatta

SEQ ID NO: 35684 - DNA, 1713 bp, Staphylococcus haemolyticus
gtgaattatcaagctttgtatcgaatgtttagaccccaaagtttccaagatgttgtgggtcaagaacatgtaactaagacgttacgtaacgccatttccaaaggtaaacagtctcatgcctatatctttagtggacctcgtgggactggtaaaactagtattgctaaagtatttgctaaagcgataaactgtttaaatcctcaagacggtgaaccatgtaatgaatgtgcgatttgtaaaggcattactcaaggtacgaatggtgatgttatcgaaattgatgctgcgagtaataatggtgtagatgagattcggaatattagagataaagtgaagtatgcacctagtgaatcgaaatataaagtgtatattattgacgaggtacatatgctaacaactggggcttttaatgcgctattaaagacgcttgaagaaccaccagcacacgccatatttatccttgctacaactgaaccacacaaaatcccgcctacaattatttcgcgtgcacaacgatttgacttcaaagcgattggtactgaacaaattactgatcgtttacgctttgtcgctgaagaacaacagttagattatgataatgaagcacttgagtttattgcgaaagcatctgaaggtggaatgcgagatgcattaagtatcatggaccaagctatcgcatttggtgatgagcaccttacgctacaagacgcattagacgtaacaggtagtgtagatgaagcggctttaaatgaattatttaaagatgtcattgatggtaatgttaaaaatgcatttacacgctatcatcaatttatttctgaaggaaaagaagttaatcgtcttataaatgacatgatttattttgttcgcgatacaattatgaataaaactgtaaataatcacgctgaatttgatgcgttaatgaattttgatttagacatgctctatcatatgattgatattattaatgatacattagtttcaatacgatttagtgtaaatcaaaacgttcattttgaagtgctattagtgaaaattgctgaaatggtgaaatcacaacctgataccgttactaatgtagcaacgactcaagttgcatcccaacctaacaacgaagtgttattgcaacgtatggaacaattagaaaatgaactgaaaacacttaaagcacaaggtattgctcaagcaagttccaaacaacaatcatcacaatcaaacacacgtggcaaacgtcagaataaaggcacattttcaatgacgaatattgctaaggtattagacgaagcaaataaagaagacattcaattattgaagaaacattggctagaagtagtagactatgcgaaaaagaatgataaaaaatcattagtaagtttattgcaaaactcaatccctgtagctgctagtgaaaaaagagtattaattcagtttgatgaagaaattcactgtgaaattgttaacagagatgatgagaaacgaactagcattgaaaatgtagtgagaaatattattaataagaatgttgaagtagttggggttccttcagatcagtggatgagagtacgaacagaatatattaatagtagaaagcagcacgataaagaagaaaatcaaacgccatctaatgaaggagaagaacaacaagacactgatgtagcacagaaagcacgtgatttatttggagaagaaacagttcatttaatagacgaagaa

SEQ ID NO: 35685 - DNA, 315 bp, Staphylococcus haemolyticus
atgcgcggtggcggaaatatgcaacaaatgatgaaacaaatgcaaaaaatgcaaaagaaaatggctcaagaacaagaaaaattaaaagaagaacgcattgtaggcacagctggtggtggcatggtagcagttacagttactggtcataaagaagttgtagatgttgaaattaaagaagaagcagtagatccagatgatattgaaatgctacaggatttagttttagcagcaacaaatgaagcgatgaacaaagcggacgaattaactcaagaacgtttaggtaagcatacacaaggcttaaacattccgggaatg

SEQ ID NO: 35686 - DNA, 594 bp, Staphylococcus haemolyticus
atgcattatccagaaccgatatctaaattaatagatagtttcatgaaactgccaggcattggtcccaagacggctcaacgtctggcatttcatactttagatatgaaagaagacgatgtagtccaatttgctaaagccttggtagatgttaaacgtgagcttacctattgtagtgtatgtggacatataactgaaaacgacccttgctacatttgcgaagataagcaacgtgaccgttcagttatatgtgtggtcgaagatgataaagatgttattgcaatggagaagatgagagaatacaaaggtctctatcatgtattgcatggatctatctccccgatggatggcattgggcctgaagatattaatatcccaactttaatagatagattaaaagatgaagaggttaaagaattaatattggcaatgaatcctaatttagaaggtgaatcaacagcaatgtatatatctagattagtgaaacctattggaattaaagtaactagattagctcaaggactttcagtaggtggagatttagaatatgcagatgaagttactttatctaaagcaatagccggaagaacagaaatg

SEQ ID NO: 35687 - DNA, 603 bp, Staphylococcus haemolyticus
atgttagagttaaagcttcaatatcaattaaaaaagacattcattgatattaacattaacgatacagtccctaaaatttacgcaatacgagggccttctggaataggtaaaaccacagtgctaaatatgatagcaggcttaagaacgccagataaagcctatatcaaaatcaatgacagactgattactgatactgagcataaagtcaatctgaaaatacaaaatcgcaaaattggctatttattccaagattaccaattgtttcctaatatgacagtttacaaaaatataacttttatgtctaaaccatctgtccatatagatgatttaatggatcgactaaatattcatcatctaaaagagcaatatccatcgacactttctggaggagaatctcaacgtgttgctttagctcgaacactaagtacgaaacctgatttgattttattagatgagccattttcaagtctagatgatgcaacgagaggtgaaggaataaagttaattaaacgtacttttaaagaatggaaaataccaatcatctttgtcacacattctaattttgaggctgaagtattggctgataaaattattaagataggt

SEQ ID NO: 35688 - DNA, 1047 bp, Staphylococcus haemolyticus
atgagtgactttcaaagagaacagaggaaaaatgaacatgttgaaatagcaatggctcaaagtgatgcacctcaatcagactttgatcgagtaagattcgtgcatcattcaatccctaacataaatgtagatgaagtagacttaacaagtcgaacaacagattttgatatgacatatccaatttatatcaatgcgatgacaggcggcagtgaatggacaaaacaaattaatgcgaaacttgcagttgtcgctagagaaactggattagcaatggctgtaggctctacacatgccgctttgagaaatcctaaaatggcggaatcattcagtattgcacgtcaaaccaacccagaaggtataatttttagtaatgttggtgccgatgttcctgtagataaagccgtagaagcggttagtttattagatgcacaggctttacaaattcatgtgaatgcaccacaagaacttgtgatgcctgaaggaaatcgtgaattctcgacttggttagataatgtagcagctattgttcaacgtgttgatgttccagttattattaaagaagttggcttcggcatgagcaaagaactatataaagatttaattgatgttggtgttacatacgttgatgtaagtggtaaaggtggaacaaactttgtcacaattgaaaatgagcgtcgttcaaataaagatatggattatcttgcaaattggggacagtcaactgtagagtcattgcttgaaagttctgcttatcaagattcacttaatgtctttgctagtggtggtgtacgtactcctctagatgttgttaagagcctagcattaggtgctaaagctgtaggtatgtctcgaccatttttaaatcaagttgaaaatgggggcattacgacaacgattgagtatgttgagtcatttattgaacatacgaaatcaattatgacaatgttaaatgcacgagatattagtgaattaaaacaaagtaagttcgttttcgaccataagttaatgtcatggattgaacaacgtggtttagacattcatagaggg

SEQ ID NO: 35689 - DNA, 933 bp, Staphylococcus haemolyticus
atgtatacacaaggtaatccaaaactatggactggtcgtttggatagtgaaacagatcctaaacagtttagacattttcaaacagtaaagttcgctaatttggaaaatatggaaaacgtaagtgataagacaggtgttggtctcttaggatatgccgtggataaaggtgttgaaaacaataaaggtagaatcggatcaaggaagggtccagatatcataaaacatgaattcgcgaaacttccagatttaagtgaatgcgaaatgttgattgattacggtaatgttgaacatacaagtaatcatcttagagaaacgcaacaagagatggcacgattgtctgctaaggttattaagcaacataaacaggcttttttaattggaggtggccatgatattgcatatgcacaatatttggctactagagaagtctattcagatgcttcaattggaattatcaatattgatgctcattttgacacacgtcctgatgagccacctacatctggcactatgttccgagaaattttagataatgatgaaaatgtcgattatctagttttaggcttggctcaaggtggtaatacgcgtgctttatatgattatgcaaaagacaataatattatttatgtctatgcggacgaacttttacatcaagtgtcaccgactattaaagataaaatagaaagatttattcatgaccatgatacgattatgtttaccatatgtatggatgttattgacagtgcgttcgcgcctggtgtaagttcacctagtgtattaggattatatcctcattcagtatttgaaataagtaagcgtgtaatattaagcgataaggtatcatcaattagtattgcagaaactaacccagactatgatgttgataatcgtacgtcaaagttagcggcgaatttaatccatcatttcctagtt

SEQ ID NO: 35690 - DNA, 1166 bp, Staphylococcus haemolyticus
ttaagttataagcagcaatggcttggagaaatctcgcaaaatataatggcaggtatcttaatgggtttagcactactccctgtagctatagccttctcatttattgttcatatcagtccaacgatagggttaatgagttgtggattaatgatgctattcattagctttcttggagaacgaataagtatggtgtctggaccaagtagtggtatttcgatagtgggtgcaccactagtagaacaatacaatattcattacttaattatggccacgcttataatgggcatcattctaattatatttggcatgtgtcacatagataagatccttaatcatattccagatactgttgttattggctttatgaatgcattgggtattctattacttacaacgcaaataaaatatatttttggtataactactgcgacttatttagtagcaatcgctacatttctaataatttatttatcttcaatatttattcgatttatgccagctccgcttatagctataattgtggtgactatagcaagttattttcttaaaccgaatgttcaactagtccacgatttagcagaaattcgacttacctttcctaaaatttctgtttatacagaacttttaaacttacatgcattaagtattattactttatatgcattaaccatgtctattatttccgtagtacaaacaaatcttacaaatgaaatgatggatgtaattacacaaagtcattccaataaagatcgagaagtcattggtcaagggttagctaatttgattgtcgggttattaggtggatatggttcaagcgccttagtaggtcaatcaaaatttaattttaaaatgggtactactactcgattagccacattcgttacaggtttatttcttctctcatgcgtcgttattttaggtccgattgtaggttttatcctatggcagtgttggcttcggtattaattacaatatcattgaatacatttgatagacgcacgtttaaacatttaaaagaagcacctataaagcatagtatcgtaatgttcataacgattattttaatattaatgtcacacaatttagctataggcgtcgttataggtacacttatctattatgtcattcacttcatttttacaaagtatggatgactgtcgctatga

SEQ ID NO: 35691 - DNA, 1935 bp, Staphylococcus haemolyticus
atgtttaaggagagatgtatcatgtctaatcaacaaatcaatattcaatttccagacggaagtaataaagcgtatcaagctggagtgcttgctagtgatgtagcgaaatccattagccaatctttatataaggaagcagtcgtttgtcgtatgaatgaccgtttagttgatttgacccatcctcttcaagaagactgtgaactcacattttacacacttaaagatcaagaaggtttaaatgtaatgcgacattctgccgcccacgtcttagcacaagcacttactcgattatatcccgatgtaaaattaacaatcggtcctgtcattgagcatggtttttactatgatatcgatttagatgaatccattagtgaagcagatttaaataaaattgaaaaagaaatgaagaaaatccatagtgaaaatttaaaatttgaacgacaaaatttaagttatgcagaagctaaaaatatttttaaagataatccttacaagttggaacttacagaagaacataaagatgatcaactttcactgtatcaacaaggggaatttattgatttatgcgtagggccacacgtaccaagtactaaatttgtaaatcattttaaattaactaaagtatcaggtgcctattggcgaggtaatagtgataataagatgttgcaacgtatttacggcgtagcatttcgttctaaagatcaacttgatgactattttgaatttttaagggaagcggaagagcgcaatcatagacgcttaggtaaacagttgaaattattcatgttttctgaagaagcgccaggtatgccattctatctatctaatggtcaattcattcgaaatcaaatggaaagtttcttgagagaggttcaattgaaacacgattatgatgaggtaagaacaccgttaatgatgaacaaacgactttgggaagaatcaggacattgggaccattatcatgagaacatgtatttcactaaagtggatgaaaatgattacgcgttgaaaccaatgaattgcccgggacatatgttaattttcaaaaatgaacttagatcttataaagatttaccgcttcgaattgctgaatttggtcaagtgcaccgtcatgagttcagtggtgcattgaatggtttgctacgcgtgagaacattctgccaagatgacgcgcatatctttatcatgaaatctcaaatcaaatcagaagtgcaggaaattctgaaattaattgattatatttattcagtattcggctttgaatatagtattgaattatcaacacgtccggatgattatttaggagacttagacttatggaatgaagcggaacaatcattggcacatgtattggatgaccttggattagactattctattaatgaaggggacggcgctttctatggtcctaagattgatgtgcatattaaagacgcattaaatcgaagccatcaatgtgctacagtgcaattagatttccaaatgccagagaaatttgaattaacttacattaacgaacaaaatgaaaaagaacgaccagttgtattgcatagagcagtattcggttcactagaccgcttcttcggtattttaatcgaacacttcaaaggcgcattcccactatggatggcacctgtacaagtgaatttaattggcgtatcagataataatgatgattacgtccgcacagttgcagaggtactaagagatgagaatatccgtgttgctatagatgatcgggatgaaaagcttggcaaaaaaattagagaaagccagatgaataaaattccatatacattagtattaggagacgatgaacaacaacatcacacggtttcagttagaaaatatgcacatgatgataatgaaacaatggatattcaagcatttattgaaaagttaaaacatgaaattgaaagtaaagaattattagtt

SEQ ID NO: 35692 - DNA, 456 bp, Staphylococcus haemolyticus
atgaaatccattgaaacgatgcaatcttaccatttgttgaaattgttattttcaaattctgaagtttcctatgtattagaagaatggaatcaacaatatgaagcggtagaaataaaaactcgaaatggacattttaaaagtaggttagctcaaaagacgcctaacaaaaaaggctactttttcgcaatgtggaaaaaagatgaaaataatacgaatgtgccgtttactgaggatgatttagagaatcaattaatagtgaatattgttgatgataattggagaggccagtttatatttcctaaggatatattgatcaagaaaggtattttgaaaagtgatgagtctaaagggaaaatggcattgagggtgtatccaccgtgggaaactgaattaaataaaacagcaactaagacacaagcatggcaatgtgcatattttaatgagataacgcacgaa

SEQ ID NO: 35693 - DNA, 2040 bp, Staphylococcus haemolyticus
ttggaaatatttgaaacgattctcatatttctagccgtagttattgtaagctcctttgttcatacttttttacccaaagtgcctctggcattcattcaaattgctttaggaatgctcctctttttaacgccagtacctgtagaatttaacttcgattcggaactctttatggtagcaacgattgcaccgttactttttgtggaaggtgttaacgtttcgagagctcatttacgtcgttatattaaaccagtgatgttaatggccttaggacttgttattacaactgttattggtgtaggtctatttattcattggatttggccgacacttcctattggtgcagcttttgccgtagccgcaatattatgtccaactgatgctgtggcagtgcaagctattacaaaaggtaaggttttacctaaaggtgctatgactattcttgaaggtgaatcgttacttaatgatgcagcaggtatcatctcattcaaaatagcggtaggtgttttaattactggttcattctcactatttgaagcggtgcaacaatttctaatcgcgtcaatcggtggtgcgattattggtttacttattggtatcgcgcttgttagattccgtttaacacttacaagacgtggcatagaaaatattaatatgtttacttttttacaactattaacgccatttgttacgtatcttgttgctgaaatgtttcatgcgtcaggtattattgctgccgttgtagcaggtttagttcatggttttgaacgtgatcgtatcgctcaaacacgtactcgacttcaaatgagttacaatcacacttggaacattctaggatatgcattgaatggttttgttttttcaatattaggatttttagttccagaagtaattggaaatattgtaaaaactgaaccacacaatttattgttcttagttgtgataacagcactcgttgcgttagcggtatacttatttagatttatatgggtgtatgtgctctatcctctattctatttatctgtcagtcctttccaaaaattaatgaatgaagaaggggaggacaagaagaaagagaaaccacctaaacgaagcatgtatgcgcttatcatgacactatgtggcgtgcacggaactatttcgttagcaatcgcattaacattaccatactttttagcagatcatcatgcgtttacatatcgtaatgatttactatttatttcatcaggtatggttattataagtcttgtgattgcacaagttgtattgccgtttgtaacatctagtgcacctaaggctaagattggaagtatgaattttaaagaagctagaatatatattcttgaacatgtcatagattacttgaatcatcattcatcatttgaaacaagttatcgttatggtaatgtcattaaagaatatcacgataaattaacgttcttgaaatctgttgaaaaggatgatgagaactcaaaagaactcgaaagattacagagtttagcatttaaggttgaaacgaaaacactagaacgacttgccgatgatggtgaaataactgcgagtgtattagaaaactacatgcgttatgcagaacgtacacaagtgtatcgtcaagcgtcattgatacgtcgtatgattgttggtgcgagagctgtactattaaaacgtcgtatacgtacacgtaccaatgcggcatcatcattaagtgttactgataacttaatggaactttctaaaatcaataagattgttcattataatgttgtgagtcgtcttgtagatgaagcgaatgaagataacaaattagaagttggtatgatttgtgacggttatcttatgagaatagataacttatcgccatctaatttctttaatacgcgagccgaagattcaattacgaagataaaattaaatgctttaagagaacaacgccgtgttttatctagtttaactgacgatggtgagattactgaaagtacggcattgaaattaagagaagcgataaactatgatgaaatggttatcgttgatagcttaactgat

SEQ ID NO: 35694 - DNA, 1272 bp, Staphylococcus haemolyticus
ttgaaattaattaaaaatgctcaaattttagataacggtgaacttaaacaagcatccattttaatagatggtcagcacatcaaagaaattaacaataacattgaagtagatgaaaatgttgaagtaattgatgcacaaggtcattttgtagcaccaggtttaatcgatgttcatgttcatttacgtgagcctggtggggaacataaggagacaattaaaacaggtacaaaagctgcagcacgtggaggattcacaaccgtatgtccaatgcctaatacacgtccagtaccagactcagttgaacatatggatcgattacaacaattaattcaagataatgcgcaagtccgtgtattaccatatgcttcaataactgtgcgtcaagctggtaaagaacatgttgactttgatgcattagcaaagcaaggtgcgtttgctttcactgacgacggcgttggtgtgcaggaatcagcaatgatgtatgaagcaatgcaacaagctgcaaaggtcaacaaagcagttgtagcacattgtgaagataatagtttaatttatggcggtgctatgcaccaaggtaaacgcagtgaagaacttggtatacctggtattccaaatatttgtgaagcggtacaaatagcgagagatgtattattagctgaagcagctaactgtcattatcatgtatgtcacgtatcgacaaaagagagtgtcagagctattcgtgatgctaaagcagcaggtattcatgtgacggctgaagttacaccacatcatttactgttaactgaagatgatgttccaggggataacgcaatctttaaaatgaatcctcctttaagaagtaaagaagatagagacgcattattagaaggattattagatggcacaattgattgtatcgcaacagaccatgcaccacatgctaaagaagagaaagcacagccaatgactaaagcgccatttggcatagtaggaagtgaaacagctttcccattactttacacgcattttgtaaaaaatggtgactggtcattacaacaattagttgactacctaacaattaaaccagcacaaacatttgatttaccttatggcaaattggaagaaggttgctttgctgacttaacgattatcaatttagatgaagaacgtgaaatcaaaggtgaagatttcttatctaaagcagacaacacaccattcattggttacaaagtttatggtaatccaattttaacaatggtagaaggcgaagttaaatttaaggaggataaa

SEQ ID NO: 35695 - DNA, 1098 bp, Staphylococcus haemolyticus
atgcttgagcgacgttatcttgtattagaggatgggacttattatgaagggtataaattaggatctaatgatttatctgtgggagaaatcgtatttaacacagcgatgactggataccaagagacgatatcagacccttcatatactggtcaaatcattacattcacatacccattaatcggtaattacggtatcaatagagatgacttcgaagcacttacaccaactttgaatggtgtagtagtgaaagaagcaagcacacatcctagtaactttagaaaccaaaagacgttacatgatgtgcttgttcaatacaagatacctggcatttcaggtgtggatacacgtagcatcacacgtaaaattagacaacacggtgttttaaaagctgggtttactgataaccgagatgacattgattcattaattaacacattaaaaagtactgaattacctcgtgatgaagtggaaacagtatctactaaaacaccttatgtttcaacaggttcagacttgagtgtggtcttattagactttggtaaaaaacaaaatattgttagagaattaaatatgcgtggctgtaacgtaactgtagtaccatataacaccactgctgaagaaatattagccatgtcaccagatggtgtcatgttatcaaatggtcctggtgatccagatgttgtagaggttgcaatagaaatgattaaaggtattttaggtaaaattccattctttggaatttgcttaggacaccaattatttgcattatctcaaggtggaacatcatttaaaatgaaattcggtcatcgtggcgctaatcaccccgtaaaagacttacgtagtgggaaagtagatattacaagtcaaaaccatggttatgctatcgataaaaattcattggtaaatactgacttagaagtaactcatattgcacttaatgatggtactgttgaaggattaagacataaaaccttaccagcattctctgtacaatatcatcctgaagcaagaccaggtccaagtgactcaaattatttattcgatgaatttatgactatgatgaaagaatttaaagaaaaggagcaaacagcaaatgcc

SEQ ID NO: 35696 - DNA, 3171 bp, Staphylococcus haemolyticus
atgcctaaacgtgacgatatacaaacgattctagtgattggatcaggtccaattatcatcggacaagctgcagaatttgattacgcaggtacacaagcgtgtctagccttaaaagaagaaggctaccgtgtcatattagtaaattctaatccagcaacaattatgacggataaagaaattgcagataaagtttatatcgaaccgttaacacacgactttattgcacgtatcatacgtaaagaacaacctgatgcattgctaccaactttaggtggtcaaacaggattaaatatggctattcaattacatgatagtggtgtattagaggctaataatgtgaaattacttggtacagaattaaaatcaattcaacaagcagaagatagagagctatttagatcattaatgaatgatttgaatgtacctgttcctgaaagtgatattgtgaatactgttgaacaagcatttgcattcaaagatgaagtaggttatccactcatcgttcgtccagcatttactatgggcggtacaggtggtggcatatgctacaatgatgaagaattaaaagaagtagtgagtaatggattgcattacagcccagctacacaatgcttaattgaaaagtcaattgctggttacaaagaaattgagtatgaagtaatgcgcgataaaaatgacaatgctattgtggtttgtaatatggagaatatagatcctgtaggtattcatacaggggactctatcgtcgttgcgccaagtcaaactttatcagatgttgaatatcaaatgttacgtgatgtatctttaaaagttattagagcattgggtattgaaggaggatgtaatgttcaacttgcattagatccacattcatttaattactatattattgaagtgaatccacgtgtatctcgttcatcagcgcttgcatctaaagcaactggatatccaatagcgaaattagcagcgaagattgcagtgggcttaacgttggatgaaatgctaaacccagttacaggcacatcatatgcagcctttgaaccaacactagattatgttatttccaaaattccaaggttcccatttgataaatttgaaaaaggtgaacgtgaattaggtactcaaatgaaagccactggtgaagtaatggctataggacgtacatatgaagaatctttattaaaagcgatacgttcacttgaatacggtgtacatcatttaggtttaccaaatggagagagttttgacttagactatattaaagaacgcatcagtcatcaagatgatgaaagactcttctttataggtgaagcaattagacgtggtacaacacttgaagagatacacaatatgacgcaaatcgattatttcttcttaaataaattccaaaatatcattaatattgaacatgaattaaaaaatcacccaggagatttggattatcttaaatatgctaaagattatggatttagtgatagagtaattgcacatcgattcggcatgacagaatcagaagtatatcaattacgccaagataataatattaaaccagtatacaaaatggttgatacttgtgctgcagagtttgaatcaacaacgccatactactatggaacatatgaaactgaaaatgagtcaattgtaactgataaagaaaaaatcttagtgcttggttcaggtcctattcgtattggacaaggggtagaatttgactatgctactgtacacgctgtatgggcaattcaaaatgctggatatgaggcaattatcgtgaataataaccctgaaacagtatctactgacttttcaatttcagataagttatactttgaaccgctaactgaagaagatgtaatgaacattattaatttagaacaacctaaaggtgttgtagtgcaatttggtggtcaaacagcaattaacttagcagataaactagctaaacatggtgtcaaaatattaggtactacattagaaaatttaaatcgtgctgaggatagaaaagagttcgaagcattattgcatacaattgatgtgccacaacctaaaggtaagacagccacttctccaaaagaagcactagaaaatgctcgtgaaattggctatccagtagtagttcgtccatcatatgttttaggtggacgtgcaatggaaatcgtgaatagcgatgcagaattagaaaattatatggagcaagctgttaaagctagccctgagcacccagtgttagttgatagatacttaacaggtaaagagatagaagtcgatgcaatttcagatggagaaacagttatcattccaggtattatggaacatatagaacgtgctggtgtgcatagtggtgactcaatagctgtatatccgcctcaaacgttaagtcaagaagatatcgatacgctagaggattatactatcaaattagcaaaagggttgaacatcgttggtctaattaatattcagtttgttattgcacatgacggtgtttacgtattagaagtaaaccctcgtgcaagtcgtaccgtacctttcttaagtaaaattaccgatattcaaatggcacaactagctatgcaagccattatgggtactcgtcttaaagacttaggctataaacaaggtgtacaaccttattcagaaggtgtgtttgttaaagcaccagtatttagttttaataaactaaaaaatgttgatgtgacattggggccagaaatgaaatctaccggtgaagttatgggtaaagatttaactttagaaaaagcactttacaaaggtttaacaggtagtggtgtggaagttaaagatcatggtactgttcttatgactgtaagtgataaagataaagatgaaattgttaaaatagcacaccgtttaaatgaagtaggctataaaattttagcaactcaaggtactgcggaaaaattaaaagaagacaacattccagttgaagttgtaggcaaaattggtggcgacgatgatttactaacacgtatacaaaatggcgaagtacaaattgtcattaatacgatgactaagggtaaagaagtagaaagagacgggttccaaattcgtcgtacaacagttgagaatggtgtgccttgtctaacttcattagatacggctaatgctttaacaaatgtaattgaaagtatgacattttcaatgagaactatg

SEQ ID NO: 35697 - DNA, 606 bp, Staphylococcus haemolyticus
atggctaaagaaatagcaaaatctttattagatattgaagcggtaacattatctccgaatgacttatatacgtggagttcaggcatcaaatctcctatctactgtgataaccgcgtaacattaggttatccagaagtacgtcgtgccattcgtgatggattaagtcaaatgattattgagcaatttggtaacgtagatattgtttctggtacagccacagcaggtattcctcatgccgcttacatctctgaaaagttaaatttacctatgaattatgttcgctctaaaagtaaaagtcatggtaaacaaaatcaaattgaaggagcagtaagtaaagggaagaaagtggtagtagtagaagatttaatttctacaggtggatcttcaattacagcagttgaagctttaaaggatgctggtgctgatgttttaggtgtcgttgctatttttacttatggtttaaagaaagcagatgacatgtttaatgaaattgatgttccattttatacactaagtaattataatgagttaattgaagtggctcgtgaagaaggaaaaatttctgagaatgatatacagactttagttgaatggagagataacttg

SEQ ID NO: 35698 - DNA, 402 bp, Staphylococcus haemolyticus
gtggaaataccgaaaataacaacatttctaatgtttaataatcaagcagaagaagcaataaatttatatacgagtctatttgaaaacagtgaaattttaactatggtgaagtatggtgaagagggaccaggcgttcctggaacagtacaacattctatatttacgttgaatggacaagtatttatggcaatagatgctgataatggagaagatttacctatgaatccatccatttctttatatataactgtagataatgccatggaaatggaacgactatttaatggtttgaagaaagaaggcgctatattgatgcctaaaactgcaatgccaccattccgcgaattcgcatgggtgcaagataaatttggcgttagttttcaacttgcgttacctgaaaaa

SEQ ID NO: 35699 - DNA, 1695 bp, Staphylococcus haemolyticus
atggcatatgatggcttattcactaaaaaaatggttgaatcaatacagtttttagtttcaggacgaattcataaaatcaaccaacctgaaaatgacactatccttatggttatacgtcaaaatcgcaaaaatcatcaactattactatctatacaccctagtttttcaagaatgcatattacgactaaaaaatatgataatccatttgaaccaccaatgtttgctcgtgtttttagaaagcatctagaaggtggcattattaaagctatacgtcagattggcaatgatcgtcgtattgaaatcgatattgaaagtaaagatgaaattggtgataccatttaccgcacggttatcttagaaatcatgggtaaacatagtaacttgttacttgttgatgacaattacaaaataattgaagggtttaaacatttaacccctaataccaatcaatatcgtactgttatgccaggattcaaatatgaagcgccacctactcaaaacaaattgaacccttttaatataacaggcgaagaagctttaaaatatgtagatttcaatagtggtaaaattgcgaaacaattattaaacactttcgaaggctttagtccactcattactaatgaaatcgttaatcgctatcaatttatgacaacggaaacgctacctaaagcatatgacgaagttatcaaccagacattgaaaacacccgtccctattttccataaaaatcatgaaactggaaaagaagatttttattttatgaaattaaagcaatttcatgatgacatggttgaatatgcgtccttacatgaattattagatcgctactacgatgcacgtggtgaaagagaacgcgttaaacaacgcgcaaatgatttagttcgatttgtgcaacaacaatctcaaaaatatcaacataaattaagtaaacttatagatgaatatgaaagtgctaaagataaagataagcaacaactttacggtgaattaattactgctaatatttatcgtattaatcaaggtgatgacgctgtaactgtattaaattactacaccaatgaggaaataacgatacctttaaatcctactaaatcaccatcagttaatgcgcaatattactacaagcaatataatcgtatgaaaacacgtgaacgtgaattagaccatcaaattcatttaacacgtgaaaacatagactattttgcaaatattgaacaacaattagagcatattacagttgatgaaattgatgatattcgtgatgaattagcagaacaaggatttatgaagcaacgtaaaaacatcaaaaagaaaaagaatgataaaattcaacttcaaacatatatctctacggatggcgatactatattagtaggtaaaaataataagcaaaatgattatttaactaatcgtaaagctcaaaagtcccatatatggttccatacaaaagatattccaggttcacacgttgtcattttgaatgatgcaccaagtgaagaaacgattaaagaggcagctatgttagctggttatttctcaaaagcgggtaattctggtcaaattcccgtagactatacggaaataagaaatgttcataaaccttcaggcgctaaaccaggatttgtaacttatgacaatcaaaaaacattatttgcaactccagattatgacaaaatacaaagtatgaaagtcaaa

SEQ ID NO: 35700 - DNA, 2027 bp, Staphylococcus haemolyticus
atgattggaaagatagttagtgaacgttacaaaatagtagataagcttggtggcgggggtatgagtaccgtttacttagcagaagataccattttaaatcgtgaagtagcgattaaagcaatctctattcctcagaatgaaaaagaagaaacgatgaagcgtttcgaacgagaagttaacaatgcgacacaactttcacatgaaaacattgttgaagtatatgatgttcaagaagatgaagagtgcttctttctaattatggaatatatagatggacctactttatcagaatatatacatagccatggacctttaagtgtagatacagccattgatttcacgaatcagattttaaaaggtgtggcacaagcgcatgaaaaacttatcatacatagagatataaaacctcagaacattttaattgataagaacaaaacactaaaaatctttgactttggaattgcaaaggcgttaagtgaaacatctatgacacagacgaatcatgtattaggaacagttcagtatctttcaccagaacaagctaaaggtgaaactacgaatgaagcaactgatatctattccatcggtatcgttctttacgaaatgttagttggtgaaccgccttttaatggtgagacagccgttagtatcgcaataaaacatattcaagattcaattccaaacgtaacggagttaagatctgaaatacctcaatcactaagtaatgtcgtacttagagcaacggagaagaaagcctctgatcgctatcaaagtgttaaagatatgaaagaagatttaagtagtgtgcttgtgtctagtcgtgctaatgaaaagaagcattctattgaagaagatgagactaatacggtatcgattgatagacaagatattaaaagtaaaataaaagaagaaaatgaacaaaaacaaattgcacaaacgatgcaaataccgattgttaatgagcatcattttcaaacgagcgaagacaaatctatgaaccacctaagaaaaaacgttcaaaaaagaagaaattcgctattgcgcttattttacttttattagtcgcaagtttatttggttttatagcgatgggcatgtttggtagtaaatatgcggaagtgcctgatcttaaaggtaaaactgaaaaagaagcggaaaaaatactgcgacaatctcatttagaaattggtaatatctctagagattacagtgatgattatccggaaaataaaataataaagactaaaccaaaacaaggtgaaagagttaatcagcatgaaaaagtagatattgtgctttcaaaagggcctgaacgtgctaaaatgcctaatgttataggcatgaaaaaagtagatgcattagataaattgaaacaatctaaacttgatcatgtgacagtcaatcaagaatataataatcaagtacctaaaggtgctatagctaagcaaagtgttaatcctgatagttatgttcgcataaacgatcatcaaattactttaaccgaatcattaggtgttaaaaaggtatatgttaaaaattatgaaaataaaaattatcaaactgcaaagaaagaacttgaaaaaaatggtctgaaagtacaaatgacgacagaatcaagtaataatgttaaaaaagataatattatttcacaaagccctaaaaatacagaggttgaagagggaagtacagttcaattcattgtttcaaaaggaaaaacatcttcaaaagatgaagacaaagattcagagaaatctaaatcttctagtgaagacaagtctgatgatacacaaaaagttaagaattatacagaaacatatcacatcccatatacgggagatgacgaaagtcaaaaagttcaagtttacattagagataaggacaatagtggcacatctgctagccaaacgtttagtataaaagatgacaaaacgataacgattccgcttaaaattgagcaaggctcagacgcgggctatacgatcagagttgatggcgatgtaattgcagataaagatatagaatattaa

SEQ ID NO: 35701 - DNA, 1155 bp, Staphylococcus haemolyticus
gtgactcaacaagtgcaagatacatcattaagtgcatctacatcaacaagcgtgagtgattcaacaagtacaagcacatcattgagtgcgtcaacatcaacaagtgtgagtgactcaacaagtgcaagcacatcattaagtgcatctacatcaacaagcgtgagtgattcaacaagtacaagcacatcattgagtgcatcaacatcaacaagtgtgagtgactcaacaagtatgagcacatcattaagtggatcaacatcaacaagtgtgagtgactcaacaagtgcaagcacgtcattaagtggatcaacatcaacaagcgtgagtgattcaacaagtacaagcacatcattgagtgcgtcaacgtcaacaagtgtgagtgactcaacaagcacaagcacatcattaagtggatcaacgtcaacaagtgtgagtgattcaacaagtgcaagcacatcatcaagtgaatcaacgtcaacaagtgtgagtgattcaacaagtgcaagcgtatcgacatcaatcagtacatcaatatcaatgagcgaatcaagttcaacaagcgcaagcacatcagatagtacatctacgtcagcaagtacgtcagaaagtagaagtgcttcacattcaatgagtggaacagattcaaataatacttcaagctcagacagcaaatcacattcaatcagtaattctgattctaatacgacgtcagatagtgcatcagcatcaacaagtattagtgattcaagtagcacaagcacatcagatagtaatgcttcacattcattcagcacatcacattctgtaagtgaatcaaattctatgagtacttctcactcacaatttgattcaatatcaacttcagaaagtatgagtggaacagattcaacaagcttgagcacgtcactaagtcactcagcatcaacttcaaacagtacgtcaatgactacttctgaatctcaaagtaataatgattcacaaatgcatagcaattcacttcatcatgatgctaaagatgaattgcctgatactggagatagtgactctaattcaacaggacttgtatcagctgttgcagcaatgttagcgggattaggattatttggtaaatctcgtaaaaataaaaaagataaaaagaataaaggatcagaacaa

SEQ ID NO: 35702 - DNA, 1572 bp, Staphylococcus haemolyticus
atgaaacagtttatacctgcatggtacgattcgaacaattggtgggatagcgctgttgtgcccttttatataaaaagaaaaacgacagaatttgatgacatggtaagtttaatgttgatgcatcataaaaacaatgaaccattcaatacaatcatcttgaattataatcccctgttgcgattatttttacatcgtcatgagctttatgaaatgaattattggtctctttttgatgagatacaaggtgcaacgcatggcacacctgtagcaattgattatagagaattatcttggccagaagacactgaatttatttatacgccatttcaagtcttggccattaaaagtgataatcaattttctaagatgatttttagtcaagaaggctatttaatttgcattgaggattatgaacacaaaacactaagccgtaaattgatatttgatgatagagggtttgtgtcatcgattgaaatttatcatgatggacaatcaccaatgaaacgatattacttagcggttaaaggtcagatcattatgactcaagattttatgactgaaaaaattactatccaaccagaattctatgacctttttcagaagaagtcatatggcaatatggatgaacttatttttgaaaaaattcaacaatacaatacttcaacattagcggatgacgataaagtgattatagctgcagataaaagacacaattatgtattaacagatacattcaaacctgagaatatgtgtttctcattattcagccagagaaatgcatacatcgatgcgacgttattagaaactattggaaaagcgaatcaatgtatagttgatacacaagcaaatgcgactaaattaaatcaattcataactcagaatcctgagtaccagccattcaaaattatgcgcgtaacgccgtttgatgcacaaatgttacctaatataagtagtcaattgtatgaaacgaatattggcgtttggatagattcacttagtgaagaagacttaaaaacggttatcgatcaattgagtcaatacgtctctcaacatgaacaaaccataatccatctgttaacgcgattaaatgagaacgatatacagcaatggttaagagatgaaatagatcaattaaatgcattgttaaatgttgaggaagaagaattctctccagaagttcaagatattttacaaacggaacttgaagaagatgaaatagaaaaggttaagttaatttatgtgcctttcgaagaagatttaatgaaggaattgtcgcaattaagagtgattgtagatttaaaccaagagcctgatttatatttacaaatttcaagtattagtgcaggcgttccacaaatcaataggcgagagacagattatgtagatgataagttaaatggtttaattatcgataatatccaacaattaagggtagcgctaaattattttataaacaatctgaagaattggaattattcgtttgcgcattctattaaattaagtgatgaattcagttcagaaaagataatccaaagattaaatagtgtgattgaaggtgaaattcatggcacg

SEQ ID NO: 35703 - DNA, 1560 bp, Staphylococcus haemolyticus
atggcacgtaaattcagaatcttacaagtaggtgggaaagatttagaaccattatttgatagtaaaaaaggtgttgaatgggattatttagatgatgcattatttacgtttgatagtggttatattgaagcggtaaaaagcattataaaagcatttggtaactttgatttagtatttgtacaaagtgcttactcacctgaattaatggatttattacgagtcgtcgctacacctcacaatacggtcatcgatgcacaaatgtggtctccgaattatgatgctgaaccattaatccaacacaaatttgtaaagaaacttaattatcaaactgaggaagatctacaccatcaattgttagctgtgacatttcctgggcaatatggcgatagagtatcaccaattaagacaactgttaacccacattttcaaggaacgtataaatatgaggggaacaagtcactcgtgttagaaggtgatttcggtacatcattcaaacctattgttacgtggacacaaagtttagtaagtgatgaagataaggttaacgagctttggccggagtattcacttgaaggagatgtcgaaatcgagtacacatttagattatctccgtttggatcaacggaatatccagatacaacattacgttttgagcataaagatttaaatcaacctattcaattaccattaaggacgactcaaatgaatgtcagcgtatctcttaaagcaaaaggaaagggtaaattacgtattggtgccattcataaacgttggtcacgactagaaatgggacaatttattatgggtggacagcgttttactgatgagaaacgagatgagtttatacattatttcaatccaggtgatatgaagcctccgctcaatgtgtattttagtggttatcgtcctgctgaaggatttgaaggctatttcatgatgaataagatgaatgcgccgtttatcttaattggtgaccctcgtcttgaaggtggttcattttatcttggatccgaaacttttgaacaagggattatcaatgtgattcaaaatgccttagactttttaggtttcaagcatgatgaacttatactatcagggttatctatgggatcatttggtgccttgtactatgcagctcaattagaaccagctgcggttgtagtagggaaaccgttattaaatattgggactatagcagataatatgaaattgttacgtccaaatgaatttggcactgcaaatgatgtgttgttggcgaatacaggtggtatttccacttcagatgttcaacatttagattcacgtttttgggaaaaattaaaaaacagtaatctaacaaatacaatatttgcaattgcatatatgtacaatgatgattatgatgctacggcatttcaaaatttatcaccagtattgagtcaacaaggttcacatgttatgagtcgtggtgtaccgggtcgacacaatgatgattcacctacaataacaagttggttcgttaacttttataacattatattaaaagatcaattcgggagagatagcgatgtcagcattaaa

SEQ ID NO: 35704 - DNA, 2388 bp, Staphylococcus haemolyticus
atggctaatcaagttagtaatgtgattaattcgatgcgtttgaaaagattacagaagcagttaacggcagtaaaccgattaagtgatcaaatgcgagactattcagatgaagcattacaagcaaaaacagctgagtttaaacaacgtttagagaaacgtgaaacgacgttggataaactgttgccggaagcttatgcaacgattcgtgaagcatcgaaacgtgtactaggtatgtatccgaaagatgttcaagtgatgggcgccatcgtgatgcatcaaggtaatatagcagaaatgcaaaccggggaaggtaagacgttaacagcgacaatgcccctttatttaaacgcacttacaggaaaaagcgcatttctaattactacgaatgattatctggcaaatcgtgattttcaagaaatgcgacctttatatgaatggctaggattaacagcgtcacttggctttgtggatattccagattatgaatacgccgataatgagaaacaaatgctatataaccatgacatcatttatacaacaaatggtcgcttaggatttgattatttatttgataatttagcagaccatattaatgctaaatatttacctgaattgaactttgcgattattgatgaagttgattcaattatattggatgctgcgcaaacaccactggttatttctggtgctccacgtgtgcaatccaatttattccatattattaagatgtttgttgaaacgttagttgaagatgaacactttaaattaaatgtgaataaaaaagaagtatggcttacggataaaggtattgatgtagccaatcattattttaaagtgaataatatctacctaccacaatattttgatttggtacgtgtcattaacttatcattacgcgcgaagtatctgttcaaagacaatttagattattttatttataatggcgaagttgtacttatagaccgaattacagggcgaatgttgccgggtaccaaactacaatctggtttgcatcaagcgattgaagctaaagaaggtgttgaactatcacaagatttaagtgtaatggcgacaattaccttccaaaatttgttcgaattatttaatggtttttcagggatgaccggaaccggtaagttgggagaaaaggaattctttgatttgtattctaagttagtagttgaaattccaaccaatcatccgattattcgtaatgataaagaagatcgagtatatgcgaaatcagatgaaaagaataaagcgatacttgagaaagtaaaagaaattcatgccactaaacaaccagtactcttaataacaagaactgcagaagcggctgaatatttttcaacccaattatttaaagacaatatccctaataacttattaattgcacagaatgttgctaaagaagcacaaatgattgctgaggcaggacaactgggtgctgttacagtttcaactagtatggctggtcgtggtacagacattaagcttggctctggagtctatgagctcggaggacttgcagtcataatcaatgaacatatggagaatagcagggttgaccgacaattgcgtggacgttcaggtcgtcaaggtgacccaggtgtttcacaaatttatgtatcattagatgattatattgttaaacgttggagtaactctaaactagctgaaaatgaaaaaataaaagacgttgatccagacaaactacaagatagtccttttttcagaagaagagtaagagggattgtctctaaagcacagcgtgtatctgaagaaacctcaatgatggcgcgtgaaatggctaatgaattcgaaaaaagtatcggcattcaacgtgatcgtgtgtatgaagaacgtaatcgtattcttgaaacgtcagacttcagtgcatttgactttgattcactagcgcgtgatgtctttgactatgatttgagaacaaagcatattcataataaagatgacatcatcaattatatttatgagcagttgagctttagtttcaaagatgacactattagccaacagattcaaacacgtgaacaaaccattgattatctagtgcaacaatttaacaaacaattaaaagagaatatgaaaattgcaaataacgattattttaaattacgatttcttcaaaaagcaatattgaaagctatagatgtagaatggataaatcaagttgatcaacttcaacaacttaaagcgagtgttaataatcgacaaaatggtcaacgtaatgcaatattcgaatatcataaagtggctttagaaacatatgaaatgatgctgataaatattaaacgggcaacgattcgtaatttatgtttaagtattctaacgtttgataaagatcaagatttagtagtacattttcct

SEQ ID NO: 35705 - DNA, 1323 bp, Staphylococcus haemolyticus
atgtttaaaaagaaaaatcaaattatactcttcatcattttatttagttattttttaatattaatggataactcaatcatatttacaagtactgtcaagatcgctcaaagcctacacatggataaagcgtccttatcttgggtatcaaatgcttatacaattacattcggtggtttcttattgttagcgggtagactaggtgatttattagggcgcaaacgtatatttttaagtggtttagtgttatttgggatatcaagtttatgtatcgggcttgcacaaaatagtatacaaattattacttttagagcaatacaaggtattggttcggcgattattgcacctacaacactcgctttacttatggaccatttcgaaggtaaggaaagaagtaaagccattagttactacggcgccactgctggtattggttcaagcattggtttactcctcggtggttggttaacaagtacaatcagttggcgttctggcttcctgattaatgtccctttcactattattttaattatcttgacgttgctttttgtaaaatctacaacggttcatcgtgtacgaattgactttattggtgcaatactttcagttattgcgataatgacactcgtatatggcatgacaaatgaatctatcattgcagtcattattgggttcattttattaattatattcgtaatatttgaacgcaaattaccatttgcattaatgccaatgtcattatttaagaataaggtgcgcacaggcgcttatgtcggtcgttttatatttatgatggcaatgttatcttattggtttatcttgccacaaatgatgcaacatttatatcattacacaccgttacaagctggtatagctttcttacctttaaccattattaattttattgcggcattgtatcttccttactttactgaaaaattaggcaatacgaacgtgttattactcggccaaattatactgactttaggactaattgttacaactagtttgaatccgttacatggatattggctagcgataggtatccccatgttactcgtaggtctaggtcaaggttggctactggctcctattacaagtgccggcattcacgaagtagatgctagtttatcaggtgccgcaagcggaatgactaataccatgcaccaattaggtggtccaatcggcttatcaattatcgtctttttcacatcaaatataacgcatattattcattattatcacgttgtgatgtggttaattgttatttatatgattatcggcttcattgtgttatggatgactcaacgccaaactaaatcaatt

SEQ ID NO: 35706 - DNA, 759 bp, Staphylococcus haemolyticus
atgtcatcaacattagaaattaaagacctacatgtgtctattgaagataaagaaattttaaaaggtgttaatttaactattaatacaggtgaaatacatgcaattatgggaccaaatggtactggtaaatcaacattatcatcagcgattatgggacatccatcatacgaagtaactcaaggtgaagtgttactagatggcgttaatattttagaattagaagttgatgaaagagcaaaagctggtctgttcttagcaatgcaatatccatcagaaattactggtgtgacaaatgctgacttcatgcgttcagctattaacgcgaaacgtgaagaaggacaagaaatcaacttaatgcaatttatcaaaaaattagataaagaaatggatttcttagatatcgataaagatatggcacaacgttacttaaatgaaggtttctctggcggtgagaaaaaacgtaacgaaatcttacaattaatgatgttagaaccaaaatttgccatcctagatgaaatcgactcaggtttagacattgacgcattaaaagttgtatctaaaggtatcaacgaaatgcgtggcgaagaatttggtgctttaatgattacacactatcaacgtttattaaactacatcacaccagacaaagtacatgttatgtacggtggtaaagtagttaaatcaggaggtcctgaactagctaaacgtcttgaagaagaaggttatgaatgggttaaagaagaattcggtgctaaagaa

SEQ ID NO: 35707 - DNA, 459 bp, Staphylococcus haemolyticus
atgaattttaataatttagatcaactttatcgatctgtaattatggatcattataagaatcctagaaataaaggcgttttggacaatggctcaatgactgtagacatgaacaatcctacttgcggtgaccgcattagattaacgtttgatattgaaaacggcattattaatgatgctaaattcgaaggagaaggttgttctatttcgatgtctagtgcatctatgatgactgaagcggtaaaaggtcattctctaggtgaagcaatgcaaatgagtcaagaatttactaagatgatgcttggtgaagactatgaaatcactgaagaaatgggagatattgaagcactacaaggtgtatctcaattcccagcacgcatcaagtgtgcaacattagcctggaaagcacttgaaaaaggaacagttgaaaaggaaggtaaagcagaaggtacgacagaagag

SEQ ID NO: 35708 - DNA, 819 bp, Staphylococcus haemolyticus
ttgtatcttattagtcaatatggtgttgattttggtactggttacgctattgaatttacaggtgaaacgattagatctctgtctatggaagctagaatgactatctgcaacatggccattgaagctggtgctaaatatggattgatgcaaccagatgaaatgacatttgcttatgtcaaagacagaaaatatgctcgaaattttgaccgttctatcaatgattggcgtcaattatatactgatgccgatgctaaatttgataaagttatcaaacttgatgttacaaatttagaacctcaagttacatggggaacaaatcctgaaatgggtgttagttttaatacaccttttccaaaaattaaaaatattaatgatgaacgcgcttatcaatatatgggcttaaaaccaggccaaaaagctgaagatatcgatttaggttatgtgttcttaggttcttgtaccaatgcaagattatcagacttagtagaagctagtcgaatcgttaagggtaaacaagtccatccaaaaatcactgcaatcgttgtacctggctctcgctcagttaaaaaagaagctgaagcattgggtttggacaaaatatttaaagatgcaggatttcaatggagagaaccaggttgttcaatgtgtttaggtatgaatcctgatcaagtacccgaaggcatacactgtgcctctacgagcaatcgtaactttgaaggaagacaaggtaaaggcgctagaacgcatctagtgtcccctgctatggctgctgcagcggctattgaaggaagattcgtagatgttagaaaggtggttgtt

SEQ ID NO: 35709 - DNA, 1743 bp, Staphylococcus haemolyticus
atggcgaagataaaagcaaacgaagcattagttaaagcgttagaagcatgggatattgatcacttatatggtattccgggggattcaattgacgcagtagtagatagtttacgtactgttagagactcatttaaattctatcatgtacgtcatgaagaagtagcaagtttagctgcagcttcatacactaagatgacaggtaaaattggggtgcattaagtatcggtggtcctggtatcgttcacttattaaatggtatgtatgatgcaaaaatggatcgcgtacctcaattaattttagctggtcaaacaaatagtactttattaggtacaaaagctttccaagaaacaaacattactgatatggtgtcagatgttttgtatataatcaccaaattcaaaaaggtgataacgtatttgaaattgttaacgaagctattcgtacagcatacgaaaaacgcggtgtagcagtagttgtatgtcctaatgacttattaactcaaaaaattaaagatacaactcatcgtgctatagacactctaaaccaaaagcaccaactccaacattacgtagcattaaaaaagcagcaaaattaatcgataaaagtaaaaaaccagtaatgattattggtgtaggtgcacaaaatgctaaagatgaattacgtgaatttgtagaagcggctaaaattccagtaattcatacgttaccagctaaaacaatcattcctgatgatcacccatatagcatcggtaacttaggtaaaatcggaacaaaaacatcttaccaaacaattcaagatgccgatttattaatcatggcaggtactaactatccttacgttgactacctacctaagaaaaatattaaagcaattcaaattgatacaaacccagatgtaattggacatcgtttcagtgtcaatgttggtatcgttggtgacgcgaaacttgctttccatcaattaactgatgctatcaaacacgtaccacaacgcccattcttagaaaaaacattagaacgtaaagcagtttgggataaatggatggaacaagatatgaatcaagaaagcacaccaatccgcccagaacgtttaatgaaatcaattagtaaatatagtgacgatgatgctgtattctcaatcgatgtaggtacatctacagtttggtcaacacgttacctaaacttatcggtaaataataaatttattatttcttcttggttaggtacaatgggttgcggacttccaggagcaattgcttctaaaatcgctttccctaaacgtcaagctatctcaattagcggtgacggtgcattccaaatggtaatgcaagactttgcaactgctgttcaatatgatttaccaatgacaatttttgttatgaataacaaacaattatcatttattaaatatgaacaacaagctgcaggtgaattagaatatgccattgatttttctgatatggaccatgctaaattcgctgaagctgcaggcggtaaaggttatgtattaaaagatcctagccgtatcgatgaagtagtagaagcagcgttaaatgaaaatgtaccaacaatcgttgatgtacatgttgatccaaatgctgcaccattaccaggtaaaattgttaatgaagaagcaatcaactatggtaaatgggcttacagatcaatcactgaagataaaaaattagacttcgacgaaattccaccaatttctgtcgctgctaaacgtttcttataagaaata

SEQ ID NO: 35710 - DNA, 1973 bp, Staphylococcus haemolyticus
atgtttaaaaagctatttggacaattgcaacgaattggtaaagcattaatgttacctgtggcaatcttgcctgcagctggattattactagcaattggaacagcttttcaaggtgaagcattacagcaatatcttccatttattaaaaatggagtaattcaaaatattgctaacatgatgacaggtgctggtggtattatttttgataacttacctatcatttttgcactcggtgtagcaataggactagcaggtggagatggtgtagcagccattgcagcttttgtcggatttattattatgaataaaacaatgggagcattcttaaatgttacgccagcacaattggaagacccatctaaaggattcgcaaatgttttaggcatacctacacttcaaactggagtgtttggtgggattattataggggctctagcagcttggtgttataacaagttttataatatttccttaccatcgtatttaggattctttgcgggtaaacgttttgtgccgattatgatggcaacgacatcgtttattttagctttcccaatggcttggatttggccattcattcaaaatggattaaatgcatttagtacaggtttattagattctaatactggattggcagtattcttatttggatttattaaacgattacttattccatttggtttacatcatattttccatgcgccattttggtttgaatttggttcttggaaaaatgcagctggagaaattattcgaggagatcaacgtatttttattgagcaaatacgtgaaggtgttcatttaacttcaggtaaattcatgcaaggtgaatttcctgttatgatgtttggattaccagcagcagcattagcaatttatcaaacagctaaacctgagaataaaaaggtagttggaggtttgatgttatcagcagctttaacatcattcttaactggtattactgaaccattagaattttcattcttattcgtagcaccattattattctttattcatgcagtacttgatggattatcatttttaacgctttatctactaaatttacatctaggatatacattctctggaggattcatagattttgttttattaggtattcttccaaataaaacaccatggtggttagtgattccggtaggattagtttacgctgtcatttattatgtagtatttagattcttaattgttaaattcaacttcaaaacgccaggtcgtgaagataaacaagcctctgtagctaatacatctgcaagtaaattaccatttgatgtgttagatgcaatgggcggtaaagaaaatatcaagcatttagatgcttgtattacgcgtttacgtgttgaagtcaatgataaatctaaagtagacgttgaaggactaaaagcgcttggtgcttcaggggtgcttgaagtaggaaataatatgcaagcgatttttggacctaaatcagatcaaattaaacatgatatggcacgtattatgaatggagacatcacaaaacctagtgaaaccactgtgactgaagatacatcagatgagccagtacagttggaagaggtaaaagaaactgatatctatgcaccaggtacgggtcatattattccattatctgaagtgccagataaagtattctcagaaaaaatgatgggtgacggtattggatttgttcctgaaaaaggcggaattgtagcaccatttgatggtacattaaaacgattttcccaacgaaacatgccatcggtttagaatctgatacaggaattgaagtattaattcatattggtatcgatacagtgaaattgaatggtgaaggcttcgaaagtttagtcgatgtcaatgaacctgtcacacaaggtcaaccattaatgaaaattaatttagcatacttaaaagaacatgcgccaagtgttgtcacaccagtgattattacaaatcaaggtgataaaacattaaca

SEQ ID NO: 35711 - DNA, 1513 bp, Staphylococcus haemolyticus
atgcgacggagcaatatttatctaaaggggccagttagtatgaatatttataataaagtgacattatcagtcattttagttatcaccattttaatatcattcgtcttttactactttaataaagaagacagacctgataaagatacattattcgaaaataaaattgcagatcataaatcatctggcagtaataaaaaatatggcgtagcatctaataatgcgattgcaacgcgtgtcggtaataaaattattgaagatggtggtaatgcagtagacgcagctatgggtgtttcttatgcattagcggtaacagagccacattcttcaggtttaggtggcggtggtgccacgcttacatataatggtaacgaaggcgaagaaccaaaggtgtacgaatataaaacgctatcttcttataattataagaaaggcgatgaaattggtacacctggatttgtgcaaggtatacatgatatgcatcaacgagaaggtaaaatggatgagaagaaaatttttagttacatcgtaccattagccgaagatggcttcgaagttgattcagaattagaacgtagtttgaaaatctacggttctgatatcgatcgaaattcacctttcttcaaaggaaaacgtacagtacgtgaaggcgatgtagttaaacagcccgctttagctaaaacacttaaaggtattagagataaggggcctaaatatttctataaggatattgctaaaagtgtatctaagcaagttgatagtgaattaattgagaaggacttttcaacatttaaaactgaagaaaagaaaccagtatcaactaaatatttaaataatacaatatactctgcatcaaatcctttaggtggggttttaatgttacaaggtttaaaaattgatgaaagtgccaattcaaataatgatagaacagattatatcaatggcattattaaatctcgtgatgtaatgtaccgaaatagagatattgttaatggtcaggaagcgaataacgactctcacttatcggaaaattatttattagacaatttaaataacgtaaatagtggcggaaatgaaatgaatagtgattttgatacgtcattagatacgacgagtacaactcattttgttgtcattgataagaatggtaagcttgctagtactacaaatacactatctagtttctttggttcaggtaaatttgttaaacaaggtttctatatgaacaactctttaacaaacttctcaagtgatcctaatagtccaaactatggtggaaaacataaagcaccacgttcttatacatcaccatccattgttgttggtccggatttctatatgggtattggtacaccaggtggaaacaaaattcctaccatcttaaatgaagtgttgattgactatttaagaggtgacggtactttacaagactctattgataaaccacgtatttataacgatggtggtacagttatgatgagatgcgacagtgatgacgtatcattcattcagagat

SEQ ID NO: 35712 - DNA, 762 bp, Staphylococcus haemolyticus
atggcgacttctataggtgcgttaaatgcaaacgcttctgaacagactgaaggtagccaaaaaggaacgatggggtatggatatcaaaaatatctaaaaaatcatcccaatgaacaaagcaacgctactagtaaccgttcaaccttttcaacaaaatctaaagtaatcacaacacaaaatggcgatcgtgtgttagatatttcagaatggcaaggaaacttaacggattcgcaagttaaacaactaaaaaaagattataatttcatcattatcagaggtcaatatggttctgaatatgttgatcaatgtttggagaataattcagctttattagataaaaataatatgaaattcggcgtctattcatatagcctgtatgaaaatgctgatgatgctcgaaatgaagctcaaacgctttatagtcgtgcacctaaagcttcattctatgtaaatgattttgaacaaaattcaatcacttctggtgatgctgacactgctacaaaagcttgggctgatgaaatgaaacaacttgcagggaataaaaaagtattattttattcttatgagaactttatgaccaacaacgttccgaatgctgtaagtgcctatgatggttattggttagcagcttatcaagagcaagaacctaatagagagaaagttttatggcaatacacagatagttactatgcccctgaactaaaccaaaacgttgatgctaattacatagatgcgaatgttactgctgattggtttactagt

SEQ ID NO: 35713 - DNA, 1095 bp, Staphylococcus haemolyticus
atggctttaacagcaggaatcgtaggattgccgaacgtaggtaaatctacattatttaatgcaataacaaaagcgggagcattagccgctaactatccattcgcaacaattgatccaaacgtaggtatcgtagaggtgccagattcacgtttaaataaattaacagaaatggttaaacctaaaaaaactattcctacaacttttgagtttactgatattgcaggtattgttaaaggtgcttctaaaggtgaaggtttaggaaacaaattcctttcacatattcgtgaagtagatgcaatttgccaagttgtacgtgcatttgatgatgaaaatgtaacgcacgtatcaggacgcgtaaatcctttagacgatattgaagttattaatatggaattagtattagcagacttagaatcagttgaaaaacgtttgcctcgaattgaaaaaatggcgcgtcaaaaagataaaactgctgaaatggaaatgagaattctatctagaatcaaagaagcacttgaaaatggcgatcctgtacgtagcttagacttcaatgaagaagatcaaagatacgttaaccaagcacaattactaacgtctaagaaaatgttatatattgccaatgttggagaagacgagattggtgatgaagataacgataaagtaaaagcaattcgagaatatgcagcaaaagaagattctgaagttatcgttattagtgcaaaaatcgaagaagaaatcgctacattagatgacgaagatagagaaatgttcttagaagatttaggcattgaagaaccaggactagacgtacttatcagaacaacatatgatttattaggtttatcaacatactttactgcaggtgtacaagaagtgcgtgcttggacgttcagacaaggtatgacagcaccacaatgtgcaggtattattcacactgactttgaacgtggatttatccgtgccgaagtgacaagttatgatgactatgttgagcatggcggcgaacaaggtgctaaagaagcgggtaaacaacgtttagaaggtaaagaatatattatgcaagatggcgatatcgttcactttagatttaacgtt

SEQ ID NO: 35714 - DNA, 201 bp, Staphylococcus haemolyticus
atgacgtcaaattatggaataaatgatatagtagaaatgaaaaagcaacatgcatgtggaactaatcgatttaaaattattcgtatgggtgctgatattcgcatcaaatgtgagaattgtcaacgaagtattatgattccacgtcaaacgttcaataaaaaattaaagaaaatattagtatcaaatcaagatactgaaggt

SEQ ID NO: 35715 - DNA, 879 bp, Staphylococcus haemolyticus
atgaatcaggtcaaaaatgtattgtcttcattatttgaacctttaactaaaatagaaacatatgaaaatttatctattaaaatagcactaattatcatatatattattgttgcacttatcgtcatagcaatattaaacaaagtaattgaacaagcatttaaaattcaaaatcgcagtagcaaaggtaataagaaacgttctcgaacgcttatttcgcttgtgcaaaacgtagtgagctacattgtttggttcattgtgattactactatcttaagtaaatttggaattagtgttgaaggtatcatcgccagtgccggtgttgtcggtttagctgttggtttcggtgctcaaacgattgttaaagatatcatcactggtttctttattatatttgaaaatcaatttgacgttggcgattatgttaaaatcaatagcggtggtacaacagtagcagaaggaacagtaaaatctattggcttaagatcaacacgaattaacacaatcactggtgaattaacgattttaccgaatggtagtatgggagaaattactaatttctctattactaatggtttctctatagtagaaattccggtatctgtagaagaaaacttagacaaggtagaaaagcgtctaaataaactatttactgcaatgcgtagcaaatattacttatttatcactgatccagtcgtagaaggtattgattcgttggatgaaactaaagtaacgtttagaatatctgctgaaactattccaggtgaaggggtatccggctcaagaatattacgtaaagaaattcaaagagtatttgttcaagaaggtattaaattaccacaaccaatttatattaaaaataataatcaacaaggcaaatct

SEQ ID NO: 35716 - DNA, 1394 bp, Staphylococcus haemolyticus
aaggacaaggtacatcgatatttattacacttccttgtgaagttatagacgacggtgattgggatgaagagtaaagagcatattaaatccattattcttttcctactagtcatgatgagtgttgtgcttacgtttatggtgtggaatttctcaccagatttaaataatattgatagcacagatagtaaaaagagcaatactaagacgattggtaagcccatgtctgccaatatagagaatgtgatatctccgtatcaaattgtagaagttaaaggcgataaggttaaagggctggcaccatctcgtgctcaattgtctcaagtaacaggtacattgaagaatcatgaagtcagtaaagtggaacatattcatcgagattataatttaaatattcccatgttaaatgaccactttactgtgctagatttcacttatgatatgccgctaacgacatatctaggtcaagtattgaattcatcagcgaaagtacctaaaaatttcaaatttaatcgtattatagtaagtcaaaatcctaaagagaatttagaattgtatgcgataagtgaagatcgtcatgaagtaatgaaagtaacgttgactacgaaagctaatcattttattaaagttatggatcatttgaataaagaaatgcagaaatattcagaggtaatcacaaataaagatacgattgataaagcaacgcatatatttgcgccaaatcgtccgaaagacatgcgttcttaccgtatggtttatgatacgattccagtcgaaacgatgaatgctattctatttgacgactcagtgattattcgaagcggtaagagtggttcaacaacgtacaataataacactggcgtacgaactataatgatgaaagtaagaaatatcattataagaatttatctgaagatgaatctagctcaagtgatatggattcaacgattccaagtacatttgaatatatcaatggacatggtggattctttaatgatgacttccgtcttttcaatacagataattcatcgggtgaattaacgtatcaactcttcctcaatggccacccaacatttaatgatcagcaattaaatgttatagaggtcacttggggagataaaggcatttatgactataaacgtgcgctattgcgttctagtgtacctctagaaggtaaaacgaagtcgctagatagtgttgaaagtgttcgttcttcactcgcaaataatcatacgattgatttcgaaaaggtaacgaatatggtcattggttataaagaagatgatcaacctgataaagatgatatagaagtgcaacgtaatagtgagtttgtgccaacatggtatattcaatacgacggcgattggtacgcttatgaggatgggaggcttgaataa

SEQ ID NO: 35717 - DNA, 1167 bp, Staphylococcus haemolyticus
atgcatatcgggtttaaaggacgggagctttttttattggacaaaaaattgaatggaggatttgacatgaaagatactcaattagcacaaatatcattaactaaagatattactggcgcaatagccaaccctatctatttgtctactgcatatcaacatcctcaccttggtcagtcaacaggctatgattatacaagaacaaagaatccaacacgttctgcatttgaagaatcctttgcgaaattagaaggaggtattgcttcatttgccacttcaagtggcatggctgcagtacaactcatatgtaacttgtttcaaccaggtgatgaaatattagtcgctttcgacttatatggtggtacatttagattatttgacttttatgaaaaacaatatggtatcaaatttaaatatgttgatttcctaaattatgaagaagttgttaacgctattacgcccaatacaaaggcacttttcatagaacctatttcgaatccacaaatgatcgaaattgacgttgacccttattacatcttaagtcaacagcataatctattaacaattatcgacaacacgtttttaacaccttatttatcaacgcctttagaagacggtgcagacattgtactccattcagcaactaaatatattggcggtcacaatgatgtattagctggggttgtaactgttaaagatggatcattagctgagcaacttggacaattgcataacatgattggagcaacattgtctcctatcgatagttatttattacaacgtggtttaaaaacattacatttacgtattgaacggtcagaggcaaacgctaaaaagttagccgagcgatgtaaagtttctagtgctatagacgaagtgctgtacagtggtaaaacgggcatgctgagtttacgtctaaataaagactttagcgttgctaaatttttggaaaatttagaaatctgtatcttcgcagaaagtctaggtggaacagaaacattcattactttcccatacacacaaacgcatgtcgatatgccggatgaagaaaaagataaacgtggcatagatgaacaccttatacgcttatccattggtattgaagattataacgacattgagtcagatattttacgagcattggagaattctaaagtaggagtgatttca

SEQ ID NO: 35718 - DNA, 1836 bp, Staphylococcus haemolyticus
atgagtcgattattgaatcaattacagaacaacgttttagtagctgacggtgcaatgggaacaattctctattcagagggtttagatacatgtccagaagcttataacttaacacatccagaaaaagtagagtctatacatcgttcttatatagaggccggtgccgatattatccagaccaacacgtatggtgctaactttgaaaagctaagacgctttggcttggaacataaagtaaaggacattcataaggcagctgtagccatcgcaaaacgtgccgcacgacctgatactttcatacttggcacagtaggtggtttcagaagtttacagcaagaggaattgcctttgtccaccattcagtatcacgctgaaaatcaaatcgatacactcgttgaagaaggtgtcgatgggttattattcgaaacttactacgacttagaagaactgacaaatattgttacaacaacacgtcgtaaatacgatatacctatcatcgcgcaattgaccgcttcaaatacgaattacttagtcgatggtactgaaatcaataaagctttacagcaattagttgcttgtggcgccaatgttgttggattaaattgccatcacggtccacaccatatgcaacgctcattttcacatattgagttaccagaaacggcttacttatcatgctatccaaacgcaagtttactggatattgagaatagcgaatttaagtatagcgataatgcacaatatttcggagatgtcgcacaagaacttattaatgagggtgtgagattaattggaggatgttgtggcacaacaccacaacacattgcatatatcaaatcatctgtaaaagatttaaagcctgttaaaaataaaaacgtcattccgatcaatcgtcagacaaatcgagcagtcacacatacgtataaacataatttaacaacaaaagttaaaaacggaccaacagttattgtcgaactcgatacacctaaacatttagatacagatctcttctttgagaatattggcaaacttgacgaagcgaacattgatgctgttaccctcgctgacaattcacttgctactgtacgtgttagcaatatcgctgcagcgagcatcatacgccaacgttataacattgaacccctcgtgcatattacatgtcgagatcgtaatttgattggcttgcaatcacacttacttggcttatcgcttattggcgttaatgaaattttagcgattacaggtgacccttcaaaagtaggccacctacccggtgccacgaatgtctacgacgtaaattcaaaaggattaaccgaattagcattaagattcaatcaaggtattaatactgatggtgatgcgctgaagaaacatacaaacttcaacatcgctggtgcatttgaccctaatgtacgcaaacttgacggtgcagtaaaacgccttgagaaaaaagtagctgccggtatgaattacttcattacacaacctgtgtatagcaaagaaaaaattaaagaagtatatgaggcgacgaaacatcttaatgtccctctatttataggtatcatgcctatcgcaagctataacaacgcacttttcctacataacgaagtgcctggtattaaaatgtctgaagacgtattaagccaatttaaagcagtaaaagatgataaagaaaaaacaaaagcattaagtttgagactttctaaagaattgattgatacagtgcatgagtatttcaatggtttatatattatcacaccattccaacgtatcgattattcattagaactcgcagcatattctaaagcaattacccaaaacaaggaggcaatatca

SEQ ID NO: 35719 - DNA, 1065 bp, Staphylococcus haemolyticus
atgggattaaataaagaagctgtaaaaattggtttcgcctatgtcggcattgtagtaggtgccggattctcaactggacaagaagttatgcaattctttacaccatatggtttatggtcttatattggtgtacttatttcaggtttgattcttggttttataggtagacaagttgctaaaataggtacagcatttgaagctacgaatcatgagtctacattaaaatatttattcggagaaaagtttagtaaaatcttcgattatatattagtattcttcttatttggtatagcagtcactatgattgcagggtctggttcaacattccaagagagttttggcatacctacgtggttaggtgccttaattatgactattgtcatttatttaacattattattagactttaacaaaatcgtgagcgcacttggtatcgtcacaccattcttaataattatggtaatacttattgccgtttactacttattcgcaggtagcgttcctttaaatgaagttaacagtactgttgataaaacaagtgtattttggggtatagttagaggattaatgtacggtggtctagcttttgcagtgggctttagtacagtcgttgcaattggaggcgacgcttctaaacgtaaaatttcaggtggaggtgcaacgtttggcggtgtgatttacactatcttactggctttaattaactttgcactacaatctgaatatcctaaaattaaagatgttgaaattccaacattaacattagctaatgctattcatccatggattggtcttgttctaactgtcatcatgttaacagttatgtacaatacaatcttaggactatgctattcattcgcagcacgttttatagaaccatatagtaaaaaatatcacatctttatcattattatgatgattgctgcatttattttaagctttgtaggttttgcagacttaattaatttcttatataacattatgggtgttgttggtctgtttatcgtagttgcagtattaattaaatactatgtacgtaagagtgataacaaagatcatatagca

SEQ ID NO: 35720 - DNA, 1002 bp, Staphylococcus haemolyticus
atggaatatgtattaattatcactatagctatcgttatattttctttaatctttgactttatcaatggattccatgatacagccaacgcgattgctacagcagtatcgacacgtgccttgacgcctagaactgcaatatttttagcggcaattatgaactttatcggtgctttaacatttactggtgttgccggtacaatcacaaaagacattgttgatccatttaagttacataatgggttagtagttgtattagccgctattttagcagcaatcatttggaatttattaacatggttttatggtattccaagttcatcatctcacgcattaataggttcaatcgctggtgcagcgattgcagcacaaggatttggtgtacttcactatcaaggttttactaagattattattgttttaatcatttcaccaattattgcattttgtgtcggattcattatgtacacaattgttaaaattgtctttaaaaatgctaaccttactcgagcgaatcgtaatttccgattcttccaagtatttacagcagcattacaatcattctcacatggtacgaacgatgcacaaaaatcaatgggtatcattacattagctttaatcgttgctaatattcaagatcctacaaacgttgagccggcattatgggtaaaagttgcctgtgcaactgcaatgggtctaggtactgcaattggtggatggaaaattattaaaacagtaggcggaaacattatgaaaattcgcccagcaaatggtgctgctgctgacttatcatcagcattaacaatatttgtagcttcatcattacacttcccattatctacgacacacgttgtatcatcatcaattcttggtgtaggtgcttctaacagagctaaaggtgttaaatggaacactgcacaacgtatgattattacatgggttattacattaccaatttctgcgcttttagcagcattgatattctgggttatgaacattttctta

SEQ ID NO: 35721 - DNA, 165 bp, Staphylococcus haemolyticus
atgagacaaggaatccatcctgattatcacaaagttatctttttagatacaactactaacattaaatttttaagtggttcaactacaacatcttcagaaacaatggaatggaaacatggtaatgaatacccagttattcgtttagatgtatcttctgattcacac

SEQ ID NO: 35722 - DNA, 714 bp, Staphylococcus haemolyticus
atgggacgtaaatggaataatattaaagagaaaaaggcccaaaaagataaaaatacaagtagaatatatgcgaaatttggtaaagaaatatatgtagcagccaaatctggtgaaccagatcctgaatctaaccaagcattaagattagtacttgaaagagcgaagacgtattcagtacctaatcatattattgatagagcaattgacaaagctaaaggtgctggtgatgaaaattatgaccacctacgttacgaaggctttggaccaagtggttcaatgcttatcgtagatgcattaactaataatgtaaaccgtacggcttcagatgtgagagctgctttcggtaaaaatggcggaaatatgggtgtatcaggttctgtagcttacatgtttgatcacacggctactttcggcattgaaggtaaatcagctgatgacattttagaggcattaatggaacaagatgttgatgttagagatgtaattgaagatggagatcttacaatcgtttatgccgaaccagaccaatttgctcatgtacaagatgcattacgtcaaacaggtgtagaagaatttaaagttactgagtttgaaatgttacctcaaactgatattgaattatcagaggatgaccaagcaacatttgagaaattaattgatgcactcgaagaccttgaagatgttcaaaatgttttccataatgtggatttaaaa

SEQ ID NO: 35723 - DNA, 1353 bp, Staphylococcus haemolyticus
atgtcagaacaagaaatttggaaaaaagtattagaagttgctgaatcagaaatatctaaatcgacatttaatacttttttgaaagatacagaactcaaagaaattcgtgataatgttgcaatcatctttgtaattcatgaattttacgcagaatggttaaattcaaactacaaagaagtaatccaaacaattatgaaagatgttattggttatgaagttgaacccaaatttttcactgctgaacaattagctgaacttgatgagacaagtcgtaaatctaacacgccaagcgaacctcaacgtcaaatcattgaagatggtcatgaaggcacagatcaattcaatactcacaatacatttgatactttcgtcattggacctggcaatagatttccacacgcagcaagtcttgcagttgctgaagcaccagcacaagcatacaaccctctatttatatatggtggcgttggtcttggtaagacacatcttatgcatgcgatcggtcatcatgttcttagcaatcaaccaaatgctaaagtactatatacttcaagtgaaaaattcacaaatgacttcatcaaatcaattcgtaacaatgaacctgaagcctttagagaaaagtatagaaacatcgacgtgttactgattgatgacattcaatttattcagaataaagaacaaacgcaagaagagttcttccatacatttaatgaattacatcaaaataagaagcaaattgtcatttcaagtgaccgtccacctaaagaaattgcaaaattagaagaccgtttacgttcacgtttcgaatggggattaatcgttgatattactcctcctgattatgaaacgcgtatggcgattcttcagaaaaaaatcgaagaagagaatttagaaattcctgctgaagctttaaattatattgctaatcaaattcaatcaaacatccgtgaattagaaggcgcactcacacgtttgcttgcctattctaaacttcaaggaagacctataacgactgaattagcagcagaagcgctcaaagatattattcaagttcctaaatctaaaaaaattacaattcaagatattcaaaaagtcgttggacactactacaacgttcgcatcgaagatttcagtgcaaaaaaacgtacaaaatcaattgcttatccacgtcaaatcgcgatgtatttatcaagagaacttactgatttttcattacctaagattggtgaagaattcggtggtcgagatcatacgacagtgattcatgcgcacgaaaaaatcgctaaagatattaaagccgatacaatttttaaacaagaggttgaagatttagaaaaagaaattcgcaaccaa

SEQ ID NO: 35724 - DNA, 1131 bp, Staphylococcus haemolyticus
atgatggaattcacaattagaagagattattttattaatcaattaaatgacacattaaaagccatctcaccaagaacaacattaccaattttaacgggtatcaaaatcgatgctaaagataacgaagtcattcttactggttcagattctgagatatctattgaaattacaatccctaaacaagtagatggtgaggatattgtcactatttctgaaacaggttcagttgtacttcctggtcgtttcttcgtagatattattaaaaaactaccaggtaaagatgttaaattatcaacaaatgaacaatttcaaacactgattacttcaggacattctgaatttaacttaagtggtttagatcctgatcaatatccattattacctcaagtatcacgtgatgatgcaattcaattatcagtaaaagtattaaaaaatatcattgcacaaacaaatttcgcagtgtccacctcagaaacacgcccagtacttactggtgttaactggcttatacaagataatgaattaatatgcactgcgaccgattcacaccgcttggctgtaagaaagttaaaattagaagatgactctgaaaacaaaaatgtcatcattccaggtaaagctttatcagaattaaataaaattatgagtgatagcgatgaagagattgatattttctttgcttcaaatcaagttttatttaaagttggaaatgtaaactttatttctcgcttattagaaggacattatcctgatacaacacgtttattccctgagaattacgaaataaaattaggcttagacaacggtgaattctatcacgcaatcgatcgtgcttctttattggcacgagaaggtggcaacaatgttattaagttaagtacgggtaatgatgttgtagaattatcatctacgtcacctgagattggtactgtaaaagaagaagttacagcaacggatgtagagggtggcaacttgaagatttctttcaactctcgttatatgatggatgcgttaaaagcgattgataatgatgaagttgaagttgaattctttggtacgatgaaaccgttcatccttaaaccaaaagaagatgattctgtcactcaattaattttaccaattagaacgtat

SEQ ID NO: 35725 - DNA, 1935 bp, Staphylococcus haemolyticus
gtgatggtgaatacattgtcagatgtaaacaacacagataactatggtgctggacagatacaggtattagaagggttagaagccgttcgtaaaagacctggtatgtatatagggtcaacttcagaaagaggtttgcaccacttagtatgggaaatcgtggataacagtatcgacgaggcacttgctggttatgcaaatcaaatcgaagttattattgaaaaagacaattggattaaagtaactgacaatggtcgaggcattcctgttgatattcaagaaaaaatgggtcgtccagcagttgaagttatcttaactgtactgcatgctggtggtaaattcggcggtggcggttataaagtatctggtggtctacatggtgtaggttcttcagttgttaacgctttgtctgaagacttagaggtatacgttcatcgtaacgatacaatctatcatcaagcatataaaaaaggtgtacctcaatttgatcttaaagaagtaggtagcactgataaaacaggtacagtcattcgctttaaagcagatggtgaaatattcactgaaacaactgtttataactatgaaacgctacaaaagcgtattagagagcttgcattcttgaacaaaggtatttcaatcactttaagagatgagcgtgaagatgtagagcaacgcgaagatacatatcactatgaaggcggtattaaatcttacgttgaactattaaacgaaaataaagagcctattcatgaagaacctatttatattcatcaaactaaagatgatgtagaaatagaaatcgctatgcaatataacagcggttatgcaacgaacttattatcttatgcgaataatattcatacttatgaaggtggtacgcatgaagatggtttcaaacgtgccttaacgcgtatattaaatagctatggaacacaaagtaagattatcaaagacgataaagaaagattgtctggtgaagatacacgtgaaggtttaacagccgtcgtatcaattaaacatggtgatcctcaattcgaaggacaaactaaaacgaaattaggtaactctgaagtacgtcaaattgttgatcgattgtttgctgagcattttgaacgtttcttatatgaacatccaaatgttgcacgcatcgttgttgaaaaaggaattatggcatcacgtgcacgtgtcgcagctaagaaagcacgtgaagtgacacgtcgtaaatcagctttagaaatttcaagcttaccaggtaaacttgcagactgttcaagtaagaaacctgaagaaagtgaaatcttcctagtagagggtgactctgccggggggtctacaaaagaaggtcgtgactctaaaacacaagccattttgccattaagaggtaaaatcttaaacgttgaaaaagcacgtttagatcgtattcttaataataatgaaatacgtcaaatgattacagcctttggtactggtattggtggcgagttcgatatctctaaagcacgttatcataaaattgtaatcatgacagatgctgatgtggatggcgcgcatattagaactttattactaacgttcttctatcgtttcatgagaccactaatcgaagcgggatatgtgtatattgcacaaccgccattgtataaattggcacaaggcaaacaaaaatattatgtatttaatgatcgtgaacttgataaattgaaatcagaattaagtcctacacctaaatggcaaatatcacgttataaaggtttaggagaaatgaatgcggatcaattatgggaaacgactatgaatcctgaaaaccgtatgatgttacaagttaaattagaagatgcgattgaagcggaccatacatgtgaaatgttaatgggcgatgtagttgaaaatcgtagacaatttatcgaagacaatgcagtatatgcgaacttggatttc

SEQ ID NO: 35726 - DNA, 2697 bp, Staphylococcus haemolyticus
atggctgacttacctcaatcaagaataaatgaacgaaatataaccagcgagatgcgcgaatcattcttagactatgcaatgagcgttatcgtttcacgtgcgttacctgatgtacgtgatggtttaaaacctgtacaccgtcgtatcttatatggcttaaatgaacaaggtatgacccctgataaaccatataaaaaatcagcacgtatcgttggggatgtaatgggtaaatatcaccctcacggagactcatcaatctatgatgccatggtcagaatggcacaaacattcagttatcgttatccacttgtcgatggtcaaggtaactttggttcaatggacggcgatggtgccgctgccatgcgttatactgaagcgaagatgactaagattacgttagaattactgcgtgatattaacaaagatacaattgattttctagataactatgatggtactgaaagagagccggaagtcttaccttctcgtttccctaacttattagttaatggtgcatcaggtatcgctgtaggtatggcaacaaatattcctcctcacaatttaactgaagtcatcaacggtgttttacatttaagtaagaatccagatgtaacgattgcagaacttatggaagatattcaaggtcctgattttccaacagctggtttaattctagggaaaagtggcatccgacgtgcttatgaaacaggtcgaggatcaattcaaatgcgtgcacgtgcggaaattgaagagcgaggtggcggtcgccaacgtatcgtagtgactcaaattccgtatcaagttaataaagcgcgtatgattgagaagattgcagaacttgttcgtgaaaagaaaattgaaggtattactgatttacgtgatgaaacaagtttacgtactggcgttagagtagtaatcgatgttcgtaaagatgcaaatgccaatgttattttaaacaatttatataaacagacaccattacaaacttcatttggtgttaatatgattgcacttgttaatggacgtccaaaattaatcaatttaaaacaagctttagttgaatatttagaacatcaaaagacagttgtacgtcgtcgtactgaatacaacttgaaaaaagcgaaagaccgagcacatatcttagaaggtttgcgtatagcgttagatcatatcgatgagattattacgacaattcgtgaatcagaaacagataaagtcgctatggaaacattgcaagagcgttttaaattgtctgaacgtcaagcgcaagctattttagatatgcgtttgagacgtttaactggtttagaacgagataaaattgaaaatgaatacaacgaattactcggttatatttctgaacttgaagaaatcttagccgatgacgaagttttacttcaattagttcgtgatgagttaaccgatattaaagaacgttttggtgacgaacgtcgtacagaaattcaattaggtggcttagatgatttagaagatgaagatttaattcctgaagaacaaatcgtcatcacattgagccataataactatattaaacgtttaccagtttcaacgtatcgttcacaacaccgtggcggacgcggcgttcaaggtatgaatacattggaagaagatttcgtaagtcaacttgtaacgttaagtacacatgaccacgttctattcttcacgaataaaggtcgtgtttataaacttaaaggctacgaagttccagaattatctcgccaatctaaaggtattccagtcatcaatgccattgaattagataatgatgaaacaatcagtacgatgattgctgttagaaaccttgaagatgaagatagttacttagtatttgcaactaaaaatggtattgtgaaacgttctgctttaagcaatttctcacatatcaataagaacggtaagattgcgattgggttcaaagaagacgatgaattaattgcagtacgtcttacagatggtaaccaagatatcttaattggaacatcccatgcttcattaattagatttgcagaaacaagtttacgtccattaggtcgtactgctgcaggtgtaagaggtatctcattacgtgaagatgatgtcgttgtaggtttagatgttgcacatgccgatagcgaagatgaagtgctagtcgtcactgaaaatggatatggtaaacgtacgccagtgagtgaatatcgcttatcaaatcgtggtggtaaaggtatcaagactgccaagattactgaacgtaatggtaatatcgtttgtatcacaactgttaatggcgaagaagacttaatgattgttacaaatagtggtgttatcattcgtttagaagtagaagatatttctcaaaatggtcgtgcaactcaaggtgttcgcttaatgaaactaggcgatgatcaatttgtatcaacagttgctaaagttattgataaaacagaagatgaagatgcgactgaggctgctcaaactgaaaatggtgaatcaaatgcagagagtactgaaagtcctagtgaagaagtaattgacgatgatacaccaggtaacgcacttcatactgaagcggacgaagaaactacagtttcatctgaggatgactcaacagatgaacgtattgaagttagacaagacttcatggatcgtgtaaatgaagacattgaaaatgcatctaacaatgatgaagatgacgaaaac

SEQ ID NO: 35727 - DNA, 1284 bp, Staphylococcus haemolyticus
atgttagacattagactatttagagagcaagcagacacagttaagagcaaaattgaactacgtggagatgatcctaaagtagttgacgaagtattagaattagataacgaacgtcgtcaattaatcggtaaaactgaagaaatgaaagcacgtcgtaacaaagtaagtgaagaaatcgctgaaaagaaacgtaacaaagaaaatgcagacgacgtcatcaaagaaatgcgtgaacttggtgacgaaatcaaagaaaacgacgctaaacttaacgaagtggataataaagttagagatatcttaattcgtatccctaacctaattgctgaagatgtaccacaaggggattctgatgaagaaaacgttgaagttaaaaaatggggtacacctcgtgaatttgactttgaacctaaagcacactgggacttagtagaagaattaaaaatggcagactttgaacgtgctgcaaaaatttcaggtgcgcgtttcgtatacttaactaaagatggtgcattattagaacgtgcattaatgaactacatgcttactaaacatacaacgcaacacggttatactgaaatgatgacacctcaattagttaacgcagatacaatgtttggtactggtcaattacctaaatttgaagaagatttattcaaagttgaaaaagaaggtttatacacaattccaactgcagaagttccattaactaacttctacagagatgaaatcatccaaccaggcgtattaccagaaaaattcactgcacaaacagcttgtttccgtagtgaagcaggatcagctggtagagatacaagaggtttaatccgtttacaccaattcgacaaagttgaaatggttcgtatcgaaaaacctgaagattcttgggacgctttagaagatatgacacaaaatgctgaagcaattcttgaagaattaggtttaccatatcgtcgtgttatcttatgtactggcgacatcggtttcagtgctagtaaaacatacgacttagaggtatggttaccaagttatgacaactataaagaaattagttcttgctcaaactgtactgatttccaagcgcgtcgtgctaacatccgcttcaaacgtgatgccgcttctaaaccagaattagcacatactttaaatggtagtggacttgctgtaggtcgtacatttgcagctatcgttgaaaactatcaaaatgcagatggttcaatcacaattccagaagcattagtaccatttatgggtggtaaaactgaaatccgtcctgttaatggc

SEQ ID NO: 35728 - DNA, 1983 bp, Staphylococcus haemolyticus
gtgaatagaggtggaataatgaaccgtcaatccactaagaaggctctactgataccatttattttaatggtacttacttcgattgcacttgtagttgtatggtttatctttaaaccattagtcgctacaattgcagcagctattttagtcgtgatgattattattagcatcgtgttagtcagacaagccttattgaaaatggataattatgtggataacttaagtggtcacatctcggctggaagcaacagagcaattaaacgattacctattggtatggtcgtgcttgatgctgatgaccatattgaatggattaaccagtacatgtctgaacacttagaaacgaatgtcatctcagaaccagtcaatgaagtttttccgaatattttaaagcagcttgaaaaggtacaagaagttgaaatcgaacatggtcaatatcattaccacgttcgtcattcagaagaagaaagttgtttatatttcttcgatattacagatgaagtgcaaactaatgagctatatgaagaatcaaagccaatcatcgcaacgttattcttagataactacgatgaaattacgcaaaatatgaacgacacgcaacgttctgaaatcaactcaatggtaacgcgagtgattagtcgttgggcatcagaatacaatatttactttaaacgatataattctgaccagttcgtagcgtatttaaatcaaaaaatattagctgaaatcgaagaatctaactttgaaatccttagccaattacgtgaaaagagtgtcggttaccgtgctcaattaacattaagtatcggtgtcggagaaggtactgagaacttaatcgatcttggcgaattatcacaatctggtctagatttagcattaggtcgtggtggtgaccaagtagctattaagaatatgaacggaaacgtgcgattctatggcggtaagactgacccgatggaaaaacgtacacgtgtaagagcgcgtgttatttctcacgcattaaaggatatcttaactgaaggcgataaagttatcattatgggacataaacgtcctgacttagatgctataggtgcggcaattggggtttcaagattcgcattaatgaataatttagaagcttatgttgtcttaaacgaggaagatattgatccaacgttacgccgagtgatggatgaaatcgataagaaacctgagttgaaggaaagatttgtaacatcagatgaagcttgggatatgatgacatccaaatctacgattgtcgttgtggatacgcataaaccagaaatggtattagatgagaacattctaaataaagctaatcgtaaagtcgtgattgaccatcatagacgaggagaaagctttatttctaatccattattagtatatatggaaccttatgcaagttcgactgcagaacttgtaacagagttattagaatatcaaccaactgaacaacgtttaacacgtttagaatctactgttatgtatgcaggtatcattgtggatacacgtaatttcacattacgtacaggttctagaacgtttgacgcggcaagctatttacgtgcccatggtgcagatacgatattaacgcaacacttcttaaaagatgacgtcgatacgtatatcaatcgttcagaacttattcgaacagttgaagttcaagataatggcattgcaattgcacatggttctaacgaaaaaatttatcatcctgttacagttgcacaagctgcggatgagttgttaagtttagaaggtatagaagcttcttatgtagtagctaaacgtgaagataacttaatcggtatatcagcacgttcattaggctctattaatgttcaattaacgatggaagccttaggtggcggtggtcacttaactaacgctgcaacacaattgaaaggattatcaattgaagaagcgattgaacaattacaacaagcaattacagaacaaatgagtaggagtgaagacgca

SEQ ID NO: 35729 - DNA, 444 bp, Staphylococcus haemolyticus
atgaaagtaattttcacacaagatgttaaaggtaaaggtaaaaaaggcgaaattaaagatgtaccagtagggtatgcaaataactttttaattaaaaataattatgctgttgaagcaactccaggtaatttgaaacaattggaacaacaaaataaacgtgctgaagcagatagacaaaaagaaattgatgatgctaaagcgttaaaagctaaattagaagaaatcgaagttgaagtgagtgctaaaactggtgaaggaggcaaattgttcggttctgtaagtactaagcaaattgctgaagcacttaaaacacaacatgatattaaaattgataaacgtaaaatggatttacctcaaggtatccatgcattaggttatacaaatgtacctgttaaattagataaagaagttgaaggtacgatccgtgttcacactgtagagaag

SEQ ID NO: 35730 - DNA, 1398 bp, Staphylococcus haemolyticus
atggataatatgtatgagcaaaagcaaatgccacataataatgaagctgaacaatctgtcttaggtgcaattattttagatccacaattgattaattcgactcaggaagtgctccttcctgagtccttttatagaggtgcccaccaacacatcttcagagcgatgatgaacttaaatgaagatggtgatgaaattgatgtcgtaacgttaatggatcaattaacgaaagaaggtacattaagcgaggctggtggtcctcaatatttagcggaactctcaaataatgtaccaacgacacgtaatattcagtattatacaaatatcgtcgcaaaccatgcattaaaacgcagattaattcaaactgcggatagtattgccaacgatggctatgataatgaacttgaattagatgcgatattaagtgatgccgagcgacgtattcttgaattatcctctaatcgtcagagtgatggatttaaggatattagagatgtattaggacaagtttatgaaacagctgaagagctcgaccaaaatagtggtcaaacgccaggcattcctacgggttatcgtgatttagaccaaatgacagctggatttaatagaaatgacttaattatcttggctgcccgtccttcagtaggtaagactgccttcgctcttaacattgctcaaaaggtagcgacacatgaaggtaattatactgtcggcattttctcacttgagatgggggcagaccaattagcaacacgtatgatttgtagttcagggaacgtggattccaatcgactacgtacaggtacgatgacagaagaagactggaatcgatttacaatagcagtcggtaaattatcacgtaccaagatcttcattgatgatacacctggtattcgaattacagacttacgttctaaatgccgtcgtttaaaacaagaacatggtttagacatgattgtgattgactatttacagttaattcaaggtagtggttcacgtgcttctgataacagacaacaagaagtatctgaaatttcacgtactttaaaagcgattgctcgtgaattagaatgtccagttattgcactaagtcagttatctcgtggcgtggaacaacgtcaagataaacggccaatgatgagtgatattcgtgaatcaggttctatcgagcaagatgcggatatcgttgctttcttatatcgtgatgattattataatcgtggcgaaggtgaagatgacgatgacggtggaaatttcgaaccacaatcgaatgatgaaaatggtgaaattgaaatcattattgctaaacaacgtaatggtccgactggtactgtgaagttacacttcatgaaacaatacaataaatttacagacattgattatgcacatgcagaaatgtca

SEQ ID NO: 35731 - DNA, 1187 bp, Staphylococcus haemolyticus
atgtcatcaatcgtagttgttgggacacaatggggagacgaaggtaaaggtaaaattacagatttcttagcggaacaagcagatgttattgcacgtttttcaggaggtaataacgcaggtcatacgattcaatttggtggagaaacttataaattacatttagtgccatcaggtattttttataaagataaacttgcagttataggtaacggtgtagttgtagatccagttgcattattaaaagaattagacggtttaaatgaacgtggtgtatctacttctaacttacgtatttctaaccgtgcgcaagtcattcttccatatcacttagcacaagatgaatatgaagaacgtcgtcgtggtgataataaaatcggaactactaagaaaggtatcggaccagcttatgtggataaagcacaacgtattggtatccgtatggctgacttattagaaaaagaaacatttgaaagacgtttaaaagagaacattgaagttaaaaatgcatacttcaaaggcatgtttaatgaaacttgcccacgtttcgatgaaatctttgatgaatactatgctgcaggtcaacgtttaaaagaatttgttacagatacttctaaaatcttagacgatgcatttgtagctgaagaaaaagttttatttgaaggtgcacaaggtgtcatgttagatatcgaccatggtacatatcctttcgtaacttcaagtaaccctgttgcaggtaatgtaacagttggtacaggtgtaggcccaactttcgtatctaaagtgattggtgtatgtaaagcatatacatctcgtgtaggcgatggtccattccctacagaattatttgatgaaaatggacatcatattagagaagttggtcgtgaatacggtacaacaacaggacgtccacgtcgtgtaggttggtttgactcagttgtattacgtcactctcgtcgtgttagtggtattacagacttatctattaactctatcgacgtacttacaggtcttgatacagtgaagatttgtactgcttacgaattagatggagaagaaattacagaatatcctgctaacttagatcaattacgtcgttgtaaaccaatctttgaagagttaccaggatgggaagaagatatcactggttgccgtacattagaagaattaccagataacgcacgtaaata

SEQ ID NO: 35732 - DNA, 867 bp, Staphylococcus haemolyticus
atgagaaaattatttatatttgcattagctggttttttagcccaacttgttgatggttcacttggcatgggattcggtgcctcatcatcatcaatattattaacttatgggattgcaccggccattgtatcggcgactgtacatttttcagaaatagctacgactgctgcatcaggaacatcacattggaaatttgagaatgtgcataagcccaccatgttaaagttagctattccaggtgctataagtggatttattggtgcaggtctacttacacaaatacatggagattatattaagccatatatcgcattgttcttactttcaatgggtatatatattttgtatcaatttttatttaaaagaaatagagaaattcatacacatgttggtaagttgagtggtttcaaacttgtgcctcaaggtgctatcgccggattcttagatgcaattggtggaggtggctggggaccagtaaatacacctttattattggctagtcataagatccaaccacgatatgcaattggtactgtatcggcgagtgagttttttgtaacattatcaacgtcattgagtttcatcatcttcttaggtattactcagattaattggtggtttgttattgcgttaagtgtcggcggtatgattgcagcgcctatctctgcatatttaacaaagatattaccaattaatattttagccatttgtgttggtggcttaatcatcttcacaaatagcaatgcattaatgacttatttcgtacacgatgacacaatttcaaatattgtaagattcgcaattatttgtgcgattgtgatacttgttattatcactgtgattcgcaacaaaaaattgtctttttct

SEQ ID NO: 35733 - DNA, 597 bp, Staphylococcus haemolyticus
atgagtcaatcaagtaatattacatggcatgattctgaagttactaagtcagatagacaacaacgaaacggtcataaaagtgtagtgatatggtttacaggattatcaggatctggaaaatcaactgtatcagtagaacttgaaaaagctttgttccaattaggaaagcattcttatcgattagacggcgataatgtaagacatggtttaaacaagaatttaggctttagtccagaagaccgtaaggaaaatattcgacgcattggtgaagtaagtaaattacttgtagatgcgggaacaattgctataacagcatttatttcgccttacagagctgatcgtgatgaagttcgtgaaattttagaagatggagaattcattgaagtttacacagagtgtagcgtggaagcatgtgaacaacgtgatcctaaaggtctttataaaaaagcacgctctggtgaaattaaggaatttactggtataagtgcgccatatgaggcaccacatcaaccagaaattacgattaatacagaacatcaaagtgtagaagaatcagtaagtactattatcgaatatttgaagaataaagaaattatt

SEQ ID NO: 35734 - DNA, 251 bp, Staphylococcus haemolyticus
atgccaaatattaaatctgctattaaacgtgttagaacaactgaaaacgctgaagctcgtaatatttcacaaaaaaacgctatggtactgctgtgaaaaatgctaaaacagcaatcaacaataatgctgataacaaagctgaattagttaacttcgctatcaaatcagttgataaagcttcacaaagtaacttaattcattcaaataaagctgatcgcattaaatcacaattaatgtcttcaagtaaataa

SEQ ID NO: 35735 - DNA, 315 bp, Staphylococcus haemolyticus
atgtcttataaggaactatcattacaattaaaaattttatcggatccaagtcgattagaaatattagacttattatcttgcggtgaattatgtgcttgtgatttattagcgtattttcaattttcacaacctacattaagtcatcatatgaaaattctagtagataatgaattagtatctacacgaaaagacggtactaagcgcatgtaccgacttaatcataagtccttagattcaatcaacaatgaattaacttatattagctctcctactcaacaatgtatgtgtaaaaagataaagacaggtgaatgtaca

SEQ ID NO: 35736 - DNA, 756 bp, Staphylococcus haemolyticus
atgccaattctaaacgtcaatcatttatcaaaagtatacggaagtaaacaaaaatataaagccctacacgacatcaacttttcagtggacaaaggagaattcgtcgccataatgggaccttcaggttcaggtaagactaccctcctcaatgtcattagttccatcgatagtatttctggaggaactgtagaagtaagtggcaatgaaattaatcaacttaaagataagcagttagcacaatttcgtaagaaagaacttggatttatcttccaagattatagtgtcttacctaccttaactgttaaagaaaacattatgttgccactatccgttcaaaaagtaagtaaagatgagatggaacaaaattataaagaagttactgaagcactcggtatttatgagttaagcgataaatatccaagcgaaatatcaggtggtcagcaacaacgtaccgctgccgcacgtgcattcgttcataaaccggctattatctttgccgatgaaccgacaggagcacttgattcgaaaagtgcgcaagacttactcaaccgtctagaagatatgaacgagcgattcaatagcacgataatcatggtaactcatgacccatctgcagcgagtttcgcacagcgtgtcattatgttaaaagatggcaatattcattcagaaatccatcaagaagataaatctaaacgcgaattttataatgaaatcattcaattacagtcagccttaggtggtgtcgcaaatgacgtt

SEQ ID NO: 35737 - DNA, 1551 bp, Staphylococcus haemolyticus
atgaaaaaacgtgtattaattacaatggcagcaagcgcaacgctcttattagcaggttgtgggaatgaccaaaaagaagataaaaatatcacagtatcgctacctactggagcgaaagcagataaacttgacgcacaaggttatgacgccgcaatgccagtctatagtgcagtatatgatgcattagttaaatacgataaagacaaaggtgtgaaagctggcttagcagaaaaatggcattttgatgaatcaggaaaagtctatgaattccatttaaaaaagaacgttaaattctcagatggctcagctttagatgctaaagcagtgaaattctcaattgagcgtgcgaaagcgatgaacaaagatacgactgtagaaacgttaaaaaaattggataaggttgttgttaaaagtgatcatgttgtccaaattagattgaagtcaccatcaaatcaagtgttgaatgaattaacacaggtgagaccgttacgtattatgagtccacattccgttgaaaatggtaaagtaaatggcaaatttgaaaaagcgattggaacaggtgcctttgtcgttgataaaactggcaaagaaaaaacgacaatgaagccaaataaatatttcaaccatagccatcccgtaaactacaatcttgcgttccaaacgattgaagatggagattcaagaaactcagcagtacaaagtggttctgttgatatttctggtggtgctttaggaatgctgtcagatcagcaaattaagcaagacaagaaaaataaaaacttaactgttgaagataagccaagtacagtaagtcatttcatggcatttaatccggataatgatgtattaaaacaacgtacaatccgtgaagccattagtaagagcatcgatacaaaagatattgcgggtaaatctgtaaatggtttattccagaagaacgtgcaatttgtaaacaaagataatcaacaggcacacgactatgatgtaaaagaggctgagaagttacttaaagaagcaggttatcacaagaacagtgacggtatttttgaaaaaaccggtaaaccattaacgtttaatttggttattcaaactgcagaattcccaagttggaaagataaagcggaaaaagtgcaacgtcaacttaaaaaagctggcattaagttaaatgtgaaaacgttagattcacaatcatactatgatacgttatggacgaaaaaagattatgacctcatcttctatagaacgtattcagatgccttaatgccttataatttcatgagttcagtatttaaaaataatgatggtaagtcaggtgtattagctaatgataaaacattgactcagcagctagatgatttcccaacaactgtatctaaaaaagaacaacagcgttcatttgatgaaatatttaaacactttaatcaacaatattatggtgtgcctattgcttatccaaatgaaagctttgtcgttagtgataaagtgaagcaattcaaattctctggacttactgatgctcctattgattataaagcgttgaaagttaatgag

SEQ ID NO: 35738 - DNA, 1722 bp, Staphylococcus haemolyticus
atggcacgagtagatttgaaagctaaaccttactttttaaatgacgaacaaattcaatgggttgaagagacattgtcacatttaactgatgaagaaaaaataggacaattattctttaatttattttcattagaagaagatggcgactttaacgattctgagtatacaaataaagatattttaaatcgatatcatatcggtggtgcccgctatcaaggcggaaacaagcaacaagttcaagcgctattaaacgatttacaacaacatagtaaagtgcctttacttgtcgctgcaaactgtgactctggtggcaatggagcttgtaaagatggtacgtatatcgcttcagcagctcagtgtgaagccgctcaagacagtaaagtcgcttataatgcaggttacgtatctggtcgagaatcacaagcacttggcgttaacattaactttgacccttgcgttgatattttaaaaaattggcgtaacacaattgtgaacacacgtgcatatggaacaactgcagaaaccgtgattaaatataccaatgcctttattaatggctttaacgaaacacaagatatgatcacttgtattaaacatttcccgggtgacggtactgaagaacgcgatcaacaccttgtattaggtgtaaatgaaatgacaacagatgaatgggatcaaagtttccgaaaagtctatgaaaatcacattaataatggggtggaaatgatcatgtcaggtcatatcgcattacctcattattctaaaaaactcaatcctgagttagcagacaaagacattttaccagcaacattatctaaagaattaattaccgatttattaaaagacgacttagcttttaatggcttagtcgtaacagacgcaagtcatatgttaggtatgactgcagccatgaaacgtgaagactatgtgcctcaagcgattgctgccggttgcgatatgttcttattcttcaatgatttagaagaagacttccacttcatgttaaaaggttatcaagacggcgtgatcactgacgaccgtctaaatgatgctgtaagacgtattctaggactaaaagctaaaatacatttacctaaaaagcaagcacagggtacactacttaaaaatgaagaccaacttagcgttatcggttgtgatgaacacttgacaatgcaacaagaagctgccgatttaagcatcacattagtgaagaacacattagatcaattaccaatacgccctgaaacacacaagaatatacgcttgtatattatcgaaggtgagaaaaatggtatttacaaatcagatgacactgtcgaacataacttagtatctatcctagaagatcgtggatttaatgtgacagttaatgatggctctacacgtgtaaaaggtaaaacattagaatatcgtgataacgttgatgctgcactcgtattcgcaaatatcgttggatacgctgctgaaaataactatcgcatccgatggtcaactgcaatgagtaacgaaattccatggtacgttcatgaagtgcctaccgtctttacatcactcaatttcacaacacacttacatgatgcaacaatggtcaaagcctatatcaacgcgtaccattcaaataaaacaacattagaaaccgttgtcgataaaatcatgggcgagtcagatttcaaaggcgtgccaaatgatttagtctggacagataaatggcaagctaaatta

SEQ ID NO: 35739 - DNA, 327 bp, Staphylococcus haemolyticus
atgagtgcgaaaatggatggacgggaattattccaccctgaacgtatggcatctcgtatattaggcatgggtgatgttcttagtcttatcgaaaaagctcagcaaggcgtcgaccaagaaaaagctaaagatttagaacaaaaaatgcgtaattctacgttcacattggccgatttccttgaacaattggaccaagttaaaaatcttggcccacttgatgacatcatgaaaatgattccaggaatgaataagatgaaaggcatggataagttaaatatggatgaaaagcaaattgaccatattaaggcgataagcgagtctatgaca

SEQ ID NO: 35740 - DNA, 1170 bp, Staphylococcus haemolyticus
atgaaaaaacaattatttacattgtacttcaatattttcttaatctttgtaggtatcggattggtaatacctgtactccccgtttacttgaaagatttaggtctaaagggtagcgacttaggcatattggtagcagtgtttgccttatctcaaatgattatttcaccattcggtggtacgatggctgataaactcggaaaaaaattaattatctgcattggtctagttctatttgccatatcggagtttctattcgctatcggtcatcattttcctgttttaatcgcttctcgtatattaggtggttttagtgcagggatggtaatgcctggtgtaactggtatgattgcagatatttcaccagctaaggataaagccaagaactttggttacatgtcagctattatcaattcaggctttattttaggtccagggattggtggatttttagcggaattctcacatcgagctccattttactttgcgggaactttaggtgttttagcatttatcatgtctttattattaattcataacccgcgcaaagaaacaactgaaggattccattcactcgaaccggaagtatttacaaaaattaactggaaagtatttattacgccaattattttgacattagtactggcatttggtctatcagcatttgaaacattattctcactttatacagctgagaaagccaactatacaccacgtgatatttcaatcgcaattgttggtggtggcgtagcaggagcggtattccaagtcttcttcttcgacaaatttatgaaatacatgactgaattaacctttattatctggtcattactctattcagcgattgtacttggtttattaatcttgtcgcatagttattggacgatcatgtttattagttttatcgtgttcattggattcgatttaattcgtccagcacttacgaactactactctaacattgcaggtaatcgacaaggttttgcaggtggattaaactccacatttactagtatggggaactttgttggtccattagtagctggtgctttatttgatgttaacgtggaatttcccttatatatggcaatcatagttatgttgttcggtatcgtgattatttttgttgaaaaagcactgcaagcaacgagacgtcgaaaacacacaacgaag

SEQ ID NO: 35741 - DNA, 918 bp, Staphylococcus haemolyticus
atgatttatacagtaacattcaatccatctattgactacattatgtttactaatggatttgaaataaaagggttaaatagagcgacatctacttataaatttgcaggtggaaaaggtatcaatgtatctcgtgttttaaaaacactaggtgtaccatctacagcattagggtttgctggtggttttcctggagaatttatagctcaaacattagaagaaagtcaaattaaaacggattttattaaagttgatgaagatacacgtattaatgtaaaactgaaatctggtgacgaaactgaaattaatgcacctggaccgtctattactgacgaccaattccaagcattattaaatcaaattaaacagacaacaaaggaagatacagttattgttgctggtagtgtacctaagagtattccaagtgatgcgtatgctcaaattgcagaaataactcaaagtacaggtgcaaaattggtggttgatgctgaaaaagatttagttaacacggtgctaaaatatcaaccattatttattaaacctaataaagatgaattagaagaaatgtttgatatgactgttgagagcgaccaagatgttgttaagtatggtcgtgaaatcttaaaagaaggtgcacaatcagtcattatatctttaggtggagatggagcaatttatatagataaaacgcgtagtataaaagctcaaaatcctaaagggcaagtcgtaaatacggttggttcaggagatagcactgttgcaggtatggtggcaggtcttgaatctggattatcacttgaagatgcatttcaacaagctgttgcttctgggacagcaacgacatttactgaagatttagcaacaatagaagatatagaaaaaattaaatcacaggttactattacagtacttgatggggag

SEQ ID NO: 35742 - DNA, 1928 bp, Staphylococcus haemolyticus
ttaatgagaatcacagaattactaacaaaagatacaattgctatggatttatcagcgtctgataaaaatggtgtcattgatgaattagtgaatcaattagataaagctggcaagttaagtgatattgctcaatttaaagaagcaattcataatcgtgaatcacaaagtacaacaggtattggagaaggaattgctattcctcacgcaaaagtagcagcagtaaaatctccagccattgcttttggtaaatctaaggaaggtgtggattaccaaagtttagacggtcaaccagcacatttattctttatgattgctgctccagaaggtggcgcacaaacacacttagatgcactagctaaattatctggtattttaatggatgataaagtgagagaaagtttattacatgctaactctcctgaagaagtgcttcaaattattgataatgcggatgatgaagcaactaaagaagaagaaaaagaagcacaagaacaagaggcagcggccgctggtgcgacaagtggttctgcaaatacgacagatgctaatgagccatatgtattagctgtaacagcatgtcctacaggtatcgcacatacctatatggctcgcgatgcattgaaaaaacaagccgataaaatgggcgttaaaatgaaagttgaaacaaatggttcaggcggtattaaaaaccatttaactcaacaagacatcgaacgtgcgacaggtgttatcgtagctgcagatgttcatgttgaaacagatcgtttcgacggtaaaaacgtagttgaagtaccagttgctgatggtatcaaacgaccagaagaacttattaacacagcacttgatacaagtcgtaaaccatttgtagcacgtggtggtaactctaaatctacagatagtgaaagtaatgagaaacaaagctttggtaaagcgttctataaacacttaatgaacggtgtatcaaatatgctacctttagtaattgctggtggtatcttgatggctatcgtattcttattcggggctaactcatttgaccctaaaagctctgagcacaacgcttttgcagaacaattatggaatataggtaataagagtgcctttgccttaatcattccaatcttatcaggtttcatcgctcgtagtattgcagataaaccaggtttcgcagctggtttagttggcggtatgttagcaatttctggtggttctggatttatcgtggtattattgcaggtttcttagcaggttacttaacacaaagtattaaatatattacacgtggcttaccacaagcagttgaaggtttaaaaccaacgttaatttatccattattaagtgtaactatcactggtttattaatgatttatgcatttaacccgccagcagcatggttaaataacttattattaaatggattaaatagcttatcaggttcaaatattgtattacttggtttagttatcggtgcaatgatggccatcgatatgggtggaccatttaacaaagcagcatatgtattcgccacagcagcattgacagaaggaaatgccgcaccaattacagcagcaatggtaggcggtatgattccaccattagcaatcgcaacagcaatgatattctttaaacgtaaattcactaaagaacaacgtggttctatcgtgccaaactatgtgatgggcttatcattcatcactgagggtgcaattccatttgctgcagctgacccattacgtgtgatctcatcaatgatggtaggttcaggtgtcggtggtgcaattgcattagcattaggttcaagaatcaatgcaccacacggtggtatcattgttatagcagcgactgactttagtcatatcttacaaacattaattgctttgatagtaggtacacttgtttcagcaattatgtatggtttattgaaacca

SEQ ID NO: 35743 - DNA, 1374 bp, Staphylococcus haemolyticus
ttggatacagtgaccataataaatttagtaatattttttctattaatagcattaacaacagtattcgtaggttcagaatttgcattagttaaagtacgttcaacgcgtattgaacaattagctgaagaaggtaatcgtagcgctaaaattgtcaaaaagatgattgcgaatcttgactattatttatcagcctgtcaattaggtattacagttacttcattaggattaggttggttaggtgaaccaacatttgaaaaattgttgcatcctctatttaacttattacagttacctgatgcattaactacaacaatctcatttgtaatttcattcatcgtagtgacttatttgcacgtagtattgggtgaattagcaccgaaatctatagcaattcaacatacagaaaaattagccctaacatacgctagaccattgtactatttcggtaatataatgaaacctttgatttggttaatgaatggttcagcacgtgtgataattagaatgttaggtgttgatccagacgctcaaactgatgctatgtcagaagaggaaattaagattattattaacaacagttataatggtggagaaatcaaccaaacagaattaaactatatgcaaaatatcttttcatttgatgagagacatgcaaaagatatcatggtaccacgtactcagatggtgactttaaatgaaccattcaatgttgacgaattattagagacgattaaagaacatcaatttacacgttacccaattactgaggatggagacaaagaccatattaaaggtttcatcaacgttaaagaattcttaacagagtatgcttctgggaaacctatcaaaatcaataattatatccatgaattaccaatgatttcagaaacaactcgcattagtgatgcgttagttagaatgcaacgtgaacacgtacatatcagtttaattattgatgagtacggcggcacagctggtattttaacaatggaagatattcttgaagaaatcgtcggtgaaatacgtgatgagtttgatgatgatgaagtaaatgacatcgttaaacttggtgaagatacgtatcaaattaatggacgtgtccttcttgatgacctcaatgaaaaattcaacattgaatttgaagattcagaagacattgatacaataggtggttggctccaagcccacaacactaacttacaagttgaagatcatatcgatacgcaatatgatcgttggattgtgtcagaaatggacaatcatcaactagtttgggttgtacttaaatatgagttcatcgataatagaccaacattcggtgaagaccaagatgaaaatgaagataaaaaagacaataacgatgaaagtcgtgaa

SEQ ID NO: 35744 - DNA, 699 bp, Staphylococcus haemolyticus
gtgaaatcattaattgtatatgcccatcctgaaccaaagtcattcaatggtgcattaaaagataaagctgtagaaacattagaagcacaaggttatgaagttaaagtttcggatttatacgcaatggattttgatccagttgctagaaaagaagatttcaaaaacttaacagatcctgaattcttcaaatacgcagtcgaacaaaaaaatgcatatgataacgatgaattaacatcagtgattaaggaagaatttgaaaaactgttatgggcagacttagttattttccaatttccactatggtggtttagtgttccagccatacttaaaggttggtttgataaaatctttatgtttggtggcatttatggcggagaatacgaccgttatgacaaagcccgattaacagataaaatagccatgatctcaactacgactggctcacccgaaggaagctatgctgcaaatggtttttcaggagatatttatgagcaagtattattccatattaaccatggtatgatttatttctctggtatgacaccattagaaccatttattgcttatcaagttagccatagcgaagaggtaagacgtgactatcttgaacaattagctgagaaattaaaacatatcgatgacattcctagaattcaatatcataaattagaagatttcgatgataacggacaattaaaa

SEQ ID NO: 35745 - DNA, 1392 bp, Staphylococcus haemolyticus
atggaagaaaagaagcataagaaatttaagtttaagacgcctcatacatatgctttattaatgtttgttatttttctagcttggttattaacttacattattccagctggtgaatatgcgcgtgaaaagaaaggagatcaaacacttgtcgtttcagggacttaccatactgtggaatcggtaaacgtcaacttcctcgaaatattcaggtcaattcctgaaggactaatcagtggcggagaaatcgtattctatatatttctagtaggtggtgcctttggcattattcataagacgggtgctttcgaaaatggtgtaaacaaagcaatgagaatgttaggaaaggccaatttcctaatgattccattgacgatgacaatattctctatattaggatttacaattggattagcagaagaaacaattatctttgttccgattggcattataatcgctcggacattaggttacgacgccttaacaggtgctgcaatggttattttaggtgctgccagtggtttcagtggaggtatgttaaatccctttacagttggtgtggcacaaaccgttgctgaattaccaatgttctcaggctggggtttacgtacaattatctatttatttatcttaactgcagccatttctacagttatgttatatgcacgtaaagtgaagaaagataagtcaaaaagtattgtgtatgagctagaaaaagaagaaggtcatattactcaagaaatcacctatcaacattttagtaagagacaagcagctagcttacttattatagttgctacaattctatttaacgtatttggcatatttgtattcgattggacgtttaatgagatgagcgccaatttcttacttgctggtattgttgcaggtttagtaagcggacttggattaaatggtacatttgacgcattaattgaaggaatgcagaacattttatttggcgcaatgattgttggatttgctaaaggaatcgttgttattttggaaaatggtaaaatcatcgatacgattgtccatggcatgacaacattgctatcagatgtaccagcttcatttgttattattgctatgtttatattacagttcttacttaatttctttataccatctggatcgggtcaagcattaacaacaatgccattaatggtaccaatatcagatttactgcatattaatcgtcagttaacggtactcgctttccaatatggtgattcaatcagtaacattttattcccaacttcagcaatcttaatgggagcattagctgttggacgaattacttatactcaatggataaaatttgtgtggaagttgatactattatgggtaatcatttgtgcagtagcgatgtcgattgcgcttataattggttat

SEQ ID NO: 35746 - DNA, 1386 bp, Staphylococcus haemolyticus
atgaatatggcatcattagaagtcttaaatccagcgacgaacgaagtaattgaaacattagaatatacaagtgaaacaacagccaaacaacaaattgagaaagcgcataaagcgtttaaatcttggagagaagtagatgcacatgaacgtgcagataagttgtataaatggttctctttaattaatgaacataaagatgaattggcagaactgattactaaagagggtggtaaacctttaaaagaggcacaaggtgaagtggattatgcgaattcatatgtttcttggtatgccgaagaagctaaacgtatttacggacgtacaattccagctaatacacctaataaaaatattattgtgaaaaaattcccagtaggcgtagtaggagcaataacaccatggaacttcccagccgcaatgattacgcgtaagattgcgccagcattagctgcaggttgtacgattgtatgtaaacctgcgacgcaaacaccattaactactattcgtctcattgaattggcgcatgaagcgggaatcccagaagatgccgttcaatatgtcattatgcctggtaaagatgcaggtgaattattcacaaaacatcctgtaatgcagaaagttacatttactggttcaacaaatgtcggcaagaaacttatcgcacaagctgctgaatcagttgaaaatgtcacaatggaactaggtgggctagcgccattaatcgttcacgaagatgcggatattgaatatgccgtagatcaaacaattgcctcaaaattccgtaatgcaggacaaacttgtatttgtgcgaaccgagtttacgttcacgaagcggttgaagcagaatttgttcaacaattaacgcaaaaagtccatgaattaaaagtcggaaatggtatggatgaagacgtgactattggaccattgattaacgaagatggcgtgaagaaagtggttaatcaattgaaagatgcagaatctaagggcgctaaattatcacgctcattagacgaagcacaagaaatgggcggcaatttcttaaaacctgtcgtcgtttcaaatgcgaatcaagatatgcttgcaatgcaagaagaaacatttggacctatcgtaccgattgcaacatactcagatctagaagatgccattcaaatggcgaatgatacacaatttggtttagctgcttacttcttcacaaatgattatcgtactggcttccatctatataactcacttgattatggtgtcattggttggaatgatggcggtccatcagcagctcacgcaccatttggcggtatgaaagaaagtggttatggtcgtgaaggtggtacagaaggcatcgaaccatacttagaaacgaaatatttatcaataggtaatatg

SEQ ID NO: 35747 - DNA, 1071 bp, Staphylococcus haemolyticus
atgagtgaaactattccggagaaaatgaacgttgcattaatgcatgaaccttatgatattgaaattgtcgaaagagatatgccaaaagtaggacctaaagatgtcttaatcaagatgatggcagtaggtgtttgtggttctgacgttcactattatgcacatggtcgtgttggtgaattcgtagtcgaaaaaccaatcgtattaggacatgaatgtgctggtatggtagcacaagttggggatgaagtaacagactttaaagtaggagatcgtgttgctatcgaaccaggtgaaccttgccgtgaatgtgaatattgtaaatctggacaatataatttatgtccacatatggaatttatggcgacaccaccatacgatggtgcgttctgtgaatacgtaagccatccggcagacttcctttatcatttaccagactcagtgacttatgaacaagcaacccttgttgaaccattctcagtaggtttacaagcatgtaagcgtgcggatattaaaccaggatcaactgttgtgattatgggtatgggtccagttggtttaatggcagttgtagctgctaaagcttatggcgcaacaaacattatcgtttcagacttagaagataatcgtttagaagcggctaaacgtttaggggcaacaacagcaataaatattaaaaatgaagacgtcgttgaacgcattaaagaattaacagacggtcaaggtgttaactatgcaatcgaaacagcaggtaacccgatcgccttaagaagcgcattaaattcattaaaagatggcggtactttagctattgttggtttacctcaagaagatatgaacgaaatcaatgtgccatttattgcgaaccatgaaattaatattgtgggtgtcttcagatacgcgaatacgtacccacaaggcattcaaattttaagtacaacagatgctgatatcgactcattattcacacatcaattcgaactaaatgatacgaaagaagccatggaattaacacgtacaagtaaaggtgatgccttgaaagtaatggtgtacccaaacggtttcttagataaa

SEQ ID NO: 35748 - DNA, 684 bp, Staphylococcus haemolyticus
atgaatacaaaaagagcattagttgtagtaacaagtgtaacgaaatatcctgatatgaatcgtccaactggattatggtttggtgaggttgttcatttcgcggatgtcttatataaaaatggttataaagtacattatattagtccagaaggtggatatactgccattgaccctcaaagtttacaagaagatatgatgacagatttagactgggaatattatcagaataaagactttatgacacgtcttggtcatacagttacacctgacgcagttaaagctgaaaattatgatgtcatttatttcgctggtggtcatggtacaatttgggacttcaaagataatgaagatttacaaaagctaactcaagaaatttatgaaaataacgatgttgttgcttctgtttgccatggtgcaattggcttattaaatgtaaaagatgctgaaggtaaacatattatcgatggtaaaacggttactggcttctcaaatagtgaagaacaagcagtgggcttagccgacgttgttccttaccttactgaagatgaacttaaaaatcgtggtgcaaactatgaacaaggtgataactggactgagtttgctgtagccgatggtcgcattattactggccaaaatccacaatctggtaaagccgtagcagaaaaattcttagaatctcaaaag

SEQ ID NO: 35749 - DNA, 189 bp, Staphylococcus haemolyticus
gtggaaagctgttctccaagaaaattgtttaatgctgacgactatgttaaagatatgcgtttagatgtaccagacatcgtcaaattacagagagatatcgatgcaaagcatcaatgtaaatttgagcgcaccgcattaaccgaatcagaattcacagagatgtataaggagtggcaacaacatgagagc

SEQ ID NO: 35750 - DNA, 306 bp, Staphylococcus haemolyticus
  misc_feature (244)..(244): n=g, a, t or c
atggcaaaacaaaaaatcagaatcagattaaaagcttacgatcaccttgtgattgatcaatcagcagagaaaattgttgaaactgcaaaacgttctggtgcagaagtttctggaccaattccgttaccaactgaaaaatcagtttatacaattatccgtgcggtgcataagtacaaagattcacgtgaacaattcgaacaacgtactcataaacgtttaatcgatattgttaacccaacaccanaaacagttgatgccctaatgggattaaacttaccatctggtgtagacatcgaaattaaatta

SEQ ID NO: 35751 - DNA, 240 bp, Staphylococcus haemolyticus
atgaaacgaattttacatttaaaagtaaccgatcaagtgagcacattaaacagaattacaagtgcattcgttagactacaatataatattaatgaattaacagttaaaccatctcaagaaaaaggtatctctgatatgcaaattactgcagatattgaagatgaagctatatttaaaattttaattgcgaagttaaaaaaacaagtcagtgtactcgaagttcaagatattagtcagaac

SEQ ID NO: 35752 - DNA, 1449 bp, Staphylococcus haemolyticus
atggttgaaaaattaaaaaatgaatggcttaaccagccaggcaaaaacatacttgcaggtattgtagttgccttagctttaatccctgaagctatcgcattctccatcattgctggtgtagatcctatggttggtttatatacttcgttcattattgctgtcgtcactgctattgtaggtggtagagcggcgatgatatcaggtgcaacaggggctattgccttattaattgtgccacttgtgaaagattacggtgtagagtatcttctagctgctactatactgatggggttaattcaattaattttaggacttcttaaagtaggtcgtctaatgaaatttatacctcgttctgtcatgataggttttgtgaatgctctaggaatcatgatttttatgtctcaaatagaacatatttttgggatatcaatttcaacttatatatatgtaattgtaacgttactcatcgtatatataattccaagattttttaaagctatacctgcaccattaatagctattatcgtattgactgccctttatatgtatacaggttctgacgttagaactgtgggagatttaggtaatatcaaacaagctttccctcactttttaatccctaatgttccctttaatttagaaactcttcaaattattttcccttactctttatctatggctattgtaggtttagttgagagcttacttacagctaaaattgtagacgatgctacagatacttatagtagtaaaaatagagagtcctgtggtcaaggtatcgctaacatgattaccggattattcggtggcatgggaggttgtgccatgattggtcaatccgtcatcaatgttaaatcaggtgcaaacagtagattgtctacatttacagcgggtattgtacttatatttatgattattgtacttggaggacttgtagttcaagttccaatgccaattttagcaggtattatggttatggtttctgttggtacatttgattggaattcctttaaatatattaagaaagcaccaaaaacggatgcagtcgttatgcttattacagtgattattgttttaatgacgcataatttagctttaggtgttgttgcaggcgttgttttcagtgctttattctttgctactaaaatttcaaaagtagaagttatttctgaagagttcggtaaaataaaccgattatcttttaaaggacaaatcttttttgtttctattgattctatgatggagcaaataaactttgagattgaaaatagtaccatagaattaaacttcaataatgcacacttatgggatgattctgcagtagatgcaattgacacgatagtacgaaaattcgaagaaaaaaataatattgttcgtgtagaaaaattaaattcagatagtcgtaaagttgtttcagagttaagccaactaaatgaaaatcatttaaac

SEQ ID NO: 35753 - DNA, 604 bp, Staphylococcus haemolyticus
atgaatattctaatagtatatgcgcaccctgaacctcaatcttttaatagtaaacttaaagatattgcacaaacagtattgaaggagaatggtaataattgtcgttgtatctgatttgtataaaatgaattttaaccctgttgctcaaaaatctgattttaaatatttaaaaaataataacttttttaaatatcctatagaacaagagcattcttacaaaaataatatattaagtaaggaaattaaatctgaattaagcaaactattgtgggcggatattattatttttcaattccctttatggtggtcgagtgttcctgcaatattaaaaggatggtttgataaagttttaatatatggagggatttatggaggggcatatgggaagtttaagaacgccagattatctaataaaaaagctattataagtacaacaactggttcatcaggagatatacacaaacaagtactatttcacattagtcatggaatagttgaatatactggaatgcaatgtttagatacattaatcgcatatgaaattgataaagatcaaaatagtagagatgagtatatagaattttttaaaaacaaaataaagtat

SEQ ID NO: 35754 - DNA, 1404 bp, Staphylococcus haemolyticus
atgtctagtaatattggaattttaggtttaggtgttatggggaaaaatcttgcgtggaacatcgaggataagaaatattctgtgagtattcatagtagagataataatgaaattaatgatactattcaaaagtctcattatcaaaagatatatcctgcgtataacttgaaagaatttgtagattcattagaaaaaccccgtaaaattttgttgatgattaaggctggtagtcctacggataacatgataaatgccttacttccattattagacgatgaagatattttaattgatggtggtaatacaaactatcaagatacaattcgtcgaaataaaacattagctgaaagtggcgttaatttcattggtatgggcgtatcaggtggtgaagtaggcgctttaactggtccttcattaatgcctggtggtcaagaagccgcttataataaagtcagtgatatcttagatgccattgcagctaaagcgcaagatggtgcatcttgcgtaacatacattggcccaaatggtgcaggtcattatgtgaaaatggttcataacggtattgaatatgcagatatgcaattaatcgctgaaagttatacaatgatgaaagacttattaggtatgagtcatactgaaatttctcaaacattcaaagattggaatgctggagaactcgaaagttacttaatagaaattactggtgatattttcactaaattagatgaaaataatgaaccattagtagaaaaaatattagatactgctggtcaaaaaggtacaggtaaatggacttctattaatgcattagaattaggaattccattaacaattatcactgaatcggtatttgctcgtttcatttcatccattaaagaagaacgtgttaatgcgtctaaatcattaaatggaccacaagcttcatttgatggtaataaagaagaattcttagaaaaaatcagaaaagcattatatatgagtaagatttgttcttacgctcaaggctttgcgcaaatgagaaaatcgagcgaagatcacgaatggaacttaaaattaggtgaactggcaatgatttggcgtgaaggttgtatcattcgtgcacaattcttacaaaaaattaaagatgcttacgataataatccagaacttgaaaacttattattagatccatacttcaaaaatattgttacagattaccaagatgcattaagagacgtcgtagcaacaggcgttaaaaacggtgtaccgacaccaggattctctgcaagtgtgaactactatgatagttatcgttctgaagatttgccagctaatcttatccaagcacaacgtgactattttggtgcacatacttatgaacgtaaagaccgtgaaggtgtgttccacacacaatgggatgaagag

SEQ ID NO: 35755 - DNA, 1329 bp, Staphylococcus haemolyticus
atgactcatattcaattagattatggtaagactttagaattttttggagaacatgaattagaacaacaaaaagatatcgtgaagacattacacaaaacgatacatgaaggaactggtgcaggaaataatttcttgggttgggtagaccttccagttgattatgataaagaagagttttcaagaattatagaagcttctaaacgtattaaagcaaattctgacgtgttagttgttattggtattggtggctcataccttggtgcacgtgctgctattgaaatgctaacatcttcatttagaacaaataatgactatcctgaaattgtttttgtaggtaatcatttatcatcaagctatacaaaagaattagtagattatttagctgacaaagatttctctgtaaacgtcatttctaaatctggtacaactacagaaccagcagttgcattccgtttattcaaacaattagttgagaataaatatggcaaagaagaagctaaaaaacgtatctttgctacaacagataaacaaaaaggtgcattaaaacaattagctacaaatgaaggttatgaaacatttgtagtccctgatgatgtaggtggccgttattcagtgttaactgctgtaggtttattaccaatcgcagctgcaggtattaatattgaagcgatgatgattggtgcagcaaaagcacgtaaagaattatcttctgacaaattagaagaaaatattgcttatcaatatgcaacaatccgtaaccttctatatagcaaaggttatacaactgaaatgcttatcaactatgaaccgtcaatgcaatatttcaacgaatggtggaaacaattatttggtgaatcagaaggtaaagactttaaaggtatttatccttcaagtgctaactacactactgatttacattcattaggacaatacgttcaagaaggtcgtcgtttcttatttgaaacagttgtaaaagtgaatcatccaaaacatgatcttactattgaagaagatagtgacgatttagatggattaaattatcttgctggtaaaacaattgatgaagttaatacaaaagcatttgaaggtacattattagcacatacagatggtggcgtacctaatatcgttgttaatattccacaattagatgaagaaacatttggctatgtcgtgtacttcttcgaacttgcatgtgctatgagtggttatcaattaggcgtaaatccattcaatcaacctggtgtagaagcgtataaacaaaatatgtttgctttacttggtaaaccaggatttgaagatatgaaaaaagatcttgaagcaagattg

SEQ ID NO: 35756 - DNA, 1773 bp, Staphylococcus haemolyticus
atgtactatagtaatggaaattatgaagcatttgcacgtcctaaaaaaccagaaaatgtagaggttaaatcagcttatcttattggttccggattagcatctctagctgctgcatgtttcttgattagagacggacaaatggatgggtcaaaaatccatgttttagaagaattatctaaacctggtggaagtttagatggagatgaacttcctttgaaaggctatgttgtgagaggtggaagagaaatggagaaccatttcgaatgtttgtgggatttatttcgctccatcccgtcacttgaaatggataatgcttctgttctagatgagttttattggttaaataaagaagatcctaattactcacgttgtcgtgttattgagaaaagggggcatcagttatctactgatggtgattttactttgacgccacaagccattaaagaaatcattcatttatgtttaatgaaagaagagacattaaacgacgtgaagattacggatgtcttctcaaatgactttttgcattcgaatttctggatctattggaaaacgatgttcgcatttgagccatggcattctgcaatggagatgcgtcgatatttaatgcgctttgtacatcatattggaggattagcagatttcagtgcccttaagttcaccaaatataatcaatatgaatcactagttcttccgatgattgcttacttagagtcccacggtgtgcaatttcaatatgatgttcaagtgttgaatataaaagtagatatcacaacaaaagagaaggttgcgcgtgaaatacaacttaagcgttcaggtaaagatgatatcattcctctaacgccagatgatttagtatttgttacaaatggtagtatcactgaaagttcaacttatggagataacaacacacccgcaccccctacaaaagaaatcggtggtagttggacgttatggcgtaatcttgccaaacagagccctgagtttggttgtcccgaaaagttctatcatcgtttaccagacaaaagttggtttgtatcagcaaccgcgacgacaaataacatgacaattattaatacaatcgagcaaatttgtaaacgagaccctctagccggcaagacagtgacaggtggtattgttactgttaatgattctaaatggcaaatgagttttactgttaatcgtcaacaacaatttaaaagccaacccgaagacgaggtgagcgtttggatctatgcattatactcaaacgtaaacggggattacatccataaacctatcactgaatgcagtggaaatgaaatttgccaagaatggttatatcatatgggcgttcctatcaatcaaattgaagacctcgctaaaacgcaatgtaatacgataccagtctatatgccatatatctgttcttattttatgcctagatccattggagacagaccacttgtcgtgcctgaaaatgctcgcaacatagcctttattggtaattttgcagaaacagaaagagatactgtatttaccactgaatattcggtaaggactgctatggaagcagtataccaattattggacatagatagaggtgtccctgaagtggttgcaacagaattcgaccttcgtatattgatggatgccttatatgaacttaatgatggtaaaaatctatcagaactctcagaacataacaaaatacagaaactcgctcttaacgctttcttgaagaaaataaaaggtacctatatcgaagaattgttgcaccaacacaagttacta

SEQ ID NO: 35757 - DNA, 1647 bp, Staphylococcus haemolyticus
atgatgaaagacaattggatgaaatataaagatgacagtcttgtagcatcattctatgatagccagaccacgacgtttcaagaacaaggatttgaaactgaattagcatttggtactgcaggtattcgtggccagtttggacttggtccaggtcgtttaaatcgctataccatacaacgtctggcattaggaattgctaattacttaaaagataaagaagataatccttcaattgtcattcactatgatattcgtcatttatcttcagaattcgcgcatattattacgcaaattttgacttcgaatggcatcaaagtttatctggcagatgtatataaaacaacgccacaactatcttttgctgtccgatacttgcaaacatctgccggtatcatgattacagcaagtcataaccctaaagattataacggcattaaagtttatggtgcagatggtgcgcaattagatgagggtacttcattagaagttgctcaatatatcaataatttaggtaatccacttaagttgaatattaacttaaatcaagaacttattgagaagaacacctttgatttaccagaatcggtttatgatagttacataaatgaacttacaaatcttacaggtgatattccacaatctgatttgaaggtcgtatatacaagtttgcatggtactggtgtgccgattattcctgatgttttaaagcatcttaattttcagaatgtaagtttagtcaaatcgcaatgtgagctagatccaaatttcagttccgttaaaagtgcgaaccccgaagagcgagaagcctttgatttagcaattcaacaggcacacgacttggaggctaaccttgttattgcaacagatccagacgtcgatcgcatgggatttgtagaacgaaatgcagatggtcaaacatattactttggtggtagtgaaattggcgcattactcattaaatatctgctcgaatacacgaatgtgccgaatcattcgtttgttattcaatctattgtaagtggcgagttaggtaaacgtcttgctcaacaacatggggtgactgtgaaggaagtcttaatcggctttaaacatattgctaaagccattcgtgagttagatgatacagaatcatttttatttgcctatgaagaaagctatggctatttagccgatgatttcgtgcgagacaaggacgccattcaaatcgttccattaattattaagtatgcttctattttgaaaaatgaaggaaaaacactacatgacgcattaaaagagattcatagagaagtaggtctatatcgggataaaccgatgtctaaagtctttgaaggtatagaaggacaacaacaaattaacgctttaatggataaattaagacgtaatattcctgatgtcattgcaggattaaaagtcattgcaatagaagattatgagacattgaaacgcatttataaagaagacaacacggaagaagcaatatcattaccacaagcaaatgtgattcgaattatctttaaagaaggatttattgctttgagaccatcaggtacagaacctaaactcaaattctacctatcacttaacgtcgataacttcgaacaagtctcacaagacatatataattacatatttggcgataccgaa

SEQ ID NO: 35758 - DNA, 960 bp, Staphylococcus haemolyticus
atggattatagagtgttattatattacaaatacacaacaattgatgaccctgaaacatttgcagctgagcacttagaattctgcaaatcaaacaatttaaaaggtagaattttagtttctacagaaggtatcaatggtacattatcaggtacgaaagaagatactgataaatatatcgaacatatgcattcagatgagcgtttcgcagatatgacgttcaaaattgatgaagctgaaggccatgccttcaaaaaaatgcacgtacgtccaagaaatgaaatcgttgctttaggtttagaagacgatgttgatccacgtgttacaactggtaaatattattcacctagcgaatttaaagaagcactagaagatgaagatactgtcatcttagatgctcgtaatgactatgaatttgatttaggtcactttcgtggtgccattcgccctgatatcacacgtttcagagacttaccagactggattcgtgagaacaaagatcaattagatggtaaaaacatcgtaacttattgtacaggtggtattcgttgcgaaaaattctctggttggttagttaaagaaggcttcgaaaatgtaggacaactacacggtggtatcgcaacttacggtaaagaccctgaaactaaaggtcaatattgggacggtaaaatgtacgtcttcgatgaacgtattagcgttgacgttaaccaagttgagaaaacagttatcggtaaagaacactttgacggtacaccttgcgaacgatatattaactgttcaaatcctgaatgtaacaagcaaattcttgtttcagaagaaaatgaagacaaatatcttggtgcttgttcatatgactgtgccaaacatgaacgtaaccgttatgtagctaaaaacaacattagcgatgaagaatggaatcgtcgtttagaaaactttaaagacgttccagaacatgcacatgct

SEQ ID NO: 35759 - DNA, 972 bp, Staphylococcus haemolyticus
atgtgtacaggttttacgtttcaagctaaaaacggtgacgttattttaggacgtacgatggactatgactatccattaactggacatcctgctgtgcaaccacgtcactactattgggaatctcgtgtagattataaaggtacaacgacgtatggttttactggtgccggttctgatatggaaggctttattttcggagacggtgtaaatgagcatggcctcgcaatatctaatcaatatgaccgtggttatgcctcatacgctaataaaatacacgatggatacatcaatatttcacaaactgaagtattaacatgggtacttggttacaacaaaacgattgaggaacttattgaacaagcagaccaagttaatgtcgttgcacatacattgaatgatattaatgaagcgccgccattacattatcatgtatcggacgcgacaggccgaactgcagagattacgtttgtagaaggtcgcattgtccttcatgataatccagtcggtgtactaacaaatagccctgatttaaattggcattacgagaacttgaagaattatgcgaatgtgacgccttacaaaccacaatataaacgctataaaaatttatatatcggcaatgaaagtggtacctctggactaccaggtggttatacgtcagcagaacgttatgtaagagcagcttatcttgtaagtaatatgttgcctgacgatggtgatgatgcagtattagatgcgtttagaattcttgatagtgtaagcattcctaaaggtgcagttcgaccttctgaagatgaattccactatacgctgtaccaaactgtattcaacttaacatcgcgcacattgtatgtgaaatactataattctaatcgtattgctgaattacaattaactgaggagttattaaatagcgacgatttagttatatttgatccgattacgcaaggattgtctaccgataaagtaaat

SEQ ID NO: 35760 - DNA, 1560 bp, Staphylococcus haemolyticus
ttgaaaaagcgcatattctattcactttctatgtgcgcgatgcttatgttaagtggctgtgctcagcatcataatgacaacaaagaggttaaagtctcactacctcgtgaatttaatacaaatcaactagatgcacaaggctttgatgcgcctatgcctgtgtacaatgctatctatcaaccgcttgtaacttatggtaaaaatggcaagattgaaccaggtcttgctacatcttgggaagcttcagaagacggtaaacactacctatttcatttaaagaagaatgtaaaattcaatgatgggtctgattttgatgcatcggctgttaaattctcaattgaacgtgcgaaggcaacggatacaactgaccctatggaaacgttagataaattaaaatcaatcacaataaaagataaacacactgttgagattgagttaaaatcaccgtcaaaccaagtattaaatgaattatctcaagttagaccgcttcgcattatgagtccacacgctgttaaaggtggcaatacaactggtaaatttgaaaaagcaattggcacaggtccattcaaagtagcagattcaacaaatgaaactgtgagttttcaacctaatacatattatcgcaatggacatccacttaattacaatctaactttccaatctatagaagatagtgattcaagacacttagcgatcgagagtcactctattgatattacaggtggttcattaggtcagatgacaccacaacaagtgaaagaatctcatagaaacaaagcactttctgtacatacgtcgccaagtacagaaacgcaatttatgggatttaatccacagcataaaatcttacaagataagacaatgcgagaggcgattagtaaagcgattaacacagacgacctatcgtcagataagaaactgaagggtctatttcaacagaatgttcaatacgttaatgctcacaatcaacctgaccatgtttactcgccttcgacttctaaatcgttaatctgctctttaggttataagatgaataatgatggttatttcgaaaaggatgatcacatactttcacttaaactcgcactccaaacggatgaatttccagaatggaagacgaaagctgaaatcatgcagcaagaccttaaaaaagtaggaattaaactcgatattaatattttagattcacaaacgtattatgaaactttaacggtgcgtaaagattttgatctcatttattatcgtacatatacaaatgcgctaatgccatacaatttcttgaatgcacgttttaaacaagatggctcacgccctggcgtattcgcaaacgatacaaccttaacgtctatgattaagcaatttccgacgatgatcaacatgcatgaccgacaacgcgcatttaataaactatcgtcttatattgatcagcaatatctcatagttcctatttcatatcctaatgagacctttgtgacaagtcctaaaatcagacaattcgagttctcaggacaaacagatgcaccaataaattacgataagttgaaggtgtctaataatgac

SEQ ID NO: 35761 - DNA, 600 bp, Staphylococcus haemolyticus
atgaagaattggattaatcgattgatgacgatacttggtgtcatactcatcttagtagcagtgtatctatttgctaaaccgcatatcgataattatttacatgaaaaagataacgacaacaaaatagaacaatatgataaacaggataagtctagcaataaacaaacaccaaccatccctaaggataaaactaaaatggcagggtatatatcagtgccagatgcagagattaaagaaccagtgtatcctggaccagctacaccagaacagttaaatcgtggtgtaagtttcgctgagaaagatgaatcgctaagtgatcaaaatatatcaatcgcaggtcatacatttaccgatagaccacattaccaattcacaaacttaaaagcagctaaaaaaggtagcaaagtgtacttcaagataggaaatgaaacacgcgaatataaaatgactagtatacgtgatgttaatccagacgaagttgaagtattagatgaacacaaaggtgaaaagaatcaattaacattaatcacatgtgatgattacaatgaacaaaccggtgtttgggaaaaacgtaaaatctttgtggcgaaacaagttaat

SEQ ID NO: 35762 - DNA, 864 bp, Staphylococcus haemolyticus
atgtataaaatagctgtagacataggcggaactaatattaaagtggcagtcattaatgatgacttagagatgattgactataaaaagattaaaacgccagacaatttccatattcgtatcgtggatgaaacatataaattagtagaaggctttgtaaatcaatatcaacttaaaaatccatttatcggtatttctagtgctggtgtcgtagattcagatttaggtcaaattatttacacggggccaaccattccaaattatgacggtacacaattcttcgatgtcttcaaagatttatcggatgatatcgctgtttataatgatgtagatgcggcattgttaggagaacttaaacttcatcgttatgaagaagatcatatattttgtttaactttgggaacaggtattggtggtgcattttacagtgaagcttctggtatttatcaaggttcacgtcaccgtgccaatgaaattggttacttactctatcgtgaagaagatggtaaaacatatgagcaacgtgcctcaacatcagcacttaaaaatttaatgactaaatatcaatttgaatatggtacagatgttcctaaaatatttgatttagcagaggaaggaaatgaagaagcacttaatattctcaatgaatggagtaattatgttgctgaaggaattgctcaaattcaaattatttatgatccaggcttgattcttattggtggtggtatttcatctcaaggagaaacacttctcaaatatatagaacctaagattcatcattatttaccttctgactatggcattgctaagatacaaacaactcaaacaaagaatcatgctgctttattcggtgcaatcactaaacag

SEQ ID NO: 35763 - DNA, 804 bp, Staphylococcus haemolyticus
atgaaatttgaaaatcgtattcaacgaagtcgtcatgtattaacgaaaatggataaaaaaattattgaatatatacaaacacatgaacttgatgaaaatttctcaacaattaattccttagcttatgctattgggacatcacctgctaccattacacgatttagtgggaaattaaattatgccaactttcaagatatgaagtttaatttgcaacacgaaaaatcagaaaaagtagtagaaaatgcaccgcttgttcagctcattcatcgatatcatcaaaatattatccaacaaacgggtgaatttatttccgaggaaaagattaaacgtctagcacacaatttgaaaacgtgtagacaagtcaatttcgcaggattaggaagttcgggattaacgacaagtgaattttactatcgcacaatgcgtatgggtattaaaggctctgtctcaacagatgcgcatcaaatgaagatatctgcgtcgctactttcatcacgagacatgtttgtcgctatttcaaatagtggggaaacgttagagttaattgaagctgcgaagattgcccgtaatcaaggggcttatgtagtcgtcataacgaatttcgaaggtagtgcgcttactaagaatgcagatttagtattaattacgacggctcaatcaagtaataatgactcaaaattcatcaactcacaaatcgcaactttatttttattagatatcgtgagttatttattacttaatgacacacatatgcatcatgtgtatcaacaaacacgagacgtcatattaggaaatgagaaagaa

SEQ ID NO: 35764 - DNA, 726 bp, Staphylococcus haemolyticus
atgaagataacgaacttagtagataaaaaattggcgagtgattatgttgcaattgaactattgaagttaattaaagataagcctgatgctatattaggacttgctactggtggcacgatgacggatgtctatccccgcttttcagaattgctatcagccaatcacgttgatttagcaaatgttcaaacattcaatttagatgaatatgtagggttagaacctgaacatgctcaaagttatcatacgtatatgcatcaattattatttgatcataatgctagttggaatgccgataacattcatattcctcaaggccatgttgatgatttagagcgtgaggcacgtcgttatgagaatcaattgaaacaaattggtcaacccgacattcaattattgggtattggtgaaaatggacacatcggattcaatgagcctggcacatcttttgaaagtgaaacgcgtgtggttgatttaactgaatcaacgattaatgctaacagtgttcattttgatcatattgatgatgtacctaaacaagccgtttctatgggattgaattctattatgcgtgcgaaacgaattatcttattagcatttggagaacgtaaacgtgatgcaattcatcaactcttgaatggtgaaacaaatgaatcattgcctgcatctatcttgcatcaacatcctaatgtagaaatcattgttgatgacactattttcaatcgttta

SEQ ID NO: 35765 - DNA, 1155 bp, Staphylococcus haemolyticus
atgtcaacaaactatgtcattacaaatggtaaaatttatacggaaaagcaagttattgaaaatggatatcttgtagtagaagatggcaaaataagtgatattcaacaaggaacgtatactggagaattagaacaaatcgacgtgaaaggtcaaaatgtattaccaggtttcatagatattcacattcatggtggctatggtgaggacgcaatggatgcttcttatgacgggttaaaacatttggctgaacaattattatcagagggaacaacaacattcttagcaacgacgatgacgcaatcggacgctaatattgaaaaggcattgaaaaacattgtggcatatcaagctgatcaacaacgaggagaagcggctgaagtaggtggtgttcatttagaaggaccatttatttcagagcataaagttggcgcgcaaaatcctaaatatgtgcaacgtccatctgcgtcaaagattcaacatttccaagaagttgcgaatcagcaaatcaaaattattacctttgcgcctgaagttgaaggcgcacatgatacacttaatcaattgcatgaagatattatcttctcaatggggcatactgtggcaacgtttgatgaagcgaatgaagcggtggaccatggtgcaaaacatgtaacacatctatataatgcagctacaccatttgaacatcgcgatccaggtgtctttggtgcggcgtggacgaatgaacaattaaatacggaaattatagttgatggtattcattcacatcctgcttctgtacatattgcttataagcaaaaaggaaatgaacacatgtatctcatcactgatgcgatgcgtgcgaaaggaatggaagacggtgaatatgatttaggcggacagaatgtcatcgttaaaggaaaagaggctcgcctagcaagtggcgctttagcaggtagcatcttgaaaatgaatgacggtttgtataatttaattgaatatacacatgattcattagagaatttatggcgtgtaacgagtttgaatcaagccatcgcattaaaaattgatgaccataaaggtagtttagccatcggtaaagatgctgatatcgtagtagtagatgatacgattcgtgttgataaaacaatcaaatcaggggttgtacatcaatat

SEQ ID NO: 35766 - DNA, 153 bp, Staphylococcus haemolyticus
atggcagttaaaattcgtttaactcgtttaggttcaaaaagaaatccattctatcgtatcgtagtagcagacgcacgttcaccacgtgatggtcgtattatcgaacaaatcggtacttacaacccagctagtgttaatgctccagaagttaaa

SEQ ID NO: 35767 - DNA, 378 bp, Staphylococcus haemolyticus
atttcccttgctaaaagagaagggcaaggatgcgtatctttaaagtcaattgctgaagaaaacagtttgagtgatttatatctcgaacaattagttggtcctttaagaaatgctggtttaattcgaagtgttcgtggtgccaaaggtggttatcaacttagagtaccagctgacgaaattaaagcaggcgatattattcgtttactagaaggtcctataacgatagtcgaaagtattgaatcagaaccacctgcacaaaaacagttatggttaagaatgagagatgctgttagagaagtattagataatactactttaaaatatctagcagactatgcgaaaactgatgataaacttgatggttacatgttttatatt

SEQ ID NO: 35768 - DNA, 465 bp, Staphylococcus haemolyticus
ttgggtaatgtgatgtttgcgtctatttatttagctacagatatactaaatgacatatatggtcgtaaagttgcgaagagagctgtatggttaggattctcttctacattggttatgattattgttatgcaaatgtcactacattttatacctgcacctgaagatatggctcaaaaatcattatcaacaatatttgatttagtgccaagaattgcagtaggttccattattgcgtatattattggacaacacgtcgatgtatttattttctctacaattaaaaaggtattcagctcagataaaacatttatcattcgtgcttatggtagtaccatgttaagttcaattattgacacagcactgtttgtcacaattgcgtttgcaggaactttaccaaatatggttgtattcgaaatattcattacaacttatttattaaaacttatttctactatatttaatgta

SEQ ID NO: 35769 - DNA, 430 bp, Staphylococcus haemolyticus
gcgattaaccaagatcctaacgatggtttcactttgttagatggtacggcattgaccgaacagttattaaatgtgcgtacacatacacttattactcaggtatatagtgctatggttgcagcagatattaaaattactttgatggaacattatccagatgattttccagtcaaaatagtgactggcgcacatagcactggcgcctctgtactagaggtacctctatttgaacttgatcatcacgaagacgcatttaataatttaacaagtgtctacgttcctaaagtgacaaatgatgaagtattatatcgaaactttgattatgcagtagagattatagatcgcttagtcgatgatgaaactggttgtccatgggatcgtgttcaaactcatgcctccctcaaacgctatctattggaagaaagctttg

SEQ ID NO: 35770 - DNA, 459 bp, Staphylococcus haemolyticus
atgccagaagagaaggataagacagtatacagacgacaagcagacgcgcagacaccttctaaacgacggaatcagaaaaagctacgtaaattaccttttatcattttgattatattgatattgctaatcgcagctattatctatattgtccatggttatcgtagtggtgttaattacgctgagaaacatgcaaaagatatcaaagtacataagtttaatggaccagtaaaaaatgacggtaagatttctgtacttgtgttaggtgctgacaaagctagcggtggtaagtcgcgttcagattccatcatggtagttcaatatgattatattcataagaaaatgaaaatgatgtcagtgatgcgtgatatttatgcggaaatacctggatatcagaattataaaattaatgcagcctattcacttggcggacctgaacttcttagaaagactttaaataag

SEQ ID NO: 35771 - DNA, 454 bp, Staphylococcus haemolyticus
gggtctttccgtcctgtcgcgggtaacctgcatcttcacaggtactatgatttcaccgagtctctcgttgagacagtgcccaaatcgttacgcctttcgtgcgggtcggaacttacccgacaaggaatttcgctaccttaggaccgttatagttacggccgccgtttactggggcttcgattcgtagcttcgcagaagctaaccactcctcttaaccttccagcaccgggcaggcgtcagcccctatacatcaccttacggtttagcagagacctgtgtttttgataaacagtcgcttgggcctattcactgcggctcttctgggcttgcaccctaaagagcaccccttctcccgaagttacggggtcattttgccgagttccttaacgagagttcgctcgctcaccttagaattctcatcttgactacctgtgtcggtttgcggtacgggcac

SEQ ID NO: 35772 - DNA, 1266 bp, Staphylococcus haemolyticus
atgataaaagatataaaaaatgttttgaatttgataaaaatgaaaaatagtgaggatgtcagaacgaataaagattgggacctaagtgacaagtattcatcaattattgaagaattattgcccaaacagctagaaaatttatcttataataaagacctttcaactactggaagtgttggaaagggaaattatagtatggttccatgggttactacctttaacactaatataactaaaagcactcaaaaaggttactacattgtttatttatttcaccccgaaggcaaagaggtatatctctctttaaatcaaggttggagcgaaattaaagaaaaaactttgggtgtgaaaaaagctaaagaaaaagcacttgccctttccaagtatttagcgtcatatctggatgataataactttgaagtaggtagattttattattcaaataataaggatagtaaatatgataaatcggatttgccaagtggatatgctcacggttcaattatttataagtattatgattttgagactgaagtgtataccgaggatatgatgatttcagactacaaagaaatgattaaattacttaacggattagtaaataaaattaatataaatgaatataacgctttattattaaatattaatgaaatagtaacaataatagagactaaagaacttaatgaaagtattaatgaaaataaaaatattcaaatgtctcaaatagataagcccaaagcttccacatatgcaaaaaaatataagacctctactaaaaaacaaactgatgacgacattgaaaaagcccataaagaaaacaaaataacgggacaaattggagaaaaattagcttatcaatattttatgaatttaattgaaaaaaatatatctgataaaaatttacaagaacaatttattaatacaattgatacatctatgggtgaactgcacggatatggatatgacatgactgcttttgatcctcaaaatttagatagtccagttgaaaaatatattgaaattaaagccactaaatctaaaaaagaggatgaacctttttacttatcattaaatgaaatatatgccatgtatgagaaccctcaaaaatatttgatattcagaattataggattaaatagtaaaacacctaagttttatattattgatccatatgaaaaccatgatgaatttgaaagtgtagaggatttaatagagaaagtctttaatgccgagtgtattcaatttaaaatatttaatgttaaacca

SEQ ID NO: 35773 - DNA, 1053 bp, Staphylococcus haemolyticus
atgaatttagcatggaaagaaataaaattttacagatttcgttatacattaatcatgttaattatatttctattaggaagcatggtgttatttattagtggattagctcaaggcttagcacgagaaaatatatcatatttaaataatatgccagctgaacattacatagtcgaagataataaggaaccgaagttagaaagttctcagttgaaccaatcacaacaaaacaaaatagagaagatcattcatgaaaatgcaactcaaatggggacgcaaacacttaaaataaaccaacaagatcaagatgttatcacattaaatacgcctaaacatcttacgccaaaacttgtaagtggtaattatccaaaaaaacagaatgaaatagctattagtgagaaactgactggaaatgacttgaaagttggagatactgtaacttttaaaggacatcatcataactataaaataagcggcataatgaatgaatcgatgtactcacatagttcaatgatattaatgaataaagaagcgtttaagtcattgaataaacaagtatcaacattttatccggttgacaaaatcaacaaagataacaaagaatcacttaaacaaattaaaggaataaaggttgtaaatgaaaaggcattaactgataacattgctagttatcaagcagaacaaatgccgcttaatttaatgattattagtctatttgtgattacagcaattgttttaagtgcgttcttctatgtgatgacgattcaaaaaatacctcaaataggcattcttaaagccataggtattaaaacgaaacatttattaactgcacttttactacaaattattttaacaacaatggtaggtgttattttagcattttccgtcatacttatattaaatgcctttatgcctgtaactatgccgttttatctaagttatagtcaggtgttattaatgatagtcgtatttctaattgtagggttaatcggtgcattattatcctttataaaagttctaaaagtagatcctatagaagcaattggaggtatggaa

SEQ ID NO: 35774 - DNA, 336 bp, Staphylococcus haemolyticus
atggcagatgtttctttaaagctttcagcaaaagatatctatgaaaaagatttcgaaaaaactatggcccgtggttatcgtcgtgaggaagtagatgcttttttagatgatatcattacagattatcaaaaaatggctgatatgaataatgaagttgtaaaattgtctgaagaaaataacaaattaaaaaaagaagttgaagaattaagactaagagtggcaacatcaagaccttctgacaataaatcattttcttcaaacaactcaagttcatcaaacaataatgttgatattttgaaacgaatttcaaacttagaaaaagctgtttttggaaag

SEQ ID NO: 35775 - DNA, 408 bp, Staphylococcus haemolyticus
ggtacaggaatatcaacctgttatccatcgcctacgcctgtcggcctcagcttaggacccgactaacccagagcggacgagccttcctctggaaaccttagtcaatcggtggacgggattctcacccgtctttcgctactcacaccggcattctcacttctaagcgctccacatgtccttgcgatcatgcttcaacgcccttagaacgctctcctaccattgtcctacggacaatccacagcttcggtaatatgtttagccccggtacattttcggcgcagtgtcactcgactagtgagctattacgcactctttaaatgatggctgcttctaagccaacatcctagttgtctgggcaacgccacatccttttccacttaacatatattttgggaccttagctggtgg

SEQ ID NO: 35776 - DNA, 927 bp, Staphylococcus haemolyticus
atgataaataataaaaatgaaaaagtatcaattacaatcgtaaatggctttttaggaagtggtaaaactacatttctaaaacattatatagagcaattattaaaaaaagatgagaaaataacaattataatgaatgaatttggatcttttgacgttgatagtttattacttggaaatgatgtttccattcattctttaattaatggctgcgtatgctgtgatttaaataacgatttagttaaccaattgaaacagttgattgatcaaacagatacgagtcatattcttatagaagcaactggtttagcgcatccctttgagatttattcggcttgccaagaccctacaataataaaaaatgttcatgaaccaacaattattggtattgtagatgcacaaagattcactaaaaaagaagtctatagtccttcaacaactcagttattagaagaacaattacgttatagtgatacgataatactaaataaaactgatttaataggtgaagaagcacttaacgaagttaaagaaaatttaaataaactcaatccacaagcgcctataattattaccacttatagtcaatttaatgatgaacagatcaacggtaaagtgattcaacataatgaaattcagcataaacatatacatcatcatggaattcagtcgatgcagtatacatttacagcagcaatagaccgtcagttattttatcaatttattatgcgtttgccagatagtgtacttcgcttaaaaggatttgtgaagtttagagatctaccagaagtaacatatgaatttcaatatgcaatgggcttacctgattatggcattatctataaagacgtaccgatgactatcgttatcattggagagtcattggatacagatagattacgtaatcaacttgatatgattcaattcaca

SEQ ID NO: 35777 - DNA, 165 bp, Staphylococcus haemolyticus
atgctttcagcacttatcccgtccatacatagctacccagctatgccgttggcacgacaactggtacaccagaggtatgtccatcccggtcctctcgtactaaggacagctcctctcaaatttccctacgccacgacggataggggacgaactgtctcacgacgt

SEQ ID NO: 35778 - DNA, 237 bp, Staphylococcus haemolyticus
atggctgataataataatcaaaatggacaagatgcaagtcaacaaatcattgacttcattaaatcatataaatggcgtatcattggtttctttgcatttttaattatagcaatcttattcctaactttaggattttggaaaacaattttggttatcgtattatgtttaataggaattggtgttgggtatattaaagaccgtacacaggatttcatgaatttcttaaatagatggagt

SEQ ID NO: 35779 - DNA, 2262 bp, Staphylococcus haemolyticus
ttgaatactaattatgaaatcacgttcgacactaaaaaggaagatatagcttctgattatttatcgctaaatttaattttaacaggtaacgtcacatgtcagagtgacaatcaaaataagcactatcatgttggagatttaatattaatcaatagctatcaaaactttttgattttagaagattcagatgtaagttatatgtcgctccgactgtctaataattatttttctcattacattgaagataagaatatttattttcattttgaagaagtatctaaaaaaatacatgatgatatcaaaacattgttagctaaaatagggattacttatttaagaaaagggaagtttcatcaattacacatggatcaaatgatgattcaattaattgaaatgttggtgaaatttattccctatcaatctagacaagagttgattcatgaacataataaagatgatgtatttgctagtctcgcttcagaatttattaatcaacattttatggaacgtattggtttggatgatttgtcagactatattaatttgtctagttcgtacacttctagattattcacgaaaaaattaggaacgtcgtttaatagttatcttaataaagtgagaacaagaaatgctgaacatgatttgaaatatagtgatatttcaattactgacatagcaatgaagaatggtttttctaattcaacgtcattagcgaaacattttaaattatggtatcacatgacaccgggtgattatcgtaaggaatttcaagttaaagacttgaatcagttgaaaatgaaacctctaaataagcaaagtattaagagatatattcaatatttgtcgtcatatgtgaataatcaaatggatgtcgtcattcattcggcagaaccccaaaaagaaatcgatattcaattagaagacaggcttggatatttaaataaatacaatcatatcgttcaaattggaagtatcgtcaatatgcgcgtgcatcgttatagagagcaaatattggaagtgaaagatagagttggtttagatactgtattggtacaagatttagtaaatgatacttcttggagagaacatgtcgttgcatctgatgaaattattccgcatagccaccaatatatgaccttagatgagtgtttgttatttttaatgaaccatcaaatacatttgagtattcgtttgagaccgccacatagtgcaacagcatttcaagcgtattgtgatacatgggtacagattcttaaacattttataaatatgacaacacatagcagtagaatgcaactttcagtaattatagacgctatagatctgaaacagtacattcaattatatgaagtatttaatcgttatatatctaacgtgaaatttattgtaaattatcaagatttcagtaatcaaaaaaataacttgaagttactttttaaagatcattctgaaaaagttaatatgttagcgtttgaagctaatcagaatgacgtagtcaatttagaagtttctgaagatatacagtatcagtatgctaaaaatcatatcaatgagacagtagaagcgttagtcgaatggctaccgaaaaagcagaaagatatgccactaatgttactcaactggaataccttaactggtaattcaaatcttactaatggcgaatattttagagcgggtattatatttaaacaattattagatattaatgaaaaagtttgtacggtggggtattggctgaattatgaattacatcaaaaatatggtgtcatgaatgaacatcaattaatgggaattgacttatatcatcaatttgatggtaaacgccctgcattctttacaagtaatttctttagaatgttgcaaaataatgtaagatttagaaatgaagaatgtatggttgttggcgacgatacacatcttcaaattgttgtatgggatgcggatcattacaatccttattacacgatttcagagcagccgaatgtaatggaaaagagaaattttaaaatagaaattaatcaacttcaaagtgggctatataaaattaaacactacacgttagataaagagaacggtgctttatatcgggtatggcaacaacacaatacaacatatggtatggatcaggaaacgattgattatgttaatcgtatttcatatcctaaattggatattgcagaagtggaggtagaagaaacacttacctatcatttaaaagtaatgacgaattccattcatattatagaagtgaataagtatgta

SEQ ID NO: 35780 - DNA, 345 bp, Staphylococcus haemolyticus
atgtctgatattacttcaagtgatgatggtgacttcaagaaaccagattcagttaacggctcaagtgctgataatttatcagtaagtggtcatccagataacaacacgactaatcgtgaagtaaatggtagcagtggctcaagttcatcaaatagctcaaataattcaaataactcaagtaattctaatactagtaacactaataatagtggcaatactaattcaggaactacaaacaataattcaatcttcatatacttgctttttcgtgtgggctgtctgtctaaaaagtttaagtgtaatgagtcccttagaaacattaagaaaacgttgactaaactgatt

SEQ ID NO: 35781 - DNA, 366 bp, Staphylococcus haemolyticus; identical to SEQ ID NO: 34425

SEQ ID NO: 35782 - DNA, 770 bp, Staphylococcus haemolyticus
atgtttaaaaagctaataaaaagaaataagactaaaatcagtcataacgatgatttagatttacataatttacctgaacatgtagcgattatcatggacggaaatggacgttgggccaaaaagcgtaaaatgcctagaattaaaggacattacgaaggtatgcaaaccattaaaactgtaacgcgagaagcaagtgatttgggtattaaatacttaacactatacgctttttcaactgaaaatggtctagacctgaaaatgaagttaattatatcatgaatttgcctgttaattttttaaaaacatttttacccgaactcattgaaaaaaatgttcaaatagaaacgattggatttctagatgcagttcctaaatcgacgattgaagcaatagaacatgcaaaagataaaacaagaaataatacaggtctgaaattaatatttgccatcaattatggtggacgagctgaaattgttcagagtatgaaatcaatttatgatgaacttcaacgcaatggtcaggacagtaaagatattgatgaatcaatgattaacaagcatttaatgacacattcatacccagatcctgagttattaattcgcacttctggtgaacaacgtattagtaatttccttatttggcagtcttcttatagtgaatttatattcaatgagaaattgtggccagactttgacggtgaagaatttaaaaattgcttaaaaatatatcaatctcgccaaagacgctttggagggttaagtaaggagtag

SEQ ID NO: 35783 - DNA, 1158 bp, Staphylococcus haemolyticus
atggcttaccaaattaagcatgaaaaacttttatcattgaagcatcaatttgaaacactaataaatgaatttaaaagctacactaattatgatgaaactaataaatttgaacagtgctttaagcaatatgaacaaatagtaactgattatgtatctaagagcgaagtattagagaaagaaataaatcaaacaaaacaacaaattgaaatcgaaacaaataatttaaacaataataaattagctattaaagaacttgaacaagaaattagtggtcatagcgatgaaattaatcaagaaatgaagcgaattggactaaattcatacaaggatgttgaaattttattatctaaattagaaaacaaagagcaaattgaaatgaaaattcagcaatatgagcatgatcatcaaaaacttactttagagattgaacgactatctaaacttacaaaagataataagtctgaatcagttgaaaaattggaagctacaaaaactgaaattgaatccaactataataagtacgttgaagcgagtgctacaattcaatatcaagtacagaataataaagacaaatttaatagtataatggatcatataaattatttagagaaagaattaaaagaacaacaagaaatctttgaattatcagaggtactatcaggaaaaaatagtaaaaaattgacgcttgaaaactatgtgcttatttattacttagaacgaatcatccatcaagcaaatattcgtttggaacgcatgagtggggaaagatatcagctaaaaagaagagaatctatatctcatggttatagtggtttagaaattgaagtgtttgattttcattcaaataaatctagacatattagttcattatcaggtggtgaaacgttccaagcatctctagctttagcgctaggattgagtgaagtagttcaacaagaatctggaggtattacccttgagtcaatgtttatagatgaaggctttggtacgttagatcaagaaacattagaaactgctttagatactttggtgaaattaaaaacttcaggcaggatggttggtatcatatctcacgttagtgaacttaaacaacgcattccattaatacttgaggtaacatcgaatcaatatcaaagtcatactcgatttaagtggaat

SEQ ID NO: 35784 - DNA, 804 bp, Staphylococcus haemolyticus
atgaagcgtagtttaggagctaaaatgggagagatttcatctttaatttacttaatattttcatattatggtttgtatttaacatggcaagatgatagctttttattaaatttatttattgtaatcatttttacatttgcatatgctagtttaattctttttcatgaagcattaagccatcgtatcaatttaatgttattttttattcattttctagcgattatttactttgtatatgcatacaatccaacattgagtttatttttcttctttagtgcatttgctataccatttttatttaaaaggggagtaaaatcaatagagtttatgttattaataagctcaatgattacatgtatcatcataacgattatacaaacgaatcacttttatgtcgtgagtattattatttattatattgttattttagcaatattatttggtaattttaaaataatgaaagagagacaatatcgtcaacaaattgaagaaaaaaataaatatattaatattttgattgcggaacaagaacgtaatcgaataggtcaagacttacatgacacgttaggacatgtatttgcaagtttgagtgttaaatcagaattagctgcaaaactaatcgataaagatccgatagcagctaagaaagaaatactaaatataaacgaaatttcgaaagatacattagagaaagtaagacatattattgaaaatttaaaagttcaaacttttgaagaagaaattcaatctatagaacaattcttaaaggatgcaaatattcactttaactttgaaaatataaga

SEQ ID NO: 35785 - DNA, 1134 bp, Staphylococcus haemolyticus
gtgtctaaaaataattttagagatgatttcgaaaaaaatcgtcagtctattaattctgatgatcaattcgaagataatacaaacgagtttgatgaaaattcaaatgagtccaatgattttgataatcaatcagaccaacaattcccacctagaaacgcacaaagacgtcaaagaagacgtaaccaagctactaataaaaacagaaaatttgataatcaaaattctgattcaaatgctaatggttcacttgatgatcgacacgatgaagactctttcaatgagttacaacacaatcaacaagaaaatcatttagataacgagccaatacataaggatgataaacgttcttctgaaaaagactttaataatgatgcttcacgtagaaataatcgtcatgaagcatcaaatagaaaacatgataaagactatgataatggtagtttgaatgatgatgatcgtcatcgtcgtaatcatgaagaaggtatcgatgagcgtcaagataatcgaaatcacaaagatcaacaaaacaaaaagtctcgacatggcaaagacgctgcaatagctggaggtgccggagtcgctggagctgctggtgctaaagctgcaaaagacaaacgtaaaaaagatgaacatcatgactcaaaatacaacgaacataaagatgatcgtgatttaaataacgataatcaatttgatcaaaacagaaaacatgataaagaccttcatgacgaccatcgtgacgctaaagataaccattctaaagaagaaccaaaaaaaggtaataaaggtaaaaaagcagcagttggtgcaggtgcagctggtgcggctggtgcagctggagtagctggggtagcagctgcaaaacataaaaaagaccataaaaataataatcataaagataatcatagccataacagagatcatcaagacgatcatagaaatcataaacatgaagatggtaatgatggattccaagctcacaatggtaaaaagaaacgtggtctagctggtattttacttccacttatagctttattacttattctagcagcacttgctatctttattggaatgtatttaaacaacgataaaaaagatagtaaccaagctgataacaaaaccggacaaacttgc

SEQ ID NO: 35786 - DNA, 2016 bp, Staphylococcus haemolyticus
agaaaaaaattatttgatactttagcgcatgtagaaggctctgaaaagtatttacacaaaaactttgttggtgctaaacgattctctattgagggtgttgatacattagttccaatgttacaacataccttaaaacgtgctgctgaaattgaaattaacaatattcaaattggtatggcacacagaggtcgtttaaatgttttaactcacgtgctagaaaaaccatatgaaatgatgatttctgagtttatgcacacagatcctatgaaattcttaccagaagatggcagtcttgaactaactgctggatggacaggagatgtgaagtatcacttaggtggtgtgaagacaacttcttcatatggtattgaacaacgaatttcattagctaataacccaagtcacttggaaattgttgcgccagtggtaattggtaagacacgtgcatcacaagatgacacaaaacacgctggtaaaccaactacagatttccataaaggtatgccaattataattcatggggatgctgcatacccaggacaaggtattaattttgaaacaatgaatttaagtaacctagatggttattcaactggtggtgccttacacatcatcacaaataatagaattggattcactacggaaccagttgatggacgttcaacaacatattcaactgatattgcgaaaggttatgacgtaccaattttacatgtaaacgcagatgatgttgaagcaacaattgaagctattgatattgcaatggaattccgaaaagaatttcataaagattttgtaattgatttagttggctatcgtcgttacgggcataatgaaatggacgaaccttcgattacaaatccacttccatatcataatattcgcaaacatgattcagttgaaattatttatggtaataagttagttgaagacggcgttatttctaaggaacaaatggaagacgtaatggataaagttcaaaaagaaatgcgtgctgctcaagacaaaattgataaatcagataaaatggataatccagatatggaaagacctgagtcattgcaagaacctttacaaagtgatgataaggatttctcagtagatcatcttaaagaaattaatgatgctatgcttacatatcctgaagatttccatgtacttaaaaagctaaataaagttttagaaaaacgtagagagcctttcgaaagtgaaaatggtttagtagactgggctcaagctgagcaacttgcatttgcaacgattgttcaagatggtatatctgttcgattaactggacaagatagtgagcgtggtacattcagtcatagacatgctgtattacacgatgaagaaaatggtgatacattcacaccattacatcacgtgcctaatcaaaaagccacatttgaagttcacaatagtccattatctgaagcagctgtcgttggctttgaatatggctataatgttgaaaataaaaatagcatgaatatttgggaagctcaatacggagacttttctaatatggctcaaatgatgttcgataatttcatgtcatcagcacgtgctaagtggggagaaagaagtggtttaacgctattcttacctcacgcatttgagggtcaaggacctgaacactcttcagcacgtttagaaagattcttacaactagcagctgaaaataatagtacagttgttaacttatctagttcaagtaactatttccatttattaagagcacaagctaaaagtttaggtactgaagctatgagaccattaattgtaatgtctccaaaaagcttattaagaaataaaacagttgctaaaccaatagatcagttcacttcaggtggtttcaaacctattattgtcgaggatggaaataaagagaaagtgactaaacttgtattagcatcaggtaaaatgttcatagatttaaaagaacatttagctaaaaatcctgacgattcaattttattagttgcagttgaccgtttatatccattcccttgaggg

SEQ ID NO: 35787 - DNA, 190 bp, Staphylococcus haemolyticus
atgtctaaatatgatgagcaaattatagttgtaccaagagatatcctttttgaacaagagtcaaatgcttttaacggctttttaactaaaaatgatccacaaggtgaagcgatatttaatactttttctaattatgaagttaaaagacgtggagatatggaagaagaatccttcatataaacaatttaat

SEQ ID NO: 35788 - DNA, 507 bp, Staphylococcus haemolyticus
atgagagtatttttgtacttaatcgttggtgtagtactgttttacattgacagtatcattggacttctaatcccaatgcattttggtcatttcgagtttaattttattcctcatttaattttgttgtatatattgttgataacgatttatcgtggctttggaatcggattaatattcgcaattctgtttggaatcgtaactgatatatatgtcggcagtgtctatggattatatatgtttggttacttagcacttgtcgttatatttgataaatttctcaaagttttttatcgagactatacaatgatttgtattttgagtattattagtattattgttttcgaaatttacgtagcaattatttatggtgtgattggattcgctaatattgatataatcaatttcactttattaagaatgattccaactattatattaaatgtcattttacttattatacttttcccagcttttataaaatttatgaaaaaaactcatatacaagat

SEQ ID NO: 35789 - DNA, 279 bp, Staphylococcus haemolyticus
atgacattatttttaataatagggattttgataccagtagtttatgttcttagactgacaatcaaagaacatacgattggactcaaggaaatgttcacgacaattgttttatctatgataggaattgtcatatttactgtgataggtgtactaattagcggtcaaaatattaatatagcatcattaatttttgcctcgttaattacaggggtaatatggggactattattatcaggtgtatataaattatttaactatctgacacatacatttaaaaaa

SEQ ID NO: 35790 - DNA, 828 bp, Staphylococcus haemolyticus
atgacagtagccgaaaagaaagaatggtatcttgaatatgaaatcacagttaaccgagcaggtttactgggtgatatttcgagtttacttggtatgttaggtataagtatcgttacgattaacggggttgatcaaggtcgacgagggttattaattaaaacggacagtcttgagaaagttaatcgctttgaacatataatcaatgagcttagtgagatagaaattactaaattaagagtacctgaattacgtgatagattggctgttagacatggacgttatattgaacaagacgccgatgataaaaaaacttttcgttttgaacgtgaagatttaggtttattggtagattttttggcagaactttttaaagaggaaggtcataaattaattggtatcagaggtatgccacgtgtcggaaaaacggaatcaatcgtagcaggaagtgtatgtgcgcataagcgatggctatttattagttctacattgattaagcaaactgtacgaagctctcttattaaaggagaatatgattctaaccatgtttatattattgatggcgctgtcactgctagagaatcaaaccctaagcatcaagaattagtgcgtgaagtaatgaccttaccatcaatcaaagtggttgaacatccagatttatttgtggaatcgggtaattatagcatggatgattttgattatattattgaattaagagaaaatgaaaatcaagaaattgaatatgatcaaatgaaacaacaaacagttaaaagtaaaaactcgctagactttggagaagacatgtttggcggaggatttggattttttgaa

SEQ ID NO: 35791 - DNA, 921 bp, Staphylococcus haemolyticus
gtgagtcaacaatcattcaaaattaccgttgaagacggcactatgattgaagtaaaagtagataaggctaagattgcaacatttggtgtcgtccatatctttcacgggatggctgagcatatggatcgatatgaagcacttgtgcaagctttaacacatcaaggatatgatgttattcgacataatcatcgagggcatggtattgatattgatgaaaatgaaagaggtcattacgatgatatgaatatcattgcacaagatgcatatgaaatagctcaaacacttcacggttcaaataacaatattccatatatcgttttgggacattcaatgggctcaattattgcgcgtttatttgtagagaaatatccagacattgcgcaaggtttgattctcactggtactggtcaatatccaaaatataaagggataccagccatcatcgttttaaaattaataactttaatttttgggaagcgtagtcgcctagaatgggtaaatcaatttgtttataaatcgtttaataaaaagatagaccaacctgaaacaagtagtgattggctatcatctaaacgcgatgaaattaataaatttgttaaggatgattacactggtttcttagtgtcaaatcaattaatttaccaaaccgttaagaatatgatacgtacggcaaataataatcaactaaaaaaaatgaatgaacaattaccaatacttcttatttctggtaaggatgatccatttggagattatggtaaaggtatacgtaaattaggaaagaaattcaaacgtgctggaataaatcatataacagtccaactttatgcaaatagaagacatgaaattttatttgaagatgaaaaagaaatgatttggagtcatatgtttgaatggatccaaaaacaagtgttaaagaaaaaa

SEQ ID NO: 35792 - DNA, 528 bp, Staphylococcus haemolyticus
atgacatcaaaagccgatttatctctatctgtgtttactaatgaacactataaaagcataaaatataccaatagtacctttagaaacgctatgtacgacgatttagaaattaataagagttattttaaaaactgtgacttttctgagggcatatttaaaaatgttcataccgtgtctaacactaaattaattaattgtgactttagcagtagtatttttgtaaacattaatttctttaaaacgttaatgagtaaagtaaactacagtgtaactacattcgatgatagtcaattcaacgtactaactatagaacagacttccttcaaagactgtagcttacgcaacgtcactttcaacgatgttgtcttaaagaaagtcgtgtttgaaaatgtggcattagatttatgtagcctagacaatgttaaaattaaagattgtgtatttaaaaatgtttcaatcaacaattcagcaatttctgagaaagtgatgaaagaattacgcaaacaagacgttcgttttgaaaacatg

SEQ ID NO: 35793 - DNA, 387 bp, Staphylococcus haemolyticus
atgataaagtgtgtttgtttagtggaggaaacagagaaccaaatcttattagtacaagtaagaaatagagagaagtattatttcccgggtggtaaaattgatgaaggtgaaacgcaattagaagcgatacaaagggaagtaaaagaggaactacaattagagtttccacaagaggatttcacatatattggaacggtcataggcgatgcatacccgcaaacgaacatgctaacagaactaaatggatttaaacttcaacaagaaattgactggaataacgttgaaattgataatgaaattactgatatacgttggttcgataaatctgatacaacgttaatagcacccgctgttataaagtggattgaaacattttcagagagaaag

SEQ ID NO: 35794 - DNA, 401 bp, Staphylococcus haemolyticus
ttaacagctggtcaaggattttattctttaattaataatcatgaaaatttattgaaagataataaatattttaatataaatgaacaaatgacagatgagttttctttaaatgcagaacacatgatttattatatatatggagttttacactctgaaaagtatcttgagaaatatggtagtgatttatctaaagttttacctaaaataccaaatttagtgaataaagaattagtagttgatatagggaaatatttatttacattacattccaattatgaagaagcaccaatttataaaggtgtagatgtaaatattagtggtaaagcaaattatcaagtaaaaagcatgaaatttgaaaatagagagaaaaaagatactattatatttgatgaaacaataac

SEQ ID NO: 35795 - DNA, 1049 bp, Staphylococcus haemolyticus
atgaaccactacttaagagctatcggctcactgcttatactagtttatagcatcttaaccgcgtactcatcgtatagatcaagtatttgttaatattatactatctcctaggtatggattatactcaaatttttgggatacctgtttttctatttttaaatttagtcatcattttactttgtattatagtaggttcaattctcgcatataaaattaatcaacaaaatcagtggattaagtcgcaaattgagcatgccattgaaggagaaacagtaggtatcaatgatcaaaacattgagctctataacgaaaccatagatctttatcaaacattagttcctctaaatcaagagttgcaccgtttacgaatgaaaacgcaaaacttaactaatgaaaattacaatatgaatgatgtcaaagttaagaaaatcattgagaatgaacgacagagattagctcgcgagttacatgactctgtaagtcaacaactttttgcagcaagtatgatgttatctgctataaaagaaacaaaattagaggcaccgcttgatcaacaaataccagttttagagaaaatggttcaggaatctcaacttgaaatgcgcgcattattacttcatttgagacctttaggactaaaagataaatcactaggtgaaggtatcaaagatttagttattgatttgcaaaagaaagtgcctatgaaagtcatacacgatattcaagatttcaaggttcctaaaggtatagaagatcatttatttagaattacacaagaggctatatcaaatacgttaagacattctaatggaactaaagtcacagtggaattatttaaccaacaagattatctattacttcgaattcaagataatggtaagggattcaatgttgacgagaaattagaacaaagttatggattaaaaaatatgagagaacgcgcattagaaattggtgcgacattccatattgtttcgttaccggattctggaacgagaatagaagttaaagcaccattaaatagggaggatgataataatgacgattaa

SEQ ID NO: 35796 - DNA, 636 bp, Staphylococcus haemolyticus
gaagtaaacgatgataatcttttcatgcatagtttatcgagtgaaagtgttaaacgaatcgtatctttagcacaacagcaagaaatatattatgaagttttcccatttaatggatcaagaattgcgctaaatgaagataaagcatggatgcaagagatgattaaaggtgatacgcctccaaatcgtgtaagcgaaagtgaatggaaatcaagattagatgcaatgtctggtaagattgattggaaagaggacatacctgaagatgactatgctaaaatatatttatttacgccaaacttagaaaaaataacaacttttagagatgaacttattcaaaatcaagtgcttttaaacattagtgtttctaattcatcaagatttaacgctgaaactatggcatatcataccgataaaggaacgggtattaaagaaatgatagaacactttaatattaaacaagaagacacgcttgtaataggggatagtgataatgatagagctatgtttgcatttggtggttatagcgtcgcaatgaaaaatgcacgacaagaaatacaggaaattactaatgaagtgacacaattcactaatgaagaagatggtgctgcattattcttagaaagcaaattcctaaaa

SEQ ID NO: 35797 - DNA, 816 bp, Staphylococcus haemolyticus
atgaagataggtacaatttcagatttacatattgatcgacatcctaaactggaaccacaagcatatcttgatgcactcgtatatattgtggaacaaagaaatattgaattattattaattgcaggagatatgtctaatgattatctgcaaagttaccaatttattcaagacttaaaagaaaaatgtcgtataccaatcttattcgtccctggtaatcatgactattggacttcagaagcatcactcagttcaaagcaaatttatgaattttatgctagcaagccagactgtctaattggcaaaccgtatgtcgttaatgaccattgggcaatagtaggacatactgcatggtatgactatagctatgctgatgacaaatttgatttggatcgaattaaaagagggaaatattacggtgccacatggcaagataaagtgaaaattgattgggatattgatgatagagtgttatctaaagaggcggctaaacaaatacaagaagacttagatcaggttaaagataaacatattatcttaatgactcacattgtcacgcatcctaaatttatagtacctatgccgcatcgcatttttgacttctttaatgcttatataggtactaaggactttgatgaattttattcaacctattccatccgttatagcattatggggcatgtgcattttcgaaagatgattaatgaaaatggcatcacatatatttgtccctgcttagggtatcaacgacaatggagaacgagtgatattaatcaagaaatcaataacgctttagtatcatttgatattagtgatgaa

SEQ ID NO: 35798 - DNA, 834 bp, Staphylococcus haemolyticus
atggaaacattagaattacaaggcgctaaattacgttatcacaaagtgggcaatggtcctgttatcatcttcatccctggtgcaaacggaactggagatatctttatgccacttgcacaacaattaaaagataaattcactgttgtcgctgtagatcgacgtggatatggacaaagtgaattaactgaaccactacctgaggaagcaatcaatccagatagtcgttaccgagttaaacgtgatgcgcaagatatcgctgaattggcaaaatcattaagtgatgagccagtatatgtattaggttcaagctccggttcaatcgtagcaatgcatgttttaaaagaacatcctgaagttgttaaaaaaattgcattccacgaaccaccaattaacacattcttaccagatgcgaaatattggcaagataaaaacgctgaaatcattgatattgcgattaatgaaggtatgcctcaagcaatgaaattgtttggtgaaacgttacaaattagtaaattagaccaacaatacatgtcaaaaccagcagaagctgaaaatgatgctgacagtaaaaaacgtttcgatgaaatgttgggttggttcaaatatgaaattcgtcaatatacagaatctgatatttcaattgatggtttcaaaaaacataaagacatcattactttattaaatgggacagcttcaaaaggttcattcccacaagaagttaacttcttcatttctgaagaaactggcaccaaaattatcgacattccaggtggtcacttaggatacgttcaagactctgaaggattcgctaaagtattacttgaaatgtgggct

SEQ ID NO: 35799 - DNA, 231 bp, Staphylococcus haemolyticus
ttgacggaattagttatttatactcaaaatgattgtccgccttgtacatttgtaaaaaattatcttacagaacacaaggtagattacattgaaaaaaatatctcgaataatgagtatcgttcagagatgattgattacgatgcatttgctacaccttttatactcttagatggtgaaccaatgtatcaagttgatttgtataaaatcaacactaagtgtcacattaaatca

SEQ ID NO: 35800 - DNA, 1383 bp, Staphylococcus haemolyticus
gagcaagaacgtggtatttcagtaacgagttcagtaatgcaatttgactatgatgattacaaaattaatatattagatacaccaggacacgaagatttctcagaagatacttaccgtactttaatggcagtggatagtgcagtgatggttattgactgtgccaaaggtattgaacctcaaactttaaagctatttaaagtttgtagaatgagaggaattccaatttttacattcattaataaattggaccgcgtaggtaaagagccatttgaattattagatgagattgaagaaacattaaacattgatacttatcctatgaactggccaattggtatgggtcaaaatttctttggtattatcgatcgtgattctaaatctatagaaccatttagagatgaagaaaatgttttacatttaaatgatgattatgaactacaagaagagcatgctattcgtaatgacagtgcatttgctcaagctatcgaagaatttatgcttgtagaagaagcaggtgaagagtttgataatgatgcgctattaaatggtgaattaacacccgtattctttggttctgcattagctaacttcggtgttcaaaacttcttgaatgcatatgttgatcatgcaccgatgcctaatgcacgtcagacaaatgaagaagttgaagtaagcccatttgatgatgaattttctggatttattttcaaaattcaagctaatatggaccctaaacatcgtgatagaattgcgtttatgcgtgttgttagtggtgcattcgaacgtggtatggatgtaacattacaacgtacgagcaaaaaacaaaaaattacgcgttcaacatcatttatggctgacgataaagaaactgttaaccatgcagtagctggagacatcattggtttatatgatacaggtaattatcaaattggagatactttagttggtggcaagcaaaaatatagtttccaagatttacctcaattcacaccggaaatatttatgaaagtttcagctaaaaacgtaatgaaacaaaaacatttccataaaggaattgaacagcttgttcaagaaggagcaatccaatattataaaacgcttcacactaatcaaattattttaggtgccgttggtcaattacaatttgaagtgtttgaacatcgaatgaaaaacgaatataacgttgatgttgttatggaacctgttggtagaaaaattgcgcgttggattgaaaacgaagatgatatacaagataaaatgaacacgtctcgttctatattagtgaaagatagatatgataatttcgtcttcttattcgaaaatgaatttgcaacacgctggttcgaagaaaaattcccagaaattaaattgtatagtctttta

SEQ ID NO: 35801 - DNA, 606 bp, Staphylococcus haemolyticus
atgtcaaaaacactttatttaatgagacatggacaaacaatgtttaatttacgaggtaaggtgcagggggcaagtgactctcctttaacaagtttaggaatctctcaagccaaacaagctggtcaatattttaacgaacataatatttcatttggaaatttatattcatctagctctgaacgcgcatgtgatacattggaatgcgtcgcaccaaaccaagactataaccgtttaaagggactcaaagaatggcattttggtattttagaaggcgaaagtaatgatttactaaacgcaaattatgatattaaagatgcttttggggatcgtttagtagtgtttgacggagagtctaaaaatgaagtggaagaacgttttataggtacattaactgaaataatgcgtacatcagatagtgattcaaatttagttgtaagtcatggaactacgattgacgtatttttaagaaaagttattggagatacagaagcaattaattactttattggaaattgtcatattttaaaatttgaatatagaaataacgaatttcggtttattgaaaagattgatccagaaaacgaagaaattactaaatatgaaaat

SEQ ID NO: 35802 - DNA, 849 bp, Staphylococcus haemolyticus
atgactaaaatatttattacaggcgcaacaggattaatcggaacacgattaacaaaacgtttggttgaagaaggacatgaagttgccggattcactacatctgagagaggtaaagagaaattagaaagactcaatgctaaagcatatattggtgatattttaaaagctgatactattgatgcagcaattggtgactttcgtcctgaaattatcattaatcaaattacagatttaaaaaatgttgatatggctgcaaacacaaaagtgcgtatagagggcggtaaaaacctaactgatgcggcacttaaatttgatgttaaaaaagtagtagctcaaagtattggtttcatgtatgaaccaggagaaggacttgctactgaagaaacaccattagataatcattcagatggtgacagaaaaattacggtagatggcgtggttggacttgaaaaagaaaccgctcgtatggaccaatatgttgtgttacgtttcggttggttatatggaccaggtacttggtatggtaaagacggtatgatttataatcaatttaaagatggcgaagtaacattatcagatggtgtcacatcattcattcatttagatgatgctgttgaagtatctattcaagcgatgaactttgatactggtatttataatgttgcagatgacgagccagtaaaaggatcagactttgcagcatggtattcaaaagaagttggtgtggatcctaaagtcactatccaacccgcacaaccatttgaacgtggcattacaaatgacaagtttaaagaacaaggtggtacactaatctataatacatggaaagatggcatgcacccattaaaa

SEQ ID NO: 35803 - DNA, 768 bp, Staphylococcus haemolyticus
atgacattcactatcttaactcgtgggatagacttatcagttggttcaattcttgcattatcatcggcgtttattgcattaatgattacgagtggtgttgacccaataattgcattaattattggcgtactgattggttttgttttaggtgcagtgaacggtttattagttactaaaggaaatatggcgccatttattgcaacacttgcgacgatgacgattttccgtggattaacattagttattactgacggaaatccaataacaaatttaggggatagttatttattccaattatttggtaagggctactttatcggtattccagtaccagcagtaacaatgattatcgtgtttgtgattttgcttattattcttcaaaaaacaacgtttggacgtcatacatatgcaattggtgggaatgaagtagctgctaaaatttcaggtattaaagttaataaaattaaaattttaatttatggaatttcagggctaatgtcagcgttagcaggaggcatattaacatcacgtttaaattctgcacaaccaacagcgggtacttcttatgagttagacgctattgctgccgtagtacttggtggtacgtcattaacaggtggtaaaggacgaattgttggaacattaataggtgtacttattataggtgttttaaataatggattaaatttacttggtgtttcttcattctaccaacaagtcgttaaaggtgtagttattttaattgcggtattaattgatcgtaaaaaa

SEQ ID NO: 35804 - DNA, 798 bp, Staphylococcus haemolyticus
atgaaagtcggtatagatgccggtggtacgctaataaaaatcgtccaagaatctcaacaaggacgttcgtatgaaacaaaacttactacaaacatttcagaggtaattgcatggttaaacgcaaacacttttgaatcaatcagtcttactggcggaaatgcaggtgttattgctgaaaatttaaatgtggatgcaactatatttgttgaattcgatgcatcatctaaaggtttgggtatgcttcttaaagagcaaggtcatcatattgacgaatatatattcgctaatgtcggtacaggcacttcgttacattatttcgatggcaaacaacaacgtcgtgtaggcggtgtgggtactggtggaggtatgattcaaggactgggatacttattatcacaaattacagattatgaagcacttacaaatctagctcaatctggagatagagatacgattgatcttaaagttaagcatatttacaaagataccgaaccacctattccaggtgaattaacagctgctaactttggaaacgtcttacataatttagacgtagatttttcaccagctaataaattagcatcagtggttggagtcgttggtgaagtaataactactatggccataaccgttgctcgtgaaaataaaactgagaatgttgtatatatcgggtcttctttcaacaataatccacttttacgtgaagtaattgaagattatacggtattacgtggtttcaaaccatattacattgagaatggtgctttttcaggagcacttggcgcaatttatttaaat

SEQ ID NO: 35805 - DNA, 1284 bp, Staphylococcus haemolyticus
atgcaaaatagatattctgatggaattatgagaacaaatcttgaaggtgtaacaattacaacgcctcaagctgatttaattgatgatgtggaagtaacgaaacaaccaattcctcataaaactattcgtgagtttgatccaactctagaaccaggctcacctgatgttattgtacaaaaaggtgaagatggagagaaaacaacaactacaccaactaaagttgaccctgatacaggagatgtagttgaacgtggtgaaccaacaacagaagttacaaaaaatccagttgacgagattgtacactttgcacctgaagaagtaccacaaggtcataaagatgagttcgatccaaacttaccaattgacggtacagaagaagtaccaggtaaaccaggcatcaagaatcctgaaacaggtgaagtagtaacacctccggttgacgatgtcacaaaacatggtccaaaagcaggcgaaccagaggttactaaagaagaaataccattcgagaaaaaacgtgagttcaatccagacttaaaaccaggtgaagagaaagtaacgcaagaaggacaaactggagagaaaacaacaacaacgccaacaacaattaatccattaacgggagaaaaagtaggcgaaggtgaaccaacaacagaagtaacaaaagaaccagtagatgaaatcacacaattcggtggagaagaagtaccacaaggtcataaagatgagttcgatccaaacttaccaattgacggtacagaagaagtaccaggtaaaccaggcatcaagaatcctgaaacaggtgaagtagtaacacctccggttgacgatgtcacaaaacatggtccaaaagcaggcgaaccagaggttactaaagaagaaattccatatgaaactaaacgcgtattagatccaacaatggaaccaggtagtcctgataaagtagctcaaaaaggtgaaaatggtgaaaaaacaacaacaacaccaactacaattaatccattaacgggagaaaaagtaggcgaaggcgaaccaacaacggaagtaacgaaagaaccaatagacgaaattgttaactatgcacctgaaattattcctcatggtacacgtgaagaaattgatccaaacttaccagaaggtgaaactaaagttatcccaggtaaagatggcttgaaagatcctgaaactggagaaatcattgaagaaccacaaggtggaagtaatcatccatggtggctaaagatgattcagatgcggacagcgattcagacagcgatagatttcaga

SEQ ID NO: 35806 - DNA, 835 bp, Staphylococcus haemolyticus
aagctcgattttcttccaaacaagcttaataagtactcaattagacgtttcactgtagggacagcttcgattttagtaggagctactttaattttcggtgttgcaaatgatcaagcagaagccgctgagaataacacaactcaaaagcaagatgatagttcagatgcaagtaaagtaaaaggtaatgttcaaactattgaacaatcttctgcaaattcaaatgaatctgatattcctgaacaagttgatgtaactaaagatacaactgaacaagcatcaacagaagaaaaagcaaatacaactgaacaagcatcaacagaagaaaaagcagatacaactgaacaagcatcaacagaagaaaaagcaaatacaactgaacaagcatcaacagaagaaaaagcagatacaactgaacaagcatcgacagaagaaaaagcagatacaactgaacaagcatcaacagaagaaaaagcaaatacaactgaacaagcatcaacagaagaaaaagcaaatacaactgaacaagcatcaacagaagaaaaagcagatacaactgaacaagcatcaacagaagaaaaagcagatacaactgaacaagcatcaacagaagaaaaagcagatacaactgaacaagcagcaacagaagaagcgccaaaagctgaagaaacagaaaaaacagcaacagaagaagcaccaaaaactgaagaaacagacaaagtagaaacagaagaagcgccaaaagctgaagaaacaagcaaagcagcaacagaaaaagcaccaaaagctgaagaaacaaacaaagtagaaacagaagaagcgccagcagctgaagaaa

SEQ ID NO: 35807 - DNA, 1137 bp, Staphylococcus haemolyticus
atgattaaaaaatatttgttgagtgtattcactgttttaatagccattgttttatgtgcttgtcaatcgacatcgcaaacgcatgagaaaaaagctaaagaagaaacgcataataaagaagagaatatttatgcgaaaaagcgtagttctggtcaaaatgattgggttgaatataagggtgatgtagcacatatcttcttccatcctttaattacggatcctaaagtggcgtttactggtgaagcgaatcaagccaaaggcaataatgattggatgattaccgttgaagaatttaaacgctcacttgatgaattatataagcatcattacatattgattgatccacatgatgcatatgatttcaattctaaacctattaaaaagaaatcacttaagttgcctaaaggaaagaaaccgttaatcttatcaatagatgatatgaattattatgaatatatgagagaaaatggttatgcagatcgtttagtattagacaaatataatcatgttgtatctcaaacgaaaggtaaagatggtaagtttactcaaagtgaatcgaatgatattgttccgattctaaatcgtttcgtaaaagaacatccagatttttcattgaatggacaaaaaggtgtagttggtttaactggatacaatggggtactcggatatcgcacgaatgagttggatagtaaagactactctaaacgtaaagaacaagcgataaaagttgcaaatgcaatgaaacgcgatggttggacattcgcaagtcattcttgggggcacattgattttgcaaatagttcatatgatcgtattgtgaaggatacagaacgttggaagaaagaagtaacgccaattattggtaaaacggacttatttattttccctcatggtgcgcaagatagaggttcagcaggttatcagtacctagagaataaagcaggatttaaattcttagctggggtaggtccgaataattttactgatattggtgaagatagcgtttatcaagaccgtgttgctatcgatggtttgaatctatatgactttaaatacaagttgaaaccatttgtagattcagacaaagtttatagcaaagaagatcgtagttattttaaaggtgagaaaggttataaa

SEQ ID NO: 35808 - DNA, 546 bp, Staphylococcus haemolyticus
ttgaatgataaagacttacgggtaattaaaactaaaaaggcattaactgatagcttatattcattgctcgaacaagagatgtttacaccattaacggttaataaaatttgtaagcatgctagtgttcatcgcactactttttataaacatttttacgataaatacgaattgcttaaatacctattaaaattaacacacgatgactattttgcgactgatattaaagaacgtttgaataatccttttcaaactttagctaattctttcaataaagaagaggtatctcgaattgaacttaagcaatataacgataaagagtttgaagatgttcgcaataaatatttaattgaaataatgcaaaaggatttcaaaaccaacatgcatcgtattactgttgataatgtagtaccgaaaagcctagtattctatgtgtttggttcggtactaaatgcatttatcgattggaaaaagaatgaaaatgtcgagattaaacctaagcaaatggaccaaatctttcataaacttatcaatatcaaagcacatgat

SEQ ID NO: 35809 - DNA, 717 bp, Staphylococcus haemolyticus
ttgaaaataatgaaattagggactggtaagcgtatgaataaacaaataagtgaaatttcacctaagatgacgttgcctatgttcatgattgggttaattatttttgtcgttgttgcaataaatgtaattcacgatacattattggttcaaaatgtcgatataggttctttacattggctgacagattattttggtgagccggaacgtaaatacggcgatggtatttggcataatttcatgactttttgtgctgagataggagaagtaaagtcagttatctatatcacactatttttagcaattgttttattgtttaaacattataaattatcgatttggatggttttaactataacgagtggtacgttattaaattatttaattaaacaactcatcgagagacaacgtccatttaatcatttgatgcgagaccacggatattcatttccaagtgggcattctaatgcaagtacgttacttgctttaatattgttaattattttaattcctttaataaaactcaaagcaataaggataatagccaatactatcactattatcatttggataggtgtgctgtgttgccgactatattttcatgcgcattatattacagatgtagttggaggcgttacactaggtatcatttgggtagcattgtttttaatgatattaccattgttttatcttaatttacgtaataagcctaataataaa

SEQ ID NO: 35810 - DNA, 1461 bp, Staphylococcus haemolyticus
atgggtgagtttaaaggatttatgaaatatgaaaagcaatcattatctgaactgtctttagttgaacgtctgaaaaatcacgatgcgtttcaacaacgcttttcacgtgatgaagcatctgttcaaggcgcacgatgtatggattgtgggacaccattctgtcaaacaggtcttcctttcggtagagaaaccattggttgccctattggtaattacgttcctgagtggaatgatttggtttatcgccaggatttcaaagctgcatatcaacgtttaagtgaaacaaataattttcctgaatttacaggacgtgtttgtcctgcaccttgcgaacaatcttgtgtcatgaagattaatcgtgaatcagtcgcaattaaagggatagaacgcacgattattgatgaagcatatgataatggttgggttaaacctaaatatcctaagcaacggttagaacaatctgtagcgattgttgggagtggtcctgcaggcctctctgcagctgaagagctcaattacatgggttatcaagtgacggtgtttgaaagagccgcagaagcgggtggtttattaatgtatggaattcccaatatgaaattagataaggatgttgtacgtcgccgtattacactgatgacagaagcaggtattacatttaaaacgaataccaacattggtgtggatatctcacgcgaagaattagaacagacatatgacgctattatcttatgtacaggagctcaaaaagcacgtgacctgccattagaaggacgtatgggtcaaggtattcactttgctatggattatttaaccgagcagactcaattactaaatggtgaaattgacgaaccaactattacggctaaaggaaaaaatgtaatcatcataggtgctggtgatactggcgcggattgtgttgctactgccttacgtgaaaattgtaagtcaattgtccaatttaacaaatatacaaaagcacctgaagaaattgcgtttgaaagtaatacgtcgtggccacttgcattacctgttttcaaaatggattatgctcataaagaatatgaagcacgttttggtagagagcctcgcgcttatggtgttcaaactatgcgatatgatgttgatcatattggtaatgttcgtggtgtatatacacaaatcttagaggaaacaccagaaggaatggttgtcgtagatggtactgaaagacattggccagcagatcttgttcttttatcgataggcttcgaaggtaccgaacctacagtaccaagatcttttgatattgctacccaacaaaataaaatcatcgccaacgataaagattatcgcactaataaagaaaaaatatttgccgctggggatgcgagaagaggtcaaagtcttgtagtttgggcgattaaagaaggacgtgctgttgctcaatctgtcgataaattcttgaaacaaaaggtattcgtg

SEQ ID NO: 35811 - DNA, 147 bp, Staphylococcus haemolyticus
ttgaaagagaaaaatcataagatgatgaaatattatgagaaagctaaaccttatttattaacacttttatatttagcgatatttattgcgctgtacctaatttatggttccggcgatacacataataatttcatttataatgaattt

SEQ ID NO: 35812 - DNA, 123 bp, Staphylococcus haemolyticus
gatgaacctactgcaggacttgaccctaaaagtagaaatcaaatcatggaaatgttaaagaaactgcagcttgaacaaaataaaacaattatactagttacacatgaaatgaatgatgttgca

SEQ ID NO: 35813 - DNA, 580 bp, Staphylococcus haemolyticus
aatcaatttttatggattatatttccatatttatgtgtagccattttcattgttggacacatcgctcgttataaatacgatcaattctcatggactgctaaatcgagtgaatttttagagaaaaaacaattaaaatggggtagcttattattccatttgggcatcataccggtgttttttggtcacgtcgtaggtctcgctataccagctaaatggattgatggattaggtgtaagcgaggaaatgtatcattttggtgctgtatacatcggtagtatctttggtataatgacgtttattggtatgttactattaacagcacgacgaattactattaaaaatgttagaaagctaagttcagcttctgatatatttgtaaattttcttattaatattaattattttcatgggatgttattcaacattagttacgaatgcgatggtaagtgattttgattatcgtcaaacgatatctatatggtttagacacttatttacattttcaccagacgcgagtctgatgacgagtgtacctttatcttttaaaattcacatcttacttggaatttacaattttaag

SEQ ID NO: 35814 - DNA, 183 bp, Staphylococcus haemolyticus
gtggctaaaacttctatggttgctaagcaacagaaaaaacaaaaatatgcagtacgtgaatatactcgttgtgaacgttgtggtcgtccacattctgtatatcgtaaatttaaattatgccgtatttgtttccgtgaattagcttacaaagggcaaatccctggcgtacgtaaagctagctgg

SEQ ID NO: 35815 - DNA, 492 bp, Staphylococcus haemolyticus
gtgattggtgtgattggggttacgatatgtctagggttagaccgttcattgctagggtggggcgcgtgtgtcgcattacttggttcactatgttggtcatgtaatactgtcgtgactaagcaatttaagtttgataaaggcgcctgggtattaacgggatggcagctattatttggtggcatcatcatgttcttgattagccaattgttaggagagcgctatcacattggacaattgaatggttggggatgggtatggttttggtggcttgtgtttcctgcgtctattggatcatttggattatggtttagcagtttaaatttacgaggtgctacgatttcgagcagttttctatttttagtgcccttattttcaaccattttttcaattatagggttaggtgaacctttcacattgcacattatgataggcggattatgtgttgtggtcgcattgattgcaattaattattcaccacatcacttaagtaat

SEQ ID NO: 35816 - DNA, 1425 bp, Staphylococcus haemolyticus
gtgaacaaaggggtagcattaaagagatattcacttatattagttgtctttctgataatgatgtgtttatcttttcattttcaatttaatgaagcgaatgcttctactaaaagtgataaattagatgtacaacaaacatctcaacaacctgtcgttaaacaacaaaataagtcagtaaatgtatctaaagataaagttgtagcaacgcagactaaggtacaaacgccgtctaaggtaacaaatcgcaatcaagcttcgttacaaaagacaatggcaccttctaaacgagcacatgttacttcaacacatgtgacaccaaaaagtactaaagtaaaaccttcatcgcaaaacttttcaaaacaaaagcaaccaactaaggttaacaaaaaagttgtctcaacaaataaaaaaccacaaaaagcatcaaaagtaacacgcacgcaatccgcgagaccacagttattagcgcaaactactaaaacaaaaagtaagccaacttcgtcaaaagtatcggcaagtaaaccatctacgaaagtggcagttgtaactaagtctaaaactgcgaaaccaagtgcacaaacaacagtcaaagcgtctaaaaaagcatcatcaacgacgaagaagaattattacaatcaagcacctaagcgttggccatctaatgtgcctggtggtgataatgtacgtgatttcggtcaaacgacgaaagaatcaggtattgatgacgccttaaaaattatgaagaaatcaggaaacaaaggtgtaaccattgaacatgctaaggcgaaagatgccaatatcgcaacagtttataattggaatccaaaagcaaaacaattaacatatggcactggtacagcaattggaaagcatacgattctaactgcaaatcatgttgtaaatgatcaaagtgcgcataagcctttgacaccgtcacaaccacaaaatatgcgtatcaacatattacaagagggatctaaaattgtgcgtacacttgaagtctttggtgttcaaatgttgcaatatggtgatgtttctctagtgtatacgtatgaagatatttcaaagtatatgaagataagaaagattgcatcagaaagttcaattaaagcaatgaaagcaaatacgcctattcacatgtaccattatggtaagccgactggtaaatataaaaatgatcctgccggtacaatgtatcattcaaaagggaaatatacgatgcctgcacgtaatgtgaacccgattggctattatcaaatgatggctgaaccaggttcttctggtggggcagtcttaaatagtaaaaatgaagtcattggtgtccatgcgttccgattaaactcaggagattataaaaaatataatttaaatacgatggctgaaatcagaggtaaattacgtaaagaaattattgataatattgtg

SEQ ID NO: 35817 - DNA, 4314 bp, Staphylococcus haemolyticus
atggcaatgacgaatcaagaaaaattcaaagtactcgctgaccagattaaagtttccaatcaactagatcaaacaataattgaaaaaggtgaattaacgcgagtagatgtgtcaaataaaaatagaacgtgggaatttcaaattacattgccatattttctatcacatgaagattatttaatattcactaatgcgattactgaagaatttaaagaaattgccaaagttgattggcattttacaattcaagatacaagtaatcaagatgagcatgctatcaaatattttggtcattgtatagaacacactgcactttcacctaaagtaaaaggtcaacttaaacagaagcgtttaattatgtctggtaatgtgttgaaagtaatgacctctaatgacatcgaaagaaatcactttgacaaagtatgtaatggtagcttagtaaaagcttttcgtaaatgtggttttgatattgataaagttgtttttgaaacagacgactcaagttcttatgatgatttagcttcattagaagcacatattcaagaagaagatgaaaaaagtgctcgtgaagcaactgaaaaaattgaaaaaatcaaagcagaaaaagcgaaacaacaagataacaatgaaagtaatgttgataagtgtcaaattggtaaaccgatacaaattgataatataaaaccaattgaatcaatcattgaggaagagttcaaagtagcgattgaaggggttatatttgatattaacctaaaagaattaaagagtggtcgtcatattgttgagttaaaagtcacagactacacagattctcttgtacttaagatgtttacaagaaaaaataaagatgatttagatcactttaaggcactaagtgtaggtaaatgggtacgcgctcaaggacgtattgaagaagacacgtttgtaagagatttagtaatgatgatgactgatatagaagaaatcaaaaagacacctaagcaagataaagctgaagaaaagcgtgtagagtttcatttacatacatcaatgagtcaaatggatggtattcctaatataagtgcatatgttaatcaagctgcaaaatggggacataaagcgatagcagttacagatcataatgtcgttcaagcctttcctgatgctcatggtgccgctgaaaaaaatggtattaaaatgatttatggtatggaaggtatgctcgtagatgacggagtacctattgcttacaaaccaacagatcgagatcttaaagaagcaacttatgttgtatttgacgttgaaacaactggactttcaaaccaatacgatcaaattatagaattggccgccgttaaagttaaagacggggaaattattgataaatttgaacgatttagtaatccacacgaaaaattatcagaaacaatcattaatttaactcacattactgatgatatgttgactgatgcacctgagattgaggaagtattgactgaatttaaagagtgggttggggatgctatatttgtagcacataatgcatcatttgatatgggctttattgacactggctatgaaagacttggctttgggccatcaacgaatggtgtcattgatactttagaactatcacgtacgattaatactgaatatggtaaacacggattaaactttttagcgaaaaagtatggtgtagaattaactcaacaccatagagctatttatgatactgaggctacagcttatatcttcattaagatggttcagcaaatgaaagagttaggagttacaaatcataaagacattaatcaaaaactgtctaatgaagatgcatataaacgtgcacgtccgacacatgtgacattaattgttcaaacacaggaaggcttaaagaacttatttaaaattgtaagtgcctcattagttaaatactattatcgaactcctagaattccacgttcattattaaatgaataccgtgaaggcatactagttggaacagcttgtgatgaaggtgaattattcactgctgtaatgcagagagaccaatcggaagttgaaaaaatcgctaaatattatgattttattgaagtacaaccacctaaactgtatcaagatcttattgatagagaactcattagagatactgaaacactttatgaaatttatgaacgtatattaaaagctggagaaagtacaggtattccagtaatagcgacaggaaatgcgcattatttatatgaacatgacgcaattgctcgtaaaatcttaatcgcatctcaacctggtaatcctttgaatcgctcaactttaccagaagcgcattttagaacgacagatgagatgttagatgagtttcactttttaggcgaagaaaaagcacatgaaatagttgttaaaaacacaaatgaattagcggaccgaattgaaaaagttattccaattaaagatcaattgtttacgccacgtatggatggagcaaatgaagaaattcgtgaactaagctacacgaatgccaaaaaattatatggtgaagatttaccacaaatcgtaatcgatcgtcttgaaaaagaactagcaagtatcatcggaaatggtttctcggttatctatttaatttcacaacgtcttgttaaaaaatctctagatgatggatatttagtaggttcgcgtggttcggttggatctagttttgtggcaacaatgactgaaataactgaagttaatccattgccacctcattacatttgtcctaactgtaaaacgagtgaattctttgatgatgggtctgtaggttcagggtttgacttacctgataaacaatgtagcacttgtggtgctgaacttattaaagaagggcaagacataccatttgaaacattcttaggatttaagggagataaagttcccgatattgacttgaactttagtggtgagtaccaaccaaacgctcataactatactaaagtgcttttcggggaagacaaggttttccgtgcaggaacaataggtacagttgccgaaaaaacggcgtttggatatgttaaaggctatttaaatgaccaaggtatccataaacgtggtgcggaaatcgatcgtctggttaaaggatgtacaggtgtaaaacgtacaacaggacaacatccaggtgggattatagtagttcctgattacatggatatttatgatttcaccccgatacaatatcctgcagatgatcaaagcgcttcttggatgacaacgcatttcgacttccattccatccatgataatgttttaaaacttgatatattaggacatgatgatcctacaatgattcgtatgttacaagatttatctggtatagatcctaagaccattccagtagatgataaagagacaatgcaaatctttagtagtcctgaatcattaggtgtaactgaagaggagatactttgtaagactggaacattcggtgtacctgaatttggtacaggatttgttcgacaaatgttagaagatacgaaaccaacaactttttcagaacttgtacaaatatcaggactatctcatggtactgatgtttggttaggtaatgcacaagaattgattcgttcaggtatttgtgatttatcaagcgttataggttgtcgtgatgatatcatggtttatttaatgtatgcaggattagaaccgtcaatggcctttaaaacaatggaatcagtgcgtaaaggtaaaggtctaactgaagaaatgatagacgctatgaaagagaataatgtaccagattggtatttagattcttgtctgaaaattaagtacatgttccctaaagctcacgcagccgcatatgtactaatggcagtgagaattgcatatttcaaagtacatcatccgctttattattatgcatcttatttcacaattcgtgcatcagactttgatttaattactatgattaaagacaaagaaagcataaagaatacagtcaaagatatgtattcaagatacatggacctcggtaaaaaagaaaaagatgttcttactgtcttagaaattatgaatgaaatggctcaccgcggattccgtatgcaaccaatcagtctagagaaaagtcaggcatttgactttattattgaaggagatactttaattcctccatttatttctgtacctggacttggagagaatgttgctaaacgtattgttgaagcgcgagaagatggtccattcctatctaaagaagatttaaataaaaaggctggattatctcaaaaaataattgagtatcttgatgatttaggttctttacctaatcttccagataaggcacaattgtctatttttgatatg

SEQ ID NO: 35818 - DNA, 423 bp, Staphylococcus haemolyticus
atgatacgatacggctaccactttcttagtgcattactgattagcattttattattgcttatcatgtttactatggatgtcgtaacacacacgacgcacctaaccttgttattaatcaatatcgatttcattgctgacccaaatcaaacaccactgattttagaactattgattcatattgtcattggatttttaatttacatcacatttctaattatttataaatttttcaaacctttttacaaaataagttatttattactgatcatcatttttctaatattatatccattacttattctattggcacaacgttcattttttcaatttagttggacagaatacggtttatggatgattgcacatttgattttcactgtttgcatggcatggtctatcccttacttttctaaaaagaaatgg

SEQ ID NO: 35819 - DNA, 231 bp, Staphylococcus haemolyticus
atgattttagaaatgcgccgtgcagaacttgttcattggttatcaatgataccaattgttgtttttatcaaagcgcctaaatatatactattcattaatgtttgttatgtgatttcggctaatttaccgatcatactcacacagcgttataaccgtcctaggttagaacattactatcaactacgaatgaaaagagatgaacgtacatgtcgcaaaagaaaatcatcatta

SEQ ID NO: 35820 - DNA, 1809 bp, Staphylococcus haemolyticus
ctacaagtacgttcaacaagcatagcgaacagccaaagcgcatcaacaagtacgtcaacaagcacagcgaacagtcaaagcacatcaacaagtacgtcaacaagcacagcgaacagtcaaagcgcatcaacaagtacgtcaacaagcacagcgaacagccaaagcacatcaacaagtacgtcaacgagtactgcgaacagccaaagcacatcaacaagtacgtcaacaagcacagcaaacagtcaaagcgcatcaacaagtacgtcaacaagcacagcgaacagccaaagcgcatcaacaagtacgtcaacaagcacagcgaacagtcaaagcacatcaacaagtacgtcaacaagcacagcgaacagccaaagcacatcaacaagtacgtcaacgagcgtgagtgattcaacaagtgcaagcacatcattaagtggatcaacgtcaacaagcgtgagtgactcaacaagtgcaagcacatcattaagtgattcagcgtcaacaagtgtgagtgattcaacaagtgcaagcacatcattgagtgcgtcaacatcaacaagtgtgagtgactcaacaagcgcaagcacgtcattaagtgaatcaacaagtacgagtctctcagactcattaagtgcaagcacgtcattaagtgattcagcgtcaacaagcgtgagtgattcaacaagtgcaagcacgtcattaagtggatcagaaagtgcgagtctttcagactcagcaagtgcaagcacatcagttagtgcatctacatcaacaagcgtgagtgattcaacaagtgcaagcacatcactaagtgaatcaacaagtacgagtctttcagactcattaagtgcaagcacatcattgagtgcgtcaacatcaacaagtgagagtgactcaacaagcacaagtacgtcattaagtgaatcaacaagtacgagtctttcagactcagcaagtgcaagcacatcattaagtgattcagcgtcaacaagcgtgagtgattcaacaagcgcaagcacgtcattaagtggatcaacgtcaacaagtgtgagtgactcaacaagcacaagtacgtcattaagtgaatcaacaagtacgagtctttcagactcaacaagtgcaagcacatcattgagtgcatcaacatcaacaagtgtgagtgactcaacaagtgcaagcacatcattgagtggatcaacatcaacaagcgtgagtgattcaacaagtgcaagcacatcattaagtgcgtcaacatcaacaagtgagagtgactcaacaagtacaagtacgtcattaagtggatcaacatcaacaagtgtgagtgattcaacaagtgcaagcacatcattaagtggatcaacatcaacaagtgtgagtgactcaacaagcacaagtacatcagatagtgcatcaacgtcaacaagcgtgagtgattcaacaagtgcaagcacatcattgagtgcgtcaacatcaacaagtgtgagtgactcaacaagtgcaagcacatcattgagtgcatcaacatcaacaagtgtgagtgactcaacaagtgcaagcacatcattgagtgcgtcaacatcaacaagtgtgagtgactcaacaagtgcaagcacatcattaagtgcatcaacatcaacaagcgtgagtgattcaacaagtacaaacacatcattgagtgcatcaacatcaacaagtgtgagtgactcaacaagtgcaagcacatcattgagtgcgtcaacatcaacaagtgtgagtgactcaacaagtgcaagatacatcattaagtgcatctacatcaacaagcgtgag

SEQ ID NO: 35821 - DNA, 799 bp, Staphylococcus haemolyticus
  misc_feature (752)..(752): n=g, a, t or c
atgcacttaaatgaggtttttacttatttaagtgcttttcttataggaggagttaatatgagcaagaaatataatcgcgacgcatttgaaactacaaattctggtaatgatttacatggaaaaggtgctaatcaacaagacaacacatcacaatcaaatgcgacaaagcattatgacagagattcatttgcaacatctaatacaggtagtgatttgcatggacaaggtgctaatcaacaagatagtgcagcacaatcaaatgcgacaaaacattacaacagagatgaatttgaaaaaaataattttggtcatgatttacatgataatggaccaaaccaaaaaaatggtaaatctagacaaggtttaaatacagaacattataatagagacgagtttgtgactaacaacactggtaaagatttacacggtcaaggtgaaaatcaaaattctaataattatgatgtttcaaattctcaatatagtcacaacaagttcagttctcatccttcacgtaaggactttgtaattagttttattacaggtgctttaatcggttcagctgtaggtttattttataaaaataaagctgaagaaaaaattgatggtgcgaagactaaagaaaaagaattgagaaatcgttaccaaaatattaagcaacaaactgaaagtaacatcgaaaatgttaagcaaaaaattgatgactttaaaaacagagacaattcagaagttagcaatgatgaacttgtagctcnaacaaatgcaatcaaagctgaaacgtcgaataatttagcagatcaat

SEQ ID NO: 35822 - DNA, 141 bp, Staphylococcus haemolyticus
atggcttatcaaagtgaatatgcattagaaaatgaggtacttcaacaacttgaaaatttaggatataaacgagtaaatatacgtaatattaaatcagaaattaacgattatctcaaagaactaggagtgttaaaacatgac

SEQ ID NO: 35823 - DNA, 615 bp, Staphylococcus haemolyticus
atggaagaaaaatttaataacgaacaagaagaaagacaatttagacaatttcaagaataccaaaaacaacaagaagaagagaaaaagaaaaaacgtaaaaaaagttggctattcggctgcggtggttgtttagttttattaatattaattattattggcgtaactgcgtgtactggatccttcgtgaatgaggtcgataaagaaataaatgaagaaggtaagcttgacaaagataaggatacaaaaattaaatctgtaggtgaaactactgaaatagatggagtgtcattcacattagacagtgcttcttatacagatgaaagaaatgaatttgcagaagttcaagctgataaagtcttaaaagtagacatgactattaaaaacaactctaaagaagaaattccagtgggcggagatgtaaaagtttatgtagatggaaaacaagctaaatcttaccctatcactgacggattgatggattcattatcacctaatagagaaattagcggttctgaaggttttgcaatcaatggcaacccagaaaaaatcgagttagagttccaacctttaacgtcattttctaacaaacgttatatttatgatgttaaaccagaa

SEQ ID NO: 35824 - DNA, 1089 bp, Staphylococcus haemolyticus
atgaagtcgaatcgtatatcaggatttcaatgggcgttaactatcttcgtattcttcgttgtcacgatggcgctatcattaatcctacgagattttcaagcatcagtaggtattaaacgttttgtatttgatattactgatcttgcaccgtttatcgcagcaattgtttgtattattgcatttaaagataaacgtactcaattagctggattaaagttttcagttgatattagagtcattgaacgtatattactagcattgattttaccgctagttattttcatgattggcatgtttagttttaacacatttgccgatagttttattttattacaagcaactgatttatctgtatcagttcctacaattattattggtcatattttaatggcattttttgcggagtttggattccgttcttatttacaaaatattgtagaaaataaagtcaatacatttttctcttcaatcattgtcggtttaatttattctatatgggccgctaatacgacatatggaatggaatatgcgggataccatttcctttatactttcatgttctcaattattattggtgaactcatacgtgcaactaaaggacatacgatatatatcgctctcgtattccatgcatcaatgtcatttgcacaagtgttcttatttagtgaagaaactggcgacctattctcaatgaaagttatcgcattaagtacgacgttagtgggcattgtctttatcattttaagtttaattattagatttattgtttataaaacaactaatcgttcacttgatgaagttgaacctaataattatttagaccatatgaatgatgacgatacaactacttcaaatgaaacaaagtctgaagatcatgaacataatgataaaaaagacagcttcactgagagtcaacttaatgaagatcatgttgaacttaaatcacagtctgagaatcaaactgattcttcaaatgaaaaacttaaagagaacacatcttataaagaagatagacgttcatctgtagttgatgatgctaaggatgaaatagatcaaatgaaagatacatctagtcacaaaactgagaaa

SEQ ID NO: 35825 - DNA, 1893 bp, Staphylococcus haemolyticus
atggctaaactagtttcaattattgtatctgtttacaataaggagcagtttttagaaaagtgcatagagtctttaattgacttaaagatggacaagaataatattgaagcgatatttgtagatgattgttcaactgatgagtcggttaacattatcaagcattatgaaaaggactatgactttataaaattaattcaattacctgaaaatacaggtagtccttctgaaccaagaaacattggaatgagagaggcacaaggtaaatatattacgttacttgatgcagatgattggttagataaggaaggattccctcaagtgattgagaaagtgaataaagatgatgccgaccttggttttggacaaagttttaaacataagtcaaaaaacgtgaagtatcatgctaggtttacttcttataaggaagcatcacatttaaaaccacaagatattagtaagatttttagagcagtcggaccaccaggaaaggtatttaaacgaagtctagtcatggatcatcatattgaatttgaacatatgaaatatggcgaggataagttgtttttctttcagctatttggaaaagtggacgatatcacaatgtccacaatacctatgtatcacgtaaatcgttacgatgaaaataaatcattggtacagcaaacatcaatgttagataaagcaaactcaaatttagaggttctagatagaacttgtcatatggatatgtcttcggaacttaagcatatggctttagctagaatggttgaagtagactttatttcgagattccttcgtacgaagacatttattaaatctgcagataaagagaaattttatgcagtaattgaaaaagttgaacgaaaaataaaagagcaaggcattgatatcaatacattgattacgaatccagtattcaagcaaatctacacgttatatcatcatgcagatgaatcggtatttgttaattttacaaaggatgttgttaatgaccaatggcgctatattattcaagatgacattgtctttagagatttcgttcatcaatatgacatgattaaacctactgttgttgattgctacccagtttacgaaggcacgcaaatgatgggagaaaacaaatacgaagtcattcgtgtcatgaaaccagacgatataaacatccaatcagtaagtttagtagaaatcaacaatgcggcgaatgaatatgaagtgacgtataaatatagcgacgatagaatttatgttccacatgaggaatttgaaaagttaaataaagatatcaatattaattttaatgtgaattatggtgagtcaggacgctcattggtgtatgcttcatatccaagtttcaatgatgtatttaaaatgaaacgccaaaatttcaaagttgaatttgtgcataaaaagaatgagaacaaagcacaacaagtaacaaaccgtaaaagtgaatatttcaagagaataacgaatccaatgatgacattgaaaaaaattaaaatatacaaagatgtatcatttaaagaagaagtaggtagtctagaagcgggtactagagttgaagcgtcagatattcaatatacatcgaaaggcacacctcgactggtattagatgatggtagtataatcacagcgaataaagattttattaccttaatcaacacatcgggattaaacaagtatattactgaggtgcctaagaaagttaaagttgtaaaagcatgtaaactctatgattcacgtgattttaaagacaatacagtacgtaaacttaaaaaaggtgatgtattaactattagagacatcatttatacgaacaactcaacacctcgcttagtaacacaagaaggcctattcttaacagcaaataaagattttattaagatcatcaag

SEQ ID NO: 35826 - DNA, 207 bp, Staphylococcus haemolyticus
atgaaagctaaggaaattagagacttaaccacttcagaaatcgaagaacaaatcaaatcttcaaaagaagagctttttaacctacgctttcagttagctacaggtcaattagaggaaactgcacgtattcgtacagttagaaaaacaattgcacgtctaaaaactgttgctcgtgaaagagaaatcgaagaaagcaaagctaatcaa

SEQ ID NO: 35827 - DNA, 999 bp, Streptococcus mutans
ttggctgttcaagttggacttggggtaatgattatgaaactgatgattacgaaacaatttcagtctttcctacaagaattgggaatagatatcaggctggttttacaaaaagcacagcttcctaataagctgtggcaagaagagcttacttataatgctcaggagtactattgttttatagcaaccttagataagctgattacagatgaagccttgttagctttgagcagaattgaaaacattaagaagtttgtgccagccttttttgctgctttggcaagtcctgatggtttgacggctttacagcgtttttcgaaatataaaagtttgattggtccagtaaaagtacagcttgaagacagcgaagatgaaatttctgtaagttatgcctaccgttcatcacagcttccgcttcctcgcatgttattgctgcaggaacagttgcttcttttaagtctcttacggacgggaacagggacttgcattcttccttacgaaataagttctccttatgattatggaagacttcttgagaaggaagtaggaatcctgccgaaaaaaacagattataatcgtttagtattatctaaagcagatcttgaaaaaccttttatcactgaaaataatgtcatgtggtatcatttgaagttaagtcttaatcagcagttgtcccagcttcatagtgatgacaatttcactcaggccgttcagacagagttgctgtctgccatccctagtggacaattttcccttgcaatgatagctaacagactaggactcagtgcccgtaccctgcaacgtaaattggctgctgaggatacaacttttaatgaggaagttttacatatgcaaaaattgatgactttttcctatcttgacttatctatgtcagttgatgagattgcttatttagtaggctactcagaaaagtccagctttctgcgggcctttaaaaaatggaccggcaagacattaaagaagtataaggaaaccgctctt

SEQ ID NO: 35828 - DNA, 2634 bp, Streptococcus mutans
atgacaaacaagaaaaaattattattgattgacggctcttccgttgcttatcgtgctttctttgcactttataatcaaattgaccgctttaaaaatcctgctggtttacacaccaatgccatttatggctttcatttaatgttggatcatatgatgaaaagggtggaaccgacgcatgttttagtggcttttgatgctgggaaaacaacctttcgaacagaaatgtttgcagactataaggcgggccgtgctaaaacgccggaagaatttcgtgagcagctaccttatattagagagatgctgaccgctttaggtgtttcctattatgatttggaaaattatgaagctgatgacattattggaacccttgataaattagccgaaaatgaggatgaatatgatgttactattgtcagcggtgataaggacctcattcagctgactgatagtaatacgactgttgagatttccaaaaaaggtgttgctgaatttgaagaatttacaccagactatctcatggaaaaaatgggactgacgcctaagcaatttattgatctcaaggctctcatgggggacaaatctgataatattccgggggtaacaaaaattggtgagaagacaggtttgaaactgttgcatgaacatggcagtctagaagctatctatgaacatattgatagctttaaaacgactaagatgaaggaaaatctcatcaacgataaagaaaaggcttttctttctaaaacactggcaaccattgatacgcaagcaccgatcaccatcactttagatgatattgattactctggtcctcagcttgatgcactggctaagttttatgacgaaatggacttcagacaatttcgatcacaacttgacagttcacctaaaaccgaaaattttgaagtgagttatacagaagtgactgaactcaagcctgatatgtttgcgcctgatcaattcttttattttgaaattttgaatgataattatcatacccaagagatgatcggtctggcttggggagatgaccaagcgatttatgcgacaactgataccagtttgctgacgcatgatttgtttaaagaagccttgtcaaaacctattaaaacttatgattttaagcgcggtaaggtcttgctgagtcatttgggcattgatctgccgacagctagtttcgatagtcgtttggccaaatatttgctgtcaactgttgaaaataataacatttcgaccattgcaagactttacacagatttacctttagaaacagacgatgatgtgtatggtaaaggagctaaacgtgctatcccagaaaaaaatgttctgctcagccatttagctaaaaaaatcagtgtcttgcttgctagcgaagagccgatgcgtcagaaactgtctgccaatgaccaactggacttgctttttgagatggaattaccgctggcaaatgtgttggctaaaatggaaattgcaggtatttcggttagaaaagaaacgctgcaggacatggaacgggctaatgagattgaattgcaggctctgactcaggagatttatgatttagctggtgaggcgttcaatattaattctccaaaacaattgggagttatcctctttgaaaaattgggtctgcccttgtcagccactaaaaagacgaaaacaggttattcaacagctgttgatgtcttggaacgtctggctcatcgttcaccaatcgttgctaaaattttagaatatcgtcaaattgcgaaattgcaatccacctatatcattggcttgcaagattcgatttcctttgatggcaagattcatacccgttatttgcaagatttaacgcaaactggccgcttatccagcgttgatcctaatttacaaaatattcctgtgcgtttggaacagggacgtcttattcgcaaggcttttgttcctgaatggaaagagagtgttctgctcagttcagattattcacaaattgaattgcgggtgctggctcatatttcaggcgatgaacatttaattgctgcttttaaggaaggagcagacattcacacctctacagccatgcgtgtctttggtattgaaagaccagaagacgtcactcctaatgaccgccgcaatgctaaggctgttaactttggtgtggtttatggcatttctgattttggtctggctaataatttgggtattagccgcaaagccgctaagaattacattgaaacctattttgaacgttatccgggaattaaaaattatatggatagagtggtgcgagaagcgcgtgataagggttatgttgaaacgctctttcatcgccgccgtgaattaccggatatcaattcacgcaatttcaatattcggtcttttgcggagcgaacagctattaactcgcctattcagggtagcgccgctgatattcttaaagtggccatgattcatctcgatcaagccttgaaaaaaggagattatcaatcgcggatgctcctgcaggtgcatgatgaaattgtccttgaggtgccaaatgctgaacttgaagcgatccaaaagttggtcaaggaaaccatggaatctgctattgaactttctgtaccacttgtggcagatgaaaatgcagggcagacttggtatgaggcaaag

SEQ ID NO: 35829 - DNA, 1494 bp, Streptococcus mutans
atgggtttatttaatcgcttatttggtaagaaaagacaagaagaaaagtcaacaacggattctattgaagaagccgctgaacaagaagttacacaagaaaagccagcactgctggcagaaactgctgaaacagcagagagtcagcagtctgtttatgaaaaagatgtgacagaaagtcaagctgaacaagtatcagatgcacgaataattgaagacggacagaattcgaaagaaccagcagctagtgggcattccgtccaagaacataagcaacagcctgtccaacaccaacaagaagtgtttcattctgaaaattctgtagccgctgtacaaaataatactgagactatgccttcgcagcaaaaaaaagacgaaaagccaaatcaatcgccggatttcatggcagaatactatgcacgtaaggctgaattagctcaaaaagtggaaagccaaaaaccagcagagactgctgagcaagaaagccaaacgacactctcggaccaaaaggagactgaaacagctgtcaatcagtctgaagaagaagcttccagtcaaatagcagaatctgttgaaagcgaggaagaaaagtacaatcgcagtctgaaaaaaacccgcactggctttggtgcgagacttaatgctttcttggctaattttcgtaatgttgatgaagaattctttgaagacttggaagagatgctcattctttctgatgtcggtgttcaggttgcgtcaaccttgacagaagatttacgctatgaagctaaattagaaaaggccaagaaacctgaagctcttcgccgtgtcattattgaaaaactagttgatatttatgacaaagacggtcagtttaatgaaaaaattaattttcagaacgatcttactgttatgctctttgtaggagttaatggtgttggtaaaacgacttccattgggaaattagcctataaatataaacatcaaggcaagaaagttatgctggttgcagccgatacttttcgtgcgggagccgttgctcagttagctgaatggggccgccgtgttgatgttccagttgttactggtccaaaaaatgctgatccagctagtgttgtctatgatggtgttgaaagggcagttgcagcagatgttgatattcttatgattgatacagcaggtcgcctgcaaaataaggataatctcatggcggaattggaaaagattggccgtgttgtgaaacgtgttattccagatgctcctcatgaaacgttgcttactcttgatgcttcaacgggacaaaatgcccttgttcaggctaaggaattttcaaaaatcacacctttgaccggtctgattttaacaaaaattgatggaactgccaaaggcggtgtggtgcttgctattcggcaagaacttgcgattcctgttaaatttattggttttggtgaaaaaattgatgatattggtgaatttcattctgaagacttcatgagaggacttttagaaggattgcta

SEQ ID NO: 35830 - DNA, 2124 bp, Streptococcus mutans
atggaaattattgaaaaaattgctgaagatttgcacttaaaagaaagtcaaatacaaaaagttttagatttagctgctcagggaaatacgattccttttattgctcgttaccgtaaagaaatgactggcaatcttgatgaagtggaaattaagtctattattgatctggataaaaatttaacagcattagccgaacgtaaggcaactgttttagcgaaaattgaaggacaaggtaaactaacagctgaattgcaagaagcgattgaagcggcttcaaagttagctgatgttgaagaactttatcttccatataaagaaaagcggcgaacaaaagcaacaattgctcgtgaaaatggactttttccattggcgcgcctcattttacaaaatgtttcggatttggaaaaacaagcagaaacttttgtaaataaaacctttcctacagctgaaaaagctcttactggagccatagatattttgattgaagccttatcagatgatacaaagttgcgctcatggacctataatgaaatttggacaaatagttttattttgtcgaaagtcaaagatcaggaacttgatgaaaaaaaggtttttcaaatttattatgatttttccgaaaaagttgcaaaaattcaagattatcgtgttttagctcttaatcgtggtgaaaaactaggtgttttgaaggtttattttgaacacaatcttgacaagatggcacgctttttcgaagcacgttttaaggaaaaaagcagcaggattgaacaggtggttcaagcagctttaaaaaagaaaattttacccgctatggaacgacgtattcgagcggaactcactgaggaagcagaagatggtgctattaagttgttttctgacaatctcagaaatctgcttatgattccgcccttaaaaggtaaagtggtacttggctttgaccctgcttttcgtacaggagccaagctggctgttgttgatcagacaggtaagctgattatgactcaggttatttatcctgtgcctccagctagtcagtccaagattaatcaggctaaaagcgaacttgcagaacttattaagagatatgccattgaaataattgctattggcaatggtactgccagtcgtgagagtgaagcttttgttgcagagattttaaaggatttcccacaagtttcttatgtgcttgtcaatgaaagcggagcctctgtctattctgcatcggagttagctcgtcacgaatttcctgacttaagtgtggaaaaacgttctgctatttccattgctaggcgtttgcaagaccctttggcagaattggttaagattgatcctaaatctattggtgtcggtcagtatcaacatgatgttggtcagaaaaagttagctgaaaatcttgattttgtcgttgaaacagttgttaatcaggttggtgttaatgttaatacagccagtcctgcccttctttctcatgtttcaggactgaataaaacgatctcagaaaatattgtcaagtaccgtgaagaaaaaggcaaaattcagtcgcgtcaagaaattaaagaggtacctcgtttaggggataaggcttttgaacaggcggctggcttcttaagaatcccgaatgcaaagaatattttagataatacaggtgttcacccagagtcttacgcagctgttgaaaaactctttgctcttttggaaataacggaattggatgaatcagctcgatcaaaattacgatcagtagcaattgaaaaagtagctactgaagttaaccttggacaggaaactctaaaggatattattgctgatttgctaaaaccaggccgtgatttacgagatgattttgcagcaccccaattacgtcaggatgttcttgaattgtctgaccttaaaattggacagcagttagaaggaactattcgtaatgttgttgattttggtgcctttgtggatattggtcttcatgaagatggtttgatacatatctcacaaatgagcaaaaattttgtcaagcatcccagccaaattgtagccgttggggatgttgttactgtctgggtttcaaaaattgatatagaacgggggaaagttaatctttctttggtggccttaaatgaatttaac

SEQ ID NO: 35831 - DNA, 1329 bp, Streptococcus mutans
atgaaagaaagtctgcgtattttgcatatcaatgatttacattctcactttgaagcttatccaaagattaagcgtttttttgctgaacattcaaaaacacagagggaagtgttaagatttgatattggtgataatgtagataaaagccatcctttgaccgatgtgagcgctggtagggtaaatgttgatttgatgaacgatctaggaattgattttgcgacgattggcaataatgaaggcattggtctagcaaaggctgaaatcaatcagctttatcataaagctgacttccaagtcatcttaggaaatttgcgagacaaaaagggacgtcctacttgggctcagccttatgtcatttatgaaactaaagctgggacaaaactggcacttttggcttacacttttccttactattggacttatgtgcctaatggttggcaagttcttgatgcgatttccagtcttaaaaaagatttggaaaatccagaggtagcggcagcagattttcgtattttacttagccatttaggcattcgtttagatgaaaaaatagcgcgtcaagttcctgaaattgatttgattattggcgcccatacgcaccatgtctttgaagaaggtgaggttgtcaatggcacttatctagcagcggcagggcgttacggagatcatgtgggacaaattgatttggatttcgaagatcatagcttgacgaatatcgctattgaagctgtgccaaccagtgatcttgattcggaaaaagaagatgcggcttttgttgcccatctttttgaagaaggcgaaaagttgctggcagagaatttgatctgcaaattatctcgccaaccaagtttgaaagagtgtgcagatttagtgatggaggcaatgaagaagtcagctgctgcagatttagctattataaacacaggattggttgttgagcctttttcgcaaaatcttactaaggcagaccttcacaaatccttaccccatcaaatgcgtctggtcaaatttcaagtgacacaaactgaactcttagaaatctgtcacgatatcttttcgcaagcagatttattagctaatcagcagattcgtggtatgggctttcgcggtaaacagttcggcaaagtagtaacgagtggttttacttacaaaaatggaaaaatagtgtataataataaggctattggcagaaaagataaaatgagccttgttttagtggatcaatattattttgctccttattttaatagcctaacatcaagaaaaggacaattgctgtttcctgatttactgagacagacagtagaaaaatacctgagaggagatcta

SEQ ID NO: 35832 - DNA, 546 bp, Streptococcus mutans
atgagaaaagacattactcctgaaatgtataattacaataagtttcccggtcctcaatttgtaacttttgataatcatgttaagagtgatgatattgatttgcttcttttggaaaatgtcaaaaatgcttttgatgtgactgtttttacccaacgcttttcagacatcttgctcaaatatgattatattgttggtgattggggcaatgaacaactgcgtttgaagggcttctataaggaggaaatgcaaagggaaactaaaaatccttatattggttatttggatgattatctaaaagaatattgcaattttggctgtgcctattttgttttggaaaatcctaatcctaaagaaatcaaaagtgaagaagataactctcaaagacgtaaacggcgcgataatcgcaggaaaaaacgttttaataaaaataatgctaaaatgaatcttcaagagaagcttcgtcgtgaaaagataaaagagcgtcaggctatgcgagagattcaggatgctaagaataattttgtgataaggaaaaaggaagttaaa

SEQ ID NO: 35833 - DNA, 1356 bp, Streptococcus mutans
atgacagaaaatgaacaaattttttggaatagggttttagaacttgcacaaagtcaattaaagcaagcgacatttgattttttcgtttcagatgctaaattattgaaagttgaaggaaatattgcgactatccttcttgatgatatgaaaaaattattttgggaaaaaaatttacagcctgttgttctaacagctggattcgaggtctttaatacagaaatttcaattgagtatgtttttgaagaaactcaatccacatcaaacagcccacaaatttctcagaataaaactgcagaacttgcaacagaaacacttccttttgtgcaaaatgatcttaatccaaaatatagttttgataactttgtgattggtgatgaaaatcgttgggcttttacagcatccgtttctgttgcagaccttcctggaacaacctataatcctctctttatttatggaggacccggtttaggaaagacccaccttctaaatgccattggtaactctgttttagcaagcaatcctaaagctcgtataaaatatatttctgccgaaaattttattaatgaatttgttgtccacattagactacaaaatatggatgagctaaagaagaaatttcgaaatttagatttactattaattgatgatattcaatctttagccaaaaaaagtttagctgccactcaagaagaatttttcaacacctttaatgctttacatgataataataagcagattgtccttaccagtgatcgaacaccagatgaccttaacgatcttgagcaacgtttggtaacacgttttaaatgggggttaactgttaacattacacctcctgactttgaaacacgagtagctattttaaacaataaaattcaagaatataattatagttttctctctgaaacaattgaatacttagctggacagttcgactccaacgtccgtgatctagaaggtgccctaaaagatatcagtcttgtggctaattttaaaaaacttgatgttattactgttgaagttgcagcagaagctatcagggcaagaaagcaagatagcagtcctaagatgattgttatccctattgaagatatccaaaaacaggttggaaaattttatggcgtaactgttaaagaaatcaaatcaaccaagagaacacaaaacattgttttagcacgccaagttggcatgtatttagcacgtgaaatgacagataacagtcttccaaaaatcggaaaggaatttggagggcgagatcattcaaccgttctacatgcctataataaaatcaaaaatatgttagcacaggatgacagtctaaaaatagaaatggaaacgattaaaaataagataaaa

SEQ ID NO: 35834 - DNA, 1134 bp, Streptococcus mutans
atgataaaattttcaattaataaagtttttttcttacaagccttaaatgctaccaagcgagctattagttctaaaaatgctattcctattctttctagtttaaaaattgaagtgaattctcagtccattactttaacaggctctaatggacaaatttctattgaaaatacgatttcagctgaagaagaaaatgctggactattggttacttcttcaggagctatcttacttgaagctaatttctttattaatattgtttcaagcctacctgatatcactttagattttgaagaaattgaacaacatcaagttgttttaaatagtggaaaatcagaaattacacttaaaggtaaagatgtggaacaatatcctcgtttgcaggaagttggaacaaataatcctttaattttagaaacaaaattgttaaaaacaattatttctgaaacagcttttgctgctagtacccaagaaagtcgaccaattttaacaggtgttcatttggtattgacaaatcataaagagtttaaagctgttgctacagactctcatcgcatgagtcaaagaaaattaactcttgaccattcatcagatgattttgatgtcgtcattccaagccgttctttacgtgaatttgcagctgtatttacagatgatattgaatctgttgaggtatttttctctaacagtcaaatcctctttagaagtgaatatattagcttctatacgcgcctgttagaaggaaattatcctgatactgatcgcttgttgggcaataactttgaaacagaagttgtcttcaatactaatgctcttcgttatgctatggagcgtgctcatttaatctcaaatgctacccaaaatggtactgttaaattggagattatcaacaatcaagtaacagcacatgttaattcacctgaggttggaaaagtcaatgaagaacttgatattgaaagcttatcaggaaatgatttaacaataagctttaacccaacttacttgatcgaagctttaaaagctcttaaaagtgagactgtcacaattcgttttatttccccaattcgccctttcactttaacaccgagtgataacagtgaaaacttcattcaattgattacacctgttcgcacaaac

SEQ ID NO: 35835 - DNA, 189 bp, Streptococcus mutans
atgtacgaattaggatctttagttgaaatgaaaaagccccatgcctgcaccattaagacgacaggtaaaaaagccaattgttgggaggtcgtacgtatcggtgctgacatcaaaatcaaatgcaccaactgtgatcatgtggtcatgatgagccgccatgattttgaacgtaagataaaaaaggtttta

SEQ ID NO: 35836 - DNA, 1113 bp, Streptococcus mutans
atggctttaacagcaggtatcgttggtttgcctaatgttggaaaatcaacgctttttaatgcaataacaaaggcaggagcagaagctgccaactatccttttgcaacgattgatcctaatgtgggtatggttgaagtaccagatatacgtttacagaagttgacagaacttattgtacctaaaaagactgtgccaacaacgtttgagtttacagatattgcaggtattgtcaagggagcgtcaaagggtgaaggtcttggaaataaatttttagccaatattcgtgaaatagatgctattgttcatgttgtacgtgctttcaatgatgaaaatgttatgcgtgaacaaggacgtgaatctgattttgttgatccaatagccgatattgaaactattaatttagaattaattttggcagatcttgagtctattaataagcgctatgcgcgtgtagaaaaaattgcacgtacgcaaaaagataaggattctgtagccgagtttaacattcttcaaaagataaaacctgttcttgaagatggaaagtcagcacgtaccattgattttacagaagatgaagcaaaaattgtcaaaggcttgttcttattgacaactaaaccagtactttatgtagccaatgttgatgaagataaagtagctgatccagatagtattgattatgttcaacaaatccgtgaatttgcagcaacggaaaatgctgaagttgttgttatttcagcgcgtgctgaagaagaaatttctgaacttgatgatgaagatagagcagagtttttagaagcaatgggcttaaatgaatcaggcgttgataaattgacacgggcagcttatcatttgttgggtcttggaacttactttacagctggtgaaaaagaagtgcgtgcttggacctttaaacgtggaatcaaagcaccacaagctgcaggaattatccattcagattttgaaaaaggcttcatccgtgctgtaaccatgtcttatgatgatcttataaaatatggctctgaaaaagctgtaaaagaagcaggtcgcctacgtgaagaaggtaaagattatattgttcaagatggtgatattatggaattccgattcaatgtt

SEQ ID NO: 35837 - DNA, 3502 bp, Streptococcus mutans
atgaatttaatagatttatttaaacaaaatcaaaaaattaaagagtggacagaacatctctctgctcctactagacaattagtaatgggattttcaagctctagtaaagctttggcaatagcagctgcttataagcagcaaaagggaaagatagtaattgtgacgtcaactcaaaatgaggctgaaaaacttgcaactgatttaattagcttaattggtgaggaagaagtttatcaatttttcgctgatgatgttgcagcagcagagtttatttttgcatcgcaagatagaacaaattctcgtgtagaaagccttaattttcttttagataaagaaaaatcaggaattttaatgacaagtattgttggtataaggattttacttccaagtccccaaaattaccaagcagctcaatttaaattaaaagttggtgaagaatataatcttgacaatattatcaagcaactgtcaaatattggttatcaaaaagtagcacaagtttataatcctggagaatttagtaaaagaggggatattttagatatttatgaaatcaatcagccctatccttatcgtcttgaattttttggagatgaaatagacggcattcgcacttttgatcctgatgatcaaagatcccttagtaatctggattcttttattttgatcccatctgatgatatcatcctgacagatagtgattttgatcaagcctgttataatttagaaaaagcacttattactgcaaatgatagtttacaaccttatttaaaagaggttttatctgttacgaaagatcattaccgtcatcaagatgttagaaagtttttatcctttttctatcaaaaagaatggactcttttaaattatctacctgaacaaacaccactattttttgatgattttcaaagaattattgatcgaaatagtcattttgatttggatattgctaatcttttgacagaagatttacaaaatagtaaagcagtgtcaagtttatcttattttgctaataattacaaagatttaagacactatcaacctgcgacctttttttctaattttcataaaggcttaggaaatcttaaatttgattatctctataactttacacagtatccaatgcaggaattttttaatcaatttcctttattaattgatgaaattagacgttatcaaaaatctgagatgactgttcttttacaaacagattcacagcagagtcaaggacgtttacaaaaagctttacagggatataatttcaatttaccaattagtcaagttgataatctgttaaaaaagcaagctcagttaacaattggaaatctttcaactggtttttattttgctgatgaaaagcttgtcttaatcactgaaagagaaatttttcataaaaaagtaaagcataaacgtcgtcgttcatatattagtaatgctgagcgtcttaaggattacaatgaattagaaaagggagactatgttgttcataatgtgcatggcataggacgttttttagggattgaaacgattgaagtgtcaggtgttcaccgagattatttaaccattcaatatcaaaatgctgatcgtatttccattcctattgaacaaattgaactcctttcaaaatatgttgctagtgatggtaaagagccaaagatcaataagcttaatgatggccgttttcaaaggattaaacaaaaggtatcaaaacaagttgaagatattgctgatgatcttttaaaactttatgctgaacgcagtcaattaaaaggttttgctttttctcctgatgataaaaatcaggaagaatttgataatgattttgcttatgttgaaactgaagatcaattaagatccattaaagaagtcaaaaaggatatggaaaaagaccaaccaatggatcgtcttcttgttggtgatgttggttttggaaaaacggaagtagcgatgagagctgcttttaaagcagttaatgatgataaacaagttgctgttttggtgccaacaacagttcttgctcaacagcactataatacttttaaggagcgctttgaaaattttcctgtcaatgttgccatgatgagtcgttttaaaaccaagactgaacagtctgaaacgttaactaaattagctaagggacaggttgatatcattattggaacacatcgtctactttctaaagatgttacgtttaaagatcttggtttgcttgttattgatgaagagcaacgattcggggttaaacacaaggaaacattgaaagaattaaaaactaaggttgatgtcttgaccttgacagcaactcctattccacggacattacatatgtctatgcttggtatacgagatttatcagttattgaaacacctccaagtaatcgttaccctgtccagacttatgttatggaaacaaatgcaagtgtcattcgtgaagctattatgcgtgaaattgatcgaggtggacaaatcttttatatttacaacagggttgacacaattgacaaaaaagttgctgaactaagagaattgattccagaagccaacattggttttgttcatggaaaaatgagcgaaattcaacttgaaaatactttactagactttatcagtggtgaatacgatctcctagtaactacaacaatcattgaaacaggtattgatatttcaaatgttaatactctgtttattgaaaatgctgattacatgggcttgtcaactttgtatcaacttcggggacgtgttggtcgatcaaatcgtattgcttatgcttatcttatgtatcatcctgataagattttaacagaagtgtcagaaaaacgtttggaagctattaaagggtttacagaacttggttcaggttttaaaattgctatgagagatttgtctattcgtggtgcaggaaatattcttggttcctctcaaagtggcttcattgattctgtaggttttgaaatgtattcacagttattagaagaagcaattgcagcaaaacaaggtcaaagaaaaacgcgttctaagggaaatgctgaaattaatttacaaattgatgcttatttaccaacaaattatattagtgatgagcgtcagaaaattgaaatttataaacgtattcgagaaattgaaagtaaaacagactatcaggctttacaagatgaactgattgatcgttttggtgattatccagatcaggttgcttatctgatagaaatcggtcttttaaaagcttatctagatgatgcctttgtagaatcacttgatcgtaagcaaaattcagtagtagtgtgttttgaaaagatttcattaaaattttatctaactcaggattattttgaagctttgtctaaaactaatttaaaagctcgtattagtgaaaataaaggaaaaattgaaattgtttttgatgtgcgagctaaaaaggaatatgaaattttagaagaattaattaaatttggaaaaattttgaagaaactaaaagataagaaaaagtaacaatttattaaat

SEQ ID NO: 35838 - DNA, 270 bp, Streptococcus mutans
atgagattagataaatatttaaaggtatcacgtattattaaacgtcggtctgtggctaaggaagtttctgataaaggacgaattaaagtaaatggcattctggctaaaagttcaacagacttaaaaataaatgacaccattgaaatacgttttggtaataaattattgactgttcgtgttttagaaatgaaagatagcaccaaaaaagaagatgctgtaaaaatgtatgaaataataagtgagacgaggattgacttaaatggagaaacc

SEQ ID NO: 35839 - DNA, 933 bp, Streptococcus mutans
atgtcagttacagtacagatgttggttgacaaggtaaaattggatgtgatttatgggacgcaagaactcttacaaaaagaaattgcaacagcagatatctcgcgtccaggacttgagatgacaggctattttgattattatgcccctgaacgtatacaattgttgggaatgaaagaatggtcttatttaacacaaatgacttctcataaccgttattctgttttaaaagaaatgtttcaaactgaaacaccagccattatcgttgctagagatcttactattcctgaagaaatgctgctggcggctaaagaagagggtattgcggttttgcaaagtcatgtgccaactagtagactttcaggagaaatgtcttggtatctagattcttgtttggctgaaaggacaagtgttcacggtgttttaatggatatctatggcatgggtgttctgatccaaggagattctggtattggtaaaagcgagacgggactcgagttggttaaacgtggacatcgactagttgcagatgatcgtgtagatgtttttgctaaggatgaagagaccctatggggtgagccagctgaaattttacggcatctgttggaaattcgtggtgttggcattattaatgttatgagcttgtatggagccagtgctgttaaggattcttcacaggttcaattatctattttccttgaaaattttgagaaggataagatgtttgatcgcttgggtaatggcaatgaagatattgaattatctggcgttaaaattccacgtattcgcattccggttaaaactggacgaaatgtttctgttgtgattgaagcagcggctatgaattaccgtgctaagcaaatgggatatgatgcaactgaaacctttgagaaacgtttgactaatttaattgatcaaaatgaggcgagccatgat

SEQ ID NO: 35840 - DNA, 1005 bp, Streptococcus mutans
atgaaagacatttttgaaaaattagctgctcaagaaaatttaacagaagctgaaataacagcagttgctgaaaaaatttttaaaggagaattgtcagaagcacaaatagcagccttcttgatggctttgaaaatcaagggggaaacaccggaagaaattttaggtctcgttaaaacgattaaaaaaaatgcagctgttattcctagccaaacaagcgatgctatggataattgtggtacaggtggtgataagtccttttctttcaatatttcaacgacttgtagctttgtcctcgctgctggtggcatccatattgctaagcatggtaatcgttctatttcttcaaaatcaggttcagccgatgtccttgaagaattgggaatcaatgttgtcctagctcctgaaaaattggcccaagttctagatgagacaggtattgtctttctctttgctcaaaagatgcatccagccatgcgttatatttcaccggctagacaggccttaggtattccaacggtcatgaatcttattgggccactgacacaccccatggatttggaaacgcagctgttaggcctttatcaggcggacttacaagatgatttagctcaagttcttaaacttcttggtcgcaaacgtgcagttattatcactggaccagataatatggatgaagcagcactttatggtaaaaatcattatactctgttggataatggtcagatttcacaaggtagtttcacttttgaagattttgacatgccaaaagttacgcttgaggatatcaagggtggtgatgctaaagaaaatgctcaaatccttgttagtgttctcaaaaatgaacctagtccttatttagagacaacgcttttaaatgctggtcttggtttttatgctaatggtaaggtggattcgattaaagaaggcattgacctagcacgtgaagtcattgcatcaggcaaggcttatgctaaattaaaggcattacaggaggcgcaagttgac

SEQ ID NO: 35841 - DNA, 1284 bp, Streptococcus mutans
atgacaaaacaattaaaacgcccagaagtgctatcgcctgctgggactttagaaaaattaaaagttgctgttaactatggagcagatgctgtttttgttggcggacaagcttatggtttgcgcagtcgtgcaggtaacttttcgatggaagaaatggctgaaggaattaattatgctcatgatcatggggtcaaggtttatgtggctgctaacatggtaactcatgagggcaatgaaataggagccggtgcatggtttcgtgaattacgcgacttaggtctagatgcagttattgtatcggatccagcccttattgcgatttgtgcgacagatgcacctggtttggaaattcatttgtcaactcaagcttcatccactaactatgaaacctttgaattttggaaagaactgggcttgacacgtgttgttttagcgcgtgaagtcacaatggcagaactagctgagattcgtaagcgtacgagtgttgaaattgaagcctttgttcatggggcaatgtgtatttcttattcaggacgctgtgtactttccaatcatatgagtcatcgcgatgctaatcgtggtggttgttcacaatcttgtcgttggaaatacaatctttatgatatgcctttcggtcaagaaagacggtcattgaaaggtgaagtaccagaggaattttcaatgtcagctgttgatatgtgcatgattgaaaatattccagacatgattgaaaatggtgttgatagccttaaaattgaaggacgtatgaagtctattcactatgtttcgacggtcacaaattgttacaaggcggctgtcaatgcctatctggaaagccctcaagcatttgaagctatcaaacaagatttgattgacgaattgtggaaagtcgctcagcgtgaattggctacaggtttctattaccaaacacctactgaaaatgaacagctttttggagctcgtcgtaaaattccccaatataaatttgtcggtgaagtggttgattttgatgagccaagtatgacagcaactattcgtcagcgtaatgtcattaatgagggggatcgggttgaattctacggacctggtttccgtcattttgaaacctttattacagatttacatgatgcggatggtcaaaaaattgaacgtgcgccaaaaccgatggagttattgacaattacggtaccacaggaagtcaaagcaggtgatatgattcgtgcctgcaaggaaggcttggtcaatctttacaaagaagatggcagcagccttactgttagaact

SEQ ID NO: 35842 - DNA, 765 bp, Streptococcus mutans
ttgactaaagagtttttacctactattttaaagcaaaaacaagaagagctagctagtctaattatggaagaagtcaaaccgcttcgcttaacctatcgtctctttgattttttaaaagagcatcatgaccagttgcagattgttgctgaagttaaaaaagctagtcccagtatgggagacatcaacttagatgttgacattgtcaaacaagcccaaatgtatgaagccgctggagctgctatgatttctgttttgacagatcaggtttttttcaagggaaatattgattttttggctgagatatctggcagtgtcagtattccgaccttggctaaagattttattattgatgagaagcagattgttcgtagccgtaatgctggtgcgactgttattttgctcattgtggccgctttaccagagaagagactgaaggaattgtatgactttgctgcaggtttaggactagaagttttagtggagacccataatttgtctgaattggaaatagctcatcgtattggagcacagattatcggtgtcaataatcgtaatcttgttacttttgaagtagatatcaataccagcttggagttatctacccatttccgagatgataaggtttatatttccgaatcaggtatttttacgggacaggacagtaaactcgtcgctccttactttaatgctattcttgtaggaacggctctcatgcaggcagataatgtcgctgataaagtaaaggagttggctattgacaaaggt

SEQ ID NO: 35843 - DNA, 558 bp, Streptococcus mutans
atgtctttagtcggaaaggaaatggttgaattttcagcccaagcttatcatcaaggagaatttgttacggttaacaatgaggatgttaaagggaagtgggcagtcttttgtttctatccagcggatttttctttcgtgtgtcctactgagttaggtgatcttcaagaacaatatgcaactttgcaatctttaggtgtggaagtttactctgtttcaacagatactcattttgttcacaaggcttggcatgatgattcagatgttgttggaacaattacttatactatgattggggatccttctcatgttctctcacaaggatttgaggttttaggtgaagatggtttagcacaacgtggaacctttattgtagatccggatggtatcattcaaatgatggaagtcaatgcagatggtattggtcgtgatgctagtaccttgattgataaagttcgtgcagctcaatatattcgccaacatccaggagaagtttgccctgccaaatggaaagagggagctgaaactttaaaaccaagtttggatcttgtcggtaaaatt

SEQ ID NO: 35844 - DNA, 1209 bp, Streptococcus mutans
atgacatataatcaacccaataacaacggtttttatggtaattttggaggacaattcattcctgaaacgctgatgacagctgttattgaattggatgaggcttatcgtgaagccaaagctgatcctagttttcatgaagaattagatgctctcttaaaagattatgttggtcgtgaaactcccttgtactttgctaaacgtttgacggattatattggtggtgccaaaatttatctaaaacgtgaagatcttaatcatacaggtgctcacaaaatcaataatgcactggggcaagttcttttagctaagcgtatggggaaaaataagattatcgctgaaacaggtgcaggacagcatggtgttgcaacagcgacagcagcggctctctttgatatggaatgtaccatttatatgggggaagaagatgtgaaacgtcaagctcttaatgtctttcggatggagctattaggtgctaaagtgcattctgttacggatggatcgcgtgtgcttaaagatgcagtcaatgcagctttgcgagcatgggtaaccaatattgaggatacccattatgttatgggatctgctcttggaccagctcctttcccagaaattgttcgtgatttccaatcggttattggcagagaagctaaacgtcaatttgcgacagtttcaaatggacagctgccagatgcagtcttagcttgtatcggtggcggctccaatgcaatcggactcttttatccttttgtcaacgatgaatcagttgccatgtatggtgcggaagcgtcaggtttagggcttgataccgataagcatgcggcaacctttgccaaaggacgaccaggtgttttacatggtgctcttatggatgtgctgcaggatgagcatggacagattatggaagctttctcgatttccgcgggccttgactatccaggtgttggtcctgaacactgctatttcaatgaaattggacgtgcaacttacgattctattacggatgaagaagctctggaatctttcaaattgctatctcgtctggaaggcattattcctgcattagaatctagtcatgcgattgctctgacacaaaaagttgcgaaggaactaggagcggataagtccattattgtttgcctctcaggacgtggtgataaggatgtggctcaggttaaagaacgtcttaagcaggaagcaaaagaagggaag

SEQ ID NO: 35845 - DNA, 918 bp, Streptococcus mutans
atgatgttaaatgaaatgaacaaaagtttagaaggcgttgatatccgtattaatgaacccctaaaaaaatatacctatacaaaagtgggcggtccagctgattttttagcctttccacgtaatcgttatgaactcgctcgcattgttaaatttgctaatcaaaataacctaccttggatggttttaggaaatgccagtaatttgattgtgcgtgatggtgggattcgtggctttgtcatcatgtttgacaaacttaatgctgtgactgttgatggttatgtaattgaagcagaagcaggttctaatctaattgaaacaactaaagttgctcaatatcatagcttgactggctttgaatttgcttgtggcattccgggaagtattggtggtgctgtttttatgaatgctggtgcttacggtggtgaaatctctcatattttgatctcagctcaggttttaactagagatggtgagattaaaacaattgaagcgcgagatatgcgctttggttatcgtcattctgttttacaagataatcaggaagttgttgtttcagccaagttttctttaaaaccaggggattatactattatcagtcaggaaatgcagcgtttaaatcatttacgagcacttaaacaacctttagagcatccttcttgtggttcagtcttcaagcgtcccttaggacattttgcaggtcagttgattatggaagctcaattgatgggacatcgcattggtggtgttgaagtcagcacaaaacatgccggttttatggtcaatgtcgccaacggttcagctaaaaattacgaagatctaattgctgatgttattcatagagttaaagaaaattctggtgttactcttgaaccagaggttcgaattattggtgaaaaagaagtacaaatggaggactca

SEQ ID NO: 35846 - DNA, 1071 bp, Streptococcus mutans
atgcataaactttattcctttataggaagtattttccttattatcctgcttttgattggcttaaacttctatatgaatcaacagatagaagggaaaggagcttctgataagctggttatttataactggggggattatattgatcccgaacttctgacaaaatttaccaaagaaacaggcattcaggttcaatatgaaacttttgattccaatgaagctatgtataccaaaatcaagcaaggtggaacaacttatgatattgctgttcctagcgattacatgattagcaaaatgaaggcagagcatcttttggttaagcttgataaatcaaaaattaagggtttaactaatcttgatcagcaatttcttggtaagagttttgataaagacaacacctattctattccttatttttggggaacagtaggtatcgtttacaatagcaaaatgctaactaaagtacctcagcattggaatgacctttggaataaagcatataccaataagattatgcttgttgatggtgcacgtgaggtacttggttttagtctcaatagtcttacttatagcctcaatactaaaaatagggcagagttggagcgagctgaaaggaagctcaatcagttgacacccaatattaaagctatcgttggtgatgagatgaagggttatctcattcgaggagatgctgctcttggtgtgacattttcaggagaagctagagaaatgctggataccaataaagatcttcgttacctcgttcctggcgaaggttccaatctttggtttgataatctagttattcctaaaacagtcaaacacaaaaagtctgcctatactttcattaattttatgctaaagccagaaaacgcggctcaaaatgctgaatatattggctacgcaacgccaaatgctaaggcgaaagatttactaccggctgatataaaaaataataaatctttttatccaagtaaggaaacaataggtcatttagaagtctatgataatcttggcaagaagtggctgggtatttataatgatctctatttgcaatttaaaatgtatcgtaaa

SEQ ID NO: 35847 - DNA, 1338 bp, Streptococcus mutans
atgaaaactcatccaaaaaagcaatcactcagcgaggtcaatcagagcgttcgtgttcctaaaaatgcctcttttttaacaactttaagagcttttttaggacccggagcactagttgccgttggttatatggatccgggaaattggattaccagcgttgttggcggagcaagttataaatacttgctgttatcagttgttttgctgtcttcacttattgccatgcagctacagcaaatggctggtaaactgggcattgtctcgcgacaagatttagcgcaggcaaccgcctcccatcttcctaagagattgcgttatcttttgtttattgttattgaattggctcttatggcaacagatttagccgaagttattggctcagggattgccttacacctcctgtttggttggcctttgcttttttcgatctttattaccattttagatgttttcttacttctatctattatgaaacttggatttagaaaaattgaggccatcgtttcaacccttattttaaccattctagttatttttgtttacttagttgttatttctcacccgagtttttcaggtattattaagggttatattcctcagtttgctatttttgattcagcacaagcagctactaacagtaggttgaccttagcacttggtatcattggcgcaactgtaatgcctcacaatttatacctgcactcatctatctctcagacacgtcaagttgattataagcaaaaatcttctattgctcaggccgttaaattcatgacttgggattccaatcttcaattaagtctcgcctttattgttaattctctgcttttaattcttggagcctcgcttttttatggacatgccagtgaaatcagtgccttttcacaaatgtataatgctttagccaataatcacattgctggagcagttgccagttcttttctttcaactctttttgccatcgctcttttagctagtggacaaaattcaaccattactggtacattaactggacaaattgttatggaagggttcttacatctcaaaatgcctcaatggctcattcgcttagtaacacgtctcttggccttattacctgttttgatagcagctattctttatggcagtcaggaaaagattttggatcagctgatcgtctattcacaggttttcctgtcagttgctttgccattttctatctttccactggtttattttacatcacaaaagaaaatcatgggagaatttgttaatgctaagtggaatacttatctagcttatggagttgccactgtattaacaatcctcaacttgcaattaatcatcaataccattttt

SEQ ID NO: 35848 - DNA, 525 bp, Streptococcus mutans
atgacgaatacaattactgaaaatatctacgcttctattattcatcaagtggagaaaaaagaaaattcaggaaatgaaaaaaccaaggctgtacttaatcaggctgtagcggatttatcaaaagcaacttccattgttcaccaagtccattggtatatgcgtggttcaggcttcctttatctgcatcctaaaatggatgaattgatggatgccttgaatggtcatcttgatgagattagtgaacgcttgattactatcggtggcgctccgttttcaaccttgaaagaatttgatgagaattccagacttgaagaaacagttggcacatgggataaatcaataactgatcatcttaaacgccttgttcaagtttatgattacctttcaagtctttatcaagtaggtcttgatgtgacagatgaggaaggtgatgctgtttctaatgatatctttacagcagctcaaacggaagcccaaaagacaatctggatgttgcaggcagagcttgggcaagctcccggttta

SEQ ID NO: 35849 - DNA, 2178 bp, Streptococcus mutans
atgacatttgaaaagcaaaaacactttagtttacgtaaactaaaatttggtttagtttcagttgcgatcatagctttcttatttgctgtaacaaagactgcagaagctgacgagacagtgataactgaacaaaggcaaacaagtaagattaacgctagttctcaaaaagtggagaatcagacttcaaatcaggtggaagcaaaaacggatagtgcaaacaaggatcctcaagaaaaaacaggaagtgttgcaactgatgccccttcaatgaattcagctaataatatgagtcagtctgacaaacaaaatactgttaatgaaatatcttcagatagtcagcaaacaaaaacagatgaacaaactgatttaccgcaaaacagctttaaacaacaatctgctcatgttaaaatgactactgaagcagagaagaccccatcacattcgattaatacctttgttaatgatggtaatggtaattggtattaccttggtgctgatggtagaaatgttacaggcagtcatacgattggtggcaagactatgtattttgctcaagatggtaagcaagttaaaggtgcttttgctcaagattcggatggaaataaacattattatgatagagatagtggtgagatgtggaccaatcgctttgtcaatgatcaaggcaattggtattatcttaataatgatggtgtccctgtcaccggtagtattactgtcaatggtcagtctctgtattttaattcggatggtagtcaggttaaagggaattttgttgaagaagatggatctttgcgttattatgataaaaattctggagatttactgagaaagacaagccgaaccattaatggtgttaactaccaatttgataatgatggaaatgcaagggcgattgacaaaattgaggttgttaagaccagtcttgtagttgatagttatgaatttggtccttctgtttcaaagattattcttgagttcaatcataaggtaactcctgctgttgttcatgctggtgcaatggtaacaactgctggagttcaaagaaaaattcttaattcttatgtctctaatgcttcaggacatgtggtttactttgatagtagccattatgtgacacttgaattagatattccttatgatccaaatgatagcagccgaaatgcatcaccttttatttttgactcagcagcctttcgtaataactgggtcaacagttatactgtcaaagtagataatttgcaggtgcaagcagatggttctaatagcagtcaaattatcagttcagagcaagatgctatcaataatcgtttcttgcctacaacggatcgtttctcagaacgtggtagttatggtaattttaattatgccgcctatcaaccagaagcagctattggcggtgagaagaatccattgattgtctggttgcatggtataggagaagtaggcactgatattaatattccgcttctagccagcaatgtggctcgtttaacggaagatcctattcaaagccatttcacttctacaggtagtggtggtcaaaagggagcctatgtgctagttcctcaaagttcaattccttggtctcaaaatcaaacagctagcttaatggcgctcattaaagcctatgtagcaagccatccagacatcgatagccgacgcatttatttggcaggtgtttctaatggtggcggtatgactctggatatgggagtcgcttatcctaactattttgcagccttagttcctattgctgcttcctatagtaatcaattaacagataatcagattaccgctgctgctttgaaagctctgaaaggtcaaccaatgtggttgattcatacacgaactgataaaacaatatctgcagatagtagtgttctaccattctataaagagttacttcaagctggcgcacaaaataaatggctttcctattatgaaactaatgttggtaaacatcactctggagtcacttataacggtcactggtcttggatttatttcttgaatgatcaagtaactggcactcaaaatactgataacgccaagaattggtctggactttctggcatggttgcgaccaatccaacctatggtggtgatgctaaggctactgtcaatggcagaacttatagtaatgtctttgattggctaaatggtcagcgaagaagg

SEQ ID NO: 35850 - DNA, 969 bp, Streptococcus mutans
atggctaagaaacttttagggattgatcttggtggaacaagtattaaatttgggattttaactttagatggacaagttcaggagaaatgggctatcgaaaccaatattttggaagatgggaaacatattgttccagatattgtgtcctctatcaagcatcgtttggaactctataatttaactaaggaggattttgttggtattggaatgggatctcctggagctgtggatcgtaatctaaagactgttacaggtgcttttaatcttaattgggctgctacccaagaggtaggaacaataattgaagcagaattggggataccatttgctattgataatgatgctaatgttgcagcacttggagaacgctgggttggtgcgggtaataataatcctgatgttgtctttgtaacacttggtacaggtgttggcggcggcattattgctgatggcaatcttattcatggagttgctggtgcaggtggtgaaattggacatattattgttgagccggatactggttttgagtgtacctgtggcaataaaggctgtcttgaaacagtggcttcagcaacaggtgtcgtccgtgttgcacgtcatttagcagaagaatatgaaggtatttccagtattaaagcgggcattgataatggtgatgatgtgagcagtaaggatatttttgttgctgcacaggcaggtgataaatttgcaaactcagttgttgagaaagttactttctatctaggccttgcaaccgccaatatcagcaatatccttaatccaaacacagttgtcgttggaggtggagtatcagctgctggagaattcttgcgctcacatattgaaagttattttaaattgtatgcttttccacaagtgaagcaatctacaaaaattaaaattgcagaattaggaaatgacgctggtattattggggcagccagtcttgcacatcagtttttagaaagt

SEQ ID NO: 35851 - DNA, 1500 bp, Streptococcus mutans
ttggaggaaaacatgtcacatcaacatacagaagaattgaatgaccaacaaattgtccgccgcgaaaaaatggaggctttgactgaacaaggaatagatccatttggcaagcgttttgaacgtacggctacttctggtcaattaaaagaaaaatatgctgacaaaacaaaagaagaattacatgacatcaatgaaacggctaccattgctggacgtctgatgaccaaacgaggtaaaggtaaggttggctttgcccaccttcaagaccgtgaaggtcaaattcaaatttatgtccgtaaagatactgttggcgatgataattatcaaatttttaaaaaggcggatattggagactttttaggtgtagaaggtgaaattatgcgtacagatatgggagagctttctatcaaagctacgcatataacgcatctttccaaggcactgcgtccactgcctgaaaaattccatggtttaactgatgttgaaaccatctaccgcaagcgttacctcgatttgatttctaaccgcgagagtctggaacgctttatcactcgttcaaaaatcatctcagaaatccgtcgctatctggatggccttggtttcttagaagtagaaacgcctgtccttcataatgaagctggtggtgctgctgctaaacccttcacaacccatcataacgctcaagatatggatatggttcttcgtatcgcaacagaactgcatttaaaacgactgattgttggtggtatggaaagagtttatgaaatgggacgtattttccgtaatgaaggaatggatgccactcataatcctgaattcacttcaattgaagtttaccaagcctatgctgactttgaagatatcatggatttaacagaaggtattgtgcaacatgctgctacagccgttaaaggtgatggtcctattacttatcaaggtaccgaaattaagattaatgaacccttcaaacgtgctcacattgttgatttaatcaaggaagtgactggtgttgatttttggaaagaaatgaccttggcggaagcacaggctcttgctcaagaaaaaaatgttccacttgaaaaacactacacttctgttggacacattatcaatgccttctttgaagaattcgtcgaagaaacactcattcaaccaatctttgtttatggccatcctgttgaagtttcaccactagctaagaaaaatgcagatgaccctcgtttcacagaccgttttgaacttttcattatgactaaggaatacggaaatgccttcactgaattaaatgacccaattgatcaattggagcgctttaaagctcaagccgctgccaaagaattgggagacgacgaagccacaggcattgactatgactatgttgaagcccttgaatacggcatgccaccaacaggcggactcggtattggtattgaccgcttagtcatgctcttaacagacacaacaaccattcgcgatgtattgttattcccaacgatgaag

SEQ ID NO: 35852 - DNA, 387 bp, Streptococcus mutans
atgtcaattatctctatcatttcgtgggttattatctttgcctttgtggcttggtttgtttggaattattttcgtgttcgccgtgctgcccagtatatctcaaatgctgaatttgaaagcatgatgagaggcgcacaaattgttgatttgcgttctcccaatgagtttcgtcgtaagcatatcttaggagctcgtaatcttccctctgaacaattcaaagcatctgtttcagctcttcgcaaagataaaccggttttattgtatgataatactcgtggacagctggttgctcgcgctgttttaactttgaaaaaggcaggttataaagatctttatgtccttaaaaatggtttagataattggaatggaaaagtaaaagagaagaat

SEQ ID NO: 35853 - DNA, 1842 bp, Streptococcus mutans
atgacaaattttagagaagatattagaaatgttgctatcattgcccacgttgaccatgggaaaacaacccttgttgatgagctcttaaaacaatcgcatacacttgatgagcataaaaaattagaagaacgtgcgatggactctaatgatcttgaaaaagagcgtgggattactattcttgcaaaaaatactgctgttgcctacaatggtgtacgtattaacattatggacacaccaggacatgcggattttggtggagaagtagagcgtatcatgaaaatggttgatggggttgttcttgttgttgatgcttatgaaggtaccatgccgcaaacacgttttgttttgaaaaaagctttggaacaaaacctggttccaatcgtggtggtgaataagattgacaagccatcagctcgtccggcagaagttgttgatgaagttcttgaacttttcattgaacttggagcagatgatgaccagttagagtttccagtcgtttacgcttcggcgattaatggaacttcttcattatcagatgaaccagcggatcaagaacatacaatggcacccgtttttgatactattattgagcatattccagcaccgatcgataattcagatcagccacttcaatttcaagtgtctctccttgattataacgactttgttggacgtatcggtattgggcgagtcttccgtggttctgttaaagtcggggatcaagtgacactttctaaacttgatggtacaacaaagaattttcgtgttacaaaacttttcggtttcttcggtttggaacgtcgtgagattaaggaagctaaggctggcgatttgattgctgtttcaggtatggaagatatctttgttggtgaaacgattacaccaactgatgctgtagaaccacttcctattcttcacattgatgagccaactctgcaaatgacctttttagctaacaattccccttttgcaggccgtgaaggtaaatttgtaacctcgcgtaaggtagaagagcgtttgttggcagaattgcaaacagatgtttcccttcgtgtagaagccactgactcaccagataaatggacggtttcaggtcgtggggagttacatctgtcaatccttattgaaaccatgcgccgtgaaggatatgagctgcaagtatcgcgtccagaagttattatcaaagaaattgatggcatcaaatgtgagccatttgaacgcgtgcaaattgacacaccggaagaataccaaggtgctgttatccagtccctttcagaacgtaaaggtgaaatgcttgatatgcaagcaactggtaatggtcaaacgcgccttatatttttagcaccagctcgaggacttatcggctacccaacagaattcttatccatgacacgaggttatggtatcatgaaccacacttttgacaaatatatgccagttatcaatgctgaaatcggtggtcgtcatcgtggtgccctcgtttcaattgatacaggtaaggcaacgacttattctattatgtctattgaagaacgtggaacaatcttcgttaacccaggtacagaagtgtatgaaggaatgattattggagaaaatgcacgcgagaatgatttgacagtcaacattacaaaggctaagcagatgactaatgtgcgctctgcaaccaaggatcagacagcagttattaagacgccgcgtattttaacacttgaagaatcacttgagtttctgaatgatgatgaatacatggaagtaacacctgagtccattcgtttacgtaaacaaattcttgataagaatgcgcgtgctaaagcggctaagaagaaaaaatcagctgaagat

SEQ ID NO: 35854 - DNA, 2151 bp, Streptococcus mutans
atgaaaaaaatcgctaaatttctcttaagcgctgttaatacccgtttagggtttattttaacgcttgtattcatttattggctaaaaacaatttgggcttataatgttgattttagtttagatttagacaaatcataccaattttttttgacactaataaaccccattcccattagtttgttgctgttaggattggcactttatatcaaaaatacacgcatcttttatttcactgcgattgttatttatactctacttaatattcttctcattgctaattctatttactttcgagaattttcagactttctaacagttagtgcagcattagcaagcagcaagacttctgctggtttaggggcttctgcccttaatttattgagaccttgggatgctatctatattctagattatgtcattttaatcactcttttttctcttaaaaaactttcttttgaccaaagacccttcaacaaaagagctagctttgctatttctgctctctcaggtctccttttttctgtcaatcttttcatggctgaaattgatcggcctgaattactaacacgtgggttttcaaatatttatgttgtccgtgctttagggttgccagcatttagtgcctacagtgctaatcaaacttaccaaacacaaaaagtacgctcagaagcaactgcttctgaattcaatactgttaaaaaatatgtaaaagaacattatgccgctcccaaccctaaatactatgggcttgcaaaaggtaaaaatgtcattgtgcttcatttagaaagttttcagcaatttctgattgattataagctcaatattgatggcaaacaatatgaagtaacaccttttttgaattcactttaccattctaaggaaacatttgctttttcaaacttcttccatcaagttaaggccggaaaaacttctgatgctgaaacattaatggagacatcactctttggtttaaaccaaggctccttcttcgttcaatacggaggtgataatacacagcaggctgcaccgcatattctaaaggataccaacaattacagcagtgccgtctttcatggtaatatcggtactttctggaaccgtaataatgcctacaaacaattgggctatcaacatttctttgatcaatcttatatgtcaaaaatgaccaaggacaactctttccaatatgggcttaatgataaagttatgtttgcagattccattaaatacttggaacacatgcaacagcctttctacacaaaatttatcaccgtttcgaatcactacccttatcaaagtttagatggtgatgatactggctttcctcttgccaaaacagaagataaaacaattaatggctactttgctacagctaactatctagatgctgctatcaaagatttctttgattacttaaaagcctctggtttatacaaaaattccattattgttatgtatggtgaccactatggtattgctaattcaagaaatactgatcttgcaccacttttaggcaaggattcacaaacttggactgaatacaacaatgctatgttacagcgtgttccttatatgattcacgttcccggaacagataaaggatttatcagtaacacctatggcggagaagttgatgctttgccaacactgcttcaccttttgggtattgataataaaaattatattgaattaggacaagatttactgtctcctaacaacaagcagcttgttgctttccgttccgaaggtaattatattacacctaattatacaagttacagcggccgtgtttacgacactaaaacaggtgttgagatcacaaatccagacgaagcaacgactgctaaactaaaagaacttcgtgatgcagcagacaaacagttaaatacaagcgataacattcaaacaggtgatttactgcgttttgataaggatagtggtctaaaaccaattgatatcggttctatttcatataaaaaggattctctgaagaaactaaagaagattgaaaagaaactagataagaattcaaccagtctttatagcaaaaatggtaacaaatcaactcaagatttatacaaggcaccaagttataaagaactacacccagaagaatcaccaaaagaatcctcaacaactacatcatcaaaa

SEQ ID NO: 35855 - DNA, 1353 bp, Streptococcus mutans
atgaaacacgtcaaaaattttgaaaataaaaaggttttggttcttggcttagcacgatcaggtgaagctgcggcacgtctcttggcgaaattaggagctattgtaactgtcaatgatggtaagccttttgatgaaaatccatcagcgcaggcacttttagaggaaggcataaaagtgatttgcggcagtcatcctttggaacttttggatgaagcatttgcttatatggttaaaaatccggggattccttatacaaatccgatggtggttcgtgcgcttgaaaaaaatatcccagttataacagaagttgagttagcttatttgatttctgaagctccgattatcggtattacaggatctaatggtaaaacaacgaccacaactatgattgccgatgttcttaatcatgcaggacagtcagcacgactttcaggaaatattggatttccggctagtgaagtggctcagccagtaacagagaaagatattttggttatggaattgtcttcttttcaattgatgggaacggaaagttttcatccgcatatggcagtgattaccaatttgatgccaactcatattgactatcatggttcatttgaaaattacattgaagctaaatggaatattcaaaaaaatatgacaaaagaagattttcttgttcttaactttaatcaggatttggccaaggacttagctaatcaaacgcaggcaaagattattcctttctcaactaaggagaaagtagatggtgcttatcttgatggccaaatgctctgcttcaagggacaagccattatgtcagcttctgagcttggtgtaccaggaagccataatgttgaaaatgctttagcaacaattgctgtggctaagttatcaggtgtttctaatgaagccatcagagaaacacttatccacttcggtggtgtcaagcatcgcttgcagtctctggggaacattgctggtgttaaattttataatgatagtaagtcaaccaatattttagccactcaaaaagctttgtcaggatttgataatagcaaggttatattaattgctggtggtctcgatcgcggcaatgaatttgacgaattagttccagatattaaaggactcaagaaaatgattattttaggcgaatctgctccccgccttaaacatgctgcagtacaagctggtgtcacctatctcaatgccaaagatgttgcccaagcaactcgaattgcttttcaggaagctagtcctggagatgttgtccttcttagtcctgccaatgctagctgggatatgtataaaaattttgaagttcgtggagatgaatttatcacaacttttaagtctcttaaaggagaa

SEQ ID NO: 35856 - DNA, 1284 bp, Streptococcus mutans
atgatttccttaccattttcaagagataaaatcttattatttgattataacataattttatttttggcagatgacagaaatgtttttttaagggagaaattttctgaattttttgttataatgattgatatgattaaacttatggtgggttcttttgcggagaaaaaacttaaacgaggggtgcaattattaagtagcagagattatccaaatttaaatttggataatcaagttgttcaattatattctgacgcagatatttttttaggaacagcctatttatcaaagcaaaataaaggcgttggttggttaatttcacctaaaaaagtatcacttaatgtgacttattttattaaattatttcaatggtctaaagataagcgaaaaaattttgctcattctaaattaacaacagcctaccgtctttttaatcaagatggtgattcttttggtggtgtgacaattgattgctatggtgattttgtgcttttttcttggtacaattcttttgtttatcagattagagatgagatagtagctgcttttcgtcaagtgtatccgaattttttaggtgcctatgagaagattcgattcaaagggattgataatgtttctgctcatctttatggtcaagaagcaccagaacaatttcttattttggaaaatgggatatcttataatgtcttcttaaacgatggactcatgacaggtatttttttggatcagcgccaagtaagaaatgagttgattaatggatcagctgcgggaaaaactgttttaaatctcttttcatacacagcagctttttctgttgctgctgctatgggcggtgcaatggcaacgacttcggtggatttggctaaacgctcaagagctctgtccttggctcattttgaggcgaatcatttggacatggcaaatcatcaattagtggtcatggatgttttcgactattttaaatatgctaggcgtcatcacttaacctatgatattattattattgatcctcctagttttgccagaaataaaaaagaggttttttctgtttccaaagattatcataagttaattagacaggggttggagattttatctgaaaacggtcttatcattgcttcaacgaatgcagctaatatgacagtttctcagtttaaaaaacaaatcgaaaaaggtttcggaaaacaaaagcatacttatcttgatttacagcaattgccaagtgattttgcagtaaatgttcaagacgaaagcagcaattatttaaaagtatttacaataaaggtt

SEQ ID NO: 35857 - DNA, 1083 bp, Streptococcus mutans
atggcaaaaaagaaaattatctttacaggtggtgggacagtcggtcatgttactcttaatttactccttattccccgctttttaaaagatggctgggaagtgcactatattggtgataaacatggcattgagcatgaacaaattgagcagtcagattttgatgtcatctttcattcaattgcaacaggtaaactgcgccgttacttttctttgaaaaatgtactagatgttttcaaggttggttggggtgttctgcagtctcttacgattatggtgaaggttcgtccacaagtactattttctaaaggtgggtttgtttcagttcctcctgttgtagccgctaatcttttgagaatccctgtttttgttcatgaatctgatttatcaatgggactggctaaccgaattgcttataaatttgccactaccatgtacacaacgtttgaacagtctgataatttgactaaaacaaaacacgttggagctattactaaagttaatcaaactatttctagcagtgatgataatacagaaattaaaacgattaaagaatattttgatcctcgtttaaaaactttgctgtttattggaggttcagctggagccaaagttttcaatcaatttatttctgatacaccagaactcactaagcattataatgttatcaatatttctggcgataaaacattaaataatttaagccaaaatctttatcgtgtagattacgtgacggaaatgtatcagcccttgatggatttagcagatgttgttattacacgcggtggttccaacaccatctttgagctgcttgctatggcaaaacttcatatcattgtgccgttaggaaaagaagctagtcgtggtgatcagcttgaaaatgctgcttattttgaggaaaaaggttatgcccaacaattatctgaagaaaatctaaactttgcagaacttgataaagtgatcaaagatttattagaaaatcaaaccgtttatcaagataaaatgacttcatcaagtgagataaagactccaaatgatttttacaatcttttgttaacagatataacatctaagagtaaaggaaaa

SEQ ID NO: 35858 - DNA, 681 bp, Streptococcus mutans
gtgtatatgaaaatagtagttcctgttatgcctcaaaatattgaagaggctaaccaacttgatttaacgaggattgatagtacagatattattgaatggcgggcagattatttagttaaagatgatattttaacggtagcaccggctatttttgaaaagttctcgggtcatgaagtgatttttactttgcgtacagaaaaagaaggaggaaatatttccctttctaatgaagactatcttgctatcatccgtgatattgcggctctttatcagcctgattacattgactttgaatatttttcctaccgtgatgttttagaggaaatgtatgatttttcaaatcttattttgtcttatcacaattttgaagaaacaccagaaaatctaatggaagtcttttcagagttaacagctttagctccgcgtgttgtcaagattgctgtcatgcctaaaaatgaacaggatgttcttgatttgatgaactatacaagaggctttaaaactttaaatcccaatcaggaatatgtgactatgtctatgtcgaaactaggtcggatatcacgtttagcagctgatttaataggcagttcgtggacctttgccagcttggaacaagaaagcgctccgggacagatttctttggcagatatgcgtaaaattaaggaggttctagatgcaaat

SEQ ID NO: 35859 - DNA, 1122 bp, Streptococcus mutans
atggcgaaagataaagatacagaaaagcaagaaattcctttgacagaatggcagcagcgcaatttggaatttcttaagaaaaaacaagaagaaaaacgcgaaaaagaaaaactaaatgaaaagaaaatggctgaaaaaaaggctcagtttcaaactgataaagaagcagacagtaaggaaagtgataagcaaccttcaagtttatttgatgataaaaaacaagaagagcctaaaaaaaagccagctacacctaaaaagataaaaaaagaaaagaaagtgccaaaacttcctcgaaaggactactggcaggctgctatggttattatcatttcaagcattgttttaattgcctccttatttatgattagtcctttgagtcgtcaaaaggagataactgtttcgggtaataaaaatgccattgaatctcagttaattgaagaattagggattaagaaatcagattatctaacgaccttactttttcaggccaatcgttttgaaagaaatcttaagtctaaagataaatgggtaaaggaggcaaaattagtttatcattttcctaatcattttactttaagagtaaaagaatatcgtattattgcttatagacaaacggataaaggctatgtcccaattttagaaaatggtacccgtgttgataccgttaacgcttcagaattacctggttcatttgtgactattaatttagatcaggaaaaagaggttcgagaactggttcaaaaattggcaaaacttgataaatccttagttggtagtattaaagtcatttcttctgttaattccagctctactaaggatctgcttttattggaaatgaaagataacaacagtgttcgtgttcctttatcagaaattgatacaaaattaccttattattctaaaattaaaaagaatcttacagacggcagtattgttgatatggaggtggggatttatagtacaactgcagatatagaagcttcgattgcagaacataagacaacagctacaacagaatcttctgagaactcctctaatgctgaaaatactgattcaacacaatcttcagaagcaaattcacaagaaggttcacaatcagtaacgcaggcaaccgtatctcaa

SEQ ID NO: 35860 - DNA, 1359 bp, Streptococcus mutans
atggctagagatggcttttttacaggattggatataggaacaagctcgattaaagttttagttgctgaatttatcaatggcagtatgaatgttattggtgttagcaatgtcaaaagttcgggtgtaaaagacggtatcattattgatatagatactgcggcagaagccattaaatcagcaattaaagaagcagaagaaaaagcagggatgtcaatcagcaaggttaatgttggtctaccggcaaatctgttgcaaattgagccaacacagggaatgattcctgttcctagtgaatctaaggaaatcaaagatgaagatgttgatagtgttgttcgttcagctttaacaaagagcatcacaccagaacgtgaagtgatttcacttattcctgaagaattcattgtggatggtttccaaggtattcgcgatcctcgcggaatgatgggaattcgtttagaaatgcgcggtctaatttatactggaccaagtactattttgcataatcttcgtaaaacagtagaacgtgcaggtattgaagttgaaaatattattatttctccactggctcttaccaagtcagttttgaatgaaggagaacgtgagtttggagccaccgttattgatatgggaggcggtcaaaccacagtagcttcaatgcgagcacaagaattgcaattcaccaatacctatgccgaaggtggtgattatgttactaaggatatttctaaagtccttaaaacatcccaccaagtggctgaggcacttaagtttaactttggtgaagctaatgtagctgaagcgagttcaactgaaactgttcaggtggaagtggtgggtgaacgtaatccggttgaaattactgaacgctacctttccgaaattatatcagcgcgtgttcgtcacttgctagaccgtattaaacaagacttagaacgcggtagattattagatctgcctggtggaattgttattgtgggtggagctgctatcatgcctggggttgtagaaatcgctcaagaaatttttggtttcaatgttaaacttcatgttccaaaccaagtcggcatcagaaatcctatgtttgctaatattattagcattgttgaatacgtaggaacacttactgaagttgatattttagcgcaaggtgcggtttctggtgatgaaaaattaagaagaaaaccaattgatattaagccatcaggtgttgcacccaaaactagaagttttgctcaaccgcaagagtcgactactcttgaatcacaattggaacaattgccgcctcaacagaaggaagcaaatgagccaaaacaaaaagtgggtgatcgtttacgtggtatctttggtagcatgttcgac

SEQ ID NO: 35861 - DNA, 1302 bp, Streptococcus mutans
atggcattttcatttgatgcagcatctgtacaaggtgcagtaattaaagttattggagtcggtggtggcggcggtaacgctattaaccgtatgattgatgaaggtgttgcaggtgttgaattcattgctgctaacactgatattcaagctttgagtagttctaaagctgaaacagttattcaacttggacctaaattaacccgtggtcttggtgcaggaggccaacctgaaattggacgtaaagctgctgaagaaagcgaagaagctttgacagaagcacttactggagctgatatggtttttattactgctggtatgggtggtggttctggtacgggagccgctccagttattgctcgaattgctaagggtttaggttcattgacagttgctgtcgtcactcgaccatttggttttgaaggcagtaaacgtggcaattatgcaattgaaggtatcaatgaacttagagatgaagttgatacgctccttattatttcaaataataatctacttgaaattgttgacaagaaaacaccgcttcttgaagcactcagtgaagctgataatgttcttcgccaaggtgttcaggggattaccgacctgattacaagtccaggacttattaatcttgactttgctgatgttaaaacagttatggcaagtaaaggaaatgctctgatgggaatcggtatcggtactggtgaagaacgtgttgttgaggctgctcgcaaggcgatctattcaccacttcttgagacgacaattgatggtgcagaagatgtgattgtcaatgttaccggcggccttgatatgacgctgacagaagctgaagaggcttctgaaattgttaatcaagctgcaggtcatggcgttaacatttggttgggaacatcaattgatgacagtatgaaagatgaaattcgtgtgactgtagttgccactggtgttcggccagacaaagctgaccaagtctctggtattcgccgtcaagcttcatcttatacacaaccaagagcacaacagcaagctccgtcttcaaattctgcgcagccaaattttgaacgccgtcaaaattttgattttgatttgaatgaatcacctgagatgcctgctgctgaaccgcagcaaactcaatcatcatctgagccacagcaatcagcttttggcgattggaatcttcgtcgtgaaaatattgctcgtccaaccgaaggtgaaattgatagtcaactaaaaatgagtagtttttccgctgattctgatgatgacgatgagttggaaacacctcctttctttaagaatcgt

SEQ ID NO: 35862 - DNA, 867 bp, Streptococcus mutans
atgcaaattgatggttatacacgtttagcagctgttgtcgcgacaccaattaaacattctatctcaccttttattcacaactacgcttttgaaaaaactggtatcaatggtgtttatgttgcttgggatattccagagtcagaactgcaagtaactttaaaaaatatcatgcgttatgatatgtttggcattaacatctccatgccttacaagcaggcagttattccttatcttgatgaagtaacgaaagcagcagatttaattggggctgttaatactattgttaatcgtgatggcagattgatcggttacaatacagatggttttggtttctttaagagtttgggaacctttgcagatttcgatgttgcagataaggttataaccatacttggtggcggaggagctgcaactgccattattgcacaagcagctatcaatggtgctaagaaaattaatatttttaatcaaacagcctttcttgaagaaacaaaagaaaaagctaaacaaatatcaagtaaaacaggcgctgctattgaagtgtttcctgttgaggacttaaacatgattcaaaaaaaggtattagtatctgatttatttgttaatgcgaccaatgttggtatggatggcaaatcaatgattattaatgatagttttgaatttccaccaaaccttatggttgcagatgtcatttatcaaccttttgaaacaccatttttacgcttagtacgcagtcgtgggttaaaggctgtgaatggtttgggcatgcttctttttcaggcggctgcagcttttgaactttggactggtaaagaaatgccgagtcaggaaatctggcaggctctagaaaaaaaatacaagtctaaa

SEQ ID NO: 35863 - DNA, 1074 bp, Streptococcus mutans
atgggctacacagttgctatcgttggtgctacaggcgccgttggaactcgtatgattcaacaattggaacaatcgacacttccagttgacaaggtacggcttttgtcatcttcacgttctgcaggtaaagttttgcaatataaagatcaagatgtcacggttgaattaactacgaaagattcctttgaaggtgttgatattgcgcttttttcagctggcggttctgtttcggcaaaatttgctccctatgcagtcaaagctggtgcagtcgttgttgataatacctctcattttcgtcaaaatccagatgtgcctttggttgttcctgaagtcaatgcttatgctatggatgctcataatgggattattgcttgtcctaactgctcaacgattcaaatgatggtagccttggaacctattcgtcaaaaatggggattaagtcgtgttattgtttcaacctatcaagctgtttcaggagcaggtcaatcagctattaatgaaactgttcgtgaaattaaagaagttgttaatgatggtgtggatcctaaagctgttcatgctgatattttgccatcaggtggtgataaaaagcattatccaattgctttcaatgctttggcacagattgatgtcttcaccgataatgattatacttatgaagaaatgaagatgactaacgaaaccaagaaaatcatggaagaacctgaacttcccgtttcggccacttgtgttcgtgttccaatccttttttcacattctgaggctgtttatattgaaactaaagacgttgctccaattgaagaagtaaaagcagctattgcagcatttccaggtgctgttcttgaagatgatattaaacatcaaatttacccacaagcagcgaatgctgttggcagtcgtgaaacttttgtcggccgtattcgtaaggatttagatattgaaaatggtattcatatgtgggtcgtttcagacaatcttcttaaaggtgctgcttggaattcagttcaaattgctgaaagtcttcatgaacgtggtcttgttcgttcgacatcagaattgaagtttgaactgaaa

SEQ ID NO: 35864 - DNA, 1164 bp, Streptococcus mutans
atgagatattttacagctggggaatcgcatggtcctcgtctgacagctattattgaaggagtgccagcaggtcttcctctaacagccgactatattaatgctgaattaaggcggcggcaaggaggttatggtcgtggcggccgtatgaagattgaatctgatcaagtggaaatcacttcaggtgttcgccatggtttgactatgggaagtccgattacactcaatgtcactaatcgtgattttaaaaattggactgaaatcatgagtgctgctgatattgaggataagaaaaaatcaattcgaaaattaaccaaaccccgtccgggacatgcagatttggttggtggtatgaaatatcgtttttctgatttgcgcaacagtttggagcgctcaagtgcgcgtgaaacaactatgcgtgtggcagtgggatcagtagctaaacgtcttttagaagaacttgagataactattgctagccacgttgttgttttgggcggcattgaagttgatgttcctgaaaatctgacagtagctgagattaaagaacgagcaagtcaatctgaaatttccgttgttaaccaagaacatgagcaagaaatcaaggattatattgatcagattaaaaaagaaggcaacactatcggcggtattattgaaactgttgttggtggtgttccagttggtttaggctcttatgttcaatgggatcgcaaattagatgcccaaatagctcaaggagttgtttccatcaatgccttcaagggtgttgaatttggcttaggctttaaggatggttatctcaaaggcagctatgtcatggatgagattacttggtctaaagaagatggctataggcgtaagtccaacaatcttggtggttttgaaggcggtatgactaatggacagcctattgttgttcgtggggttatgaagcctattccgacactttataagcctttgatgagtgttgatattgaaacacacgaaccatataaggccagtgttgaacgttcggacccaacagctgttcccgccgctgcagtagttatggaaggagtcgttgcgacagttttagcaacagaaattttgaataagttttcttcagataatatggaagagctaaaagaagctgtgaaaagccatcaaaaatttatcaaagaattt

SEQ ID NO: 35865 - DNA, 669 bp, Streptococcus mutans
atggatttacaagcaaataaagaacacgtttttcaagaagttgcagcctatgctcaaaagtcagggcgcagtaaggacgatgttactgttattgcagttacaaaatatgtagacagtgatacagctgaaaaacttgttgaagctggggttaagcacattgctgaaaatcgtgttgataagttcctagataaatatcgtgctttaaaatcttacgatttaacttggcatctgattggaagtttgcagcgtcgtaaggttaaggatgtgattaattttgttgactacttccatgctcttgattctgtaaaattagctgctgaaattcaaaagcgtgcagaccatcaaataaagtgttttttacaagtcaatatatctgaagaagcaagtaaacatggattcagactatcagaagttgacaaggcgcttgaagaaattcagcattttgataagattaaagttatcggtttaatgacgatggctccaatagatgcttccgaacaagagttaactgatatttttcaaaaagcaaatgcgttgagaaagaacttaaaagaaagaaaactgaagaatatgccgttcgatgatttgagtatggggatgagtggcgattttccgattgctattcgaaatggctcaacctttgtcagaattggcagtgcattctttaaa

SEQ ID NO: 35866 - DNA, 573 bp, Streptococcus mutans
atggcacttagagacagctttaacaaaattatttcctacttcgatactgatgaggtcagtgaagtagaagagcctgctgttgcgtctgttaaacggcagcaagatgcagctcaacctgctagtcagcagcaaaaagctcaaagtcaccaataccaccaatcagcctccagaccaagtcagcagcaagtacagtctggacagaatcgtcgttctggagaggaaaatattcattcacttccaacacgtcgccaatctcataatcaacagcctgcccaagaaaagacaacaatcgctcttaagcttcctcgtaaatatgaagatgctgaagagattgttgatttgctgattagaaatgaatgtgttttgattgatttccaatatatgttggaagcacaagcacgtcgttgcttagattttattgatggtgcgagtaaagtcttagcaggaaacttgcaaaaggttggggcttcaatgtatcttttaacgccaattaatgttattgttgatgctgaggaaatgactcttgctgcaaatggacaagatgttagttttaactatgatatgaagagacgt

SEQ ID NO: 35867 - DNA, 849 bp, Streptococcus mutans
atgtctaaaattcaatggtttcctgggcatatgtcaaaagcccgcagacaagtgcaggaaaatctcaaatttgtggattttgtgacgattttggtagatgctcgtttacctctgtcaagtcaaaatcctatgttaactaagattattggtgataagccaaagctgataatcttaaataaagtagatttagcagatagtacctgcacagcagaatggtgtaacttttttgagaagcaggggattaaggcgttggctgttaattctaaagagcagtcagcagtcaaaaaggtgactgaagcggctaaaggattaatgaccgataagcttgtcaaactccgtgaacgtggtattcagaaggagaacttacgaaccatgattgttggtattcccaatgttggtaaatcaaccttaatgaatcgtttggctggtaaaaaaattgctattgtgggaaacaaacctggtgttactaagggacaacagtggctgaaatctaataaaaatttggaaattttagatacaccgggtattctttggcctaaatttgaagaggaagcagttggactcaaattggccatgaccggagctattaaagacaatctactgcctatggatgagataacgatttttggtcttgattttttcaagcgatactatccagaacgtttattagaacgttacaaaggtattgatttggaagaggaagcacctgaaatcattatgagcatgacacaaaaattaggctttcgtgatgattatgatcgtttttatcaagtttttatcaaggatgtacgtgatggtcgtttgggatgttatacattggatagattggcagaattagatggcaacgat

SEQ ID NO: 35868 - DNA, 780 bp, Streptococcus mutans
atggcaacgattaaggaaattaaagaacagctggcggccatttctgacctcttagatccacattggacagagtttgaggcagatgcccgttcaggcgttcaggcagctgttaggcagcgtaaaaaaatcattcaagcagatttagacgaagaggtacgtttggaaaacatgctgcgctatgaaaaagatctgtatttgcaaggctaccaagctattgcaggtattgatgaagttggcaggggtcccttagcaggtcctgttgtggcagcttgtgttattctgcctaaaaactgtaaaatcagacatcttaatgattctaaaaaaattcccaaaaagaagcatgaagagatttacaaacaggtcgtaaaagttgccctagctattggtattggtcgtatttctagtgaaatgattgatcaagtcaacatttatgaagcaactaaaatggctatgttgcaggctattgacgatttgcaaggtctagttagccgaccggattatctcttaattgatgctatgaatcttggtatttcaattcctcagtcttccattatcaaaggagatgctcattcgctttcgatagcagcagcctctattgttgctaaggtaacgcgagataggatgatgattggatatgacgagatttatcctggttatggttttgctcaaaatgtaggttatggtactaaacaacacttagaaggtttagaaaccttgggcgtaactcctattcatcgaagaacttttgaaccgattaagtcaatgttaaaagaaaagaac

SEQ ID NO: 35869 - DNA, 960 bp, Streptococcus mutans
atgaaaaaagtactcactgttccagtgctgggtgcagctgcagtctttctttctctcgtttcaatatttatcggtgttaagagtctatcgctttttgaactgggctctttagacgattcacaacttaacattttattatctagtcgcattcctagaacggttagtattttaattgctggctctagtttagccgtttgtggtttaattatgcagcaattaacgcaaaataaatttgtctcaccgacaacggctgggacaatggattgggcaaagctaggtgttgttgtcactattatcttatttagtaaatcttctttactattgcagttgattatttcatcggtctttgtcatttttggttctttgttttttatctatcttttaaaggttattaaatttaaggatgatgttttcattcctctagtaggtctgatgttggggaaagttgtatctgcaatcagtacttttttaggagtacagtttcagatattgcagtctgtaaacagttggttagaaggtcatttttccatcatgacttctcatcgatatgagattttatttttggtgctgccttgcatggtattaatttacctttatgctcatcagtttactatagctggcttgggagaagatttttctaaaaatctaggtttgaattatcaatttattattaatttaggcttggttcttgtttcggttatgacagctatcattgtaacagttgttggcagtcttccttttttaggtttgattgttcctaattcgatttctgctatcaagggcgataatatgaagaacaacttaatattaacctcttttttaggtgctgttattgtgcttatttgtgatatttttggacgtcttattatttttccatatgaagtttctattggattgactatgggaataataggaagtatctttttcctttattttttaatgaagggaagaaggcgttca

SEQ ID NO: 35870 - DNA, 813 bp, Streptococcus mutans
atggcaattacagcacttgaaattaaagataaaacatttgggacaaaaatgtttggttacaatactcaggaagtggaagaattcttggatattgtagttgatgactatgaagagttggtacgtactaatcgtgagaaagataatcgtatcaaagagttggaagataaattgggctattttgatgaaatgaaagaatctcttagtcaatcggttattttggctcaagaaacagctgaaaaagtgaaattatcagccaatactgaatcaactaacattcttaacaaagccacttatgagtcgcaacaattagttgatgcagctaaatcaaaagctaatcagattcttcgcgatgcaacagatgaagctaaacgtattgcagttgaaacagaagaattaaagcgtcaaagtcgtgtcttccatcaacaccttttatctgtagtagaaggtcagttaacacttgcaaattctcctgaatggacagagttacttcaaccaactgctgtttatttacagaattcagatgctgctttcaaagaagtcgtagagcaagttttaggtgaacatgttccagatgctgctgatactgaacctattgaggtgacacgtcaatttactccagaggaaatggaagaattgcatcgtcgtgtttctgaaagtaataaagaactggaagagacaaaagctggtcagtctacagttgatgatcaacagcctcttattatcgaggcagctgatgaaacaaaagtaaatgagtcagcggatgagcaaccaaatttgaatgaaacacagacttttaaattaaatattaacgaa

SEQ ID NO: 35871 - DNA, 2790 bp, Streptococcus mutans
atgaaattaaaagaaacgcttaatctcggaaaaacagcattcccaatgcgtgcaggccttcctaataaagaaccacaatggcaaaaacagtgggatgaagctaatatttatgctaaacgtcaagaattaaatgcaaataaaccagcttttttcctgcatgatgggccaccctatgccaatggaaatatccatgtaggacatgctcttaataaaatttcaaaggatattattattcgttccaaatcaatgtctggttttcgagcaccttatattccgggttgggatacacacggtttacctattgaacaagtccttgctaaaaagggtgttaaacgtaaagaaattgacttagcagactatttagacatgtgtcgtcagtatgctttgagtcaagttgataagcagcgtcaggactttaaacgcttaggtgtttcaggagattgggagaatccttatatcacacttgttcctaagtatgaagctgctcaaattcgtgtctttggtgctatggctgacaaaggctatatttatcatggagctaaaccggtttattggtcttggtcttctgaatcagctcttgcagaagcagagattgagtatcatgatattgattcaacttctctttactatgctaatcgtgttaaagatggtaaagatattctagatacagatacttatattgttgtctggacaacaacaccatttaccattacagcttctcgtggtttgacggtcggtccggatatagattatgtagttgttaaaccagctaatgacgaacgtaaatttctcgtagcacaagctcttctttcagaattagcagaacgttttgcttgggacaaccctcaggtattagcaactcataaaggtattgagctcgaccgaattgtgacaattcatccatgggatgataatgtagaagaattagtcatgaatggggatcatgttacccttgattctggtacggggattgttcatacagcaccgggatttggtgaggatgactataatgtgggagtcaaatatggtttagatgttgttgttactgtcaacgaacgtggtatcatgatggaaaatgccggtcctgattttgaaggacaattctatgacaaagttttgccaacagtgaaagaaaagttgggtgatttgcttttagcatcagaagttatcacgcattcttatccttttgactggcgaacaaaaaaaccaattatttggcgtgcagtcccacaatggtttgcctctgtttcaaaattccgtcaagatattcttgatgaaattgataaggttcatttttatcctgcttggggtaaaacgagactttataatatgattcgtgatcgtggcgattgggttatttcacgccaacgtgcttggggtgttccgcttccaattttctacgcagaagatggcactgccattatgactaaagaagtgacagaccatattgccaatttgtttgaagaacacggctcagtcatttggtggcaacgtgaggccaaagatcttctccctgaaggttttactcatccaggttctccaaatggtgaatttactaaagaaaatgatattatggatgtttggtttgattcgggatcatcttggaatggtgttctaaatacacgtgaagacttaggctatcctgcagacctctatcttgaaggctctgatcaatatcgtggttggttcaattcatcactgatcacttctgtagctgttaacggtcatgcgccttataaatccgtcttgtctcaaggttttgttctggatggcaagggtgagaagatgtctaaatcaaaaggaaacattatttcgccaaatgatgttgccaaacaatatggtgctgaaattcttcgcctttgggtagcttctgtcgacaccgatagtgatgttcgtgtatctatggaaattttaggtcaggtttcggaaacttatcgtaaaatccgtaatacccttcgctttttgattgctaataccactgattttaatccttatattaataagattgcctttgaggatcttcgttctgttgataaatatatgttaatcaaatttaatcagttagtttcagtaattaatcgggcttacagccattatgatttcatgactatctataaggctgttgttaattttgtgactgttgatttatcagcattttacctcgattttgctaaagatgttgtttatattgaagcagcagacgatttagctcgtcgtcaaatgcaaacggtcttttacgaaatcttggtaaatattactaagctattgacgccgattttaccgcatacgagtgaagaaatttggtcttatttagagcatgaagaagaagcatttgtacagttagcagaaatgcctgaagcgcaagaatttgccaaccaagacgaaattttggatacatggagtgcttttatgtctctgcgtgatcaagcacaaaaagcacttgaagaagctcgtaatgctaaaattattggtaaatcattagaagctcatttgactgtctatgctagtgaagaagttaaaacgcttctgactgctcttgatagcaacattgcccaactgcttattgtgtcacaattgacagtgactcaagaacaagcaccgaaaaatgcacttgtctttgaagatgtagcctttagtgtggaacatgctcgggggcatgtttgtgaccgttgtcgtcgcattgatgaaactgtcaaagaacgtccttatcatgttacaatttgtaatcattgtgcagctattgtagaaaatcatttccctgaagctgttaggcaaggatttgaaagcaaa

SEQ ID NO: 35872 - DNA, 1386 bp, Streptococcus mutans
atgagcagaaacaataaggggaaagtaagccgtcacgagcagttacgctatgagtacctcttaagaaatatagcctacctcagtcctcgagagcaggctgaattcgactatcttaaaaagaaggttgaaattcaagagacgccttcttactattacgatgaacctggggataactattatcaagattatgagcagtcttatgataataactatgaagatgattatcaggatgctgaccagtgggatgattattatgcaaatagtcattatactgatcaaggattgcctgtttatcctgagcaacaatccacacgttctcaaaggaaaagccatcaaggaaaaagaaaagattccgtttcggcaactaagcctaaaaagcgccgccgctggactgttaagcgcactttgaaggctgtttgcttgttattgctagttatttttgctggtatgattgttatgtttatcaaaggcatgaatgatatttcttccggcaaaaataaaaattataaaccagctgttgttgaaaaatttaatggaaagaataccaaagatggaaccaatattctagtgttaggaagcgatcagcgtattacacaagggtcatcagaagcgcggacggataccattatggttttaaatgtcggtaataaagacaagaagattaaaatggttagttttatgcgtgatacattggtcaatattaaaggggtcagcgcagataattactcatatgacaataaattaaattcagcatttaatattggtgaacaagataacaatcaaggcgctgagctgatgcggcaaaccttgaagcgtaattttgatatagatatcaaatattatgtcatggttgattttcaaacctttgctgaggccattgatacgcttttccctaatggtgttgaaattaatgcaaagtttgcaacggtcggtggtgaagccgttgattcagtagaggtaccagatgatcttaatatgaaagatggtgttgttcctaatcaaacgatttctgttggtaagcaaaagatggatggacgaactttgttgaattatgcccgttttcgtaaggatgatgaaggcgactttggacgaacgaaacgtcagcagcaggttatgtcggcaatcatgtctcaaattaaagatccaaccaagctctttacaggttctgctgccttaggtaagatttatgctttgacatcaaccaatatttcttatggttttctcttgagtcatggcttatccgttttgaccaatggcaagaaagttgaacaggtcactgttcctgataatggggattggattgatgattatgatatttatggtggtcaggctctgtctattgactttgacaagtataaaaagaaattagcccatttaggcgttcgt

SEQ ID NO: 35873 - DNA, 804 bp, Streptococcus mutans
atgatttctgttaaaaatattatcaaacattatcaacgaaagcccgttcttaacgatttaactgtgaatattgaaaaaggaaaaatcacagctatcatcggatcaaatggttcagggaaaagtacatttttatctattatgagccgtttgattgaaggagatagtggacaagtcctattagacaaaaaagcattaaaatcatttaataataatgatttggccaaaaggctggctattttaaggcaaacaaactatattaatcttaaaattagggtagcagaattggttgcttttggaaggttccctcatcatcaaggaagattgacccaaaacgatcaagataaaataacacaagcgcttgcttatatggaacttgaggagatcaaagatcgctttcttgatgaattaagtggcggtcaattacaacgagcctttattgctatgatactagctcaggatacagactatattttactagatgaacctttaaataatctggatatgaaacactctgttcagattatgcagatactaaggcgtttggtaaaagattttaataaaacgattatacttgtgattcacgatattaactttgcttcttgctatgctgacaatattgttgctttaaaagaaggaaaaattattgccaatggaaatgtggatgaagtggtcaaagaagaagtcttgtctaaaatctacgatatgccaataaaaattgaaacttatcaaggaagaaagatttgtaactattttgaccctcaggagcaaatacattgcgaaacagcacataaattattaagcaaa

SEQ ID NO: 35874 - DNA, 2115 bp, Streptococcus mutans
ttgacaagtaaaacaacgacaacagtaaaaaagacgagtaaaaagcgagcgactcctaagaaaaatttagtcattgtcgagtcacctgctaaggcgaaaaccattgagaaatatctaggacgttcatataaagtggtggcttctgtagggcatattcgtgacttaaaaaagtcaagcatgtccattgattttgataataattatgagccgcaatatattaatattcgcggcaagggtcccttaatcaattctctaaaaaaagaagctaagaatgccaagcaaatctttttagcaagtgacccggatcgtgaaggggaagcgatttcttggcatttagctcatattttggatttagatcttaaaggtaaaaaccgtgttgtctttaatgaaatcactaaagatgctgtcaaaaatgcctttgtcgagccgcgtcaaattgacatggatcttgttgatgcccaacaagcccgtcgtgttttggatagaattgttggttattctatttctcctattctttggaaaaaagttaagaaaggtctttcagctggtcgtgtacagtctgttgctcttaaacttattattgaccgcgaaaatgaaatcaaagcttttaaaccagaggagtattggagtattgatggtttctttaaaaaaggaaataagaaattccaagctaatttttatggacttgataacaaaaaaactaagctgaaaagcaatgatgatgttaagaaagtattgactcgcattaagaatgatgactttcttgttgacaaagtagaaaagaaagaacgaaaacgtaatgcaccgcttccttatacgacatcttccttgcaacaagatgccgccaataagattaatttcagaacacgaaaaaccatgatggttgctcagcagctttatgaaggaataagacttggctctaatggccagcaaggtctaattacctatatgcgtacagattcaactagaatcagccctgtggctcaaaatgatgctgctaattatattactgaacattttggtgctgaatattctaaacacggaaatcatgttcgcaatgcctccggtgctcaagatgcccatgaagcgattcgtccatctaatgttaatcatacacctgaatccattgctaaatatcttgataaagatcaattaaaactttatactctcatttggaatcgttttgttgctagtcagatgaccgccgcagtttttgatactgttaaggttaatttgacgcaaaacggtgtcttatttatcgctaacggcagtcagattaagttcaagggctatatggctgtttacaacgattctgataagaccaaagtacttcctgaaatgatcaagggagaaacagttaaaaagatttcagctaatcctgagcagcatttcacgcaaccacctgctcgttattcagaagcaagtcttattaagactttggaagaaaatggtgttggtcgtccatcaacctatgcaccgactcttgagacgatccaaaagcgttactatgtacgtttagtatctaagcgttttgagcctacagaacttggtgaaattgttaattctttaattatagaatttttccccgacattgttgatgtgaaattcactgctgaaatggaaagtaaactggacgaagttgagattggcaaagaggagtggcagaaggttattgaccaattttataaaccatttgaaaaagaggttattaaagcagaggaacagatggaaaaaatccaaattaaggatgaacctgccggttttgactgtgatgtttgtgggcatccaatggttattaaattaggtcgctatggtaaattttacgcttgcagtaattttccagattgccataataccaaagctattactaaagaaattggagtgatatgtccgatttgtcaaaaaggtcaagtcattgagcgaaaaacaaagcgtaatcgtattttctatggctgtgatcgctatcctgattgtgattttacttcatggaataaacctataggccgcgattgtccaaaatctggagattttctcgttgagaaaaaaatccgtggcggcggcaaacaagttgtttgtagcaatgaggagtgtgactataaggaaaaagctgttaaa

SEQ ID NO: 35875 - DNA, 1332 bp, Streptococcus mutans
atgtctcaatcttatattaatgttgttggggctggtcttgctggctctgaagctgcttatcagatcgctaaacgcggtattcctgtcaagctttatgaaatgcgtggagtcaaaagaacaccccagcataaaacaagtaattttgcggaattagtttgttcgaattcttttcgtggtgacagtttaacgaatgctgtcggtcttctcaaagaagagatgcgccgcttggactctattatcatgcgaactggtgaagcccatcgtgtacctgcaggtggtgctatggcagttgaccgtagcggctatgctcaagccgttacggcagaacttgaaaataaccctctcattcaggttattcgaaacgaagtaactgaaattcctgatgatgctattacagtgattgcgactggtccactgacaagtgacagtctggctaaaaaaatttataaactaaacggcggtgaagggttttatttttatgacgcggcggcgccaattgtcgatcaatcttccattgatatggataaggtttatctcaagtcgcgttacgataagggagaggctgcctatctcaattgtcctatgactaaggaggagtttatacgtttttatgaagctttgatcaatgctgaagaagctccgttcaactcctttgaaagggaaaaatactttgaaggttgcatgcctattgaggttatggccaagcggggcattaaaacattgctttatgggcccatgaaaccagttggtctggaatacccacaagactacaaggggccgcgagatggtgattataaggctccctatgctgttgtgcagcttcgacaagataatgcagctggcagcctttacaatattgttggttttcagacccatcttaagtggagtgaacaaaaacgtgtcttttccatgattccaggtctggagcaagcacatttcgttcgttatggcgtcatgcatcgcaactcttacattgactcccctaatcttcttgctcctacctttgcaacgtgtaaaaatccaaatctattctttgctggacaaatgacaggtgtagagggttatgttgaatctgcagcttctgggcttgttgctggaatcaatgctgttcgtcgtttcaaagatgaagaagcagtaatctttccgcaaacaacagctattggtgctttaccgtattatattacacatacaaaaagtaagcattttcaaccaatgaatattaattttggtatcatcaaagatttgggtggaccacgtattcgtgataagaagaaacgttatgagaagattgctgagcgatcacttaaagatctacagcaatttttaactgtt

SEQ ID NO: 35876 - DNA, 360 bp, Streptococcus mutans
atgtcaatttacagcaaatcttatgtcaccactccccaacactcagctatgaattggggttcaggcagtcttaatgttttatcaactcccagtatgattgcttttatagaaaatgcagcttttctgtactgtgaagaagatttagatgtgtcaaaaacaactgtcggtgctcaaattactgtccagcatttggccgctactaaaattggtcaaacagtagaagtcaaaattttagctgttgaaaaagatggacatcacacccatttccaaatagaagtttacgaaggagataaacttatcggtaagggtgaacacacacgcgtcactatcaacatcaaaagattccttgataaattagaa

SEQ ID NO: 35877 - DNA, 1308 bp, Streptococcus mutans
atgagtatgtttttagacactgccaaagtttcagttaaggctggtcgcggcggcgatggaatggttgcctttcgacgtgagaaatatgttgctaatggcggtccttggggcggtgatggcggccgtggcggtgatgtcatttttgttgttaatgaaggactgcgcaccttgatggattttcgttataaccgtcattttaaagccaaagctggtgagaaaggtatgacaaaaggtatgcatggccgcggtgcagaaaatctttatgtatcggtgccgcagggaaccactgttcgcgatgctcaaacaggtaaggttatcgctgacttggtcaaaaatggacaagagtttattgtagcccatggtggtcgcggcggccgcggtaatattcgttttgcgacacctcgtaaccctgctccagagatttccgaaaatggagaacctggcgaagagcgggaattggctttagaattaaaaattttggctgatgttggtttagttggttttccttcagttggaaaatcaactcttctcagcgttattacagctgctaaacccaaaatcggagcctatcacttcacaaccattgttcccaatttaggtatggtgcgtaccaagtcgggagattcttttgccgtagctgatttaccgggattgatagaaggtgccagtcaaggtgttggtttagggacacaatttctgcggcatattgagcggacacgtgttatcttacatgtcattgatatgtcggctagtgaaggccgcgatccttacgaagattatttggctatcaataaggaattggagacttataatctacgtttattagaacgtccgcaaattattgttgctaataagatggacatgccccaagcggcagagaatcttgaacaatttaaagaaaaattagatgccaactatggtgaatttgatgacaagcctcaaatttttcctatttcaggtattgctcatcaaggattagatgcgcttttagatgctacggctcagcttttggctcagacagatgactttttgctttacgatgaatcggatatgcaagaagaagcttattatggttttgaggaagaagaaaaagcctttgatatttcgcgcgcggatgatgctgcttgggtgctgtctggtgaaaaactagaaaaactctttgtcatgacaaatatggaacgtgatgaagctattatgaaattttcgcgccagttgcgtggcatgggagttgaccaagctcttcgtgagcgtggcgccaaagatggagatattgtccgcattggtaaatttgaatttgagtttgtagat

SEQ ID NO: 35878 - DNA, 2001 bp, Streptococcus mutans
atgttctatcttaaacttgctcttaataatattaagcagtcttttaaacatttcacccctttttttctagtcagtgtgacaacttttatttttagtactattacggtactccttatgactagtccatccgctaagtctatgggggcaggagtttatgctctaggtttggctaccatagtacttgatatcttagcagctattctttgtttgtatagttacaatttccttcttaaacagcgtaataaagagtttggtctgtataatattttaggaatgaataagaagcatatcatttgggtatcaacattagagctgatagttgcttatttagtgacaattatcctaggaacctttctcagtgcagttctctcaaattttttctacttgatttttgtcaatattattcagtatgaagatctaaattttcaattaacactaccagcttttgtgattaatcttattctttttgctgtcatcttcttatttttagaactagttaatattataaagatcagcaaaacatcagctcttaatctctttagcaatcaaagtcaaggagaacgtgagccaagaggaaatattgttttagcttttattgctatcttagcgattggttatggttattatttatctgtcacctctggtaatgttaatgctatatttggtattacacgctttttccaggctattttagcagttattttaggaacttatctcttttacattagttttactacttggtatttgaaacgtcgtcgtaagaacaaatcttatttttatcaaccagagcattttgtaacaacttcgcagatgatttttcgtatgaagcaaaatgctgtcggtttagctaacattactctgctagccattatggcttttgtaactatattttcaacagtggcgctctatacaagtagtgaaaatatggttaaaatggcttatcccaaaaatgctcagattgagatgaaacatatcagtaatcgtcaacaggctgaggaaatttttcaaaagcaggtcttagcaccgctcaaaagagccggctataatagtaaggcaaaattttcagcttaccttgatatcagctatcctgttctttttacacaaaagcaaaatttagttcttgataagtctattgcaactaatagaacattctataaaaacaatcatgctggtacaatggaaatcataacgcaagatgatttccggtctataggtaataaagtccctcaattatcagcaggagaagtggccttttacagttatagccaaaataccactgttaaaccctttaaaactttaacttggtttggtcaaacttataagaatgtttatcatataaaatctattaaaaatatggtgattagcaactcagcaacacctgcgggtattctcgttgttcctgacgatgcaactatggaagctatgcgtaaaccttatgatgatgcatcaaaatatgattatacctatacatttttagcttttgctaatctaacaaataaagaaaaacaggttttaaatagaatgagtcaggctaagcatggacttctctatggcgatgatgatatagctgttctttactcaactgctgcgaattatcgtactgaagggttgagaatgactggcggtttcctctttacaggatttctattgggaattgccttcttacttggtgctgctttaattatatattataaacagctttcagaaggaacacaagataagcgatcttataaaattttacaagaagtggggatgagcttaaaacaaattaaaaaaacaatcaactcgcaaattatcctagttttcttcctgcctttacttatggctatcgtacattttgtttttgctttgcctattcttaaaaagctgctcttcctgtttggtgtacaaggtgataaattcctttatactgttagcgctctaactgtagttggaatcttgattatttatttcattatttacaagttaacgagcagaacttactataaaattattgaaaga

SEQ ID NO: 35879 - DNA, 738 bp, Streptococcus mutans
atgactgacctaaaaattgatgttcaggatttacataaatcctttggtaaaaatgaagtcctcaaagggattgacgtccaatttaacgagggagatgtggtgtgcatcatcggtccttcaggatcaggaaaatcaacttttcttcggaccttgaatctccttgaaacagtcactagcggcaaggtcattgtagatggttataaattgtcagatccatcgaccaatgttgacaaggcacgagaaaatatcggtatggtcttccaacactttaatcttttcccacatatgactgttcttgataatgtcacttttgctcctatcgaacttggcagagaatccaaggaagaagcacaaaagcatggcatggaacttctagaaaaagttggactttcggataaagcccaagcctatcctaacagcctttctggcggccaaaaacaacgtgttgccattgcacgcagcttagccatgaacccagatatcatgcttttcgatgaaccaacttctgcccttgaccctgaaatggttggcgatgttctcaacgttatgaaagacctagctgagcaaggtatgactatgcttatcgtaacacacgaaatgggttttgcccgcaaagtggccaaccgtgtgattttcactgatggcggtcaatttcttgaggatggctcacctgaagaaatctttgataacccacagcacccacgtctcaaagacttcctggataaagtgttgaatgtc

SEQ ID NO: 35880 - DNA, 687 bp, Streptococcus mutans
atgaacgcatcagttataactgctgtaaaaaataatttagatttatcacaaaatgttcctttaaaagttgctttttatgaagctttaaggaagaccatcattcttagtgaaattccagcaggctgtcgcattaacgaaaaagaacttgcttctgctcttaatattagtcggacacctatccgctatgcactgggggttttagaagaagaaaaacttgttgaacatattcccaaacgcggcattattgttcgtggcatttctttaaaagatgctattgaaatttttgatatccgaaaggctttagacactctggcagctaccaaggcaatgtatttaatgactgataaagattttgcagatatgaaaaaaattctaactgactgtgaagattttattgaagatggtgatatcgaaactattttagataatttcaatcaatttaacgatctgatttatcgaaaaagtcaaatgttgcgcctacgagagatcgttaccgaattacagacttatttgagatattttcgagaaatatcaattgcttctgtagaacggcgtaagcgagctttgaaagaacattggattatctatcgtggtatgcgcaataaggatgtcgagcaaattactcttatcacccatgagcacttgaatgcttctcttgactttattcttcaacaaatggaaagtaag

SEQ ID NO: 35881 - DNA, 462 bp, Streptococcus mutans
gtgtcccgtacctctcaagtcatcctaactaatatgtgtttaattgaagacggcaatggaaatattgttatgcaaattcgtgatcctaagcgttattcttggtctggtgctgccctgcctggcgggcacattgaagaacatgaaggtttagtggaatctgttattcgcgaagtcaaagaagagacaggattaaccattcatcatccacagttggttgggatgaagcattggtataccaaggaagatgttcgttatctggtttttctttatcggacatctgattttgaaggtgacttgcagtcttctgctgaaggacaagtgcgttgggtagcaagaaaagagttggcagagcttgatttggcttatgatatgcttaatctgctgcgcgtgtttgaagaaaaaaacttatctgaactcttttatcgtgaacgcctagcagatgattttgtcaaagagttttgg

SEQ ID NO: 35882 - DNA, 1401 bp, Streptococcus mutans
atgttgctaacaattctagcttatgctatgattattgtcttcatgtacgttgttatgaagaagaaaatgtcgccttttacggcactgattatagttcctttagtagctgtcattattgttatcttaacaaattctgcaaactttacagctgataaaagtttcgttgaatttttgggaggcgataaaatttcccataatttaacagctattggacctatggtattatatggaattaataataccgctcaaacaggaattatgcttctatttgctatcttatatttctcattaatgctggatgcagggctgttcgatccgattactgaaaaaatgattcgctttgctaagggcgatccaatgaaagttttgatagctaccgctatcgtttccgctgctgtttctcttaatggcgacggaactacaactactcttatttgctgttctgcctttctgccaatctataaaaaacttaatatgaaaattatgaatcttggtgttttgattattcttcaaaatactattatgaacctacttccttggggcggaccaactgctcgggctatgtctgttttaaacgttggttctgaaatattaggctatctagcacccggtatgattttatccctactttatgttatcttcttcgtcgctagaagcatgggtaaaaaagaacgcaaacgtttaggtgttactgaattatctgacaaagaaataacagaattaatcactgttaacgatcctgatacacttaaaattcgtcgacctcaaaatttttggtttaatggtattttgacacttatcttaattgcttggttagttgccggttctttcatttcggctattgaaatgccttcacttcttctctttgcattaggaacttgtattgctttaatggtcaactaccctaatttgaaagaacaatcaaaacgaattagtgaaaatgctggtgatgctgttcaagttgttatccttgtcttcgctgcaggtatcttcatgggacttttccaaggttctggtatggctggggctctagcacaaagctttacaactatcattcctaaacaactggctggtttctggggcttagtcatcgcctttatctctgctcctggtacatttttcctttcaaatgatggcttttattatggtattatgccagtcttggcggaagctggtgctaaatatggatttgataatgttgctatggctttagcctcattgatgggacaagcttttcacttattaagtccattagttgcctttatttatctacttcttcgcttaacgggcttagacatgggcgaatggcaaagagagtctgctaaatatgcactggttgtctttatcatctttgtggtgacaattcttatcgtgggacgtctaccattttatattccacaa

SEQ ID NO: 35883 - DNA, 900 bp, Streptococcus mutans
atggaacgcttaagaagaacaatgatgtttgttcccggtgccaatgcagctatgctgcgagatgctcctttatatggtgcggactccattatgtttgatttggaagattctgtttctcttaaagaaaaggatgcttctagaacattagttcattttgccttaaaaacatttgattacagcaaggtggaaacagttgttcgtatcaatagtttagatagttgcggtgctttagacattgaagcggttattatagccggtgttgatgttattcgattgccaaaaacagaaactgctaaagatattagagaagttgaagatgtcattgaaagagtagagcgtaacaatgacatcgaaattgggcgtacgaaaatgatggcagcaattgaatctgcccaaggagttttgaatgcgcttgcaattgctaaagcatcagatcgtttaattgggattgctcttggagctgaagattatgttaccaatatgagaacgcgccgttatcctgatggtcaagaacttttctttgctcgcaatatgattttacatgctgctcgtgccgccggtatcgcagcagttgacactgtttattctgatgttaataatccagaaggatttcaaaatgaagtacgtttaattaagcaacttggatttgatggtaaatctgttatcaaccctcgtcaaattccattggttaacgcaatttacgctccaaatgaaaaagaaattcaaaaggcaaaagaagttgtttgggccattcatgaggctgaaagcaaaggttctggtgttgtttcgcttcagggtaaaatggttgataaaccaattgttgagcgcgctcaacgtgttattgctttagctaaggccgctggattacttactggggaggatatttcaaatggcagaaaa

SEQ ID NO: 35884 - DNA, 1533 bp, Streptococcus mutans
atggcagaaaataaattaggacgtgatattcctcgaaaatatgccaatcaatatggtgtatttgaaggagaacttgcacatattaaaagctataaggaatccagccgacaagttaaaccggtaaaacctagtgatgataaacttttatcttctattcatgaagcaattgaaaaaacaaggctcaaagatggtatgactatttctttccatcatcattttcgtgaaggggactatgtcatgaatatggtgcttgatgaaatcgctaagatggggattaaggatatctctatcgctccaagttcaattgccaatgttcatgaaccactgattgatcatattaaaaatggtgttgttactaatattacttcaagtggtttgcgtgataaagttggtgccgccatttcagaaggcattatggaaaatcctgttattattcgttctcatggtggacgtgcacgtgctattgcaacagatgatattcatattgatgttgcctttttgggagcaccaagttcagatgcctatggtaacgctaacggaactagaggaaaaacaacctgtggttcacttggttatgctatgattgatgccaaatatgctgatcaggtcgtcattgttacagatactttggtgccatatcctaatacacctattagcatcccgcaaacagatgttgattatattgtagtagtagatgctattggtgatccagaaggcattgccaaaggcgctacacgttatactaagaaccctaaggaattacttattgcagagtatgctgctaaagtgattacaagctctccttactataaggaaggtttctctttccagacaggtactggaggtgcttcccttgctgtgacacgttttatgcgtgaacaaatgattaaagatgacatcaaagctaattttgcactcggtggtattaccaatgcaatggttgaactattggaagaaggtttggttgataagatcctcgatgttcaagatttcgaccatccatctgctgtatctttggatcgtaatgctgaaaaacattatgaaatcgatgctaatatgtatgcttcgccattaagtaaaggttctgttatcaatcaattagacatttgcgttctctcagctttggaggttgatacaaattttaatgttaatgttatgacaggttcggatggggttattcgcggagcatcaggtggtcactgcgatacagcttttgctgctaaaatgagtctggttatctcaccattggttcgtggacgcattcctacttttgttgataaggttaatactgttattacaccaggtacaagtgttgatgttgtcgtaacagaagtcggtatcgctatcaatcctaatcgtccagatttgattgaatatttcaaagatttgaaagtacctcaattgaccattgaagagttaaaagaaaaagcttacgctattgttggtaatcctcaacctattcaatatggtgataagattgtagcgcttattgaataccgtgatggcagcttaattgatgttgttcgcaatgtc

SEQ ID NO: 35885 - DNA, 1341 bp, Streptococcus mutans
ttgacagatgaacttatcacttattttaagataggtttggctcccaatgagtatgattatctgtatcaggccatgctcaaaaaatatgatgaagatacaattattaattcaggtttgtttaatctatcagatagcaattccatttatgatgcttttcgtaatcggatcatgtttcctttgactgatgaatttggacacattataggtttttcgggacggatttggacagaagaagatacttctaaaaaattagcaaagtataagaatacccgctcaacaatcatttttaataaatcttacgaactttaccatttggataaggctaggactgcagctaaaaaagaacatgaactttatcttatggaaggctttatggatgttattgcagcctatcgtgcgggtattcctaatgctgttgcttctatggggacagcgctaacaccagaacatgttaagcatttaagaaaatttactaaaaaagttattttgacctatgatggtgataaagccggacaaaatgctattgctaaatcattgaacttgctgtctaatatggcggtggaaattgttagaattcccggacagatggatccagatgaatttatcaaggagaattcagaagaggaattagaaaagctgctaaaacaagcaaggattagcagtgctgagttttggattgaacatctaaaacctgaaaatattgataatttgcaagcggaaattgactatgtcgaaaagatagctaaggttattgctgcttcaccgtctataacagctcagaatacctatattaataaagtagctgagtttctaccagattttgattatttacaggttgaacaggcagttaataatgagcgactgcaaatgcgttcacaaatcagcgaacaagagtcagccaatcagcaggttttaatagatttgccggtaactaaacaattaaccgctttaactaaagccgagagtcaattattccaccgcttactccaccacgattacctcttgaatgaatttcgtaatcgtgctcattttaaatttacaacgccagaattacaagaactttatcaaattctcaaaactaacggtgagattaatgcttatgatttgtctcaactttccaatcagcttcaggaaacttattatcgtgttttagaagaaaatcttcctgaagaaattgctgaagatgaaattaggcagattgaagatcaaattgataagtgtttgcagcgacaagaaatgcgcaaacaaagcaaagctattcgagagagtagcaatcatggtgatgtagatactgcagtggagggattagcagccctgatcgctcaaaaaagaaatatggaa

SEQ ID NO: 35886 - DNA, 1113 bp, Streptococcus mutans
atggtaaataataagaaaaaaacatcaagtacttttaatgttcaagttgcagattttattcgcaaccataaaaaagagggagttgctgttgatgatgaagttactgaaaaattagttatcccttttgaacttgaagcagagcagattgatgatttgctggaacgtttgacagatggcggtatctcaattactgacagagaaggcaatccttctaccaaatatgctgttgaagaaattaaaccagaagaattaaccgatgaagaattattaggcagtaattctgccaaggttaatgatcctgttcgcatgtatttaaaagagattggcgttgttcctcttttgactaatgaagaagaaaaagaactagctattgctgttgaaaatggcgatcttgaagcgaagcagcgcttggcagaagctaatttacgtttggttgtttccattgcaaaacgatacgtaggacgcggaatgcagtttcttgatctcattcaagaaggtaatatgggtttgatgaaggcagttgataaatttgattattccaaaggtttcaagttttcaacctatgcaacttggtggattcgtcaggcaatcacacgtgccattgcagaccaagcacgtacgattcgtattccagtacatatggtggaaacgatcaataagctggtgcgtgagcagcgcaatcttcttcaagagctggggcaagatccaacaccggagcaaattgctgagcgaatggatatgacaccagataaagtgcgtgaaattttaaaaattgctcaagaaccggtgtctcttgaaacaccaattggtgaagaagatgacagccatttaggcgattttattgaagatgaagtcatcgaaaatcccgttgattatacaactcgtgttgtcttgcgtgagcagttagatgaagttttggatactcttactgatcgtgaagaaaatgtccttcgtctgcgtttcgggcttgatgatggaaaaatgcggacgcttgaagatgttggtaaagtctttgatgttactcgtgaacgtattcgtcaaattgaggctaaagcgcttcgcaagctgcgtcaccctagtcgcagcaagcagttacgtgattttgttgaagat

SEQ ID NO: 35887 - DNA, 1365 bp, Streptococcus mutans
atgataacaaatgaatttgatactattactgctatcgctacacctcttggcgaaggggcaatcggcatcgtccgtatttcaggatcgaaagcactagctattattaaaaagatttttaagggaaaaaatttggatgatgttccctcccataccattaattacggacatattgttgagaatggggcaatcattgatgaagtgatggtctcagtcatgcgcgctccaaaaacgttcacacgtgaagatgtgattgaaatcaatacgcatggcggtgtggctgtcaccaatgaaatcctgcagttggttctccgctctggtgctcgtatggcagatcccggtgaatttaccaagcgtgcctttctcaatggacgtgttgatttagcgcaagctgaagctgtaatggatctcattcgcgccaaaacagacaaagccatggctgttgccgttcaacaactggatggctccctttcaaatcttatcaataacacacgtcaggaaattctcaatactctggcccaagttgaggttaacattgactatcctgagtatgatgatgtggaagaaatgacgacagcactcatgcgagagaagactcaggaattcgaaaccctcttaaccaatcttttaaagacagcccgccgcgggaaaattttgcgtgaaggcttatctactgctatcattggacgtcccaatgttggcaaatccagtctgctcaacaatcttttacgagaagaaaaagctatcgttactgatattgaagggacaactcgcgatgtcattgaagagtatgtcaatatcaagggtgttcctctcaaactgattgatacggctggtattcgtgaaactgatgatctggttgaaaaaattggagtggaacggtctaaaaaagctttagaagaagctgatctggtcttactcgttctcaacagtgctgagaaactgactgatcaagatcgaactcttttagaaatcagccaaaacagcaaccgtcttatccttcttaataagacagacctcccagagcaaattgaaacggatcagcttccagaagattgcatcaaaatctctgtcatcaaaaaccagaatattgatgtcattgaagagcgcatcaataagcttttctttgataatgccgccattgtcgaaaaagatgccacctatctatccaatgcccgccatatttccttaattgaaaaagctcttaaaagtctacaggccgttaatgacggtctggaactcggcatgcctgttgatctcttgcaagttgatatgacgcgaacttgggaaattcttggtgagattactggtgatgcagcgccagatgaactcattacacaactctttagccagttttgtttggggaaa

SEQ ID NO: 35888 - DNA, 1389 bp, Streptococcus mutans
atgacaaaaatccatattatggagacggttttaagagacgggcagcaaagtcaaattgcaacacgaatgacaactaaagaaatgttacctgttcttaaaactttggatgaagctggatatcgtgctttagagatgtggggtggagcgacctttgattcctgccttcgttttttaaacgaggatccatgggaaagattgcgtactattcgtaaacatgttaaaaagacaaaattgcagatgttactgcgtggtcaaaatttattgggctatcgcaattatgctgatgatgttgtttgctctttcattcaaaaatcagttgaaaatggtattgatatcgtccgtatttttgatgctttgaatgatccgcgtaatctacaaacggcagttagtgctactaaggaagctggcggacatgctcaagtggctatttcttatacaactagtcccgttcatacagttgattattttgttcatttatctaaagaatatgctgaaatcggagcagactccatttgtatcaaggatatggctggtgttttaacacctcaaacaggttatgaccttgtaaagcgtatcaaagaagcggttgatttgccactagaagtacatactcatgcgacaagtggtatctctgaaatgacttatcttaaagttgcagaagctggtgctgatattattgatactgctgtatcttcctttgcaggcggaactagtcaaccagcgacagaatctatagttatcgctttagaagaacttggttttgaaacaggtgttgatctacagaaagttgagacagcagcagctcacttcaatactatccgtgatcattatcgtgcagaaggtcttttaaatcctaaggttaaggatgttgagcctaaaactttgatttatcaagttccaggcggtatgttgtctaatttgcttagtcaattaacagaacagggattggccaatcgctatgaagaagtgttggccgaagttcctcgtgttagagccgatttgggttatccgccattggttacacctttatcgcaaatggttgggacacaatctctactgaacattatctctggtgaacgctataaagttgttcctaacgaaattaaggattatgttcgtggactttatggacgtccacctgcagccattgccgatgatattaaagaaaaaatcattggggatgaagaagtgattactgttcgtccagcagatttaatcgagcctcaattacctaaacttagacaggaaattgctgaatatgcaagaagtgaagaagatgttttaagttacgcttctttcccgcaacaagcaaaagatttcttggggcgtcgtgaagatcctttctacgatgtacctgtacaaaatgtttctgttaccattgattttgat

SEQ ID NO: 35889 - DNA, 933 bp, Streptococcus mutans
atgaaagttaatattttaatgtccacctacaatggtcaggaattcatcgcccaacaaatccaaagtattcaaaaacaaacttttgaaaattggaacttacttattcgcgacgatggttctagtgatgaaactcctaaaattattgcagactttgctaagtctgatgcgcggattcgttttatcaatgctgataaacgagaaaattttggtgtcatcaaaaatttctataccttactaaaatatgaaaaggccgattactatttttttagcgatcaagatgatgtttggcagccgcaaaagctggaattaactctggcaagtgttgaaaaagaaaacaatcaaatccctttgatggtttatacagatttgacagtagtagatagagatttgcaagttttgcatgatagcatgatcaaaacacagtctcatcatgccaatactagtttacttgaggaattaacagaaaatacagttactggcgggactatgatggttaatcattgtctagctaagcagtggaagcagtgttatgatgacttgattatgcatgattggtatttagcgctccttgctgccagtctaggtaaattgatttatctagatgagaccacagaattataccgccagcatgaaagtaatgttttgggagctagaacttggtctaaacgtttgaaaaattggctgcgtccccatcgtttggtgaaaaaatactggtggctagtaacatcaagtcagcaacaagccagtcatttattggaattggatttgtcggcagctaataaggctattattcaagcttatgtgactttgttggatcagtcgtttttaaacaggattaaatggctcaaacaatatggttttgctaagaatcgtgcctttcatacttttgtttttaagacattgattattactaaatttggttataggagaaaa

SEQ ID NO: 35890 - DNA, 1410 bp, Streptococcus mutans
atgtttgtagattttcaaaaagaggtagataaacgccgcggagatattttggccgatttgtttcggattttacagattaattctgagcgtgatgacagtaaggctgataaaaaacatccttttgggcccggccctgttcaagctcttgaacattttttgaaaatggcagagcgtgatggttatgagactaaaaatgttaataactatgccggtcattttgaatacggtcaaggagatgaggtcttaggcatttttgcccatctggatgtggtgccagcgggtagtggctggaaaacctctccttatttgccagaaatcatcaatggcaaactctatgcgcgtggtgctagtgatgacaaaggcccaacgattgcctgttattatggtttaaaaattattaaggaattaggtttaccagtctctaagaaagttcgttttgttgttggtactgatgaagagtctggttgggctgatatggattattattttgaacatgttgacatgccagagccagattttggtttttcaccagatgcttattttccaattatcaatggagaaaaagggaatattacggaataccttcattttggcaatagcaatggtggttcttttatccttaaatctttcaaaggtgggctgcgtgaaaacatggtaccagaatcagcaacagctgttttttcagcaacgatttgtttagctgaattgcaagaatctttgaccgcttttacagaacaacatgctttaacagcggatcttaaggaagaagcagggaattttgtcttgaccttgcatggcaagtctgctcacggttcaacaccagaagcaggtatcaatggagctacttatttggcacgcttcttgtcacagtttgattttgctggtgatgctaaagcttacttggatttagctgccaatgttttattagatgatcatgcgggtgaaaaactgggagttgcctataaggatgagaagatgggttctgtttccatgaatcctggcgtctttagttttgattctcaatctgaagacaatagcattgcgcttaatttccgctatcctcaagggacagatgcacagaccatcaaggccagcctagaacaattatcagtatcaggtgttagagaggttactctgtctgagcatgaacaaaaaccccattatgtgccgatggatgatccgttagtagctaccttgctagcggtttatgaaaaacatacaggagataaagggcatgaatgggttatcggtggtggtacctttggacgtttgctcaagcgcggagttgcttttggcgctatgttcccccattcgacagataccatgcatcaagctaatgaatttgttgaagtgaacgatctgtataaagcagctgctatttatgcagaagccatttatgaattgatcaaa

SEQ ID NO: 35891 - DNA, 1032 bp, Streptococcus mutans
gtgaattataaaaatccatatgaacaattgtctggaaaactaaataatcggaagctgataaatgctggtttttcagaaaaaacttatgatacaaggagtgttaaactgaactatgtggttggtcctaacaatggaccaagtttattgttgattcctgctcaaatgggcatatgggaaagttataaaaaagtacttttaccattgtcgaaacattttcaagtatatgccatagatgtgagagggcatggaaaatcttcttggacaccgggacactattcatggaaaattgttggtgaggatataaaaacatttatagaaaatgtaataaaacagaaagtgataattagtggaaactcatcaggcggtattgttgctctatggtgttctgctaatattcctgaatatgtttccggaatcattattgaggacgcacctattttttctgctgaaatgccacgttttaaagaacgagataaatttgtttataacggactaaaacaccttgttaatcaaattggaaatataccagatagagatttagcaaattattttaaagatatggaagtaccagccactgataaaagaattaaaagaattccagattggtttgtcagttggttatcacagaagataaagaagtttcaaaataaacaccctgatagtccagttgaaattggatttccaaatagcctacgtttactcattaaatcattatctatgtttgacccagattttgccagagcatttgtagatggtagattttatgatggtattgaccatgcagaagcttttaagaaagcaaaatgtcctatattacttattcaagccaattggaaacgatatgaaaattacggacttgtaggagcatttgatgatgatgacgctcagcacgctatttccttagctccgcaaataatatataaaaaagtttctgctaatcatgttattcatgctttcaagccaaaagagtacattaaactattgttagaattcaaaaaaatagtacctgatagttcgatttgtgatgggaag

SEQ ID NO: 35892 - DNA, 1215 bp, Streptococcus mutans
atgacaaaaaataatattgcagtcaaagttgaccatgtcagtaagtattttaagttacctgttgaaagtactcaaagtttgagaactgccttagtcaatcgttttaaagggattaaaggttataagaaacagcatgtcctgcgagatattgatttcgaagttgaaaaaggagacttttttggtattgtaggccgaaatggttctggtaaatcaacacttttaaaaattatttctcaaatttatgttcctgaacaaggcaaagttactgtagatgggaaattagtttcttttattgaactcggtgtcggttttaatccagaactgactggccgtgaaaatgtttatatgaatggggctatgcttggtttcacaactgaagaggtagatactatgtatcaggatattgtagacttcgcagaacttcaagatttcatgaatcaaaagctgaaaaactattctagtgggatgcaggtgcgtcttgccttctctgttgccataaaagcgcaaggggatgtcctcattcttgatgaagttttggcggttggtgatgaagcctttcagcgtaaatgtaatgattactttttggaaagaaagaatagcggcaagactactatcttggtaacgcacgatatggctgcagtcaagaaatattgtaataaagctgttttaatagatgatggtttgataaaggcaattggtgagccatttgatgtggctaaccaatacagtttagataatacagaccagattgttgaggataaacaagaagaggaagcagccgttcaggaagaagagcaaattgttgttgataatcttgaagtaaaactcctgtctgctaatcgtatgacaccaagagactccatccgttttgaaatttcttataacgttcttgcagatgtgggaacatatattgctctttctttgacagatgttgatcgtaatatttggatttataatgacaattctttagactatctatccagtggttcaggaaagaaacgggttttttatgaatgccatctgaaaagcttaaatgatattaagttaaaattggaagtgacagttagagataagcaagggcagatgttggctttttctagtgcgacaaatacacctattatttctattaatcgagatgaccttgaaggtgatgacaaatcagctatggactctgccagtggacttattcaaaggaatgggcagtggcaattttca

SEQ ID NO: 35893 - DNA, 1395 bp, Streptococcus mutans
atggtaaaagtatccattatttgcaccaattataataaaggaagctggattggtgaagctattgatagtttcctgaaacaagaaacatcatttccatatgaaatcataattgttgatgatgcttcaacagatcattcagttcatatcataaaaacctatcaaaaacagtatccagatttaattcgggctttctttaatcaagaaaatcaaggaattacaaaaacttggtccgatatttgtaagaaagctagaggacagtacattgccagatgtgatggtgatgattattggatagacccttttaagcttcaaaaacaaattgatcttttagagacatctcctgaatcaaaatggtctaatacagactttgacatggtggactctaaagggaatataattcataaagatgtactaaaaaataatattatcccttttatggattcttatgaaaagatgcttgccttaaaagggatgacgatggcttccacttggttggtggaaactaaattaatgttagaaattaatgatcgaattaataaagatgccgttgacgataccttcaatatccaattggaattatttaaaaaaactaaattagcgtttttaagggattctacaaccgtctatcgtatggatgctgagtcagattcacgttctaaggattcagaaaaactagcccagcgatttgatagactcttagaaacgcagcttgagtatattgaaaagtaccctgatagtgattataagaaagttctagaatatctattgcctaagcataatgattttgaaaaagttctggctcaggatggaaaaaatgtttgggataatcagcagattaccatttatttagctaaaggagatgatcaagaattttcagaagaaaattgttttcagtttcctttgcagcattcgggcaatattcaattgacttttccagaaaatatacggaaaattcggattgatttatctgaaatcccaagttactatcgtcaagtgtcattggtaaatacaacagttaatacagaattattaccgacttggaccaatgccaaagtctttggttattcttattattttatagctcccgatcctcaaatgatctatgatttaaccgcacaagaagggcaagactttaaactgacttatgaatggtttaatgttgatcggccaagtcagcctgattttttagcgaatcacttagtgaaggaattggatcaaaagaaggtagagctaaaaatgctcagtccttataagtatcaatatcaaaaagctgttgctgagagagatttgtatctagaacagttaaatgagatggttgtccgctacaattcagtcactcattcccgccgttggaccattcctacaaaaattatcaacttattcaggagaaaaaaa

SEQ ID NO: 35894 - DNA, 2538 bp, Streptococcus mutans
atgaaacaattgaaaaaaatatgggatatgcttggaaagcaaaaattacttattttcattttcatttttgctcttaatgtcacattaagaaattatgatcttttaataggacgtagagcaaattcatctttgtcttttaaagtcatttcgaaaaactttgatattatgatagagcattgggaagcattgcctagtcattttaaaattatcgggggagtttgtcttgttatttatgttctctccattttaggactatcgttctatttatctaaaaatctaaagaaaactttttttatagaattattgttaggatatggtctttatatagtaatatcctattttctagctgttaccagagaattaaataatgagtcttttaagatttgggatttggcaaaaaatcacttctttcagccttattttttaccgactttagttttaattattgtttgcacacttgctttgaattatcttataagagtgaaaatgaagagatcacatttgtctcggaaaatgactctacttttagagaacttttctgaaactgaatttcttctaactggattaattgtttcttttattcttagcgatacgctttatgttaaacttttacaggaatcattaagggcttattaccacaaacctcttgcctatgaaagtcttttatttctttatactttgctaacgttaatcttgtttagtgtgattgtagaagcttgttttaatgcttatcgttctatcaaattgaatcgtcccaatctctccctagcctttgtttccagtcttttatttgctactatctttaactatgcttttcaatacggcttaaaaaatgatgctgatttattaggtaagtatattgttccgggagcaactgcttaccagatattggtattgacagcggctggttttttcttatacttgatcattaatcgctatctacttgtaacttttctaattgttattttaggatcaattattactgtcgttaatgtccttaaggtaggtatgcgtaatgaacctctgctagtgacagattttgcatgggttactaatataagattgttagcacgttctgttaatgctaatattatttttagtactctattaattttagctgctctgattctgttatatttgttccttagaaaacgtttgctgcaaggaaaaattacggaaaatcatcggttaaaagtagggcttatctcttctatttgtcttcttgggtttagtatttttatcatctttagaaatgagaaaggcagcaaaattgtaaatgggattcctgtaatatctcaggttaataattgggttgatataggctatcaaggcttttattcgaatgctagttataaatctctgatgtatgtttggacaaagcaggtaaccaagtctattatggataaaccgtcagactacagtaaagagcgtattcttaaattagctaagaaatataataatgtagctaataaaatcaataaggttcgaacagaaaatatttcaaatcagacagttatctatattttaagtgaaagtttttcggatcctgatcgtgttaaaggagttaaccttagtcgtgatgttattcctaatattaaacagattaaagaaaaaacaactagcggattaatgcattcagatggctatggcggtggtactgccaatatggaatttcaatcattaactggtttgccatactataattttaactcttcggtttcaactctctataccgaggttgttcctgatatgtctgtttttccttccatcagtaatcagtttaaatcaaaaaatcgagttgttattcacccatcttcggcttcaaattattctagaaaatatgtttatgataaattaaaatttccgacttttgttgcttccagtggaaccagtgacaaaattactcattctgaaaaagtgggacttaatgttagtgataaaacaacttatcagaatattttagataagattaatccttctcaaagtcaatttttctctgtaatgacaatgcaaaatcatgtaccttgggcatcggatgagccaagtgatgtggttgctactggcaagggctatacaaaagatgaaaatggttctttatctagttatgcgcgattgctgacctatacagataaagaaacgaaagattttttagcccaactttcgcagctgaaacacaaagtaacagttgttttttatggagaccatttacctggtttgtatcctgaaagtgcttttaaaaaagatccggacagtcaatatcaaacagattactttatctggagtaattataataccaagactttgaatcattcttatgttaattctagtgattttacagctgaacttctagaacataccaattcgaaagtttcgccttattacgctctattaacagaagttttagataatactactgttggtcatggaaaactgactaaagaacaaaaagaaattgctaacgatttgaagcttatacaatatgatataactgtaggaaagggatatatcagaaactataaaggattctttgacattcga

SEQ ID NO: 35895 - DNA, 1296 bp, Streptococcus mutans
atgtcaattattactgatgtttacgctcgcgaagtccttgactcacgcggtaacccaacacttgaagtagaagtttacactgaatcaggtgcattcggacgtggtatggttccttcaggagcttctactggtgaacacgaagcagttgaacttcgcgatggagataaatcacgttatggtggtcttggtactcaaaaagctgttgataatgtaaacaatattattgctgaagcacttatcggatatgatgttcgtgatcaacaagctattgataaagcaatgatcgcacttgacggtactccaaacaaaggtaaacttggtgctaatgctattcttggtgtttctattgctgtagctcgtgctgctgctgatttccttgaaattccactttacagctaccttggtggatttaacactaaagttctgccaactccaatgatgaacatcatcaacggtggttctcactcagatgctccaatcgctttccaagaatttatgattgtacctgctggtgcacctacattcaaagaagctcttcgttggggtgctgaaatcttccatgcacttaagaaaattcttaaggaacgcggacttgaaacagctgttggtgacgaaggtggattcgctcctaagtttgatggaactgaagacgctgtagaaacaattatcaaagctattgaaacagctggttacaaaccaggtgaagaagtcttccttggatttgactgtgcgtcatcagaattctatgataatggtgtttatgactacactaaattcgaaggtgaaaaaggtgctaagcgttcagctgcagaacaaattgattatattgaagaattggttaacaaatacccaattatcacaattgaagatgctatggacgaaaatgactgggatggctggaaagcattgactgctcgccttggtgaccgtgtacaattggttggtgacgacttcttcgttacaaatacggactaccttgctcgtggtatcaaagaaggtgctgcaaactcaatccttatcaaagttaaccaaatcggtactttgactgaaacatttgaagctatcgaaatggctaaagaagctggttatactgccgttgtatcacaccgttcaggtgaaactgaagattcaacaatcgctgatatttcagttgcaaccaacgctggacaaatcaagactggttcattgtcacgtacagatcgtattgctaaatacaaccaattgcttcgtatcgaagatcaacttggtgaagtcgctgaataccgtggtcttaaatcattctacaacttgaaaaaa

SEQ ID NO: 35896 - DNA, 1068 bp, Streptococcus mutans
atgagacgtgaactcttacttgaaaaaattgacgaacttaaggaacttatgccttggtatgtgctagagtattatcaatctaaattgacagttccttatagttttacgactttatatgaatacttaaaagaatatcggcgtttctttgaatggttaattgattctggtgtctctaatgcgaataaacttgctgatattccgctggaaactttggagcatcttagtaaaaaagatatggaatcctttattctctatttacgagaacgaactcttttaaacactaaaaacaaacgtcaaggtgtttctcagacaacgataaaccgcacactttcagccttatcaagcctttataaatacttgactgaggaagttgaaaatgctgatggtgaaccttatttttatcgaaatgtcatgaaaaaggtatcaactaaaaagaaaaaggaaacattggccgcacgagctgagaatattaaacaaaagctctttttaggcaatgaaacaatggaatttttagaatatgtggattgtgaatatgaacacaaactttctaaacgcgctctttcctcttttcgaaaaaataaagaaagagatttggcaattattgctttgctgctagcatctggagttcgtctttcagaggctgttaaccttgatcttaaggatgttaatctcaatatgatgattattgaagttacccgtaagggcggcaaacacgattcggttaatgtcgctggtttcgctaaaccttatttagaaaactacattactatcagacgggggcgctacaaggctaaaaagactgatctagctttctttttatccgaatatcgtggtgttcctaatcgcatggatgcttcttctattgaaaaaatggttgctaaatattcgcaagatttcaaaatccgcgtcactccccacaaactaagacacacgcttgcaactagattatacgatgctaccaaatcacaagttttggtcagtcatcaattaggtcatgcttctactcaagtaacagacctttatactcatatcgttaatgatgaacaaaaaaatgctttagataaatta

SEQ ID NO: 35897 - DNA, 1350 bp, Streptococcus mutans
atgactaaacaatatgattatatcgttattggtggtggttcaggcgggattgcctctgctaaccgcgcggctatgcatggggctaaggtgattctgtttgaaggcaagcaagtcggtggaacctgtgttaatgttggctgtgttcctaagaaagtcatgtggtatggagctcaagtagcagaaaccattaataattatgcagctgactacggttttgatgtaacaactcaggcctttcatttcgatgtcttgaagcaaaatcgtcaggcttatattgatcgtattcatgattcttatgaacgtggttttgatagcaatggtgttgaacgtgtttatggctatgctacttttgtagatgctcatacagtagaagtagctggggaacattatactgcaccgcatattttgattgcgacgggtggtcatgccttactgccggatattcctggtagtgagtatggtattacttcagatggcttctttgagttagatgccattcctaaacggacagcagttgttggtgctggttatattgctgtggaaatttcaggtattctgcatgctcttggcagtgagacacatctttttgtccgtcgggatcgtccccttcgcaaatttgataaggaaattgttggaacacttgtggacgaaatgaaaaaggatggtcctcatcttcatactttttcagtccctaaagaagtgattaaaaatactgataatagtctaacacttattttggaaaatggtgaggagtacactgttgatacattgatttgggcaattggccgtgctgccaatacaaaaggttttaatctggaagtgactggtgtcacattagatagtagaggttttattgcgactgatgcatttgaaaatactaatgttgaaggtttgtatgctcttggagatgtcaatggaaaattagaattaacaccagttgctgtaaaggctggccgtcaactgtctgaacgcctttttaaccataagcctcaggctaagatggattataaggatgttgctaccgttattttcagccatccagttattggttcaatcggcctatctgaagaggcggctttagatcagtatggtgaagaaaatgtcaccgtttatcgttcaacttttacttcaatgtatacggcagtaaccagtcaccgtcaagcttgcaagatgaagttggtaacagtaggtgaggatgaaaagattgttggtctacatggtattggttatggtgttgatgagatgattcaaggttttgcggttgctatcaaaatgggagcaactaaggctgattttgacaataccgttgccattcacccaacaggttcagaagagtttgtcactatgcgc

SEQ ID NO: 35898 - DNA, 993 bp, Streptococcus mutans
atgggtattcgctctttatttggcagcttgagagaaaaaattgtcagcaaaaatgtgaggatcgtttttcctgaaggaaatgatgaacgtgttgttcgggcagctgctcgtcttaaatttgaaggtttgattgaaccaattattttaggagatgcgactgaagtccgtaatttgttgacaaagctcggttttgctgatcaggactatacgatcattaatcccgaagactatacagattttgaacatatgaaacaagaatttgtagaaattcgcaaaggtaaagcaaccattgaagatgctgagcagctattgaaagacgtcaactattttggtgtgatgttagtaaaactcggtttagcagatggtatggtttctggtgctattcattcaacagcagatactgttcgccctgcacttcaaattatcaaaacgaaaccagaaatttcgcgaacatcaggtgtcttcttaatgaatcgtgaaaccactgaccaacgtttgatttttgcagactgcgctatcaatattgaaccggatgaacaagaattagctgaaattgccatcaatacagcagatacagcaaaaatttttgatattgatcctaaaatcgctatgctgagtttttctactaaaggcagtgcaaaggcttctcaagttgaaaaagttcaagaagcaacccgcattgctaaagaacttcgtcctgaaattaccttagatggagaacttcaatttgatgctgcctttgtaccgacaacagctaaaattaaagcgccggaaagtgacgtagcaggacaagccaatgtctttattttcccagatctccaatcaggaaatattggttacaaaatcgctcaacgtctgggaatgtttgatgctatcggaccaatcttgcaaggcttaaatatgccagtaaacgatctctcacgcggatcaagtgctgaagatatttacaaacttgctattatcacagctgcgcaaacccttgataatactaaa

SEQ ID NO: 35899 - DNA, 888 bp, Streptococcus mutans
atgaggtttgaattcattgctgatcgaaaagtaaaagttaaaactttcttaaaaagccatgatatttctaagactttgttagctaaaatcaaatttaaaggcggtcaaatattagtaaatgatcaagaagaaaatgctatttatcttcttgatataggcgatcgggtaactataataattcccgacgaagaagcgcttgaaactttacagcccattaagcatgatttgaatattgtttatgaagatgaacattttttaattttggataaacctgctggttatgctagtattcctagcatcttacataccaataccatagccaattttgttaaatattattatctcaaaaaagattatcccaataagcaaatccatattgtaacaaggcttgataaggatactagcggtcttatgcttttagccaagcatggttatgctcatgctaggctggataagcagctgcaaaagaagaccattaaaaaacggtattatgcgcttgtttctggacaagggcaactgcctgatcaaggagagatcatcgctcctattgcaagaccggaagatagtatcattacacgctgtgttcacccttctggtaaatatgcacatacaagttataaagtattagctcgttacggtgatatcgccttggttgatattcaacttcataccggccgaactcaccaaattcgcgtacactttgctcatattggttttccccttttaggagatgatttatatggaggagaaatggggtatggtttaaaaagacaagctcttcactgccattttttgtcttttgtggatcctttttccaaagaacataagcagtacaatagttccttgacagaagaccttgatagcgttatcatagatttacaaaaacat

SEQ ID NO: 35900 - DNA, 528 bp, Streptococcus mutans
atgactttaactcaacaaaaagtgaagttttttagtaaagcttatcatgatgttaaaagattatatctttcagcttttccacctcgtgagcgctttccttatttttgcttgctgctaaatagcttgcgctctctggtgacttgctatgcctattatgataaggaacgctttgttggttttgcttatattattgaatctaaggagcaggtgtttatcctttttttagctgttaatgggtcagttcgctccaaaggatatggcagtatgatattagcacagattcgtgaatatgctggaagaaaaccgcttattttaacgatagagcctgtcgagaaagattcgccaaatagtgaacaaagaagacagcggctgtccttttatgagcgcaatggataccaactgacatctcattactattacgaggggcaggagcgctaccagatattgactacggaacagagtattgatttagaacgttttcaaaaattagtcaaaagagcggttctgggcttagtgctaataacagta

SEQ ID NO: 35901 - DNA, 312 bp, Streptococcus mutans
atgagcacatacgcaatcatcaaaactggtggaaaacaagttaaagttgaagtcgatcaagcaatctatgttgaaaaacttgatgttgaagctggagcagaagtaacctttgatcaagttgttcttgtcggtggcgacaaaactgttgttggtactccaattgttcaaggagctactgttgttggaactgttgaaaaacaaggaaaacaaaagaaagttgttacttacaaatacaaacctaaaaaaggtagtcaccgtaaacaaggtcaccgtcaaccttataccaaagttgttatcaaagctatcaacgct

SEQ ID NO: 35902 - DNA, 831 bp, Streptococcus mutans
atgacacagatgaactttaccgataaaattaaagttgctattatagcaaatggaaaatatcaaagtaaacgcctaacagcaaaactttttgcaatattaagaaatgatgatagattttatctaaccaaaaaaaatcctgatattgttattacgattggtggtgatggtatgctcttgtctgcctttcatatgtatgaaaagtgcttggatcatgttagatttgttggtattcatacaggacatttaggtttttatactgattatcgtgattttgaagtcgataagttattagagaatttacattctgataaaggcgaaaaggcatcttatcctatcttaaaagtgactgctacgctagctgatggtcgtcagttaacatccagagctcttaacgaagctactattagaagaattgaaaaaaccatggtagcagatgtcgttatcaataaggttcattttgagcgttttcgaggagacggcatttctgtttccactccaactggaagcaccgcttataacaaatcattagggggggctgttttgcacccgaccattgaagccttacagttaacagaaatttcaagtcttaacaatcgtgtctttagaacattaggaagctccattattgttcctaaaaaagacaaaattgaaatcgttcctaaacgcttagggtcttatgttctatctattgataataaaacttatacgcatcgaaatgttgctaaaattgaatatgaaattgatcgtaaaaaaattagctttgtatcaacaccaagccacactagtttttgggaacgcgtcaaggatgcttttatcggagatttcgattca

SEQ ID NO: 35903 - DNA, 663 bp, Streptococcus mutans
atgaattgggaagaatttctggacccttatattcaggcagtaggtgaattaaaaattaagttcagaggaattcgtaagcaatttcgtaagcaaaaacgccattcaccaattgaatttgtgacaggacgtgttaaaccaatcgaaagtatcaaagaaaaaatggttttacgaggaattaaaaaggaaaacctcactcaagatatgcaggatattgcgggattaagaattatggttcagtttgttgatgatgtcaacgatgttttagagcttttacgtcaacgcaaagacatgaaagtgatacaagaacgtgattatatcaataatttaaaacccagcggttatcgctcttatcacgttattgttgaatatcctgttgatactatcagtggacaaagaattattatggctgaaatccaaattcgaactctggctatgaatttttgggcaacaattgaacactctctcaattacaaataccatggtgaatttcctgaagatattaaaagacgtttagaattaacctccaaaattgcttttcaattagacgaggaaatgcggcagattcgcgatgacattaaggaagcacaactattatttgatgctgagactagaaagctaaacgatggtgtaggaaatagtgatgacacagatgaactttaccga

SEQ ID NO: 35904 - DNA, 978 bp, Streptococcus mutans
atgctcaaacttggtattattgggacaggatccatttcgcatcagtttattgaagcagctcagctcagccagcactatcaattaacagcggtttattcacgaaaattagaaacagcagaagctttttctgcacgttatcaaaatattgcctgctatgatatgctagatgacttttttaacgatgcttttgatgttctttatattgccagcccaaatgcccttcattttgaacacgccaaattagcattagaagctggaaagcatattattgttgaaaagccggctttctcaactccagaggagttaagcaatattatccactcggcagaaaaaaaacaactgttcttttttgaagctgctcgtaattatcatgaagaatctctccttcttattaaggaattcctatcccacaaaacagttatcggggctgacttttcctatgctaagtattcttcaaaaatgaaggatttactggcaggcaagctgcctaatgttttttcagataagttttcaggaggagctttagttgatttgggaatttatcctatttacgctgctatcaaactttttggaaagcctaaaagtgtcaactacacagcgacacaattggaaaacaccattgatttgaacggcaatggcaatctgatttatcctgattttcatgtttccattagggcaggaaagaattacaacaccttagaatacgctgaaatttataccagtgagggaactctccgactgaatcatattcaaggaatcagctctgctattttccaaaaacatgatggcagccgcgaaaaattagctcttcctgacattgaacacctcatgttggaagaagcaaagcactttgctgaaatgatgaacaataaaaatgaggtcatttaccagacttggttagaggatgctaaaacggctagtcaaattctctatcagatgcgtcaaagtgccggtattgtatttgaggcagacaaaaaa

SEQ ID NO: 35905 - DNA, 645 bp, Streptococcus mutans
atgacaaaacaattaaccattgccttgacaaaagggcgaattgaaaaggatacggtcaaattacttgaaagagcgggttttgacatgtccttcatggctgataagggccgtaatctgatttttgaaagtccagataaaagctttcgttttctgcttgttaaggcaccagatgtcacaacctatgttcgtcatggtgtagctgatattggtgttgtgggaaaagatgttctgatcgaacatccgacaggttacttggaaatgctggatctcaattttggactttgcaaattttcagtagcctccacaccagattataatcctagtgatcataaacgcaagcggattgcaaccaaatatccaacagttgccagagactttttcaatcaaaaaggggaggatgttgagattatttctattcaaggaagtgtggaaattgcccctgttattggtttagcggatgccattgtcgatattgttgagacaggcaatacactagtcgctaatggcttggaagtctttgaagatatttgtcgtatttcagctcgcatgattgtcaataaggccagtttaaaaaataaaccagaattattggctttcatcaagaaaatggaaaaccttgtcggtgatagagaggtggcttttaaa

SEQ ID NO: 35906 - DNA, 1749 bp, Streptococcus mutans
atgaaatcgaaaactgctaaaattactttgctaagcagccttgctttggcggcttttggagcaacgaatgtttttgcagatgaagcatcaactcaattaaattctgatactgttgcagcacctactgctgatacacaagcatcagaaccggctgcaacagaaaaagaacagtctcctgttgtagctgttgtcgaaagtcacacacaaggaaatacaacaacgacaacatctcaagttacttctaaagaattggaagatgctaaggctaatgctaatcaggaaggtttagaagtcactgaaactgaagctcaaaaacagccttcggtagaagctgcagatgcagataacaaagcacaggcacaaacaattaatacagcggtagctgattatcaaaaggcaaaagctgaatttcctcaaaaacaagaacaatataataaagattttgaaaagtatcagtctgatgtcaaggagtatgaagctcaaaaggcagcttacgagcaatataaaaaagaagttgcacaaggtttggcatctgggcgtgttgaaaaagcccaaggacttgtgtttattaatgaacctgaggcaaaactttctattgagggtgttaatcagtacctaacaaaagaagcacgtcaaaaacatgcaactgaagatattcttcagcaatataatactgataattatacagcttctgattttacccaagcaaatccatatgatccaaaagaagatacttggttcaaaatgaaagtgggagatcagatttcagttacctacgataatatcgttaattcaaaatataatgataaaaagattagtaaggtaaagattaattatactctcaatagttcaacgaataatgaaggcagtgcactggtcaatttgttccatgatccaactaagacaattttcattggtgcacagacatctaatgctggcagaaatgataaaatcagtgtgacgatgcaaattattttttatgatgaaaatggcaatgaaatcgatttaagcggcaataatgccattatgagtctctcatcgttaaaccattggacgactaagtatggcgatcatgtggaaaaagtaaaccttggggataatgaattcgttaaaataccgggctcatctgttgacttacatggcaatgaaatctattcggctaaggacaaccaatataaagctaatggtgcaacctttaatggtgatggagcagatggctgggatgctgtcaatgctgatggaacgccacgtgctgcgacggcttattatggtgcaggtgctatgacttacaagggagaacccttcacctttactgttggtggtaatgatcaaaacttaccaacaaccatttggtttgcgactaattcagctgtagctgtgcctaaagatccgggagctaaaccaacaccgccagaaaaaccagagttgaaaaaacctactgtgacttggcataaaaatcttgttgttgaaactaaaactgaggaagttcctccagtgacaccaccaacaactcctgatgaaccaacgccagaaaagccaaaaacaccagaggatcctcaatcacctgtcgtagctaagtcagtaagctttagaacggcaagaaaaggagaaatgcgtgttagagagcgtgattatcaaccgactcttccacatgctggggctgctaaacaaaatggtttagctactcttggtgctatttcaactgcatttgctgcggctactttgattgcagctagaaaaaaagaaaac

SEQ ID NO: 35907 - DNA, 678 bp, Streptococcus mutans
atgtattcaatccattctgcaaaagaagcactattgcctagagaacgtctcatgacttatggtcctgaaagtttgagtaatcaagaattattggctatattattgcgaactggtactaaaaaggaacatgttctcaatctctcaataaaaattttaaatggtctagatagcttggccgattttcgcagcttatccttagaagaactgcaggaaattgaaggaatcggtcaagtacgatcagtagaaattaaagctatgctggaattatccaaaagaatcaatcaagctgaatacaattttaaagaacgtattttaagcagcgaacgtttagctaaaataatgatgagtgaattaggcgataagagacaggaacaccttattgctatatatcttgacactcaaaatcgtgtgataaaaaaacaagtcatttttattggcagcgtcagacgatctgttgctgaaccccgagaaatccttcattatgcttgtaaaagtatggcaacatcacttattattgtccataatcatccttcaggttcaacttatccaagcgagaatgacctgcgatttacagaaaaaataaaacgatcctgtgatgatttaggaatcgtctttttagatcatattattgtcgggaaaaaagaatattacagttttcgtgaggaaacagatcttgtt

SEQ ID NO: 35908 - DNA, 1950 bp, Streptococcus mutans
atgacagaagaaaataaaaatttagatcaattagcacaagagtacgatgccagtcaaattcaggttttggaaggacttgaagctgttcgtatgcgtccagggatgtacattggttcaacttcaaaagaagggctgcatcatcttgtttgggaaattgttgacaactccattgatgaagctttggcaggctttgccagtcacattcaagttttcattgaagaggacaattctattacggttattgatgatggtcgcggcattccagttgatattcagcaaaaaacaggtcgtccagctgtagaaaccgtctttactgttctccatgcaggagggaaattcggcggcggcggttataaggtatctggaggccttcacggtgttggttcttctgtcgttaatgctctttcaacacagttggatgttcgtgtccataagaatggcaagattcattatcaagagtatcatcgcggagtggttgctgaagatttaaaagtcattggtgatacagatattactggaacgattgttcacttcacaccagatcctgagatttttacggaaacaactgaatttgattttgataaattagccaaacgtattcaagagcttgctttcttgaataagggtttgaaaatttcaattaccgataaacgctctggacaagaaagaaaagaagaatttcactatgagggcggtattgtcagttatgtagaattcatcaatgaaaataaagaagttatttttgataaaccgatttatacggatggttctttggatggtatttctgtcgaagtagccatgcaatacacaactggttttcatgaaaatatcatgagttttgccaataatattcacactcatgaaggtggaacgcatgaacaaggattccgtacggctctgacacgtgttatcaatgattacgccaagaaaaataaaatccttaaagaaaatgaggataatttaaacggtgacgatgttcgtgaaggtttgacagccatcatttcggttaagcatcccaatccgcagtttgaaggacaaaccaagaccaaactgggaaattcagaagttgttaaaattaccaatcgacttttcagtgatgctctcaatcgtttcttgttagaaaacccccaaatcgctaaaaagattgttgaaaaagggatactagcatctaaagctcgtattgcggctaaaagagcgcgtgaagtgactcggaagaaatccggacttgaaatctcaaatttaccgggcaaattggcagactgttcctctaatgatcccattcagaatgaactctttatcgtggagggagattcagctggcggttctgctaagtctggccgtaaccgtgaatttcaagcaatcttgcctatccgcggtaaaattctaaatgttgaaaaagctaccatggataagattttggccaatgaagaaatcagaagtctcttcacagcaatgggaacaggttttggggcagaatttgatgtttctaaatcgcgctatcaaaaattggtgattatgactgatgctgatgttgatggggctcatattagaaccttacttttgacacttatttatcgtttcatgcgtccggtgcttgaagcaggctatgtctatatcgcgcaaccgcctatttatggtattaaggttggcagtgatattaaagaatacattcagcccggaaatgatcaagaagaaaaattgcaggaagctttagaaaagtacagtcaaggacgttcaaaaccgaccgttcagcgctataaggggcttggggaaatggatgatcatcagctttgggaaacaaccatgaatccggataatcgcttgatggcacgcgtttcattggacgatgctgctgaggctgacaagatatttgatatgcttatgggagatcgtgttgaacctcgtcgtggttttattgaagaaaatgcggtttatagtacgcttgacgtt

SEQ ID NO: 35909 - DNA, 1548 bp, Streptococcus mutans
atggcttttgaaagtttaaccgaacgtttacaaggtgtctttaaaaatttacgcggcaaacgcaaactctctgaaaaagatgtacaggaagtcaccaaagaaatccgcctcgctttattagaagctgatgtcgccttacctgtcgttaaagaatttattaagcgtgttcgtaaacgcgctgttggacatgaggttattgataccttagatccttcccaacaaatcattaaaattgttaacgaagaactgacagcagtcctcggctctgaaacggctgaaattgaaaaatcgtctaaaattccaaccattatcatgatggtcggtcttcaaggggctggtaaaaccacttttgctggcaaacttgctaataagttagttaaagaagaaaatgcacgtcctctgatgattgctgctgatatttaccgaccggctgctattgaccagttaaaaactttgggacaacaaattaatgtacctgtttttgacatggggacagagcattcagcagttgagattgtaagtcaaggtctggctcaagccaaagaaaatcgtaacgactatgttttaattgatacagccggccgtttacaaattgatgagaaattaatgactgagctgcgtgatatcaaagctttagccaatcctaatgaaattctcttggttgttgatagtatgatcggtcaagaagccgcaaatgttgcacgcgaattcaaccaacaattagaggtcactggggttatccttacaaaaattgatggtgatactcgcggtggtgctgcgctttccgtccgtcaaatcactggaaaaccaattaaattcactggtactggcgaaaagattaccgatattgaaaccttccatccagatcgcatgtcctctcggattttgggaatgggagacttgcttaccttaattgagaaggctagtcaggattacgatgaacaaaaatcagctgaattagctgaaaaaatgcgcgagaattcctttgacttcaatgatttcattgaacaattagatcaagttcaaaacatgggatcaatggaagatattcttaaaatgattcctggtatggctaacaatccagctcttgccaatgtcaaagttgatgaaggtgaaattgctagaaaacgcgccatcgtatcatcaatgacacctgaagaacgtgagaatcctgacctcctaactccgagccgcagacgtcgtattgcttctggttctggtaatacttttgttaatgtcaataaattcatcaaagattttaatcaggctaagaagatgatgcaaggtgtcatgtctggtgatatgaataaggtcatgaaacaaatggggattaatcctaataatatgcctaaaaacatggactcatcagctcttgaaggaatgatgggacaaggcggtatgccagatatgtcagagttgagcggtactaatatggatgtgagtcaaatgtttggtgggggacttaaaggtaaggtcggcgaatttgctatgaaacaatctatgaagaaaatggctaaaagaatgaaaaaagccaaaaaacgtaaaaaa

SEQ ID NO: 35910 - DNA, 1176 bp, Streptococcus mutans
atgaaagaaaatcaattcaaaataaatgaaataagtttagccattctattattttggtgtggccttatagttgtcgccagtaattacataacgattcctttaatgtctgcttttactcagcagtttcatgttagtgcagaacagacagcttggttgggaaccagtttttctttcgcctatgctttaagctgtctcttagttggtgttttatctgatcgatttggcagaaaaagaattatggttggagggttgatcttattatcagttattactcttatcattccttttggcaatcagttgtcttggttaattatgggacggatcatgcagggcatagccgcatctagctttgcccctgtagctgttgtttatatttccgaaaaattttcaaaagagattaaagggacagttgtaggccttgtcagtgccagttttttgatttcggcaattgtcgggcaaattatgagtgcttacattagtcggttgttgaactggcaggctgtcttttgtacatttggaataatttatttgctaacagccctaatcttatatagctatgcttcacctgtttctaaccaaagtaaaggaattctattttctcaactgtttagacattattgggagatattaaggaaaaagaatttaatcaagctttatctgattgctctgactttattatttgcatttgtagctttttacaccgttttagagggttattcggttcatacatttcatttaagtaaagataatatttttaagataagagctttaggtgtgattggcatgttatttgctccttttgcggataaattagctagaaaatttgatataaaatgtctactcatcctttctttgctgttttcgtttgtatccctttttattattgctttttgtccatatctcaatgtattgattataatgagtcttttatttgtagcaggaatttcaatcattgttcccactttaattattttagtgggaaggtttggacagaatcaagctggaatcgctgtctctttttacacctttattttgttcttaggtgctagttttggaccgattgcaggtgttcagttattgactgtactgggagcaaaagcaacctttttgactttagctttattattgttgttcagtatgcttgttgcatttactttggatattaaaggagaacag

SEQ ID NO: 35911 - DNA, 330 bp, Streptococcus mutans
atggagatcgaaaaaaccaatcgaatgaatgcgctttttgaattttatgcggcgcttttgacagataagcaaatgaattatattgagctatattatgcagatgattatagcttagctgaaattgctgaagaatttgacgttagtcgccaagctgtttatgataatattaagcgaaccgaaaaaattttagaagactatgaaatgaaacttcatatgtattctgactacgtcgtccgcagtgaaatttttgatgctataatgaaaaaatatcctaatgatccttatctgcagaacaagatttccatattgacgactattgataatagagac

SEQ ID NO: 35912 - DNA, 345 bp, Streptococcus mutans
atgaatccattaatccaaagtttgaccgaaagtcaactccgtacagacattcctaacttccgccctggtgacactgttcgtgttcacgcaaaggttgttgaaggaaaccgtgaacgtgtccaaatttttgaaggtgttgtcatttcccgtaaaggtcaaggtatctcagaaatgtatactgttcgtaagatttcaagcggtgttggtgttgaacgtacttttccaactcatacaccacgtgttgaaaaaatcgaagtgactcgtcatggtaaagttcgtcgcgctaaattgtattatcttcgtgcattgcaaggtaaagctgcacgtatcaaggaagtccgtcaa

SEQ ID NO: 35913 - DNA, 1605 bp, Streptococcus mutans
gtgattatgtcttttactagtaagtttagtaaaactgtagaagaaagggagataatgactgatattaaagatattcaaaaaattatcgtacttgactacggcagtcagtacaatcagctgatcgcacgccgcattcgtgaatttggtattttttctgaattgagaagccataaggtaacagccgacgaagtccgtgctatcaatccaattggtattgtcctttcaggaggaccaagttcagtttatgctgaagatgcctttgacattgataaggaaatccttgatcttggaatccccgttttaggtatttgttatggtatgcagcttcttacagaaaaacttggcggtaaagttgttcctgctggacaaactggcaatagtgaatatggtcagtctacacttcatttgacagaaaactcagagctttttaaggaaactcctgctgaacaaactgttttgatgagccatggcgatgctgttactgaaattcccgaaggctttcaattggttggcaaatcaagcgactgcccttatgctgccattgaaaatgtcgaaaagaaaatctttggcattcaatttcacccagaagttcgtcatacggaatatggtaatgcgattttacgcaattttgcttttaatgtttgtaaagccaaaggtgattggtcaatggacagtttcattgatatggaaattgaaaaaatccgtgaacaagttggtaatcgtaaggttcttctggggctttcgggcggtgtggactcttctgttgttggcgtgcttttgcaaaaagctataggtgaccaattaacctgtatcttcgttgatcatggccttcttcgtaagggtgaaggcgatcaggttatggaaatgttgggtggtagatttggactcaatattattcgtgttgatgcttccaaacgctttttggatcttcttgctggtattgatgatcctgagaaaaagcgtaaaatcattgggaatgaatttgtctatgtttttgatgatgaagccagcaaacaaaaaggcgttgatttcttggcacaaggaacgctttatacagatgtcatcgaatccggcacagaaacagcccaaaccattaaatcacaccacaatgtcggtggtcttccagaagacatgcagtttgaattaatagagccgttaaacacactgttcaaggatgaagttcgtactctggggactgctttaggaatgccagatgaaatcgtttggcggcaaccatttccaggacctggacttgccattcgggtgatgggagaaattactgctgaaaaacttgaaacggttcgtgaatctgacgctattttacgcgaagaaattgctgcagcaggcctgaatcgtgatatttggcaatattttactgtcaatactggcgttcgttcagtcggagttatgggagatggtcgtacctatgactataccatcgctattcgcgccatcacttctattgacggcatgacagcagactttgcccgtattccttgggaggttctccaaaagatctctgttcgtattgtcaacgaagtggaacacgtcaaccgcatcgtctacgacattaccagcaaaccaccagcaactgttgagtgggaa

SEQ ID NO: 35914 - DNA, 858 bp, Streptococcus mutans
atggaacattcatcaaaagcaacggttcttgaaatagagcatctgcaaaaatattataagaaaaatattggggttaaagatatttctttatctgtcaaaaaaggagagatttttggttttcttggatcaaatggtgcaggaaagtcaacgactattcgctgtctcttggggctgattaagccaagtggtggtcagatgacacttttcggaggtcgttatggatcgctgactgaaagcctccatcatattggttatatgccatcggaagccatgttttatccaaccatgaaagttaaagatgttatcgcatttgcagctaaagttcgtaaaaaagactgtagccaagaggccaaacgcttgtctgaacttttagaggttccttcagataaaaaaatagaagaactatctttaggaaatcgtaaaaaagttagtattgtctgtgccttgcagcatcaaccagaccttattattttagacgaaccaacatcagggttagaccctttaatgcaagagcgcttttttaaattgattaaggaagcttgttccaaaggagctacttgtttcttgtcctctcatgttttatcggaaattaagaattattgtgatcgtgttgctattcttaaaaatggtgaaatagtaactgttgatgctattcatcatttgacacacagcatgttgcggaaagtgtctgtttggaaaggcggtaagttgaagactttcaattatagcggttctatgaaagatttgcttaaacagcttgaggaaatgaatcctgatgatcttttgatagaagaaccatcactggaatcattatttttacattactatgaggagaaagacaatgaccatactatatca

SEQ ID NO: 35915 - DNA, 240 bp, Streptococcus mutans
atgaaaaaagatattcatccagaataccgtccagttgtctttatggatacttcaacgggttaccaattcctcagcggttcaactaagacgtcaaaagaaaccgttgaatttgaaggcgaaacttatccacttatccgcgttgaaatttcatcagactcacatccattctatacaggacgtcaaaaattcacacaagcagatggacgtgtcgaccgtttcaacaaaaaatacggcctcaaa

SEQ ID NO: 35916 - DNA, 1029 bp, Streptococcus mutans
atggctagagaactattatttatgaaagcaattaatgaagcgcttgatatggcaatggccaaagatgacaaaattattttacttggtgaagatattgcaggtggtgttaaggttaaacatttagaagagcaaaacgaagaagcctggggcggtgttatgggggttaccagcggtttaatggctaaatacagtcgtgatcgtgttattgacacccctctttcagaacatggttacatgtcagcttctgttgggatggctttgacgggattgcatcctgtgccagaattgatgttcaatgactttattggtttttgttttgatgctttgattggccaagggtcgaaaatgcgttatatgtttggtggcaaggcaaaagtgccgatgaccgttcgtaccatgcatggtgcaggcgcttcagctgctgcacagcactcaggatcttactatggcatctttggttcaatcccaggaattaaggtagttgttccagcgacaccttatgatgccaagggtctgcttctttctgctcttgaagatgataatattgttatcttttcagaagataagacgttgtatggctttaaaggtgaagtgccagaggattattataccgttccgattggaaaggcagttgtccgtcgtgaaggtaatgatttaaccattgtaactattggtaaaatgctctatgtggcttatgaagtagcagatcgtttggctaaggatggcatttctgttgaagtcattgatcttagaacagttgcaccttgggatcaagaaaccgttctaaattctgtgaaaaagacaggacgcttgattgtgattgatgaatcaaacccacataataatacagcgacagatattgcttctgttgttaatgataaggcattcgattatctagatggtccaattaaatgtgtttgtgcaccaaatgtacctgttccgtttgccatcaatcttgaacaactatacatccctaatgcagaccgtgtcattgaagcagcagctgaattgattgacgacttgaaagca

SEQ ID NO: 35917 - DNA, 1713 bp, Streptococcus mutans
atggtatatcaagaaaattatcaaaaatggttagcttatgctaaacttcccgactatcttcatcaagaattattagcaatggatgaaaagaccaaggaagatgctttctatactaatcttgagtttggtacagcgggcatgcgtggttatattggcgctggaactaatcggatcaatatttacgtcgttcgtcaagcaactgaaggacttgcccaattgattgaaaccaaaggagacgacgtcaaaaaacgcggtgttgctattgcttacgattcccgtcatttctctcaagaattcgcctttgaatctgctcaggttttagcaaaacacggtattaaagcttatgtctttgaatctcttcgtccaactccagagttatcatttactgtacgccatttaggaacttttgcgggtattatggtaacagccagtcataaccctgcaccatttaatggttacaaagtttatggtgaagatgggggacaaatgcctccttttgatgcggatgctctaacagattttattcgtgccattaatgatccattttcaattgaattagctgatttagaagaaagcaaagcttctggattaattgaagttatcggtgaagctgttgatactgactacctcaaagaagttaaagatgtcaatatcaaccaaaaattgattgacgagtacggtaaagacatgaaaattgtctacaccccgcttcatggtactggtgaaatgctggctcgtcgtgctttggcacaagctggtttcgattctgttcaagtggttgaagctcaagcagtgccagaccctgatttttcaaccgttaaatcaccaaatccagaaaatcaagaggcttttcgtttggctgaagaattaggacgtcaggttgatgctgatgttctcgttgcaaccgatccagatgcggatcgtcttggcgttgaaattcgccaagctgatggatcttataagaatctttctggcaatcaaatcggtgctatcatcgctaagtacattcttgaagcgcacaaaacggctggaagtttacctactaatgctgctctttgtaaatcaattgtatcaactgaattagttagcaaaattgctgaaagttatggcgcaactatgtttaatgtcttgactggtttcaaattcattgctgaaaagattcaagaattcgaagaaaaacacaaccacacttacatgttcggctttgaagaaagctttggttaccttattaaaccttttgttcgtgataaagacgctattcaagctgtgttgattgttgctgaaatcgcagcctactatcgctcacgcggtttaacacttgctgatggcattgatgaaatttacaaagaatacggctacttcgctgaaaaaaccatttcagttactctgtcaggtgttgatggcgctacagagattaagaaaatcatggataaattccgtggtgatgctccgaaacaatttaacgcaacagatgtcgttaaattagaagacttccaagctcaaactgctacaactgctgatggtattgaaaaattaacgactcctccaagcaatgttcttaaatatatcctatcagatgcgtcttggattgctgtccgtccttcaggtaccgagccgaaaatcaaattctacatcgcaactgttggtaataattcagaagatgcgcaagttaaaattgctaatatcgaaaaagaaatcaatgatttcgtcgga

SEQ ID NO: 35918 - DNA, 1071 bp, Streptococcus mutans
atgccaaactataaagatttaccacaagaactaacaagaacaaggacaaatgaagctgtttcggaacttgttgatttgaaggttcacacggcaacagatattgaagcccaagaagtttccaaagagcaagctaaagatatgtataaaaccatgtgggatattcgtaattttgaggaaaatgctagacgtttctttgcagcggggcaaattcctggttttgttcatttgtatgcaggtgaagaagccgtagccgcaggagtctgtgccaatttaacggataaagactatattaccagtacccaccgtgggcatggtcattgtgtggccaagggtggtgaccttaagggcatgatggctgaaatttttggcaaggagacaggtcttggcaagggtaaaggtggctccatgcacattgctgatttggacaagggaatccttggtgccaatggtatggttggtggcggttttggtctggcaactggagctgctatgcgtaataagtatcttaagactgatgatgttgctgtttgtttctttggagatggtgccgctaatgaaggccttttccatgaatgtttaaatatggcttctatttggaaattgcctgttatttttgtcaatgaaaataacctgtttgctgaatcaacaccacaatggtattcatcagcatcagctaccattgccgaaagggcattggcttatgatatgcctggtgttcgtgttaatgggaaagatctctttgccgtctatcaagtggctaaagaagctgttgaacgtgctagatctggtcaagggccaactttgattgaagctgttacttaccgtgatcatggtcactttgaaggggatgaacaaaaatataaagctccagacggagaagaaaaagactgggcagatgttgatccactagaagttttccgcaattatactattgaacatgagctattgacagaagaagaattggatgaaatattagaagaatcaaagaaagatgttgatgatgccattaaatatgctcaagacagtccaattcctaaagcagaatcactacttgaagatgtatttgctgag

SEQ ID NO: 35919 - DNA, 1335 bp, Streptococcus mutans
ttggctaagtatgatcttttaattattggtgctggacccggtggttatattgcagctgaagaggctgcaagattaggcaaaaaagttgctgtcgttgaaaaaaaagacattggcggaacttgtttaaacgttggctgtattccttccaaggcttatctgcagcacagtcattggttattatcaatgcaggaagctaacaaatacggcatttcaactaatcttgaaagtgtagactttgctaagttagtcaatcgtaaagatcaggttgtttcgactttacaaggaggtattcacacaacttttaaatctctaaaaattgattattatgaaggccaagcacaatttcttaaagacaagagctttatggtcaatggtgaaaagatttctgggaaagatgttattttagcgactggtagccatccttttattccgcaaattcatggtattaattcggtgaattacctaacaacagatagctttttcaatttaaaagttttaccagagaaattggttatcattggtgggggtgttattgcgattgaattagcctttgccatgcagccattgggtgtgaatgtcactgtcattgaaattgcaccgcaaatactattgacagaggataaagctgcacgtgctattatcagaaagaaactcaaaacaatgggagctcatatttttgaagctgctaagatagaagaagtacatgctcaatcagttattttagagggggatggcgctcaagaatttgaccagttgttagttgcaacaggacgtaagcctaatacagaattagctcaggaaatgggattaaagctaacagaacgtggttttgtcaaagttgatgattactatgaaacgtctactccacatgtttatgctatcggtgacttgacggaaagttatatgctagctcatgttgccagcatggaaggcatcaaagctgttagagctatttgtcgtcaggcacaggatcctgttgatgctcaaggtgtaccgcgttcgctctacaccaatccggaagtggcttcctttggactgagtgaagaggaggctaaagaacaaggttatgatgtcctcgttgaacaattaccattttctttcaacggacgggccattgcatcaacagagacgcaaggatttgttaaactgatttcggaaaggaggtatcatcaaattttaggggctgttattgttggcgaacatgggacagatttgttgcaacaattgattttattgagacaggcagaaggaacttttgatcaagttgttgatgcagtctatgcccatccgacaatttcagaactcattcaagaagttgctaagcgaattgttcag

SEQ ID NO: 35920 - DNA, 2580 bp, Streptococcus mutans
atgatcgataaaatgactcagttagttgaagattctttagaagaagcaaaggaattggctattgctcatcgtaattatcagctggacattccccatttatgggctgtcttggtaaaacctgatcaatttgcttttcaattctatcaatctttagaaataaataccaatcagctgattgagattatcaataaagaaatagataaaatcccagtcctttcaagtacagaaaaaagcagttatgcacgtttatacagtcagcgtttaaaaaatttattggatgacgcgcatcaggaaatgattgatttaaaggatcaggtgctgactgtagaacacttgatcttggcactttttaaccaacaacgcaatcccattactgtttttttgcttgaacagggtctaaacaaagaaaaactttatcaaaagatgcataggattcgtaaagggaaacctgctatttcttccagtcaagaaactatttatgatgctttagaaaagtatgctgtcaacttaaatcagcgtgctttagatgaacctgttaataaaattattggtcgtcaggatgaaatgaatgatattattcgtattttatcgcgtaagaataagaataatgccgttttggttggtcattcaggtgttggaaaaacagccattattgaaggatttgttcagcggttagttaaaaatcaagttccgaaaaatttgcaaggtaaggtcatttacagtcttgacataggagccttgctggcaggaactaaataccgcggtgaatttgaagaacgttttaaagctcttctcaatgatattatagactcaaacggtcagattattcttttcatagatgaaattcattctattgtcagtgcaggacggacagagggttctgttgatgcggccagtattttgaagccgcttttggctagaggaaaaattagaattattggttccactacccatgcagaataccgtgaaagtattgaatacgatagggcgttagaaagacgttttcaaaggatcttagttcatgaaccagatcttgattataccatggaaattcttaaaggtctcaagcccatttatgaaaattttcatggtgtcagacttgaagaagatggcttggaagctgccgcaagcttgtccaagcgttatatttctgatcgctttttgccagataaggctctggatttaattgacgaagcctgtgctgctaagcggcttgcttctcatgcttatcccgtgcaaatgaccaatttgtctcagcaacttatttctgagaaaattcgtttattgcgtttgaccgattctgacactgacgataagtttaaattaaacaatcatcttgagcaattagaggagcaaaaaagccaattattagcaaattggcaaagggaaagagagctcctagatcaggtacaagagcttcgttcacatttaacggctttagaagagcaggctaatcttgctcttgaaaataatcaagtcgcagattatgtccgtctagaagatgaggaaataaggaaatgtcatcaaaagatgacagctttagaaaaggaacgtttagacagtcagaagataattaatgttactgtgactagagaagatatagcagctgttgttgaacgcttgacaggcatcaaagtacagggtgttatggaaaacgagcgtgatcgtctcttgcacttagaagaattattgcaccaaaaaattgttggtcaagatcaagccgtacaaaaggtatctcaggccatcattcgctctcgtgctggcattcaaaaccctaaacgtccaattggctccttcctctttttgggaccgactggtgtggggaaaacagcgcttgctaaacgtttggcggaagttctttttggcagtgaacttgagatggtgcgtctcgatatgtctgaatatatggaaaaacatgctgtctcacgtttagtaggaccaccaccaggttatgtcggatatgaagaaggaggccaattaactgaggctgttcgtcagcgtttatactctatcgtcctacttgatgagattgaaaaagctcatcctgatgtttttaataccttactgcaggttttagatgaagggcgtttgacggattcaaaagggcgaaccattgattttaaaaataccatcttaattatgaccagcaatattggctcaaccaatattttacaaagtctgcaagatagtggctgcattacttcagaagtccgttataaagttctagatgagctgaatcacagtttcagaccagagtttcttaatcggattgatgagacggtactctttaatgctctttctgaaaaagatatgacaggtgttgttaaggtcatggtttctgatttgcaagctcgcctcttagaacaagatattcatctgacattgactgaatcggtttatatcctcttagctaaagaaggttttgatgcagcttttggtgccagacccatgcagaggacaattatgcaaaagttagaaaaccctttggctttatatcttattcaaaatcagaaaaataaagaaaaagagacttttgtgacagtatctgttaaggataagaaactcaaattcacattctca

SEQ ID NO: 35921 - DNA, 1347 bp, Streptococcus mutans
atgggaaaatattttggtacagacggcgtacgtggtgaggcaaatgtagaactaacaccggaactggcttttaaacttggacgttttggcggctatgttctgagtcagcatgaaccggatcgcccgcgtgttttcgttgcccgtgatactcgcatttctggagaattgttagaatcagctcttgttgctggattgctttctgttggtattgaagtctataaactaggtgttctggcaacaccgggggtttcttatttagtgcgtactgaacaagccagtgcaggtgtcatgatatctgctagtcacaatcctgcgcttgataatggtatcaaattctttggtggtgatggctttaaattagctgatgaacaagaagcagaaattgaagctttattagatgctaaagaagatgacttaccccgtccttcagctcaaggattgggaatggtcgttgattatccagaaggacttcgtaaatacgaaaagttcttagtgtcaacaggctcagaccttgaaggaatgaaaattgctattgatgcagcaaatggtgctgcatcttactcagcccgccaagttttccttgatttgaacgctgatatcactgttattggcgaggagccggatggtctcaatattaatgatggggtaggatctactcatcctgagcaacttcaaaatcttgttaagggatctgattttgttattggccttgcttttgatggcgatagtgatcgtttgatcgctgttgatgagaatggtgaaattgttgatggtgataagattatgtatattattggcaagtatctttctgaaaaaggaaggctgtctaaaaatacgatcgtcacaaccgttatgtcaaatctcggcttccataaagctttggatcgtgagaatattaacaaaaaaatcacagcagtaggtgatcgttatgttgttgaggaaatgcgacgttcgggctataatctcggcggtgagcaatctggtcatgtgattattatggactataacacaacaggtgatggtcagctgacagctattcaattgaccaaagtgatgaaagaaacaggtaaaactttgtctgaattggccaatgaagtgacgatttatccacagaaattagttaatatttatgttaaaaatgacatgaaaaataaggctatggaagtgccaatgattgcacaaatcattgaaaaaatggaagctgagatggctggcaatggtcgcattctggttcgtccaagtggaacagagcccctcttgcgtgttatggcagaagcacctagtacagaagaggtcaattattatgtagataccattgccaaagttgtcaaaacagaaattggcatt

SEQ ID NO: 35922 - DNA, 954 bp, Streptococcus mutans
atgtttaagcggttttttactaaacgtctctggttaactcttgtttcaatcttttttgccattctcttgttcttgacagctaattcagtcaattatggttcaagaaatcaaacaactggccttttgcagacatacaaccataccttagaaaatgtccctattgatattaaatatgacagcaataagtacttcattagtggttattcttatgatacagaggtttatttgacctcaaccaatcgggtaaaattggattcagaaatcaataatgacaccagacattttaaagttgttgctgacttgtcaaatgctaaagaaggtaccaataaggttcctttggagataaaagatcttcctagtggtgtcagcgcagaagcttcaccgacgactataaatgtgaccgttggtaaaaagaaaacaaagacgtttaaagttgttggtaaagtatctgataatcaaattgctgatggttacaaattaaagaaaatttctactagtgcttcagaggtagaggttactagcgatgagtccactattgagcagattgatcatgtagtagctgttcttccggagaatcaagtcctatccaaagattacagcggttcagtaaccttacaggctgtttctgaaaacggtaaaattttaccaagtattattgatccaacaaaaacagacttagaggttgaggttgaagaattgtcaaaaaaagtaccgattattgttgagttaacaggtcaaattaacagcagtctgtctgatattcgctacgaattagcgacaaaagaagttcttatctatggtaaacaagaaaatctcgaaaaaatatcttacattaaggctaaagttaatatttcagatgttactaaggatacaacaaagacaattcctttagctgcggataatcttaagataagtcctgcaaaagtaactgttaagttgacagctaagaaaaaa

SEQ ID NO: 35923 - DNA, 1341 bp, Streptococcus mutans
atgactttaaaatcaagaataggaattttagctggtaagacagcacacttttttctcagtaaaatagggcgcggctctaccttacctggaaaaattgctcttaagtgcgataaagatattttagatacacttgctaaagattatgacattgttgttgtcacaggcactaatggaaaaaccttaacaacagctttaacagtaggaattttaaaagaggcttacggtcaggtgctaaccaatcctagtggtgccaatatgattacaggaattacctcaacttttttaactgctaaaaaatctagaaatggtaaaaagattgcggtgctggagattgatgaagccagccttcctaaaattacagattatctaaagcccagcctttttgttttcaccaatatttttcgtgatcaaatggatcgttacggtgaaatttatactacctatcaaatgattttggacggtgctgccaaagcgccaaaagcaactattttagctaatggcgatagcccactctttaacgccaaaacagttgttaatcctgtgcgttactatggttttgatacaaaaaaagaagctgctcacttggcacattacaatactgaaggcatcgtctgtcctaagtgcgaatatatcctacaatacaagcttaatacttatgccaacttgggcgactacatctgccccaactgtggttttcaccgtcctcatctggattacagcttgactcagctaaccaagattagcaacactcaagctgagttcatcattgacggacaggattataagatcaatgtcggcggcctttataatatctataatgccttggctgcagtcgctgttgcagaatttctcggtgtaactcctgaacaaatcaaggctggctttgacaagagccgtgctgtttttggacgccaagaaacctttaaaatcggcgataagtcatgtactcttgttttaataaaaaatcctgttggtgccagtcaagcactagaaatgattaaactagcaccttatcctttcaccttatctgtccttctcaatgccaattatgctgatggcattgataccagctggatttgggatgcgaattttgagagcattttagatatgaatattccacaaatctttacaggtggtgtccgccattcagaaatagccagacgtctgcgtgttactggttacaatgaaacaaagattgagcaggctgaaaaacttgaagacattctaagtatgattgaaaaacaagaggctgatcatgcctacattctagctacttacacagccatgttggaattccgcgaattactagccagccgtcacgcagtaagaaaggagatgcat

SEQ ID NO: 35924 - DNA, 909 bp, Streptococcus mutans
atgagttttaccacacaggtgaaagaagaaatcttaaatttggattcagctgacaaaaatgaattgtcggctattattaaaatgtcagggagtttaggcttggcagataaaaagctcagtttatccatcattactgaaaatgctaaaattgctcgccatatttacgcattattggaacgactctatcggattaatcctgagataaagtaccatcacaaaaccaacttgcgaaaaaaccgtgtttatactgtttttttagatgacaatgttgaacaaatattagccgatttacagctttcggattctttttttggaattgaaactggcattgaacagcaaattttatctgatgataatgctggccgttcttatttgaaaggagccttcctttccactggatccatccgagatcctgaatcgggcaaatatcagctggagattttctctgtttatcttgatcatgctgaagatttagcaaaactaatgcaaaagtttatgttagataccaaggtgattgaacataagcatggtgcagttacttatttgcaaaaagcagaagatatcatggattttctgattattatcggcagtatggaaggtatggaagcttttgaaaatattaaggttatgcgcgaaacaagaaatgatgtcaaccgtaccagtaatgccgaaacagctaatattgctaagacgattaatgctagtatcaaaacgattaataatatcaacaaaataaaagaaactgttggtttggaaagtttgcctatagaattgcagcggattgcccaaatcagagcagcccatcctgacttttctatccagcagattgctgatagcttagctgtacccttaaccaagagcggcgttaatcataggttaagaaaaattaataaaattgctgaagattta

SEQ ID NO: 35925 - DNA, 975 bp, Streptococcus mutans
atgagaaaacctaaaataactgttattggcggtggaactgggatacctgttattctcaacagtctgcgtcatgaagaggtagatatcacagcaatcgttactgtagcagatgatggcggcagttctggtgctatccgtcatgttatgcaattaacacctccaggagatcttagaaatgtcttagttgctatgagtgatatgccaaaattttatgagagaatctttcaatatcgctttaacgctgaagacggggcattagctggtcatcctttgggaaatttaatcattgcaggtatttctgagatgcagggttccacttacaatgctatgcagatattgtcaaaatttttccatacaacaggtaagatttatccttcaagtgaaaaggctttaacgcttcatgctgtttttcaggatgggcaagaagtggttggtgaaagtcagattgccaagcataaaggaatgattgatcatgtctatgtggctaatagctatgacgatgctaagccgactgccagtcgtaaggttgttgatgctattatggaaagtgatatgattgttctaggtccgggttcgctcttcacttctattctcccaaacttagtcattgatgaaattggaaaagcactctgtgagaccgaggcagaagtagcctatgtctgcaatattatgactcaatatggtgaaacggaacactttacagatgctgatcatgtgcgagttctcaatcgtcatttgggacaaaactttattgataccgttttggttaatgtagaaaaagttcctcaagattatatgaattctaatcaatttgatgaatacctcattcaagtagagcatgactttgctggacttcaagagcaggtaccccgagtggtttcttctaattttctttgtttggaaaatggcggtgcttttcacaatggtaaaagtgttgtggatgaattgatgaatttaatcaaggtgaaagagcta

SEQ ID NO: 35926 - DNA, 888 bp, Streptococcus mutans
atgagtgagaaaaaaattgatttggttattgtgaccggtatgagtggggccggtaagacagttgccattcagtcttttgaagacttgggttattttaccattgacaatatgccgccagcattggttcccaaatttttggaattagttgaaagcagcggtgaaaatgataaagtggctttggtagttgatatgcgtagccgtctcttttttaaggaagtcagttctattttagataagattgacttaaatgagacaattaattttcgcattctatttttggatgcaacagatagcgaattggtttcacggtataaggaaacacgtcgcagtcatcctttggctacaactggccgtgttctagatggaattgctcttgagagggaattgttagctcctttaaagaatctcagccaaaatgttgttgatacgaccgatttaacaccgcgtcaactccgtaaaaccatttccgatcaattttctgttgagaagagtcaaacgagttttcgcttagaagttgtcagctttggattcaaatatggtttacctttggatgcagatctagtttttgatgtgcgttttctgcctaatccgtactataaaccagaactgcgagataaaacaggactggataaagatgtctcggattatgtcatgcagcatcaggagtcagaagaattttatcaacacttattggctttgctagcgcctattttaccgggttatcaaaaggaagggaaatctgttctgactattgctattggctgtacaggcggtcagcaccgcagtgtagcttttgctcatcggctggctcaagatttaggacaaaattggacggttaatgagagccatcgtgataaaaatcggcgtaaagagacggtgaatcgttca

SEQ ID NO: 35927 - DNA, 1260 bp, Streptococcus mutans
atgatttttgataaagataattatgaagagtacgatagagaagtctgggaagctattcacgcagaagaaaagcgacagcaaaacaatattgaattaattgcctctgaaaatgtagtttctaaagcagtcatgaaggcgcaggggtctattttgactaataaatatgctgaaggttatcctggccgtcgttattatggcggtacagactatgttgatgtagttgagagtttggctatcgaacgtgctaaaaaactttttggtgctaaatatgctaatgttcaaccccactctggtagtcaagcgaatgctgcagcttatatggcacttatcaagcccggtgatactgttatgggcttagatttggctgctggtggtcatttgacacatggctccccagttagtttttctgggcaaacctataacttcatagcttacaatgttgatcctgaaacagaagttttgaattatgaacaaattttaaaacaggctgaagaagtgcagcctaagttaattgttgctggggcatctgcttattctcatatcattgattttaaaaaattccgtgacattgcagaccaagttggtgcaaaacttatggttgacatggcccacattgctggcttggttgctgccggcttgcatccaaatcctctaccttatgctcatattacaacaacaacgactcataaaactcttcgtggccctcgcggtgggctcgtcttgaccaatgatgaagatttagctaaaaaaatcaattctgctatcttccctggtttgcaaggtggtcctttggaacatattgttgcggccaaggctatcactttcaaggaaaatttagatcctgcttttaaagtttatgcgcaaaaaattattgaaaattgccaagcaatggtagaagttttcaatgctcacgaaaaattccgtgttgtttctggtgctagtgaaaaccatcttttcctcgttgatgtcacacaagttgttgaaaacggtaaagtggctcagaatattttagatgatgttcatatcacattgaataaaaattctattccttttgaaaagctgtcaccgtttaaaacttcaggtattcgcattggaacggcagcagtaacagcgcgtggttttggtcctgaagaatgccgtaaggtggctgaattgattgttaaaacccttgaaaataccgaaaatgaagcagtgttagaagaagtgcgtcaagaagttaaacttttgacagatgctttcccactttacgagaatcttgta

SEQ ID NO: 35928 - DNA, 834 bp, Streptococcus mutans
atgatgaattatggacaagtttttgcccaatatgaatcagaacttgaagctttgggagaagaaaaggaaagtttggcctacgtttttaaagattgtaagggttggaatcagacagattttatccttcaacagccacaagaaattgctgaagcggatctgactaaacttgaagaaatcatgcaacaattaaggcagcatatccctgctcaatatatcacaggaaaagcttactttgctgacttaatcctatcagttgatgaacgtgttttgattccaaggccagaaacagaagaattagtcaaacttatcttaaaagaaaatcagcatagaagctctgctaaacttttagacattggtacaggcagcggtgctattgctttggctcttgcaaaagctcagccagattggcaagtatgggctagcgatatttcagaagatgctcttaatttagcacaggaaaacgctactgttaatcaagcagctgtgacctttttgcagtcagatatttttagtcacatttcagataaatacgatattattgtttctaacccaccttatatttctttaagggatcaagatgaagttgaacagaatgttttggcacacgaaccccatttagcgctttttgctgataatgatggcttagctttctatcagaagttagctttagaagctgagcattatttaaaacttacaggtaaaatttacttagaaattggctacaagcagggagaagcagtttctcagctttttgaaagacagttcccaaataagcgtgttcgccttttgcaggatagttttggcaaggatagaatggttgtggttgacgatgga

SEQ ID NO: 35929 - DNA, 786 bp, Streptococcus mutans
atgacttatacttctctacaatctcctgctgacaaggattacttatatgatatcagggttgctcatctttatggcaatttgctcaatacctatggcgataacggaaacgttctcatgcttaaatatgttggtgaaaaattaggtatacgaatgacttttgatattgtctcaatcggcgatgattttgatgctaacaagtatgatatggttttctttggcggcggtcaggactatgagcaatccattgttgctaaggatttgcctaataaacgctctgctattgccagctttattcaaaataataaggttgtcctagctatctgcggcggtttccagttgttgggacaatattatgttcaagccaatggcgtccgcattgacggtattggtgttatggggcactatacgcttaatcaaaaagataatcgctacattggtgatatcaagattcataatgatgaatttaacgaaacctactacggctttgagaatcatcaaggaagaacctttttgtctgatgacgaaaagcctttagggagagttatttatggaaatggtaataataaagaggatggcagtgaaggcgtccactataaaaatgtttttggctcctacttccacggtcccattctttcgcgtaatgctaatctagcttaccgccttgtgacaacagctctacataacaagtatggcattgatattcaactacctcgttatgaggacattcttagcttagaggttgctgaagaatacggcgatgttaaaagcaaagcggagtttgagaaa

SEQ ID NO: 35930 - DNA, 1077 bp, Streptococcus mutans
atgaatatttatgatcaacttcaggcggttgaagatcgttatgaagaattaggagaattgctttcagatccagacgtcgtcagtgataccaagcgttttatggaattatcgcgagaagaagccaatagccgcgaaacagttgctgtctatcgtgagtacaagcaagtcgttcaaaatattgctgatgcgcaagaaatgattaaagatgctagtggtgatcctgaacttgaggaaatggccaaggaagagttgaaaaactccaaggtagcaaaggaagaatacgaagaaaaactgagatttctccttttaccaaaagatcccaacgatgataagaatattattttagaaattcgtggtgctgcaggcggtgacgaagccgctctttttgctggtgatcttttgaatatgtaccaaaaatatgctgaaaatcaaggctggaaatttgaggtgatggaggcttctgccaatggtgtcggcggactcaaggaagtcgttgctatggtttcaggacagtctgtttattctaaactcaaatatgaatcgggtgcccatcgagttcaacgtgttcctgtaacagaaagtcaaggtcgtgtccatacctcaacagcaacagttctcgtcatgcccgaagttgaagaagtcgaatatgaaatagatccaaaagacttgcgtgtggatatctatcatgcttcaggtgctggtgggcaaaatgtcaataaagtagcaactgcggttcgtattattcatttgccaaccaacattaaagttgaaatgcaagaagagcgcacccagcagaaaaatcgtgataaggctatgaaaattatccgtgcgcgtgtagcagaccactttgcgcaaattgctcaggatgaacaagatgctgaacgaaaatcaacagttggtacgggagaccgttcagagcgtattcgtacctataattttccgcaaaaccgtgttacagatcaccgtattgggctgacacttcaaaaattagacagtattttgtcaggcaagttagatgaagtcattgacgctcttattctttatgatcaaacacaaaaattagaagagcttaataaa

SEQ ID NO: 35931 - DNA, 1911 bp, Streptococcus mutans
atgattattttacagggaaacaaattagagcgctcattttctggtgatgtgctctttgataatattaatcttcaagtagatgaacatgatcgtatcgccttggttggacctaatggtgctggtaagtctacactcttaaaaattctcgtgggtgaagaaacagcaacatcaggtgaggtcactctcaagcgtgatgtaaccctgtcgtatttggctcagaatagccgttttaaatctgataataccatttatgatgaaatgctccatgtttttgatgatttacgtgcgactgagagacatttgcgctctatggaagggcaaatggcagagttggtcggaaatgattttgataaactcatggctgattatgaccgcttatccgaatccttcaggcagcagggtggtttcacttatgagagtgacatcaaagctattctcaatggttttaaatttgatgagtctatgtggcagacgaaaattgctgaactctcaggcggtcaaaacacgcgcctagctttggccaagatgcttctagaaaaaccagaactgttggtattggacgagcccaccaatcatttggatattgaaaccatttcttggttggaaaattatttagtcaattatcaaggagctttaatcattgttagtcatgaccgttattttcttgataaggtagcgacagttacgcttgatttgacccctcactctctagatcgctatgtgggaaattattccaaattcatggatcttaaggctgaaaaaattgccatgaaagagaaaaattatgagaagcagcaaaaagaaattgctaaattagaggactttgtgcagcgcaatattgttcgtgcatcaacgaccaagcgggcacaggctaggcgtaagcaattggaaaaaatggagcgattggataaacccgatgccagtaaaaaatctgccaatatgacttttcatgttgataaagcctccggaaatgaggttttaaaggttactgatgcagctattggttatgatgacaagatattagcgcagcctattgatctagatgttagaaaaatggatgcccttgctatcgtcggtcccaatggtattggcaaatcaaccttgctcaagtccattatggggcaaataccatttattcatgggagctcagtttatggctcaaatgtacaagtcggttattatgaccagacccaatccaatctgacagctagcaataccgttttagaagagctttggtcagcctttccaaggacagcagaagtggatattagaaaccgtttaggtgcttttctcttttcaggcgacgatgtcaaaaaatctgttgccatgctgtctggtggtgaacgcgcgcgcttgcttcttgccaagttatccatggaaaacaataattttctcattctagacgaacctactaatcacttagatattgacagtaaggaagtgttggagactgctcttattgattttgatggcactcttctctttgttagccacgaccgttatttcatcaaccgcgtcgcgacaaaagttctcgaaatctcccaaaatggttccaccctttacttaggtgattacgattattatcttgaaaaaaaagcagagcgagaagcaaagacagagttccttcaacctatgcagtcaggatccccttcatcctccttggctgccgccacgaactatcaagcccaaaaggccaaccaaaaagaagaacgcaaattaaagaggcgtatagccgaaattgaagagcgtttagaaaccattgaagcgcgtgaaactgaaattaatgaggccatgcttactactaatgactttactcaattggccgacctgcaaaaagaactagaaagcgttcaaacagaacaattggaacttctagaagaatgggaagaattgagtaggcagctggaggat

SEQ ID NO: 35932 - DNA, 1344 bp, Streptococcus mutans
gtgtctaaagactatatatctattattgatgtgaaaaatcatgtcggtgaggaagttactatcggtgcctgggttgctaataaatcaggcaaagggaaaatcgctttcttacagttgcgtgatggaacagcttttttccaagcggttgcttttaagcctaattttatcgaaaaatttggtgaagaagcaggacttgaaaaattcaatactattaaacatcttaatcaagaaacagcaattgaaattaagggaattgtcaaagaagacaaacgttcgaaatttggttatgagttggatgcgactgacttaaaagtcattgggacatctgacaattatcctattacgccaaaagaacatggaactgattttttgatggatcatcgccacctttggctgcgctcacgaaagcagatggccattatgcagattcgtaatgctgtcatctatgcttcttatgagttttttgaccaaaacggctttgtcaaatttgacagtccaatcttatcgggcaatgcagcagaaaacacaacggatctttttgagacagactattttggtgagcctgcttttctcagtcagtcaggtcagctctatttggaagcaggtgctatggcatttggccgcgtctttgatttcggacctgttttccgtgctgaaaagtcaaaaacacgccgccatttgacagagttttggatgatggatgcagaatacccattcatgtcgcatgaacagtcccttgatttgcaagaagcttatgtcaaaacgctcattcagggtgttcttgatcgggcgccgcaggctcttggtatcttagaacgcgatacggatttacttaggaagtatattgcccaaccgtttaagcgtgtctcttatgatgatgcgattacacttcttcaagagcatgaagaagatgaggatactgattatgagcatattgagcatggagatgattttggatcgcctcatgaaacttggatttccaattactttggaataccaacttttgttgtcaactatccagctagcttgaaagccttttacatgaaaccggtaccgggcaatccggatcgtgttctctgtgctgatttgcttgctccggagggttatggtgaaatcattggcggctctgagcgtgaaacagattataatactttacttgcgaaaatcaaagagaatggacttaatccggatgattatgccttttatctcgacctgcgtcaatatggttctgttccgcactgtgggttcggtcttggtttggagcgtatggtgacttttgtagcaggaacgaaacacatccgtgaagccattcctttcccgcggatgctccatagaattgaacca

SEQ ID NO: 35933 - DNA, 588 bp, Streptococcus mutans
atggggatgacagtcttggcgcagttatattataaatatgggaccatgaattcaggtaagacaatcgaaattttaaaggttgctcataattatgaagaacaaggaaagcctgttgtcattatgacgagcagcttggacacgcgagatggatttggtgtggtggctagtagaattggcatgcgacgtgaagcagttactattacagatgacatggatatttttgcttacatcgaaaacatgtttaagaaaccttattgtattttaattgatgaaagtcagtttttaagccaaaaaaatgtttatgatctagcaaggattgttgatgaattggatgttcctgttatggcctttgggctcaaaaatgattttcagaaccatctctttgaagggtcacgtgaactcttgctgttagctgataagattgaggaaattaaaactatctgtcaattttgctccaaaaaggcaactatggttttaagaacagaaaatggcaggcctgtctataagggcaatcaaattcaaatcggcggtaatgaaacttatattcctgtctgtcgaagacattacttccatcctccaatcaaagcc

SEQ ID NO: 35934 - DNA, 1107 bp, Streptococcus mutans
gtgaaaaaaaagaaattaaaatacatttggcttatacttttgctagcaacactggctgtaggattttattttatccgagtgaaaagtactaatgatatgcaaaggaatacctataaaaattggtctaaatattatgttgtaactcatggaaaaagtgcttatataaagacggctactagtgatgaagggacaactgctctttctgaaggacagggttatggaatgtatattgccattaaagctgctaagaagggcataacaactaagtcccaatttgctaagctctacaaatattatatgaatcatcgcactgccaatacgcagttaatgtcttggaaacaaaatattaaaacagatggttcaattgaggatttgtcaaacagtgcaacggatggtgatctgtatattgcttatgccttgattaaagcatcagagctctggtctgatcaagctgatacttataaaaaacaagctaggttgcttttaaaggatattttaacttataattacaattcagagacgaaatccttgactgttggtaattgggctgttaaagggactgattattacgatctcgttcgcacctcagatatactgccagaacaatttgatgttttttatcagtttagtaaagatgagacttggaaaacgatcaagacttccatgctagctagtttagaaaaaatgagccgtcagcataaaactggtctcctgccagattttatgtgggttcgtgaatcaggtgagataaaggctgccaaggctaaccttattgccagcaaatatgatggtgattactactataatgcctgtcgtatgccctataatttagctaaaagcaatgataaaaagagccaaaaaatacttaagaagatgatgaatttcttcatgaccgaaaagaccatctatgcgggttataagctgaatggggaacggttggatagtcatcagtcggctagttttgatgctccaattttctatgcagctaagaaattaaaccataagtatgagcgtttacatcagcaagaaaagaaagtttttgtcaagggtctgtcatcaacaaactattatgactcagccctaacaacgatggctgttttggatcaa

SEQ ID NO: 35935 - DNA, 1308 bp, Streptococcus mutans
atgatgagtcaaattctaatgattattagtttaatttcgatttggtcttccttagctatggcattgatcatccttatgtcagcagttcatttttggtttaagcacagtgattttgatgttgatactagccctttgccagaatatccgatggtgacagttgtggttccagctcataatgaagatgttgtgattgcacaaacagcaaaggctattttggatatgaagtacccaagggataagcttgaaattattctttttgctgataactgtgaagataatacgtatcaggaaatgcaaagcattaaagctttgccgcaatatgctgatcgagatttgactctgattaatcgtagtggtactggtggaaaagctggtgtcttaaatgatgctttgaagatagctaaaggtgattatatctgtgtttatgatgcggatgccatgcctgaaaaaaatgctctttatttccttgttcaaaaggttatggaagatccagaacgtcatgtagcagcttttggtcgaaataagacgcgtaatgctaatcaaaacttcctgactcgttgtattaatcaggaaatcgttgttacccaacgtatccaacatgttggtatgtggcatttgggaaaaattggacggattcctggtaccaactttattatcaatacggaatttgttaagagtattggcggctggagaaatggtgccctgacagaagatacggatatctcctttaaaatcatgcaaagtggtaagttgattgcccttgcctataattcagaagctttccagcaagaacccgaaacgctgaaatcttattatttgcaaagaaagcgctgggctaaaggtaactatgaggttgttattgctaactttaaacacctttttggccgtggtaattggcgtgtcaaatgggaagtcttctactatacttgtactttcttttggtttaatgcagccattgtgttatcagatatcttatttttttccaatttgattgcattaattattggtctatttaagccaggtgtgcaggttccctttgcttttgatgctaataatatttacatggcacagcttttgctctttaactggttcttaatgattttgctttatctcttgcaaatttccatttcacaggcgactcaatatggtcaggcaaccgttaaacaaatttggattgccttattggcttactttacttatacgcagctctttattattgtatccatttcatcagtagcttctgttatgatggataagattttacatcgtgaaggaaccaaatgggttaaaacaaaacgttttgcaggc

SEQ ID NO: 35936 - DNA, 1146 bp, Streptococcus mutans
atgaaaaagattaaagttatgcttgtctttggtacaagaccagaggccatcaaaatggcgcccctgattatatctttaaaagagcagactgaacgttttgaaacagtaaccgtagtaactgctcagcacagacagatgcttgatcaggtgttagagacatttaagattaggcctgattatgatttgaacattatgagtaagcagcagaccttgtcaaccattacaacaaatgttattaataaacttgatgaagtcttaaagagtgagaaacctgatattattttagttcatggtgacacaacgacaactcttgctgctagcatctctgctttctataatcaaattaaaattggtcatgttgaggcaggccttaggacttggaataaatactctccatttccagaagaagttaatcgccagataacagatgttgtttcagatttgtactttgcaccaactaatcaaagccgtgataatctcttgaaggaaaatcatcctgctcaacatatttttattactggaaatactgctattgatgctcttgatttaactgttaaagagaactatcatcatgatgttcttactaaaattaaatcagataataggattattttagtaacaatgcatcgtcgtgaaaatcaaggagagccgatgagaagggtctttaagacgcttaaatcagtgttagctgattatccagatgttgagcttgtttatccagttcatctgagtcctgctgttcaaaaggcagcaaaggatattctagcaaatacagagcgtatccatctgattgaaccgcttgatgttatggattttcataatctagcaaataagagttattttattatgtcagattctggtggtgtccaagaggaggcgccatctcttgggaagcctgtccttgtcttacgtgatacaacagagcgacctgaaggagtagcagcagggactttaagattagttggtactcaagaagatagtgtcaaaaatgctatgataagtttgctggataataaagaagaatacgataaaatggcccagacccaaaatccttatggcgatggtcaagcttcaaaacgtattttagaagctatttcttattattttaataatggcgcgcggccggatgattttggaacgggggaa

SEQ ID NO: 35937 - DNA, 309 bp, Streptococcus mutans
atggttatgatttacggtgatcttattgacaaggaaacaaggtgcattgattatcatggcccgacagacattgtcgccctaaaatgttttgcctgtcaaaaatactacccttgttttttatgtcataatcgacacgagacacacaattttcaagcttatccagaaaaattgaaaaaagataaggttgttttttgtggatcttgtcaaagagaattaactattgaagcatacaaagaaaaaggaacctgccctttctgtcaccatcttttcaatcccaattgtaaagtacattataatcattatttcaga

SEQ ID NO: 35938 - DNA, 1662 bp, Streptococcus mutans
atgagtgacattaaaattattgccctaggcggagttcgtgaaaatggtaagaacttctatgtggtagaagtcaacgacgccattttcattcttgatgctgggcttaagtatccagaaaatgaacagttaggtgttgatgttgttattcctaatctggattatctgattgaaaataaaaagcgtgtacagggaatttttttaacccatggacatgctgatgctattggtgctttgccttatttgttgagtgatgtcaaagctccggtatttggttctgagttaacgattgaactagctaagttggtcgttaaaaacaacgatgcaactaagaaattccataatttccatgtggttgatgctcaaactgaaattgaatttgacgatgctattatttcttttttcaaaactacccattctataccagaaagtttaggaattgtagttggcactaaagaaggcaatattgtttatacaggtgattttaagtttgaccaagcagccagcaagctttatcagactgacttagctcgcattgctgaaattggacgtgaaggtgttctggcacttttatcagattctgctaatgctgatagcactgttcaaattgccagtgaagctgaagtaggtattgaaatggagcaagtcatttccaattgggaaggacgtattatcgtcgctgcagtagcctctaatcttgttcgtatccaacaagtctttgattcggctgctaacaatggccgccgtgttgtgctgacaggttatgatgttgaaaatattgttcgaacagctatccgtcttaaaaagctttctctggttgatgaaaaacttattgtcaaaccaaaagatatgcataaatttgaagatcatgaactaattattttagaaactggtcggatgagcgagccactcaatggtttaagaaaaatggctattggccgtcatcgttatgttgaaattaaagatggtgatttggtctatattgtaacaacacctactgtttctaaagaagccgttgttgcgcgtgttgagaatatgatttataaggctggcggtgatgtgagactcattactcaggacttacgtgtatctggccatgctaatggtcgtgatcttcaactgatgattaatctgcttaagcccaaatatctcttccctatacaaggagaatatcgtgaattagctgcccatgctgatttggctcttgaaataggcatgtttccggaaaatatttatattatgaaacatggtgacattatggtttatgataaagaggatggtttcttacatgaaggcggtatcccggctggagatgtcatgattgatggcaatgctattggtgatgttggcaatattgttttacgagaccgcaaggtgctttctgaagatggtatctttatcattgccttaactgtcaataaaaaagaaaagaaaatcatttcaagagctaaaatcaatacacgtggttttgtttatgtcagaaaaagccgtgatattttacgcgaaagtgcagatattgtcaataaggctgttgaaaattatttgcaacaagatacgtttgattggggagaattgaaatctattgttcgtgatgaaattggtaaatttctttttgaacaaactaagcgtcgtccagctattttaccagtagttatggaagttaga

SEQ ID NO: 35939 - DNA, 873 bp, Streptococcus mutans
atggaattagaaaaactacagcctaaaatttttcaagaatttcagcgaattttacaatctggcaagctgagccatgcttatttgttttcgggggattttgctagttttgaaatggctgttttgttggctcagagccgtttttgtgacagtcctattgatgctcttccttgtgggcagtgccgttcctgccggttaattgctgaaaatgatttttcggatgttaaagtcattgaacctgaagggcaaatgattaaaacagcaacgatccgtgatttgctgcgtgaattttccagttcaggatttgaaggacagtcacaggtttttattattcgtgatgctgataaaatgcatactaatgccgctaatagcttgctaaagtttattgaagagccacaaagtgatacttatatgattttattaactcaagatgaaagtaggatattgcctacgattaaaagtcgaactcaaattttctattttcctaagaatagggcttatttaatccaacagttagaacaggaaggactactcaaaagccaagcagaaatactagcggatctatctaaagatccgacacaagcaaaagaatttgcacaaaataataaattgctggacttgttaaaagcctgtgaacgttttaccgctatcttatttgacagtaaaaatcttgcttatttagaagtgtcacggttggctcagctagctagcgaaaaatccgaacaggaatgggtctttcaattgttaactttctttttatcaaaaaattatgataaaagggaaactttaagttacttagaagctatttatcaagccaaaaaaatgtggtttagtaatgtaagttttcaaaatgcactggaatatatggtgataaca

SEQ ID NO: 35940 - DNA, 636 bp, Streptococcus mutans
atgacaaagggaatttttatttcatttgaaggaccagatggagccggaaagacgacagttttagaggctattttacctcaattaaaaaaacttgttgcaaaagaggttatcacaacacgcgaacccggtggtgttgctattgcagaaagtattcgggatcttattcttgatgttaatcatactaatatggacgataagacagaattacttctttatattgcggctcgtcgtcagcatttggttgagaggattttacctgagttgaaaaaaggcaatcttgttcttgtggatcgttttattgacagttctgttgcttatcaaggctatggcagaggacttgatgctgatgcagttacgtggctgaataactttgcaacagatggtttgcaaccagatctaacactttattttgacgttgattcacagattggtcttactcgaatcgagaagaataaagaacgtgaagtcaatcgacttgatttagaacaattagatatgcatcgccgtgtacgttcaggttatttgaaattggctcaggaaaatcctgatcggattgttaccattgatgcggctcgtcctttggaagaagttattactgatgccttatttataatcaaacaaagatgtttagaaaag

SEQ ID NO: 35941 - DNA, 1647 bp, Streptococcus mutans
atgtcttttgatggcttttttttacatcatttaacaaaggaattacaagaacagattctttgggggcgtattcagaaagtaaaccagcctttcgaacaagagctagtgttgacgattcgcaacaacaggcaaaattataaactgcttctttcagcccaccctgtctttggccgtgttcaattaaccaagaccgattttcaaaatcctcaaagccctaatacttttactatgattatgcgaaagtatctgcaaggagctcttatcgaaaacattgaacaaattgaaaatgaccgtattcttgaaatgagcatttccaataaaaatgaaattggtgatcaaatcaaggttactatgattattgaaatcatggggaagcacagtaatattattcttttagataaaaatgaaggaaaaattactgaatccattaaacacattggcttcactcaaaacagttaccgcactattttacctggctcaagatatttagcaccaccgaaaatacaggcccaaaacccttttaccatttctgatgaaacattatttgaaatcctacaaacagaagatttagcggctaataatttacaaaaactctttcagggcttaggacgcgacacggctgccgaattgagccaaagattaaaaactgacacattcaaaaactttaaactgttttttgactcgccaacttctccaactttgactgaaaaatcttttactgcaattactttcagcaattcccaagaaacctttggtagcctgtcagatctgcttgactatttctatcaagataaggctgaacgcgacagaattgcacagcaagccagcgatcttatccatcgtattcaaaatgaattagagaaaaacaagaaaaaactcaaaaagcaagagcaagaattgcaagatacagataaggctgaagagttccgccaaaaaggagaacttttgaccacttatcttaatcaggtccctaacaatcaggacagtgttgaactggataattattatacgggacaaaaagtaagcattccgcttaataaagccttgacacctagtcaaaatgcgcaacgctattttaaaaaatatcaaaaattaaaagaagctgtgaagcatttagggagcctcatcagcgaaacaaaggctactattcaatacttagaaagtgttgacaatgccctcaatcaggccagcctgtctgaaatcagcgaaattcgtgaagagctggttcaaacaggttttgtcaagcgccgccatcgtgaaaaaattcaaaaacgcaaaaaacctgaaccttacttagcttctgatggcaaaaccatcattctggttggaaagaataaccttcaaaatgacgagctaactttcaaaatgtctaaaaaaggggagctctggttccatgccaaagacattccaggaagccatgttttgattaaagataaccttaaccctagcgacgaaattaaaacggatgctgccgaattagcagcttacttttcaaaggctcgcctttccaatcttgtccaagttgatatgattgaagctaaaaagctcaacaaacccagcaaagccaaacccggttttgtcacttataggggacaaaaaacgttgcgcgtaacgcctaatgaagctaagataaaagcgatgaagatg

SEQ ID NO: 35942 - DNA, 975 bp, Streptococcus mutans
atgacagaaccagacttctgggatgacaatattgctgcccaaaagacatcacaagagttaaacgaacttaagctcaaatatgaaaccttcaacagcatgcaggaactgtcggatgagacagaattgttgcaagaaatgttagaagaagatgatagtttgcaaggcgaacttgaagaagaccttgtcaagcttgataagattatgaccagttatgagatgacgcttcttttatcagaaccctatgatgctaacaatgctattttggagatccatccgggttctggcggtacagaagcccaagactggggtgatatgctgctgagaatgtatacccgctttgggaatgccaaggggttcaaagtagacgttttggattatcaagctggtgatgaggctggtattaaatcagtcgctttatcttttgaaggccaaaatgcttatggtcttttaaaatcagaaatgggtgttcaccgtttggtcagaatctcaccatttgattcagccaaacgtcgccacacttcctttgcctctgttgaggtcatgccagagcttgatgataccatagaagtagatattagagatgaagatatcaagatggatactttccgttctggtggtgctggcggacaaaatgtgaataaagtgtcaactggagttcgcttaacccatattcctagcggcattgttgttgcttcgacggtagatcgtacccaatatggaaatcgcgatcgagccatgaaaatgcttcaggctaaactttatcaaatggagcaggaaaaaaaggctcaagaagtggatgctctcaaaggtgacaaaaaggaaatcacttggggcagtcaaattcgttcttatgttttcaccccttatactatggtgaaagatcatcggacaaactatgaagtttctcaggtagatagggtcatggatggtgaactagatggttttattgacgcctttctcaaatggcgtatggaa

SEQ ID NO: 35943 - DNA, 714 bp, Streptococcus mutans
atggaaaccaacaaattatttcaatataataccttaggagcgcttatggcaggtctctatgatggttctttaactgtgggtgagctgttagaatatggagatttaggtttaggaacacttgattccattgatggtgaattaattgtcctagatggtaaagcttatcaggctaaaggatctggtgataaaccagaagttgttgaagtgcctgatgatatgaaagtgccttatgcagctgtcattcatcatgaagcagaggttatttttaagcagcgttttgaaatgacagataaagaattgcaagaacgtattgagtcttactatgatggggagaatctctttcgttcgattaaaattcacggaacctttgctaaaatgcatgtacgtatgattccgcgttcgacccctgatgagaaatttgcagaagtggcaacacatcagccagaatacagagccgaaaatattaccggtactattgttggtatttggacgcctgaaatttttcatggtgtcagtgtggctggttatcatttgcactttatttctgatgatcatacttttggtggccatgttatggactatgttatttcagaagggcaggttgaagtgggtgctgttgatcagttagatcaacgtttccccgttcaagatcggcaatatctctttgctaaatttaacgccaaagatattcgtggtgatattgacaaggcagaa

SEQ ID NO: 35944 - DNA, 954 bp, Streptococcus mutans
atgaaaaaaaatttaaaagcaaatataacttggcttgccctagtccttatcatcttttttcttctttttggacttattagtgctggtatcatagatatttactatactcaaattctcatgggaattgggattagtattatcatggcactcggaaccaacttagttcttggcttttctggacagctctctcttggacaagctggctttatggccattggtgcttatgcaactgctattttaacaactcaaaatcctacttatgcaggtttctatttatccattattgtcggtatgatagtgactgcaacggttgccttggttgttgggattccaacacttcgtttgaagggtgattacttagctattgcaactcttggtgtagctgaaattatccgtaaactgattgaaaatggtggtgatttgactaatggttctaggggaattatgggaattctcaaatacaccacttggccagtcgtctttgttttcgttgttttgattaccatttttgtgttaaattatctgaggagtcctatgggaagagaagtacttgcggttcgtgaagatgaaattgcagcagaagctatgggggtgaatacgacaaaaattaaggtacttacttttatgattgctgcagtaatttccagcattgcaggttccctttatgtcggttatattggtacagtcgctcctaaagattttaccattatgaaatcaattgattttcttatcgtggctgttcttggtggacttggctcagtaacaggaactattgtggctgctgttgttttgggtatcctcaatatgttcttgcaaaatgtatcagatattcgtatgattatctattcgttagctttaattttggttatggtctttagaccaggcggtcttttaggaacatgggaattcagtttttcaagacttttcgctaaaaaagctaaggagggcgacaaa

SEQ ID NO: 35945 - DNA, 1677 bp, Streptococcus mutans
atgaccgaaataaataaggaaggctatggggctgacctgattgtagacagcctcattaatcatgatgtcaactatgtttttggaatccctggtgcaaaaattgatcgtgtctttgataccttagaagataaggggccagaacttattgtagcacgccatgagcaaaatgctgcttttatggctcaaggaattggccgtattactggtgagcctggtgttgtgattacaaccagcggtcccggtgtttccaatctggtgactggtcttgttactgcgacagctgagggagatcctgtccttgctattggtggtcaggttaaacgtgctgatttgctcaaacgggctcaccagtcaatgaataatgttgctatgctcgatcccattaccaaatattcagcagaaattcaggatcccgcaacactttcagaaaatattgctaatgcctatcgtttggctaaagcaggaaagccgggagctagtttcttatctattcctcaagatataactgatagtcctgttactgtcaaggcgattaagcccttgacagatcctaaactaggttcagcgtcagttgctgatattaattatttggcacaggccataaaaaatgcggtccttcctgtcttacttttaggaaatggtgcgtcaacggctgcagttacagcttctattcgccgtttgttaggagctgtcaagctgccagtcgttgaaactttccaaggagctggtattgtttcaagagatttagaagaggacactttttttggtcgtgtggggctttttcgtaatcagcccggagatatgttgctgaagcgttctgacttagttatcgctattggctatgatcctattgaatatgaagcgcgcaattggaatgctgaaatttcggctcgcattatcgttattgatgttgctccagctgaaattgatacttatttccaacctgaacgtgaattaattggtgatatagctgaaacacttgatttactcctacctgctattagtggctactcacttccaaaaggttctcttgactatctcaaaggccttcgtgataatgtagtagaagatgtcaaatttgataagacagtcaaatccggtctggttcatccgcttgatgtgattgatgtccttcaaaagcaaacgactgatgatatgacagtaacggttgatgttggcagccattatatttggatggctcgttattttaaaagctatgaagcacggcacttacttttctcaaatggtatgcaaaccttaggtgttgctttgccttgggcaatttcggcagctcttgtacggccaaatgagaagattatttctatttcaggtgatggtggtttcctcttttctggccaagaattggaaacagctgttcgtttacatttaccaattgttcatatcatttggaatgatggtaaatataatatggttgaattccaagaagaaatgaaatacggccgttcagcaggtgttgattttggtcctgttgattttgtcaagtatgctgatagtttcggtgctaaaggttaccgtgctgatagtaaagaaaagtttgatcaagttcttcaaacagcactcaaggaagctgcaaatggcccagttctcattgatgttccaatggactataaagataatgtaaaattgggtgaaactattttgcctgatgaattctac

SEQ ID NO: 35946 - DNA, 627 bp, Streptococcus mutans
atggggaaatttcaaatcatttcgcatccgctcattcagcacaaactctctattttacgtcgtaaagatacttcaacaaagcattttcgtgaattagtcaatgaaattgctatgcttatggggtatgaagtctcccgtgaattgccgctagaagaggttgagattgaaacgccgattactaagactgtacaaaaacagttgacaggaaagaaattggccattgttccaattttgcgtgctggtattggtatggttgacggactcttgagtttggtaccagcagctaaagttggtcatattggtatgtatcgtgatgaagaaacattggagccggtagaatatctggttaaattacctgaagatattgaccaacgtcagatttttgtggttgatcccatgttagcaactggaggttcggctgtcttggctattgattcccttaaaaaaagaggagcagccaatatcaaatttgtttgtcttgtttcggctcctgaaggccttaagaaattacaggaagcacatcccgatattgatatttatacagcggctcttgatgaaaaactaaatgaaaagggctatattgttccaggtcttggggatgcaggcgatcgcttgtttggcacaaaa

SEQ ID NO: 35947 - DNA, 1092 bp, Streptococcus mutans
atgactgaagactataaattagatactattctggcacatgcaggaattaatacggacaagacaacaggagctctgacggctcctattcatttgtcaacaacttatcagcatcctcaatttggtcaatcaacaggttttgattacacacggacaaaaaatcctacccgcactgttcttgaagaaacgctggctaaaattgaaaaggctaaatacgctttagtaacatcgtcgggtatggcggcgcttgttttgctttttactggctttcctattgggagtaaggtagttgcggcgcgtgatttatatggtggttcttttcgttggtttaacgaacaggaaaaagcaggaagattttcttttgtttacaccaatacagaaactgatatgattgctgccatttcagatgagaccgattatgtttttatcgaaacgccaaccaatccgctcatgattgaatttgacattagtaaagttgctcaagcagctcataagcatggtgccaaggtcattgttgataacactttttacagccctatttatcaaaatccgctcgttttaggtgctgatgtggttttgcattcagcaaccaagtatctatcaggtcataatgatgttcttgccggtgttttaatgaccagcgatcaagaaatttacgataagcttttttatgaccaaaatacaacaggtccaacactctcgcccttagatacttatttgctgatgcgcggtctgaaaacacttaaattgcgtatggaaaaagcaacacaaaatgctaagacagttgttgcttatttagaaaaatcacctgctgttaaagaggtactttatacaggaaaaggcggaatgatttcttttaaagttgtggatgaaaaaaaaattccgcaaattctcaatcatttacagctgttcacctttgcagaaagtttaggtggcgttgaaagtttaattacttatccagcgacacagacacacttggatataccggaggaagtgcgtcattcctatggtttgacagatgacttactgcgtctgtccattggaattgaagatgcggaagacttgattgatgatttaaaagctgctttagaagct

SEQ ID NO: 35948 - DNA, 6140 bp, Streptococcus mutans
tctaaacaggaaaaattagcgtctatccctcatcttgaagaatctcaagtttatagactgtctcctgaacaagaacgaatgtattttttgcaacagtttgacttaaaatcaactttgtataatattccttttatttttaaaattaaaggctttttggatagtaataaattggcaattgcttttcataaattagtatcaactaatgatattttccgaacaacttatcatgttgttggaaatgaagttgttcaaactgtgaataaaacagcaaattataacattgctctagaagatttatcagatttaggtagcttagaagaggctgagaagagtttcatacgtccttttgatttatctaaagatttgttgataagaatgggtttatattctgaacaaaactcccaatatttatttattgatatgcatcatattagttcagatgggttctcaatgaatttaattatgaataaattgagtaacttttatttaggagaagatgataaacaggtatcaaggatcacttatggggattatgctgaatatactaaaacagatgaatttgaaaaaattttgcaggaacaggaagaatattggcgaaaagaatttgccaattatagtcattctaatcaattaccacactctcaacaaagctattcaggtgatatacaagaattttcttttgaagagggagatttgttaagaattgatgaatttgctaaaagacttaatataactcggtatgtctttcttttttccgttttcgcaaagttaataaatacacttgaatttcctgttgatataattgggacacctgtttcaggaagaaatttatcagagttgcaaaatgttgtgggtttatttgtgaatacggttccaattagaattccgaaagaagatgatttcaatagctacttaatggagtttaataataaaattaaaatggctcttcttaatcaaaactatccttttgatagattgattcgaatacttcgaagttctggtcagctaaattcaagtggtttatttaattttatgtttgcctatcagatttatgaatctccattaaaacttggagatattgaactagtagaacaaaagaaaaatatattaattgaaaaatatgacttaacagccaatgtggtagattttggaaataatataaaaattcaaatcagttttaataccgataagtacagccatgaggacatcaaacagttgttacaaaaatatgttgagtttataaataacattttagatggggaggggatatgatggagcagcaaaagaaatttaaaaataatcaatttgattatgataattatctcactataattaacgagttcgaaaaacaggtagaacgatttccagataagattgcaattattcataatgatacaagaataacttataaggagcttaatatactagcaaataaagttggaaatattttaatttcttctggggttgataatggtgataaagtcgcaattgacatgaaacgaggaatttcttatattgctgcaattttgggaattttaaaaataggagctatctatgtcccactagattttgattttcctcaatcaagaaaagaatatatcctgaacgattgccggtcgaaaattattatcacagaatcagatattgaatataaaaattataaaaaagtaaattggaaccaaattatagaaggatcttcctcaaaggatttagtaacagatcattatgtcaaagaaagtttagatgaaattgtttatattatgtatacttctgggactacgggttttcctaagggagtgcaggttggcggaagaggaattattcgtttgataaaggacaataaaagcttaacaatgaaaaatacagaagttatgctacatggttcttctttagcatttgatgcgtcaacattagaaatatatgcagctcttttaaatggtgcatgcctatctatcattgataaggaggatttaattgatagtcaaacattaaaagaaaagttgaaaaatgatcatgtcaatcgagccttttttacaacccctttatttaattcattgtgtgagcaagatccaagtgtattcaatgagcttgaacaagtaattataggtggagatagagcatctaataaacacctaaaaatagtaatgaagaatagcaagaaaactcaattttataatggatacggaccaacagaaaacactgtttttacgaccatgcataatattcaatactcagagttagaaggtgatattccgatcggtaaagcaattaatgatactggaattcttatcgttaatgaaaattttgaagaagtaaaaaaaggggaagttggagaattagttgtaacaggtggaggtcttgctattggttatctaaatcaaaaagatgcttctcaaggttcctttatttctcttccaaatctagggatcaaacgtgcttataaaacaggagattatgttagagaaaataatgatggggatctcatttttattggccgcagagatagtcaaattaagtatcgaggttttcgaatagaacttagagaaattgaaagtattgcaaaaaagattgatcatattagagaagctatttgtctcctaattggtgaaaaatctaattctaaattagttctttttgctgagtctaattcttctgtgtcagaagcttctattattgaaacacttcatgttgagcttccagaatatatggtgcccaatgatcttattttgctagataatatgccattaaaacttaatgggaaagttgattctgacaagcttaaacaaatctatttggaaaaaatacaaagtcaggttgaaaaacctagcgaaagtaacacagagagatttttcatagaaattttggaagatgtgttaaaaaagccaaaccttaatttagagatgaatttttttgaaattggtggacattctttaaatgcaacaattatatcaacaagactatcagaagcatttcataaaaaaatttctgtcagagatgttatgttaaatccaaatttgaaagatttgtttcatttgactaaggtgacagaagatgacgctggctctaatttagaagtgctatcaaaagctgataattatgattgttctcctactcagtctagactttttctgttaaacaagagccgaagtgacacatcttataatattccatatttcattaaggtaagtagcaatattgatatggaacaactaaaaaaggctatttggaaagaactaaaagaaaatgaaattttaagaacaatttatacatttaacaattccaaaattgtccaaaaagttcttccgtttgagaaaaaactacttaatatttctgtagaatatgaaccaataattgattttgagtatttgcaaaagtatttgattcaaccatttgatttggaaaaatcaattccctttagggcttctatcataaaatccaatagtgatatcatcctttttctagacattcatcatattgccatagatggtttttcattaaatcaattattaaaaaatattgaaaaaaactattttgaaattaaatttacgcgtcctaaatttacttataaagattactctaattggataaataaacagattagtaatggtaagtatatgcaaaagaagcagtattggcaagaacagcttaaaggttatcaggagaatatatttttaggaattgaaaaaactataaaacccaattctaaacgaacgatttactataatagagaaatatcttcacaattatatgaacaattgagagattatatagttacaaataatattagtctaaatatactttttatgactgcactttacattcttatagctaaatattcctcaattaatgatatagttattggttcccctgtttcaggaaaagtattagcggatttggaagaaatgattggttcttttattaatagcttaccaattagatataaagtagatccatcaaaaactatcttggaaacgattgaggatgtaaaaaagcaagtgatggatgcattagaaaatcaagaatatccgattgattcgatagttagtgataagaataaagaaaatacggaaattgcttctttgtttgatattatgtttgttatgcagaccaatttcaagcaaggtgaacaagaaaaatcaaatcagatatttttagactatcaagagattccgattgattctaaaatgaatttaattgttgaaggaattgattttggaaatacggtaaagtttcaaataacttaccctgttgaactgtatgatgatgacagtattattcagcttatggattcatttttacaagttattgagtcaattattcaaaatgatagaaggtgtgtaaaggaaatagaaattatttctcaagatcaaaaagattttattgatttaaattataataaaacagctaaggattttaaatttgataatcagtgtttgaaacaattgatcgaaagaaatgtagcgaagatgcctaataaaattgctattgcctgtgatgaagaaaatattagttttgaacaattaaatatgagatctaattttatggccaataaattaaaagatttaggcttacaagtgggcgatgtagttggtgtcatgaaagatagaaatattgaggcaataatcattatactagctttaattaaactaggagtaacatatgttcccttggattcgggaacgccaattgaaagagttaaaaagatttttgttaaatctggaatgaaatttgtaataactgatttggtacctttgcagaaagatatactaattattgatactaatgctccagactttcaaggtttgtctaaacaaaatccaaaaacagagatcaatttagatcagatgctatatatcatatttacttcgggaagtactggtgagcccaaaggagtagctatttcaaataaacagtgtattaatactattttggatattaatcataagtttacactatctccaaaagataatattctattgatttcatcttttgcatttgatctttcagtgtatgacatatttggtgcattagtttctggggcaactttaactattgctagtcaaaataaagacacaaattatttgaaaaaagtcgttcaaaataacccgattacagtttggaattccgtaccagcgtatatggaattaatttgtaatgtattagcagaccagaagccaatattaagtattagaaatattattctgagtggtgattggataccattagaattgcctttgaaaataaaaaaaatctttcctaatgctaatctttttagtgcaggaggtgctactgaaggatcaatatggtcaatttattacccaattgttaaagttgaaccagaatggaaatcaataccttatggaatgcctttggctaatcaacagatgtatattctgaataatatgggaaatgaacttcctattggagttatgggaaatatatatattggaggagtaggagttgcaatgggctacattaatgatattgagaaaactaatgatagtttcattaatcatcctaaattaggcagaatttataagacaggtgatttgggacgcttaacttcccaaggatacatggaattttgtggaagaaaagatattcaagtaaaagttaacggaaatagaatagagttaggagaaattcaagcaattcttcaatcttttgagaccattcaaaatgcgatagtaactgtaggacagaatgattatcaaaaacaattgctggcatattataaatctgataatgaaattgaaaaagatgtactgaatcagtttatgaaacaatatttaccaaattatatgattcctagccattatatttatatgtcagagttcccattaacttcaaatggtaaaattgataaaaaacaattaccggatcctaaaaaaatagaatctattaaagaggtaaaagatgtaaaacctaaaaatcagttagaagagaccgttttgacaatttgggagaatgtattggaacatcaagttctttctgtaacagacagtttcttctcagaaggaggcaattcattaatggccacggtcattataggtcagataaaggatcaatgtaatgttgatttatctctagaggaattctatgaaaatgactcaatagaggctttaggaaatttaataata

SEQ ID NO: 35949 - DNA, 1632 bp, Streptococcus mutans
atgtctgataaagaaacaaagatgacacagcaagagcaaatggttcgaggaactgcctggctgactgctggtaatttcattagccgcctcctcggagctgtttatattattccttggtatgcatggatgggaaaatatgcagcagaagctaatgctctttttggaatgggttatgaaatctatgccctttttttactgatttcaactgtcggtattcctgttgctgttgctaaacaggtttcaaagtataacacactgggagaccctaaaaaaagtacctatcttgtgcgaaagattttgcattttatgcttggtttaggtgccatctttgctgttattatgtatatgggatcacctgtttttgccagtatgagccgtggcggtcaagacttagtacctgttcttagaagtttaactttggcagttcttgtttttccgtccatgagcgttttaagaggcttttttcaagggtttaataatcttaaaccttatgccataagtcaaatagctgaacaagttgttcgggttatttggatgcttttaacagctttctttatcatgaagatgagctcaggagactatgttgacgcagtaacacagtctacttttgctgcctttgtcggaatgtttgcagggattgcagttcttatttatttcctatgggaaaatgatttgttagatgccttatttggcaaaaagcctgaaaaggttgatattgataccaaggatctccttattgaaacagttaaggaggctattccttttatcgttacaggttcggctattcaggtttttaaactgattgatcaattcacttttggcaatagtatggctcttttcacacattatagtgatagagaattaaaagttatgtttgcctatttttcgacaaatccaggcaaggttacgatgattttgattgctgttgcgacagcgattgcaggtgtcggtattcccttgttaacagagaattttgtcaaaaaagataaaaaagctgcggcacgcttagttgttaataatttacaaatgctgatgatttttatcattcctgccattataggagctgttattttagctaagccgctctatactattttttacggtctgcctcagggacaagcgttggggctattcatcgtttctttactgcagacaattattttagctatctatacggttttagctccgatgctgcaagctttatttgaaaatcgtaaggctattcgttactttatttatggtgttattgctaaatttgttttacaagttcctctcatttatttcttgcaggcctatggtccaatattagcaacaacgtttgccctattcattccaattattctgatgtaccttcaaatacaaaaaattacaggctttaatcgtactgccattagaagaacaagccttttagtgttgattttgacagcaatcatgactgttgttgtcgttttggcaacttggctgctggggctaattctatcagataatagtcgaatcgctagtcttatttacattacagtgattggttttattggtatagttgtttatggtatcttggctttagctactcatcttcttgataaaatgttgggtactaaggcggtcagccttcgtcggaagctgcatatgaat

SEQ ID NO: 35950 - DNA, 7725 bp, Streptococcus mutans
atgtttcatttgataaaaacagttatatctgaactccctcaaaatattaatcagaagattaaggatattgctttaatcacaaatgaagaaaaagaaagtattttaaagatatcaaggggcaaagaattatcaattgaagctccaacctttttaaagttatttcaaaaagttactgatagattaaaaaacaaagtagctatttcgtcagatgattggtatttaacttatgaacaacttaatcaggaatcagagaaactttctctttatttaagtaaactctttgagccaaaaagtattgttcccttggtgatggataatagttcagaaatgtttattgttatttttgccatattgaaaagtggttttgctttctcacccatttctttagattatcctccagaaagaatagagcatattataaaagaaactcatttaaatagtgttattgttccagaagaagctaatcttcaaatttctaaggaaataaaacaatatgtagctaaagatttgttaaataaagctccagttgaagtagatcaattttcaaatgctgtaaatgtaagaggagacgacattgcttatgttatttttacatcagggacaacaggaacacctaaaggagtaaaagtttctcatcaatcattgatgaatctcattacttggcataatgataatttctcaataacttctgaaactatagctgctaaatacgctggtgtggcttttgatgcaagtatttgggaattatttccttatttatcaattggagcaaaagtttatgttgtttcagaaaaagatcgttttgatgttaaaaaattaaatcaaaaatttattgaaaataaggttagtattgcttttttacccacagtagtctttgaaaaatttagcaaggtgcaaaatccatatttgaaaattcttttaaccggtgcagaaaagctacactatttttcagaacaagcttacgaacaatataataattacggtccaacagagtatactgttgtagccacatctttcaagttagaaaaacacatggataatataccaattggtaaacctatcgccaatacaactgctttagtaatgtcaaatgatcgtcactttctccccattggttttaaaggtgaactatatttgggaggagatagtttatcttctggttatttaaatgattctaaaaagacaaaaaatagttttattgaattagaacaaattatgggacaagttttttacaaaacaggagacttagttgcatatactgatagtggtgagttactttattatggaagaattgataatcaaattaaaattaatggatatagaatagaacttcaggatatcgaaaaaaatatattagaaataataggacaggattcagattgttctgttgttgttattccagtctctattaatggcttaatatctcttcatgcattttatgaaggagttacgggatttgactctaatcctaatcaagtcttaaaacaacttacaaataaattaccttcatatatggttcctagtactattgagtctttgtcacaatttcctttaacttctaacggaaaggttgatcgaaaatatttggaaaaaatagtactaaataaatcgacatctgttaaagaaattaataatgataatcctttattagttaaagtaatgaaaattattactgagattttaaaaggtagacaaattaatcctgatgaagattttttccaaatgggtggaaattctttaactgctattgaattagccaataaattacaagaagaactaaataaaaaagtaacaattgatgatatatttaaatttagaaatgctattaaccttgttgataatttaacaaatagggaaaacttaaaaccgctagaaactagtatccaatcttcggaggagatttcttatgaatcaagtccaagtcaaaaagcaatttttattgaacaaaagattgatgagaagtctttggcatataatatgccaattgtttacaaaattaatggagaaatagattttgaaaaattggaatctagtttggacaaagtagtaaaaaataatgaattattaagatctcacttttatttaaaagatgagcgtgttatggtaaaaacccctaaggtaaaagattattatcatgttatggaaaggaaagagcttagtgaaaaatcttttgatttaacaaaggaatttaaaaaatttgtacgcccatttaatcttgaaaaagatgttcttatcagagcgaaaataataaaaacttcgtctcaaaaatatctctttttagatagccatcatatttcttttgatgggggaagcttgaatccctttattaatgattttaaaaaggcatatgcaggagtagaacttgaaagaaaagcttcgtatagtcaatatgctttacaaacactatctcctcatttcttaaaagcaagtcattcacattttgaaaaggaatttggaacacttgtggagccactaaaattatctgattttggaactattgatcatcaaaaaaaggctggtgtgagtttcgatagtgaattttcttataagataagaaatatcgctttgaaaaataaggtaacagtatttaatctgttgttttcaattgttggatatttactcagttgtttttcaaatcaaaaagatatttgtataggtgttccagtaacaaatagaaatagaagtcagtataaaaatattattggtatgtttgttaatactctacctgttagattgaattatgaaaatttacatacagttgaggaaatgaataaatatgtaaataatcaatttatcgaagctttaaaatataaagaattttctttagaagaaattattaaaattagtagagacaaaacagaaaatgatattagccaattatttaatgtactatttgtaatgaatgaaattgaagattttaatttttctattgataatacaactttcgagaaaatgtctgctgataataaagatgtgaaatacgatttgttatttgaagttttagataatacaaaggataatactttttcaatttctttagaatatgataataaaaaatattcgaaccaattagcaaatagactattacaaagtttgcaaaagattttgatggaagtagttgacaagcaaaaaaataatttatcggatattaaaattatttctgaaatagaggaacagacactacaatcatttctaacgtggaagcaatttacaggaaaacagcaaaaactccatgaaccctttgaaaatttagtcaagcaatttcctaataagattgttgttaaagataaaaatacttcaatgactacaaccgaacttatgcagaaatcgaatattgttggtaattttttacaaagacaaggagtgaataacaataaaaaagttgctattattgttaataaatcagtaaatatgatggtaactatactaggtgttctaaaatctggtgcagcttatgttcctattgaaccgtctttaccagaggagagagtgaaatacattttagatgactcctgttgtgacttcattattagtgaggaaccattttataatggaaagattaattctgaaacaatatcaaatattctaaatgaagaaccagatatttctaaagttgaatcagacagtacctataaagatctgtgttatatcatctatacctctggttcgacaggagatcctaaaggagttatgctaacccatgaagctgttatgaatcgattgctatggatgcaaaatgcttatccaattacaaagaatgatataattttgcaaaaaacttcatttggttttgatgtatctatttgggaattatttggctggacttttgaaggtgcagtattatattttttagaaaatggagaggaaaaagatcctcaaaggattattgagttaataaatagccaaaatatttcaaaacttcattttgttccatcaatgttaaatgtatttcttgaattttgtgagagagaaaacaaagattctttaaaaagtcttagcatagttttttcgagtggagaagcactgacaaaagaacaagtaatcaagttttatagtatttttgacaacgacaagcctcaattaattaatttatatggcccaactgaaacagcaattgaagtaacttattttgattgtagtaatcttgattataaatctgaagatgttccaattggagaacctttggataatgttgaagcttatgttcttaatgataaaaaacaaaaatgtcctatcggtgttgttggggaactgtatataggaggaatacaggtagctcaaggatatattaacaaagaagatgctacaaagaaatcttttgtgagactaccgaaaatttcaaattcaagattatatgctacaggtgatttagtaaaatggacttcagaagggaagttaatattcattggtcgttctgatgatcaagttaaaattcgaggttatcgaattgaattgggtgaaattgaaaaatatttgaagaaagtaagccaaaagaactgcttggtaagccttcaaaataaactttcaaaaaataataagagcctcattgcttatattgaaagttcaacaactattgatgaaagcaagatcaaagaagaacttaagactttattacctcaatatatggttccaagtcacatttatattgtcccagaatttcctataaataaaagtggtaaagtggataggaagttacttgatagtatgtattcgtcaaaacatattgctcctaaggaaggtcttattaaatcaagtaatttaacagaagatattaaatctgtttggagtaatatattagattattccattgattctttttcagaagatgataattttttctctcttggaggagactctattaaagctattagtatggcttcgaaactcatttccaaagggtataaagtttcagttaaagaaattttgaaaaatccaacgatagctcaacttacaaaaatagtagttaagtctaatcaaatcgaagaagattcggaacttgataatagtgtcccattaactccgattagtcaatggttttggaaacaaaattttcaagtgcgaactcattggaatcaagctgtagtacttgtgagtaaagataaaataaatgatgaatttttaagaatagctatagaaaaaatcattgatgagcatactatattaaggagtcaacttgacaataattcgttatcaattgacaatcaaaaagacgctcaacgattttatgattatcaagaaattgatatttgtggatgggatgataaagcaaagatcattaatagctatgtatataatattttatctaaatcttcaaagttaataaatattgttaaattcatttgtgatgattgtgaaagaatcgtgctttcaattcatcatcttttgatagatacaatttcgtggaaaatacttatagaagatttttgtagttattatggacaacttagaaatggacagtcattaaattcaagttttaaaacaacttcatttattacttgggctaatagaataaacacgttatctgttaagttttctgaaagtaatatggaaaagaagtattgggataatattgtgcaaacgcctgtcgatttaattaatcaagatggtgttattaatccaggaagtatcaaggatagaaaacattctagaataaaattggaaaaagaaatcagctctcaactatcagatatatcagtatcaaattcccatgttacccaggagcatattcttttgacaagtgttttaatggctttaaagaaaagttattctatttcaaatattcctattttaatggaaggatatggtcgtgaagagtaccttactcaaaccactttagcgagaagtataggatggtttactaatacttatccgcttgtttttaaagtcaaggatgatgttttacaaacattaattcaagttaaagatatcattaatagggtgcctcataatggtattggctatggattactccatttggtaaatagtaatttacaagatttagatcctgaaattagttttaactttttgggagaaataagtagtgaatcaagtacacaattcatgactttggacaatattgagttagattgtttaataaataagtcaaatagtaatccatatcttattgaattttcagtatttttcttaaagggagaactattcgtagatgtttattttgacagcacgttaattagtcaagaagatgtggaaataatgaatcagaattttgtgcaaacaataaatgagctgataaattgttcagaagatatatcaacaatgcgaagtatttctgatgttacaaatgaaacatttaaatatgaaagtaacaatttacctattgttaatgataaaaatattgataaaattagaaaaacattaccaatgcaaagtaatattttgtttcttgaacaatttcaaaaaaatagaaatatttatcatgaacaatttaaagtagactttaaaggtagactgaataaaaaaatttttgataaagctgtgcaatttgtagtagatcagtacgaagctctaaggactagtttcgatttaactacatttggtgagcctgctcaaattattaaacaaaataatacaattagtatagacgcttatacatttgaaagcccaagacaggatagtgaagctgctgttaagaaattagaaaatgaattcttagatatcccatttgatactcaggaatcagatctgtttagaattactattttagaatttaaagaccaagaagtcagtttaatttttgactatcaccatataattttggacggttggtcaatgttgattgttttacgtaaaatattcacctgttatactaagcttttgaaggatgcaacctatataaatgaagaagaaaacataaatatagatgattactttgattataaagatttatttgaaactgaatcagctaaaagatattggaaaaatttcttagaaaacattggtgagaatttaaatttagaaaattactttgatagaaatcttgagggaaaaacgattgaacataatattggtgaatatagattctcaatatcaaaacaacaagataaacaaatcagacaattttgtgaaaatttaaactgtactacaaatgattttgctcatttaatttggtcaaccatattatataaatatttaaagagtcaatcacaagtatttttctatactgtttcaggtcgagatggagatattaatattgaaaatgaagttggactttttataaatactattcctcaagtgactaatatcaatgatgatagtagtatatcaagtatagtcgaaagtattcatttaaatatttctaatgcatttggctattcacaattgcctctaagtgagattttacaacaatcacaagtttctcatgatcagattaatacacttttggtttatgaaaattttcctatccataaagatgattttatagcagaattgtcagattctcaattggaatttcaaacttataaagcaactgaagctacaacgtatgacttgactcttatcttttctgaggaagaagagaagatttctattcgtatactctataatcctcataaatatagtaatcagtatatttcgattctaggaaaaaatatccaaggaattattgatgatttagtcactaaaaattatttccgtgagattactcttccagataatactttcaatgaggctttacagtcggtagaagataaactagactttaatttt

SEQ ID NO: 35951 - DNA, 1449 bp, Streptococcus mutans
atgattacaattgaaacagtattaacgattcttaaaaataatgctaattttcgcgaaataattgatggtaagcattatcaatacaaatactcaaatccagaagtggcttttcatcacatttcttatgatagtcgtgacattaaagcctcaaccctcttttttgttaagggagcaactttcaaaaaagaatttctagaaaaagctatcgaaagcggattaaccttttatgtagcagaaaaagattatcaagtgggtattccgcttattcttgttaataatatcaaaaatgccatgtgtctgattgctaaggaattttatgacaaccctcaagataagttgaaaactttggcttttacaggaactaaaggcaaaacaacagctgcttattttgcttatcatatcttaaagcaaggctaccgtccggccatgatttctaccatgaacacaaccctagatggaaaaactttcttcaaatcaaaactaacaacccccgagagcttagatctttttaaaatgatggcacaggcagttgctaatggcatgactcatctcattatggaagtctcaagtcaagcttacctagttggccgtgtttacggactgacttttgatgttggtgtttttctcaatattagtcctgatcatattggaccgattgaacatcctacttttgaagattatttttaccataagcgtcttttactgaaacatagtcgttatgttatcgtcaatagtcagatgaatcattttgcactcatcaaagaacaggttgccgaccagccacatgatttctatgggaaatattctgacaatcaaattataaacagcaaggctttttcatttgatctgacgggcaaattagcaggccattatgacattcagctgacaggctcgttcaatcaagaaaatgcagttgctgctgccttggcctgcttacagctaggagctagccagactgatattcaaaaaggcatcgttcaaacaacggtgccggggcgcatggaagttctcattcaaaagaatggtgctaaggtctttgttgattatgctcacaacggagatagtttagaaaaactattgtcagttgttgaagaacatcaaaaaggaactttaattcttattcttggcgctcctggaaataaaggagaaagccgccgagctgattttggttatgttatcaatgctcatccagagttgcaagttattttaactgcagatgatcctaacaatgaagacccacagctcatctctcaagagattgctcatcatatcaaacgtccagtaaacattattgttgatcgtaagcaagctattcaaaaagctatgtcattgacgcagtctgaaaacgatgctgtcattatagctggtaaaggagctgatgcttttcaaattattaagggaaagcgcacagcatatgctggtgatattgaagtggctagaaaatacctt

SEQ ID NO: 35952 - DNA, 717 bp, Streptococcus mutans
ttgaataaaacaaaaaaagttgtcctattttgtattcctcatgctggaggtaatagtagtatctttaacaaatggagcgggtacatgcccgataatattatttttaaaccaattgaattaagtggtagaggaaagcgtttgaacgaaaaattagatgctagttttgaagatatgattgatgatgtttttaattctatcaaaaaaataatggttaattttgatatggattattatatttttggtcatagtatgggagcttggatagtgttagaattactttattattttaaagaataccatttaccttatccaaaaggtgtaatattttctgggaatatcccaccttgtttttatcataagtctgacccaccacttcatttgttaccagataaaatatttctagaagaagtctcaaaattgggagggatacctggaaaaataataaaagaaaaacaatttgtagaatattttgttcctattataaaaaatgattttaaattgatagagaactattattttcaacagaagcaggaaaagtttcctgtaaaaagtctgatttgtagtggtaaagatgataaatttcgggtaaaggatttggtacaatgggaaaattactttattgataagtgctcaatatctttatttaaaggtggccatttttacatcgatgacaatattgctagtctttgtaatcaaataaaagattttatttatatg

SEQ ID NO: 35953 - DNA, 2202 bp, Streptococcus mutans
atgattacttccaaatatgcttggaaaataaatgaaaaaaagccagatgatggcttttttgagctggctaaaaaagaaaatctcaatcctacagctgcacaaattttatatgagcgaggttttaaaacaagtaaagatatagaagcgtttttgagacctgatttgtctcaattacatgatccctttcttttaaatgatatggacaaggctgtcacgcgtattcgcagagctattgaaaccaatgaacgaattcttatctatggggattacgatgctgatggtatgacgtcaagttccattgcaaaggaagctttggaaatgctgggagctgaggtagaggcttatcttcctaatcgttttaccgatggttatggtcccaatctcagtgtttataaatattttattgagcagcaggatatatcactgattcttactgtggataatggtattgctggccatgatgctattgcttatgcgcaaggacaaggtgttgatgtcattgttactgaccaccacagtatgcctgctgagcttccttcagcttatgctgtcgttcatcctgaacatccagatgctaattatccttttaaatgtttagcagggtgcggtgtcgcttttaagctagcctgtgccttgttagaatccattccgacagagatgctggatttggtggctattggaaccattgccgatatggtatcgctcaccgatgaaaatcgtgtaatggtcaaatacggtcttgaaatcctaaaacaaacagagcgcgtcggtctgcaagaattaatagcacttgcaggtgttgattttgctgatatcaatgaagaaaccattggtttcaagttagcaccccagcttaatgctttgggacgtctggatgatcccaatcctgctgttgaattgttgacaggctttgatgatgaagaagcaaagactattgcggccatgattaatgaaaaaaatgaggagcgaaagaccattgtacaggctatttttgaagaagctatgactctggttgatgagaacaaatctgttcaggtcttggctaaagaaggctggcatgctggtgttctggggattgttgcaggtcgtattatggaacaaataaaccagccagtcattgttcttaatattgaaaatggccttgccaagggaagtgcccgtagtttagagtcagtcaatatttttaatgcccttgatgcgcatagggatttatttatggcttttggaggccatgctggagctgcaggtatgactctagaggctgataaattagaagaattatcacaggttttaaatgattatattcaagaacatgcgattgatttatcgcaaaagtctgctttagtaattgatgaagaattgtacttgccagaacttagtttagatactttaaaagggcttgaaactttggctccttttggtatgaacaataaaaaacctatttttttactaagggattttacagtcaaacaggttagaacgatgggacaaaatggagctcatttgaagttaaaagtggctcaggaacaggctgtctttgatctccttgcctttaactacggttcgctcgtgacagaatttcaacaagctcagcatctcgaactagctgttactttatcggttaatcgttggaacggcaatactagtctacaattgatgctagttgatgcgcgtgttgaaggcattcagttgcttgatatccgtgctcgcaatagcgctctgcctgacggagttccctttttagaagatcaaacagatagtaaggcagttgtcttatttgaaataccggaaaaagaagaagaccttctagcactttttgaaaatcgggattttgaagtcatttattttaaaaataggattaagcatcaatattatttaacaggatctggaacgcgtgagcaatttgctaagctttacaagacgatttaccagtttccggaatttgatgtacgtcataagttaaaagagctcagtcaatttctcaaaattccagatattttgctggtcaagatgatccaaatttttgatgaattggactttgtttccattgatgatggcattatgacagttaataaagatgctcaaaaacgggaaatttctgacagtcatatttatcaagatttgaaaaaattagtgaaattccaagagttaatggcattaggaacacctcaagaaatatatgaatttttaaaacgcgatcgc

SEQ ID NO: 35954 - DNA, 930 bp, Streptococcus mutans
atgtctaaaattttagtttttggtcatcaaaatcccgattcagatgcaatcggttcatcaatggcttatgcatatttaaaacgtcaactcggcgtagatgctcaagcagtagctttaggaaatccaaatgaggagacagcttttgtacttgactattttggtattcaagcaccgcctgttgttaagtcagctcaagcagaaggtgccaaacaagtcatcttaacagaccataatgaatttcagcaatctatcgcagatatccgcgaagttgaagtcgttgaagttgtagatcatcatcgtgtcgctaattttgaaacagcaaatcctctttatatgcgtttagaaccagttggatctgcttcatcaatcgtttatcggctttacaaggaaaatggtgttgctattcctaaggaaattgcaggagtgatgctgtcaggtttgatttcagatacacttcttttgaaatcaccaacgactcatgcctctgatccagctgttgcagaagatttagccaaaattgcaggtgttgacttgcaggaatatggtttggctatgcttaaggctggtaccaatttagcaagtaaaacggctgcacaacttgttgatattgatgctaaaacatttgaacttaatggtagtcaagtacgtgtagctcaagtcaatacggttgatatcaatgaagttttggaacgtcaaaatgaaattgaagaagccattaaagcatcacaagcagctaatggatactctgattttgtcttgatgattactgatattttaaattcaaattcggaaatcttagcattgggcaacaatactgataaagtagaagcagcctttaatttcacacttaaaaataaccatgccttcttagcaggtgctgtatcacgtaagaaacaagttgtacctcaattaacggaaagttttaatggg

SEQ ID NO: 35955 - DNA, 1547 bp, Streptococcus mutans
atggctaataaaaaaataaaagatatgattgcaacaattgaaaattttgctcaagaacaggcagaatttccggtttataatattttaggagaaatccatacctatggagaattaaaagctgattctgattcgcttgcagctcatcttgatcagttagatttaacagcaaaatcaccagtagttgtctttggaggacaggaatatgccatgctggctagttttgttgctctgacaaaatcagggcatgcctatattcctattgatcatcattcagccttagaacgtattgaggctattttagaggtagcagagccaagtttagttattgctgttgatgatttcccaattgacaatcttcaagtcccagtaattcagtatagtcaattagaagagatttttaaacaaaagctatcttatcaaatcaatcatgcggttaagggagatgatacctactatatcatctttacttcagggacaactggtaaacctaaaggagtacagatttcacatgacaatctgcttagttttactaattggatgattaatgcagaagcttttgcaacacctcataggccgcaaatgctggcacaaccgccttactcttttgatttatcagtgatgtactgggcgccaacattggctttaggtggaaccctttttgctcttcctaaagaaataactgcagatttcaaacaattatttacaactattaaccaattacccattggtgtgtggacatcaacaccttcctttgttgatatggctatgctgtcagatgactttaatgcacagcaattgcctcatttaactcatttctattttgacggagaagagttgacggttaagacggctaaaaaattgcgtcagcgttttccgcaagcaagaattgtcaacgcttatgggccaacagaagcaactgttgctttatcagctttggctgtcactgataaaatgcttgaaacatgcaaacgtctgccaattggctatacaaaaccagattcgccaacctttattattgatgagtcaggtcataaactggcaaatggtcagcaaggagagattattgtttccggtccggcagtctctaaggggtatctcaataatcctgaacgaacagcagcagctttctttgaatttgaaggtttgccagcttatcatactggtgatttgggaagtatgacagatgaaggtctcttgctctatggcggtcgtatggattttcagattaaattcaatggctatcgtattgagttggaagaagtctctcaaaatcttaacaaatcgcaatatatcgcatctgctgtagctgttccccgttataataaagaccataaggtgcaaaatcttttggcttatgttgtcttaaaagatggtgtagaagagcaatttgagagagcacttgacattaccaaagctattaaggctgatttgcaagatgttatgatggattacatgatgccttctaagtttttgtaccgtaaagatttacctttaacacctaatggtaaaattgatattaaaggtttgatgagtgaggtaaacaaaaa

SEQ ID NO: 35956 - DNA, 1335 bp, Streptococcus mutans
atggaagaccccggtagccagtccttgatcttacaatttttattattactgattttaacgctttgcaatgcttttttctcagctactgaaatggctcttgtatctcttaatcgtgcacgcgttgaacaaaaggctgaagagggcgaaaaaaagtatatccgtctgctaaaagttttggaaaatcctaataattttctatcaaccattcaggttggtattactcttattacccttttatccggagcgagtttggcagattctttagggcgtgaaattgctgtttggtttggcaattcagctactgccagaacggcaggaagtcttatttctttagcttttttgacctatatttctattgttttgggtgaattgtatcctaaacgtattgctatgaatctcaaggaaaatttagctgtgctgtcagcacctgttattatttttcttggcaaagtggttagcccttttgtttggctgctttcggtctcaacaaatctattaagtcgcctcactcctatgacctttgatgatgccgatgagaaaatgacccgtgatgaaattgaatacatgttgacaaacagtgaagagactctagatgctgatgaaattgaaatgctgcaaggtgtcttttcactagatgaattgatggcacgtgaagtgatggttcctcgtacagatgcttttatggtggatattaatgatgattctagtgatattatccaaaccattctcaatgaaagattttcgcggattcctgtttacgatgatgataaagataagattattggaatcattcatactaaaaatttattgaatgctggtttcaaggaaggttttgatcacatcaatcttcgccgtattttgcaagagccgctttttgtaccagaaactattgttgtaaatgaccttttgaccgctttaaaaaatacccaaaatcagatggctatcctacttgatgagtatggcggtgtggcaggtcttgtcaccttagaagacttattagaagaaattgttggtgaaattgatgatgagacagacaaaacagccatttctgttcgtgaaattgcagataatacctatattgttttgggaacaatgacacttaatgattttaatgagtactttgaaactgaccttgaaagtgataatgttgatacgattgctggtttttatctgactggtgtcggaacaattccaagtcaagaagaaaaagaacactttgaagtagagagtaatggcaaacaccttgaactgattaatgataaagttaaggatggtcgggttaccaaactgaagattctcgtttcagaggttgaagaaaaggaagatgaaaaagac

SEQ ID NO: 35957 - DNA, 1383 bp, Streptococcus mutans
atgagtggaaaatcaatttttgataaattatgggatcgccatgtgattaccggtaaggaaggagagccccaactcatgtatgtggatcagcactatatacatgaggtgactagcccgcaagcctttcagggcttgcgagatgctggtcgaaaagtgcgccgtcctgatttaacttttggaacatttgatcacaatgtaccgaccgttaatatttatgatattcgtgatgttatttctaaggcacaaatggatgctcttgctagaaatgttatcgaatttaatattcctcatgcagaccatggttctgaaaatcagggaattgtccatatggttggccctgagactggtcgtacacagccgggtaaatttatcgtttgcggagatagccatacggcaacacatggcgcttttggtgctattggttttggaattggaactaccgaagttgagcatgtttttgcgacccagactatctggcaggtaaaacctaaaaagctcttggtaaaatttacaggaaaaccacaaaagggtgtttattccaaggattacattttagccttaattgctaaatatggtgtggctttaggtgttggttatgttgttgagtatattggtgatgctgttgatgccctaagcatggaagaacgaatgactatatgcaatatgtccatagaatttggttctaaaatgggaattatgaatcctgatcaaaagacctttgattaccttaagaacaaagcgtgtgtccctgaagattttgaaacagcagtggctgattggaagactttggtttctgatgaagatgctcattacgacaaggtgattgaattagatgtttctcaattagctcccatggtgacttggggaactaatccttcaatgggagtcgcttttgggcaagcttttcctgatattagagatatgaatgataagcgggcttatgattatatggacatgaagccgggccaaacagcagaggatattgaacttggttatgtttttttaggttcttgtaccaatgcgcgattaagtgatttgaaagtggcagctaagtacgttgctggtaaacatattgctcctaatttgaccgctattgtggttccgggcagccgtcctgtcaagcaggctgctgaaaaaattggtctggataaaattttcttagatgctggctttgaatggcgcgatccgggctgttccatgtgtcttggtatgaatcctgataaggtacctgaaggcatgcactgtgcttcaactagcaatcgtaattttgaagatagacagggagttggagcgaaaacacacctttgcagccctgctatggcagcagcagcagcaattgctggtcgctttatagatgttcgtcaattaccggaggcacaagtt

SEQ ID NO: 35958 - DNA, 894 bp, Streptococcus mutans
atggttattgaattaaaaaatgaaaaagtaactgtccagtttaaagagtttggcggtgctttgtcttctatcaaagatcaagatggtatagaatacctatggcagggaaatcctgcctactggagttctcaggcaccggttctttttcctatttgcggcagtttaagaaatgataagggcatttacacgtctaagaaacactcacatcgttatggtagcatccctagacacggcctggtgcgaaagaaaaattttcgctttgagcaactgggaaaagacagtgttgtttttaccattactcctgacaaagaaatgctgatgcaatatccctatcattttgaattaaagattatctacactttaaagcatacaactattcgcacagagtatcaggttattaacaaagaaaaagaaagcatcatgccttattttatcggaggccatcccggtttgaactgtcccttgtttgcaggagatcgctatgaagactactatcttgaatttgaaaaggaagaaacctgtacagtaccaaaatcttttcctgatacagggttgcttgatttacaagacagaaaaattttcttgaaagggcagaaataccttgatttggattattctttgtttacgcatgacgccattactttagataatctacaatcaagaagtgtcagtctgcgttctaaaaatcacggcggaggcctgcgtttggattttgcagattttccttaccttattctttggtcaacagccaataagagtccttttatagccttagaaccttggagcgggttgtcaactgcggtagatgaatcagattattttgaagaaaaacgcaatgtgagctttgtagagcccggacagtttgatcgaaactattttgacatcactgtttta

SEQ ID NO: 35959 - DNA, 1419 bp, Streptococcus mutans
ttgagaggtcacactatgagcaaaacattacctaaagattttatctttggtggtgcaacagcagcttatcaggctgaaggtgccactcatgcagatgggaagggtcctgttgcttgggataaatatttagaagataactactggtatacagctgaacctgccagcgatttctatcatcaatatcctgttgatttaaagttggcagaagaatttggcgtcaacggtattcgcatttccattgcttggtcacggatttttccaaaagggtatggagccgttaaccccaaaggtcttgccttttatcataatctttttgctgaatgccataaacgtcatgtggaaccttttgtaacacttcatcactttgataccccagaggctttgcattcaaatggtgactttctcaatcgtgaaaatatagagcattttgtcaactatgctgaattttgctttaaagaatttccagaagtgaattattggacaactttcaatgaaattggccccattggtgatggtcagtatctggttggaaaatttccgccaggcatccaatacgatcttgccaaggttttccaatcccaccacaacatgatggttgcacatagcaaggcagtcaaacttttcaaagatggtggctactctggcgaaattggtgtggttcatgctctgccaaccaaatatccttatgatccaaacaacccagcagatattcgtgcggcagaattagaagatattattcataataaattcatcttggatgcgacttatctgggtaagtattctgagaaaactatggaaggggtcaatcatattttggctgtcaatggtggtcaattagaccttcgtgaggaagattttgctgctcttgaagctgctaaagatctcaatgatttcttgggtatcaattattatatgagtgattggatgcgtgcttttgatggtgaaaccgaaattacgcataatgctaaaggcgaaaaaggaagttctaagtaccagattaagggtgtcggtcgcagagaagcgccagtaaatgttcccaaaacagattgggattggatcatttatccgcaaggactttacgaccaaatcatgcgagttaagcaggactatcctaattacaagaagatttatatcactgaaaatggtcttggttataaggatgaatttgtgaatcatactgtttatgatgatgcccgtattgattatgttaaaaaacacttagaagttctttcagatgctatagcagacggtgccaatgtcaaaggttactttatctggtctctgatggatgtcttctcatggtcaaatggttatgagaagcgctatggtctcttttatgttgattttgatacgcaagagcgttatcccaagaaaagtgcctactggtataaaaagttagctgagacccaaataattgac

SEQ ID NO: 35960 - DNA, 648 bp, Streptococcus mutans
atgaaaattaaacaaacttatcttttaagagcttcctttgcttttttacttttaatgtttctaggatacttggtcaaattttaccctgataatttgactggtattgataccaatattcagagcgctatgcgaggggattttccttcagtagaaacttgtttttttactactattactaattttggaaatgaattatttttattcatcttttgtatttttttgttttttctattttatatcaaaaattggaaagctgaagctggatttattttggcgaatttcgcaactgtaggtttgctgtcaacagctttaaagtacctgtatcaaagaccacgtcctaagattaagtggctgattcagacaacgggcccttcttttcctagctggcatgccgcttcaaccttactgatagcggcagccatagttgtgattattcagcaacgtatgaaaagcagcgttttaaaactgctcttacaaatacttcttattgtaatagctattttggtaggcatttctagaatttatatcggtgtccaccatccaacggatgttttaggaggctggctgttggccttaggtttaagtcaaatgatttatccttattatgatgagtggcgttttaaatggcgcttttcaggcaagcagaag

SEQ ID NO: 35961 - DNA, 1704 bp, Streptococcus mutans
atgaacacattgattgctcaaattgaaaagggaaagcctttctttgaaaaaatttcgcgtaatatttatctacgtgctattcgtgatgggtttatctcggcaatgccggtcatcctattttcgagtatttttctgttgatcgcttatgttcctaatatctttggttttacttggccaaaaggtattgaaaacatgttgatgacaccctataactatacgatggggattattggtttcctagtggctggtacaactgctaaatcactaacggattcgatgaaccgccaattagaaaagaccaaccagattaatttcatttcaacaatgttagcttctatggccggttttttaatcatggcagcggatccagctaaagaaggtggtttcttgagtgcctttatgggaactaagggcttgttaactgctttcattgcagcctttattactgttaatgtctacaagatttgtgttaaaaataatgttaccattcgtatgcctgaggaggtaccgccaaatatctctcaagtgtttaaagatatttttccatttgccttttccattattattttgtatgctatccaattagctattaaggcagttattggagtaaatgtggctcagtcaattggaaccttgcttgctcctttattttcagcagccgatggctatcttggtattacgattatttttggagcttacgccttgttctggtttgtcggtattcatggtccttctattgttgagccggctattgcagccattacatattcaaatgttgaattgaatgcacatttgattcatgctggtcaacatgctgataaagtgattacctcaggaactcagatgtttattgtaactatgggtggtactggtgcaacattagttgttcctttcatgttcatgtggttatgtaaatcaaaacgcaataaggctattggacgtgcttctgttgtgccaactttctttggcgtcaatgaacctatcttgtttggagcacctattgttttaaatccagtctttttcatccctttcattcttgccccaattgttaatgtttggatttttaagttttttgttgatacccttggaatgaacagtttctttgctaatcttccatggacaacacccgggccaataggcattgtcttaggaactggatttgctgttttatcttttgttcttgcagcacttttaatccttgtagatactgtcatttattatccttttgttaaagtttatgatgaacagattttggctgaagaagctgaaggtaaaagttcatccgatgctttaaaagaaaaagtagcagctaactttgatacgaaaaaagctgatgctattcttgaaggtgctgaatctaaagaagagccagcaactcatgctattactgaagaaacaaatgttctcgttttatgtgccggcggcggtaccagcggtcttttagctaatgctttaaataaagccgcagaagaatacggagcccctgttaaggctgcagctggaagttatggcgctcaccgcgaaattttagaccaataccaattagtcatcttggctccgcaagttgcttctaactatgaagatatgaaggcagaaacggataaacttggcatcaaattagctaagaccgaaggtgctcaatatattggtttgacgcgtgatggcaagggagcgcttgcctttgtggaagaacaatttaaagat

SEQ ID NO: 35962 - DNA, 312 bp, Streptococcus mutans
atgaacagagaagaagcgactcttttggggtttgaaattgtagcctatgcaggagatgcacgttctaaattacttgaagctttgaatgcggcacaggccggtgagtacgatagggcagaagagcttgtagctgcggcagatgactgtattgttgatgcccataaagctcaaacaagccttttggctaaggaagcacaaggtgatgatattgaacttagtgttactttaatgcacggacaagatcacctgatgacaaccatacttctaaaagatttgatgaaacatttaattgaattgtacaaaagagggagc

SEQ ID NO: 35963 - DNA, 594 bp, Streptococcus mutans
atgacaagaactgaatacctcaatcagttaaaacattatttaaagagattaccacatactgattatgaagaagcaatggattactttaaggaatattttgaggaagctggtccagaaaatgaggctcaggttatccaagatttgggtaatcctaaggaagcggcttatgaaattttaagtcagctgttagataaaaaagttgaagaagaatgtggaccttcaactaaatctaaacacattgtttggataacaattttagccattctagccgcaccaatagcgttgcctttgactattgctgccttggcacttgccttagctattattattttagctttatccagtattgttgttacagttagtattggggttagcgcttttacttcagcctttgtgcttatttgggaagccatttttaaactttctggttctttttcaacctttagtcttggtttgggtgctggcctgctttcacttggactatctttaatctttttcgtttttactcttttattagcgcaatggtttaaatttgcttttattaaatggagtcaatggattgttaaacaaggctataaaagggggtacagagta

SEQ ID NO: 35964 - DNA, 513 bp, Streptococcus mutans
atgaaaattgctattggttgtgaccatattgttactgatgtgaaaatggaactatctaaacatctaaaagaagaaggttatgaagttctagatgtagggacctatgactttacacgtacgcactatcccatctttggtaaaaaagtgggcgaagcagttagcagtggtgaagcggatttaggtgtatgtatgtgcggtactggtgtgggtataagtaatgctgccaataaagtaccgggtgttagaacggcattagtaagagatatgacttctgcactgtattcaaaagaagaacttaatgcaaatgtcgttagctttggcggcgctattataggtaagttgttattatttgatattgtagatgcttttattaaagcccagtataaaccgacagaagaaaataagaaattaattgctaagatcaaacatttagaagcacataacgataaacaagcagatccgcatttctttgatgaatttctagaaaagtggaatcgcggtgactatcacgat

SEQ ID NO: 35965 - DNA, 426 bp, Streptococcus mutans
atggcaattattattggttcagatgcagctggtaaaagacttaaagatgttattaaaacatttttaaaagataacaatcatgaagttttagatgttactgaaaggaaagatttggattttgtagattcaactttagcagttgtacatgaggtacaaaaaaatgataaaaatttgggaattgcaattgatgcctatggtgcgggcagctttatggtagctactaaagtcaaaggtatgattgcagcagaagtgtctgatgaacgttcagcttatatgacacgcggccataataatgcgcgtatcattactcttggtgctgaaattgttggagatgaactggccaaaaatattgttaaggactttgtagaggctaaatatgacggcggccgtcatcagatccgtgtagatatgctaaataaaatgtgc

SEQ ID NO: 35966 - DNA, 546 bp, Streptococcus mutans
atgaatattgaacaactcgaaaaagaaaataaactgttaactttgggtagaaatcatgtggttttatttcaaccacaaattcctgcaaatacaggaaacattgctcgtacctgtgcggctactaacacctctcttcatattattcgtccaatgggatttcccattgatgataaaaagatgaagcgggcgggtcttgattattgggataaattagatgtgcatttttatgacagtcttaatgatttcatgaatatttgttcaggtaaactgcatctaattactaaatttgcaaataaaacgtattctgatgaaaattatgatgacagtgagcatcattattttctgtttggacgtgaagataaaggactcccagaagaatttatgcgccagcattctgaaaaagctttacgcattcccatgaatgatcagcatgttagaagtctaaacttgtcaaatacggtttgtatgattgtttatgaagctttacgtcaacaagattttataggattagaacttagtcatacttatgctgtggataaattaaag

SEQ ID NO: 35967 - DNA, 711 bp, Streptococcus mutans
atgacccctgaagaattttaccaagctttggccaaacatcacatcaacttatctgctaaacaaaaagaacaatttgacctttattttaaattattggtggaatggaatgataaaatcaatcttactgccattactgaggaaaaagaagtctatcttaaacatttctatgactctatagcaccacttttatcaggctatattcctaatgagtctttaaaacttttggacattggggcaggagctggttttcctagtctaccaatgaaaattatttatccccagttagacgtcactatcattgactcactgaataagcgtattaaatttcttaatttattagctgatgctttagaacttgacaaggttcatttttaccatggcagggctgaagtttttggacaagacaagaattttcgagctcactttgaccttgttacggccagagctgtcgctcgtttacaagtgttatccgaactcactattccctttttaaaagtcggcggtcaattgcttgctcttaaagccagtgctgctgacgaagaattaaaaactgctcaaaatgctttaaacttattgtttagtcaaacaactagcagtgacaactatcaacttcccaatggagacggacgcaatctcactattatcactaaaaagaaagaaacaccgaataaatatccacgtaaggctggaatgcctaacaaaaaacctttg

SEQ ID NO: 35968 - DNA, 1353 bp, Streptococcus mutans
atgaaaattattgtcgttggtggcggcaaggtcggtaaggctctctgtcgctcactggtggaagaagaacatgatgttattttgattgaagaaaatgaatccgtcctcaatcatgtcaccaaacgtcttgatatcatgggaatagtcggtaatggtgctaactttagaattttagaacaggctgatgtgcaacattgtgatatttttattgctattactgataaagatgaagtgaatatggtagctgctgttctagctaaaagaatgggggctaaagaaaccattgtccgtgttcgtaatcctgaatattccaacacctactttaaagacaagaactttcttggtttttctttagtagttaatcctgaacttttgacagcacgttatatcgccaatatggttgatttccctaatgcacgatcagttgaacattttgtcaatggtcgtgtcatgttaatggaatttaaaattgttgacggtaacaacctctgtcaaatgtccttgaatcaattccgtaaaagattcaataatattgtcatctgcgctattgagcgtggaaatgagctcattattcctgatggtgatgctgtcattcagtcaggggataaaattttcgtaacaggcaagcgtatggaaatgattcatttccataattttgttaaaaataaagttatcaaacatctaatgattattggtgcaggaagaatttcctactatttgcttaatattctcaagactaccaatcgtcatcttcaagtcaaagtcattgaacttaatcctaaaaaggctgaactatttagtcaagaattcccccatatccatgtcgttcaaggagatggaactgctaaagatatcctcttagaagagagtgctgcaaactacgatgctattgcgaccttaactggtgttgatgaagaaaatattattgcttccatgtttttagaaacattaggtgtgcaaaaaaacattactaaagtcaatcgtactagtattttagaaattattaaccctgaacagttttcaagcattatcactcctaagagcattgcggttgattccatgatgcattttattcgcggtcgtgttaatgctcaagattctaatctagatgctatgcaccatgtagcaaatggtcgtattgaaactttgcaatttgaaattcgccaaaccaacaaaatggctggtaaaacattgtctgaacttcattttaagaccaatgttttaattgcagccatcattcgcaatggtaaaacaattttccctactggtgatgatattcttgaagtaggtgacaagattgttgtcattacacttcttacaaacatcactcatatttatgatttattaaagagg

SEQ ID NO: 35969 - DNA, 3636 bp, Streptococcus mutans
atgacctttaaaccatttttaacagatcaagaaatagcttccttacaaattcaagaagctcagtctgataagaaacaaaaacgaacgcctgagcaaattgaggctatttacacttcaggaaccaatattttggtttctgcctctgctggttcaggaaaaacctttgtgatgattgagcggattatggataaaattctgcgtggtgtaacgattgatcagctttttatttccacctttaccgttaaggctgctggtgagcttaaggagcgtttagaaaagaaaatcaccgagcaattgcgtttgacaaatgacactgccctcaaacaatttctcagcgaacaactcttgggattgcagactgcggatattggaaccatggatgcctttacccaaaaattagtgacacagtacggctataccttgggaatttcaccgaattttcgaattttacaagataaaagcgagcaggatcttcttaaaaatgatgtctttgacgacctttttactgattacagaactggcgatcaagcagagcttttcactaagcttgttaggaattttgctggaaatcgaaaagattcgagcaattttagacaaatcatttacaaaatttatgatttcagtcaggcaaccgataatccccaaagatggcttttggagaatttcttaaagggagccaatacctataaggatttttcagctattcctgaacaagaagtgaaagactttttgaatactttgcaggaaactgctctcgctcttcgtgatgtgacggatttagaagattacaagcaagtaacggctaaaggaactccaacagcagcttatcaaaggcaccttaaaatgattgagcagctgcaggattgggtcttgcattttgacagtctatatgggcgagatggtctggggaaattagcaaatgacattgcaacactcattccatctggtaacgatgtgacagtagcaggagttaaatatcctgtctttcgcagtttgcacagtcgcttaagaggactaaaacacttggaaacaattttcaagtatcaggatcaaagtctgcctttgttgcaagtactgcaatcttttacacttgatttttcaaaacaatacctgcaagcaaagatgcaggaaaatgcctttgagttttcagacattgcacattttgctatccagattttagaagaaaatgatgctattcgtcagctttatatagataagtatcacgaagtcatggtagatgaatatcaggataataatcacacccaagagcgcatgttggaacttttatctaatgggcgcaatcgcttcatggtaggagatattaagcaatctatctatcggtttcgtcaggcagatccacagatttttaatcaaaaatttaaggattttcaagaacatccagagcatggaaaactcattctcttaaaagagaactttcggagtcagtcagaagtcttagatgctaccaatagtgtttttacgcatcttatggatgaagcggttggagaaattctctacgatgatacccatcagcttgtggctggcagttcagctcagaaaattccttatccgcaaaatgaaacacaagtcctcatctatgatacaaaggatcagcaaaatcaagatcttgctgtagaagatgatagtaatcaaatcagtctaggtgaggtcaaattggttgctaaggagattattcgccttcataatgaagaaaaggttcagtttgaagatattaccttgcttgtctcatcgcggacacgcaatgatggtatcttgcaaacatttgatgattatggcattcctttggtgactgatggtggtgaacaaaattatctgaaatcagtggaagttatggtcatgttggatactctgcgttctattgataatcctctcaatgattatgctctagtagctcttttgcgttcacctatgtttgcttttgatgaggatgacttggctcgtctagctctgcaaaatctaccagatcaacacaaacaaaatctttatgaaaagatggagaatgccagaaatggccaaggccagcaagttcagttgatcacagaagcattgtctgccaaattggatgctttctttgaaactttcctcagttggcgtgagtttagtctcttaaattcgctctatgatttgatttggaaaatttataatgataaattttactatgattatgtgggaagtttaccaaaatctgaacagcgccaagccaatctttatgctctagccctgcgtgccgataactttgagaaaacaggttttaaggggttgtcgcgcttcattcgcatgattgacaaaattctagaaaatcaaaatgacttggctgatgttgaagtcgctttacctaaaaatgcagtgacgctgatgacgattcataagagtaagggattggaatttaaatatgtctttattcttaatattgataaaaaatttagcattcaagatatgacatcacccttaattttatcgcggcaaaacggtgttggtatcaagtatattgctgatatgaaagaagaactagaggaaaaattattgccgacagttaaagtcagcatggatactcttccttatcaactgaataagcgtgagcttcgcctggcaaccctatctgaacaaatgcgattgctttatgttgccatgacacgatctgaaaagaaactttacttggtcggaaaaggcagtcaggaaaaattaggggatcagtatgatggcaaatcagaaaacaatcatttgccagtagctgatcgtgaacactatttgacttttcaggattggcttttggcgattgaagctgcttatgctgccgatgaacttcattttaaaacaagttttataacggatgaagacttaacagaagataaaatgggaagtttagaagcagagcaggcttatgatgcggataatcttaaggataatcggcaatcagatgatattacgcgtgctttagatatgttagaagcagttgaaaaattaaatcagcactataaggctgctatccatttaccaactgttcgtacgccaagtcagatcaaaaaattttatgagcctgttatggaaacagaaggtgtagaggtgatgcaaacttcctatcagactaaaccaaagtttgagctgcctcaattttcaaaaaaggcgaaacaagatccaacagctcttggttcaagtgttcatgaacttatgcagcggcttcatttgagtgaacaggttagtcttgaagatattttaactgctctggcagaactatctgtagaagaaaatgttaaaaaagctattcaggttgataagattttgcatttcttccagaccagccaactggggaaactcattcaagcaaatgctgacaaggtctatcgtgaagcaccctttgctatgctgcaagcggatcctgcaagcggagaagactatgtcgtgcgggggattattgacggttacattctttttgataatcggattgtcctctttgattataaaacagataaattcactaatagtcaagctattaaagagcgttaccgaggtcagatgacactttatgctcaagctttgagccaatcctataatatccaacaagtagacagttatttaattctattaggcggtgaaaaattagaagttgtggaaatt

SEQ ID NO: 35970 - DNA, 720 bp, Streptococcus mutans
atgagaattaataaatacattgcacacgcaggagtagccagtcgtcgaaaagcagaagaactcatcaagcaggggctggtcactcttaatggtcaaatggtgactgaattggctactactgttaaatcaggcgatcgtgtcgaagttgagggacaacctatctataatgaagaaaaagtttactatcttctcaataaaccacgcggagtgatttctagtgttagagatgataagggtcgtcaaacggttgttgatttattacctgaggttaaggagcgtatctatcctgttggtcgtttagattgggatacgtctgggcttcttattttaaccaatgatggtgattttacagataagatgcttcatccacggcatgaaattgataaggtctacgtggcgcgtgttaaaggacttgccagtaaggataatctgcgccctttgacaaaaggaatcgttattgatggcaaaaaaacacaacctgcccgctatcgtattgtcaagacggatagagaaaaaaatagatctgttgtggaactgactattcacgaaggacgcaaccatcaagttaaaaagatgtttgaagcagttggtttaatggttgataaattatcgcgtactcgttttggaacacttgatttatcgggtcttaatccgggagaggctaggcgccttaataaaaaagaaatcagccagctttacaatgctgctgttaatgaaaac

SEQ ID NO: 35971 - DNA, 3276 bp, Streptococcus mutans
ttgattaccaatgacttcaatctgatagaggcaattatgaaactactttacaccgacattcaatacaatatgatagatattttagctggggaagcgcagttggctgctaaggctggcaagcgagtcttttatattgctcccaactccttgtcttttgagaaggagcgagctgttttggagaccctgcctgagcgggcttcctttgctattaccattacgcgttttgagcaaatggcacgttattttgttttaaatgatattcatcagggcgaaaccattgatgataatggacttgttatggttttttatcgtgttttatccagtttttcagaccaagatttgcgagtttttgggcgtcttaagcaagatgctcattttatcaatcaattggtggatttgtataaggaactcaaggcttctaatctgactgtcttagaattaaatcagctaaattcggctgaaaagcaggaagatttgattaagatttttacagaggttgaaaccattttaagtgctggccattttgataatcaaagcaagattgccttctttgcacaacagatcaaattcggtcatttagatacggctttgcaggatttgacaattgttattgatggtttcacacgtttttctgctgaagaagaaaatctgataggactgttacatgaaaaaggtgttgacattatcattgggacttatattagtcaaaaagcttatcgttcaactttttcgaatgggaatgtctatcaggctagtcttgatttcattcgtggtttggctggtaaatttcaaaccaaaccagaatatgtggtatcaaagcaagaagctttgcctgcctttaccaaactttctcagctatttgaaagttgtcatgatttttcggacagtcagctggtcttgacagataaggacaaggaacatgtaactatctgggatgtcattaatcaaaaagaagaagtggaacatgttgctaagagcattcgccggaaactctatgaaggtcatcgttacaaggatattttggtccttcttggggatgcggatgcctataaactgcagattggcaagatttttgataagtatgaaattccctattattttggcaaagcggagtccatgagttcgcacccgctggttcattttgtggattctttggagcgggttaaacgttataattttcgtgctgaggatgtcatgaatctgctcaaatcaggcctatatggcaaaatcaggcaaaatcagttagataaattggagcagtatgtcatttatgctgatattaaaggaaaaacaaagttttttaaggactttacgctagataatcatgggcaatttgatctaaaagccttaaataaactgcgggcagaagtcatgtcacctttacaagagctgattaaaatacaggcccaaaagggagacagtatcctgcaaaaattgaccaactttttagaagccatttctttaacgaataatttttcaaaattaatccaaggtgtcagtgacactgagcaggaaaagaacgagcaagtttggaaaacttttacggttattttagagcaatttcatacgatttttggacaagaaaaaatgaagttggctgattttctggcactcttacgcagcggcatgctggcggctgattatcggacggttcctgccagtgttgatgttgtgacagttaagtcttatgatttggtggagccccatagcaataaatttgtttttgctctgggaatgacccagtctcattttcctaaaattgtccaaaataagagtcttatttcggatgaagaacgtgcaaaaatcaatgaagcaactcctgacaatcgtcgttttgatattgtcactaaggaaaatctcaagaaaaatcatttcaccgccctgtcactcttcaatgcggccactcaggaattggtcttaaccttgccgcagattttaaacgaggcagaggacaacacctcctcctatttgcttgaattgcaagatatgggtgtgccagttgtcgaaaaggggggcaatcgtttagctgcggatccagaagatattggcaattacaaggcgcttttgtcgcgtgtgattgagcttaaccgctctgctattgaccaagaattatctaaagaagagcagaccttttggtcagttgctgttcgctatttacgccaaaaattggcaaaagaaggacttacgattcctgaagtgaacgataagatgcagaccaagcaggtcgctgcagaggttatggcagcacgttttccaatagatcaacctttaaatctatcatcgtctgccctgacaactttttacaataaccagtatctctatttccttcaatatatccttggtttgcaagagcttgaaacgattcatcctgatgctagaaatcatgggacttatttgcaccgcgtgtttgaattggttatgcaagatcaatctactgatgattttgacagtaaattaaatcgtgccattgatataaccaaccatgaggatagctttcacttggtttataatgaagatgaggaaagtcgctatgctttgggtattttagaagatattgctcgtagtacagctaccgttttaaaaggggataatcctgttcaggcagaaagtgaagaagaagcctttgagttaatgctggatcaggctgttaaaatcagaggggttattgatcgcattgatcgcttgtcagatggcagtttaggaattgttgattataaatcaagtaaaaatacctttgatctgcaaaaattttacaatggactcagtccgcagttagtgacttatatagaagctcttcggtcttgtaaaaatttgaatgatacagataagatttttggagccatgtatcttcatatgcaggaacctaaaactgatttagccaatatgaaatccatcgaaaaaattccggaaacggttcataagaatttaagttataagggactctttttagaagatgaaaaagcacatttggctaatgggaaataccatttgcatgatgctgtctatagtcaaaaagaagttgatttgctgcttgattataataaaagactctatcgcagtgccgcaaagcaaatcagaaaaggaaactttctcattaacccctacagtcaggatggcaaatctgttcagggagaacagctgaaggctattacacattttgaagcagatcgccacatgccttatgctcgtaaactttatcagctgccacgcaaagaaaaacgtcagggtttcttggcgttaatgcagtctaaaaaagaggaggaaggtaatgacctt

SEQ ID NO: 35972 - DNA, 843 bp, Streptococcus mutans
atgagtaataatttattagtcttgcagtcagattttggcttggttgatggtgctgtatctgcgatgattggtgtcgctttgcaagaagccccaacactcggtattcacaatttaactcatgaaataactccttacaacatttttgaagcttcttatcgtctctttcagacagttgaatattggcctcaaggaactacctttgtctcagtggttgatccgggagttggctcagacaggaaaagcgttgtggccttaacgtcaagaaatcagtatattgtgacgcctgataatgggactttatcttatatcaagaagcatgttggtatcaaagctgttcgtgagatttcagaaattgagaatcgtcgtcgtaatacagaattatcctacacttttcatggacgtgatgtctatgcctttacaggagccaaattggctagtgatcatatttcttttgaagaagttggtccagaattagctattgagtctatagtagaattaccagtggttgaaaccgttattgaagataatcttgttcgtggtgccgttgatattctggatgttcgttttggttctttatggacgtctattacacgtgaagaattttacacgcttaagccagaattcaatgatcgctttgaagtaactatctacaataatgatatgctcgtttatcaaaatcaagtgacctatggcaaatcatttgcagctgttcggattggtcaacccattatttatatcaattctctctatcgtgtgggcgttgctattaaccaaggttcttttgctaatgcctacaatgtcggtgtcggacctcagtggcgtatcgaaatcaaaaaattaaat

SEQ ID NO: 35973 - DNA, 138 bp, Streptococcus mutans
ttgggacaaggtaagaaatcaatggcctacagcctgactttccaaaatcctaatgataatctcacagatgaagaagttgccaaatacatggaaaaaatcaccaaagccctaaccgaaaaaattggtgcagaagtgagg

SEQ ID NO: 35974 - DNA, 687 bp, Streptococcus mutans
atgcattttattcaaacctatttacccaatgcttatgagcttggtttgacaggagatgctggttggttaacagcaattctgaatacactttatatgactattgttccttttgttattggaggaggcgttggtctggtttttggtcttctcttagtattgatgggacctgaaggtgttattgaaaataaggttgtttgttggatcattgataaagtaacatctgttttccgcgccattccttttgttattttgattgctgtcttagcaccattaaccatgcttttgatgcaaacgaatttaggtgcgacagcagccttggttcctttatcttttgcgacttttcctttctttgcacggcaagtacaggttgtcttttctgaattggatcgcggtgttattgaggcagcacaagcttctggagctaccttttgggatattgtaaaggtctatctcagtgaaggttttccggatcttattcgtgtctcaacagtaaccttgatttctcttgttggtgaaacggctatggccggagcaatcggagctgggggacttgggaatgttgctatttcttacggctataatcgttttaataatgatgtcacttgggttgcaactttacttattcttttgcttatttttacaatccaatttattggagatacgctaactcgaaaagtaagtcatcgt

SEQ ID NO: 35975 - DNA, 1113 bp, Streptococcus mutans
atgagagattattcaccatatccgttattggttgatgtttgtgtaacaaatcgttgtaatttaagttgttcatattgttcagcagaagcaggcccttttgccagtaaaaaaggagagatgtctgttgagaagctggattctattttccgtgaattaaatttaatgggagttccgcgagtaggtgttactggaggtgaaccgtttattagagatgatatattagacatcttaaaggcttttgataaatatcattttgctaaagttttaaatactaatggtaacctcattacagattctgtagctaaggaattatctaaactgcatttggatagaatttgtgtgactgtggatggaagttgctctaaagttcatgatagccaaagaggtaaaggaagctttaaaaaggcaatagagggtattaaaaatttacaaaggtataatcttcctgtttctacactttttacattaggaaggcacaatgtagatgatttgattaacactattaggttaaacgatatgcttagaattaaatatatgtctgtaatgattatttgcccaacaggtagagctaataatggaagcattctagcagataagaaacattggtatcctgtatttttagatttaacagagagattgtctcgtggagaatttaaagtgaagtttaaaatagttcctccaaatgaaagtgatgtcttttggacacattatttcccactagctttttacaaccgattagatttacttgaaagtgtatggcatcaaagcctgaactttaatagtaacaagaaaagagaaatatcttgccaagctggagtaagagcttgttctatcaaccataaaggtgatgtttatggttgtgatttgatgaacggcattgatgaacttgtagcaggtaatgtaaaagaaaaatctttttatgaaatttggcataattcttctatatttcataaattgagaaatattacatttgacgatatttcggggaaatgtgctggttgccccttaccttggtgtggtggtggatgtagatgcagtgcactggagttagatggaactttgcttggatctgatttagcatgtttttatgatgaagaggaaagcgtattggta

SEQ ID NO: 35976 - DNA, 459 bp, Streptococcus mutans
atgattgcacaagaatttaaagattttctaaaaccacttttgaaagatgccctcactccggctgaggaattagctatttttattgatactcataagactgatcatgttatgctgctgttagctaataatggtttttcacgtgtccctgttctgactaaggataaaaaatatgtaggcactattagtatgtctgatattgttaaatatcaaaaagaagagggggtagataatgaaaagttagcagccctagacatttcttatatgactaacggtagttatgctactgtgagtcctaatgccgatctaacagaagtcatgcataaattagttgatgctaattttcttcctgttgttgaagcagatggtacttttttaggtattattacacgaaaaacaattttaaaagccttaaataacttgcttcatgaatttacaaatgactatacattgactaaaaaa

SEQ ID NO: 35977 - DNA, 2403 bp, Streptococcus mutans
atgttagtaagttataaatggttgaaagaattagttgatattgatgtacctagtcacgaattggctgaaaaaatgtcaacaacaggtattgaagttgaaggggtagacgttccagcagaaggactgtcaaaattagtcgtcggtcatgtcctttcttgtgaagatgttccagaaacgcatcttcatctttgtcaggtggatactggcgaggaagaatctcgtcaaatcgtttgtggagcaccaaatattacagctggcattaaagtaattgttgctcttccgggagctcgtattgcagataattataagattaaaaaagggaaaatccgcggtatggaatctctgggtatgatttgctctctgcaggagcttggtttgccggacagcattattcctaaggagtattcagatggcattcaaattttgcctgaagatgctgtgccgggtgaaagtatcttcccttatttggacttagatgatgaaatcattgagctgtctatcacacctaaccgtgcagatgctttatccatgcgcggtgtggctcatgaagtagcagcgatttatgataaatctgttcattttgaagataaagtcttgactgaaagtgataagaaagcagctgaccttatcaaggtagccatcgcttctgacaaggttttgacttacaaagcgcgtgtggttgaaaatgtaaccattaaaccaagtccacagtggttgcaaaatctgcttatgaatgctggcattcggcctattaataatgtggttgatgtgaccaattatgttcttctttattttggacagcctatgcatgcttttgatttagataagtttgaaggcaaggatattcttgcacgtcaggcaaaagctggtgagaaattagtaacacttgatggtgaagcgcgtgatttgattgaagaggatcttgtcattactgtagcagataaaccagtggcacttgcaggtgttatgggtggtgctgcaactgaaattgatgcctcttctaaaaatgttgtccttgaagcagccgtctttgatggaaaatcagttcgtaaaacaagcagccgtcttaatctgcgttccgaaagttcttcacgttttgaaaaaggtgttaattacgctgatgttgttaaggcacttgattttgctgcagcaatgctgacggaattggcagatggaacagttctcgctggtcaggtcagtgcaggagcagttccgacagatgatattcaagtatccactagtctggattatgtcaatgttcgcttaggtacagacttagttttctcagatattgaaagtgtttttgctcgccttggttttggtctttctggcaatgacgaaaaattcacggtttctgtaccgcgtcgccgttgggatattagcattcaggcggatttggtcgaagaaatcgctcgtatttatggttatgataaattaccgacaacactgcctgaagcagcaggaacagttggtgaattgaccaagacacagaaattacgtcgtaagataagaaatttggctgaaggtagtggtctttcagaaattatttcctatgccctgacaacgcctgaaaaggcagttgcttttacaccaaatcctactaaaataacagaattaatgtggccaatgaccgttgatcgctcagcattacgtcaaaatatcgtttctggaatgctagataccattgcctataatgtagcacgtaagagcaacaatctagccctatatgaaattggcaaagtatttgagcaaacagcggatcccaaaaaagatttgcctaaggaaatagatacttttgcctttgctctgacaggtttagtaactgaaaaagactttcagacagcagcaaccccagttgatttcttctatgctaaaggtgttctggaagctattcttgctaagcttgaaatcactgttcaatttgttgcgactaaagaaatggctaatatgcatcccggacgtacagctttgattgaacgtgatggtcaagttatcggttatcttggtcaagttcatccgcagactgctaaactgtacgatattccagaaacttatgtagcagaagtgaatcttaatgcactggaagcagctcttaaatcggatttagtctttgaagatatcactaaattcccagctgtttcgcgcgatattgccctgcttctttcagaaaaagtgagtcaccaagatattttggatgctattgcagccagcggtgtgaaacgtctgatcaaggtaaaactctttgatgtttatgccggtgaaaaactaggagtaggtaagaaatcaatggcctacagcctgactttccaaaatcctaatgataatctcacagatgaagaagttgccaaatacatggaaaaaatcacttcagccctaaccgaaaaagttggtgctgaagtgaga

SEQ ID NO: 35978 - DNA, 519 bp, Streptococcus mutans
atgtcacaggttgaaattagaaaagtcaatcaagatgagctttctttgcttcagaaaattgctattcagacttttcgtgaaacctttgcttttgataatacagcagagcagctgcaaaacttttttgacgaagcttatactttgtccgttttaaaattagaattagatgataaagaatcagaaacctattttattttgatgtccggtaaagcagcgggatttttgaaagtgaactggggcagctctcaaactgagcaggtactagaagatgcatttgaaattcaacgtctttatattttgaaagcttatcaaggtttaggtttaggaaaacagctttttgaatttgctttagaacgtgcgcaaatatcaggcttatcatgggtttggctgggcgtttgggaaaagaatgttaaggcccagttattgtatgctaaatatggatttgaacaattttctaagcattctttttttgttggtaacaaagtggatacggattggttgcttaaaaagtctttaagt

SEQ ID NO: 35979 - DNA, 1041 bp, Streptococcus mutans
atggatttacaagcacaattagaagagctgagaaaatcaactcaagcaacattaaaggaaatgagcggcaatcacagcaaagaattacaagatttgcgtgttaaggttttgggtaagaaaggttccttgacagaacttttaaaaggtctaaaggacttaccaaatgagttgcgtcctgttgttggaaaacaagtcaatgaagtccgtgatgtcttaacaaaggcttttgaagaacaagctaaaatcgttgaagccgccaaaattcaagcgcaattagaatcagaaacattagatgtcactcttccgggacgccaaatacatctaggcaatcgccatgttctcagtcagataagtgaagaaattgaagatatattcctaggaatgggttttcaagtggttgatggctatgaagttgaacaagactattacaatttcgaacgcatgaatttgcccaaagatcacccagcacgtgatatgcaggacacgttttatatttctgaagacattttgcttcggacacataccagtcctgtgcaggcacgtactttagataaacatgatttttctaaaggaccgcttaagatgatttcacccgggcgcgtttttcgccgcgatacagatgatgcgacgcattcccatcaattccatcaaattgaaggcttggttgttggtaaaaacatttctatgggtgacctcaaaggaacactggaaatgattagtaaaaaaatgtttggtgaagatcgtaagattcgtctgcgtccttcttatttcccatttacggagccttctgttgaagtcgatgtttcgtgtttcaaatgcggcggcaaaggctgtaatgtttgtaagaaaacaggttggattgaaattcttggtgccggtatggttcatccaagtgttcttgaaatgtctggcgttaattctgaagaatattctggttttgcctttggcttaggccaagaacgtatggctatgctgcgctatggaatcaatgatattcgaggtttctatcaaggtgacagccgttttacagaacaattcaat

SEQ ID NO: 35980 - DNA, 840 bp, Streptococcus mutans
atgaaacttaaaaaaatattaggtcttttaggattggctttagctgcggcatttgttttaacggcttgcggtcaaaaaaatgataaaaatacgttaactgttggtgtgatgaccatgactgattctgataaagaacgttgggataaaattgaggaactgcttaaaaaagaaaatatcaaacttaaatttaaagagtttacagattattcacagccgaataaagctttaaaaaacggtgaaattgacatcaattctttccagcattataatttcttgaataattggaacaaggaaaacaagggtgatttagttactgtagctgagacatatatcagtccgattaatcttttctcaggcacagaaaatggtaaagcaaaatacagtagtgctaaggaaattccaaatggtggtcaaattgctattcctaatgatgctactaacgaaagccgcgctctttacgttcttcaagatgctggcttaattaaattaaatgtttctggtgatgaattggctaccgttaaaaatattaagtcaaatcccaaaaatcttgatattaaagaagtagatgctagtcaaacagctcgtaatttagcatccgttgatgctgctgttgttaataacagttacgctgttccagcaaaaattgatttcaaaacttctctttataaagaaaaagtgaacgaaggctctaaacaatggattaatatcattgcagctcaaaagaattggaaaaaatcaaagaaggcagcagcgattaagaaattgattaaggcttatcatacagatgctgttaaaaaagttattaaaaagactgccaaaggcgttgatgaacctgtttgg

SEQ ID NO: 35981 - DNA, 975 bp, Streptococcus mutans
atgaaagaaaaaatttatgaatataaagatgatcataactggttcattagccaatggtctaaagtaggctcctcaacttactatgaggaagaggcagaagaaacttacagttctattgaacaaagtcttagaggtttacttgatgaaggcaattcgtttatactgacagttattaaaatcaactccaacatagctcttgtacgttttatcttaaaaatgcttaatgaagagcaacaagataattttaaagtcagcagtcataaaggagctattttagtgacacagggacaacagttgcttttagtttgtttgccaaaaaaaggcataactataaccgatttttttgaaaaggaaaaaaaggtttctgaattaggagatactattttaattgccacacgcaacgaaggtaaaaccaaggaattcagtcaaatgttcgctcaattaggaataaaagttgaaaatcttaatcaatatcctgatttgcccgaggtagaagaaaccggtctaacctttgaagaaaacgctcgtttgaaagcagagaccatttctcatttgacagggcagatggttttggcagatgattcagggttgaaggtagatgttttaggtggtttaccgggaatctggtcagctcgtttttcgggacttgatgcaacagatcaaagtaataatgctaaattactacatgaactcgctatggtttttgatatcaaggatcgttccgctcagtttcatacaactttggttgtagctgctccagataaggaaagccttgtggttgaagcagattggtctggatacattgattttgctcctaaagggaataatggttttggctatgatcctttgtttttagtgggagaaacagggaagaccgcagcagaactttcaaatcacgaaaaaaatattatttctcacagaggacaagctgttaagaagcttatggaggtatttccagcatggcagaacgcacat

SEQ ID NO: 35982 - DNA, 792 bp, Streptococcus mutans
atggataatagacctattggttttttagactccggagtgggcggtttaacggtcgtacgtgaattaatgcgtcagcttccacatgaagaggttatctatattggggattcagcgcgtgcaccttatggaccgcgtccagctaaacagataaagacatatacttgggaattggtcaactttctccttactaaaaaggttaaaatgattgtttttgcttgtaatacagcaacggctgttgtttgggaagaggtcaaagaaaaacttgatattcccgttttaggtgttattttaccaggttctagcgctgctattaaatcaactatttctggtcaaattggcattattgggacaccgatgaccatcaaatctaatatttatgagcaaaaaatacgagatctctcaccacaaatgaaagtaagaagcctagcttgccccaaatttgttcctattgttgaatcaaataaaatgaactcaagtgtagcgaaaaagattgtttatgaaagtctatctcctctggtggggaaaattgatactcttgttttaggctgtacccattatccacttttacggcccattattcaaaatgtaatgggaccagatgttgagttaattgatagtggtgcagaatgtgtacgtgatatttctgttctcctgaattactttgatcttaatcgcagcagaacttcaaaagtgctgcatcatcgtttctatacaacagctagtgtggccagttttaaagaaatagctagcgactggttacctttagctattgaagtggagcatgtaacatta

SEQ ID NO: 35983 - DNA, 2499 bp, Streptococcus mutans
atggtttactacaatcacaaagcaattgagaataaatggcaaaaattctgggaagataaccatacttttaagactggaacggcttcctcaaaaccaaaattttatgcccttgatatgtttccttatccatctggagctggcctacacgttggacaccctgagggctatacagcgacagatattctcagtcgtttcaaacgtgcgcaaggctacaatgtccttcaccctatgggctgggatgcttttggtttacctgctgagcaatatgctatggacacgggtcatgatcctgctgactttacagcgcaaaatattgcgacctttaaacgccaaattaaatcacttggtttctcttatgattgggaccgtgaaatcaacacgacagatcctaactactataaatggactcagtggatttttaccaaactttatgaaaaaggtctggcttatgaagctgaagtgcctgtcaactgggttgaagaactagggacagctattgcaaatgaagaggtgctgccagacggaacttctgaacgcggtggttatcctgttgtccgtaaacctatgcgccaatggatgttgaaaatcacagcttatgctgaacgtctcttagaagatttggaagatctggactggcctgagtcaatcaaagatatgcaacgcaactggattggtaaatcaactggtgccaatgtaactttcaaagtcaaggacacagatgaggaattcaccgttttcaccactcgtcctgatacactctttggtgctacttatgctgttcttgctcctgagcatgatttggtagatattattactactgctggccaagcgcaagcagttgctgattataaacatcaagccagtctcaaatcggacttagctcgtacagaccttgccaaagaaaagactggtgtttggacgggtgcctatgctatcaatcctgtcaatggcaaggagattccaatttggatagccgactacgtgcttgctagctacggaacaggtgctatcatggccgttccagctcatgacgaacgtgactgggaatttgctaaacagtttaatcttgatatcattcccgttcttgaaggtggaaatgtagcagaagcagcttatacagatgacggattgcatattaattctggtttcttaaacggccttgacaaggctgccgctattgacaagatggtgacttggcttgaaactgaaggtgtcggtaataagaaagtgacctatcgcttgcgtgactggctctttagccgccaacgatactggggtgagcctattccaattattcattgggaagatggaacgagtacagctcttcctgaaaatgaattgccacttgtcttaccagtaaccaaggacatcaaaccttcaggcacaggtgagtctccacttgccaacttgacagactggttggaagtgacgcgtgaagacggtgttaaaggtcgccgagaaaccaacactatgccgcagtgggcaggttctagctggtatttcctacgctatattgatccgcataatgaccaaaaattggccgatgaggatcttttgaaacaatggttgccagttgatgtttatgttggcggcgctgaacatgccgttctccacttgctttatgcacgtttttggcataagtttctctatgatcttggtgttgtaccaaccaaagaacctttccaaaaactctttaaccaagggatgattttgggaaccagctatcgcgatcatcgtggtgctttagtagcaacagataaagttgaaaaacgtgatggttctttcttcaacatcgaaacagacgaagagttggaacaagcaccggctaagatgtccaaatcactcaaaaacgttgtcaatcctgacgatgttgtcgaacaatatggtgctgatacccttcgtgtttacgaaatgttcatggggccgcttgatgcttccattgcttggtctgaagaaggtcttgaaggcagccgtaaatttcttgaccgtgtctaccgtcttatcacaacaaaagaaatagctgccaaaaacaatggacacttagacaaggtttataatgaagtggttaaaactgtaacagagcatcttgaagctatgcgctttaacacagctatttctcaattgatgatttttgtcaatgccgctaacaaggaagaacaactctttcttgattatgctaagggatttatccagttattggcaccatttgcaccgcatttagctgaagaactttggcaattcttaacgcagtctggacaatctattacttatgttgcttggccaagttatgatgaatccaaattggtcgaagacgaaatcgagattgtccttcaaatcaaaggaaaagttcgtgccaaggttgttgtttctaaggattccagccgtgaagatcttgaaaaaattgctcttgccaacgacaaaatccaagcagaagttgcaggaaaagatattgtaaaagttattgcagtgcctaacaaactggttaatatcgtgattaaa

SEQ ID NO: 35984 - DNA, 3534 bp, Streptococcus mutans
atgtttttaaaagaaattgaaatgcagggatttaaatcttttgctgataagaccaaggttgagttcgacagaggagtgacagccgttgttggaccaaatggttcaggaaagagtaatattacggagagtttacgctgggctttgggtgagtcaagtgccaagagcctgcgtggcggtaagatgccagacgtgatttttgcaggaactgaaaatcgaaagccactcaattacgctcaagtaacggttattttagataatagcgatgcctttatcaaagacgctcaagaggagattcgcattgaacgccatatttatcgtaatggggacagtgattatcttattgatggtaaaaaagtacgcctgcgcgatattcacgatttgtttatggatactggtttggggcgtgattccttttccattatttctcaaggacgtgtggaagagatttttaatagtaaaccagaagagcgtcgttcaatttttgaagaagcagccggtgtcttaaaatacaaaacacgtaaaaaagagacgcagtctaagctaacacagactcaggataatttggatcggctggatgatattatctatgaactggagacacagataaagcctttagaacgtcaggcaaaaacagccaaagaatttctggttttggaaacagaacgcaaggagaaacagttagacttgctggtctaccaaattctccatcataaggaagccttagtgaaaaaccaagctgagcttgaaaaagttaaacaaaatttagcagcctattatcaagaacgtgatctattagaaactaagaatcagactctaaaagaaaaaaggcaccagctttctcgtcaaatggatcaaaagcaggctgatctccttgaaatgacacgtctcattagtgattacgagcgtcagattgaacgcattcatttagaggtcagtcaaaagacagaaaagaagcaatctactcaaaaaagcctagaacaattgtcagagcaaaaggcttctcttaaaacagaattagctcaaaaagaagttgacttagaacaattagaagaggatcttaaacaaaaaaatcaagaaattaaaaatgtcgaaacggaattgtcacgttttgcaacagatcctgatcatattattgaaagtttacgagaagattttgttagactcatgcaaaaagaggctgatacttctaaccaattggctgttttaaaagcagaaatggatagtcgaaagcaagaatccgaaagtaaaacagcagaaatcaaacaagtacaagcagacttagagaaagcaaaagatcgagaacaaagggaatccgcaaactttgaaactgctaaaaccaaagttcaagaattgctaaaggactatcaaaaaacagcacagcttgttcagaatttagaagctgcttatgctgagcagcaagaggctatgtttcaattgttggatgatgtcaaagacaagaaagcacgccaaagcagtctgaagtccatcttaaaaagccatagtaatttctatgcaggtgttaggtctgttcttcagcaggctgataaaattaaaggtattgttggcgcggttagtgaacatttaacttttgataaaaaatatcaaaccgcacttgagattgccttaggtgccagcagtcaaaatattattgtcgaagatgaagcggcggccaaacgatctattgattttttaaagaagaaccatcaaggtcgagcaacttttcttcctttaacaaccattaaaccccgtcgtttatctgagtcaaatcaaagcctattaacttccagccagggctttctcggtttagcacgtgatttggtaagttttgagcctcgtttgcaaacaatttttggcaatttactgggtgtcacagcgatttttgatacggttggtcatgccaatcaggcagctcgccagttacgttatcaagtgcgtcttgtgacattagatggaacagagatccgtcccggagggtccttttcaggagggactagccgtcaaaataatacaacttttatcaagccagaactggatcatttgacacaagagctagcgcttttagaagaaaaacaagttgagcaggaaagaatagttgaaaagaccaagcaggacttggaagtgaaaaaagcagatcttttagaattaagggaaaaaggaaatcaagcccgattggctgagcaaaaggctgagatggagtatcaacaatcagagtctcatttacaagagctggtcttgctttatacccaattaaaacaaacaaatcaggcggatctcaatcgagacttagaaaaagaccaagcacttttacaagaaaagctgtataaaattgctgatgacaaggaaaagctcaatcaagagattgctcaaatcaaggaagataaagatagtattcagcaaaagacagctgctttaagtcaacgactctcttctttgcaactttctgagcgcgatttggctaatacacagaaatttgaaagaacgaatttaaaacgtttggcagaagaattagctgaattggagcaaaatgaagctggtatgatgcaacttttagatagccaagaagaggatttggatgaaaaacgtttaccatcactcaaacggcaattagcaaacgctcaggctagaaaaacagagagtgaccaagaacttgtccgctaccgttttgaactggaagactgtgaagcacagctagaagaggttgagaccaatctcctaaaaactaatcaaaagaatgaagagttcattcgtcagcaaacgcaattagaagcaaaaagggatcatttatccaatcaattgcgccgttttgccaataacttggctgaagattatcaactaagcttagatgatgctaaacaagaggcaggaccgattgaaaatctagaagctgctcaagctcatttaagccaattggaaaagcaaattaagggattgggaccggtcaaccttgacgcaatcggtcagtacgatgaagtgtctgagcgtttgcatttcttaaatagtcaaaaagatgaccttgttcacgctaaggaacttctcctgaatactattcatgatatggatgatgaggtcaaggcacgctttaagacgacttttgaagctattcgtgacagttttaagacgacctttacgcagatgtttggcggaggaagtgctgacttgcttttgacagaaggagatctcttgatgaccggtgttgaaatttcagtgcagccgcccggcaagaagattcaatctctcaatcttatgtctggtggtgaaaaggcactgtctgctttggcattgttatttgccatcattcgtgttaaaaccattccctttgttattttggatgaggttgaggctgctcttgacgaggccaatgtcaagcgttttggtgattatctgaatcgttttgataagtccagccagtttattgtggtcactcaccgtaaaggcaccatgtctgctgcagatagtatatatggggttaccatgcaggaatcaggtgtctctaagattatctctgttaagctaaaagaagtcgaaaagatatct

SEQ ID NO: 35985 - DNA, 534 bp, Streptococcus mutans
atggattcatttgataaaggatggtttgtgctgcaaacttattctggctatgaaaataaagtaaaggaaaatctgttgcaacgggcacaaacttataatatgttggataatattttacgcgtagaaattccaacacagactgttaatgtcgaaaaaaacggcaagactaaagaagttgaagaaaatcgcttcccaggctatgttttggtcgagatggttatgacagatgaggcttggtttgttgtgcgtaacacaccaaacgttactggttttgtcggctcacacggtaatcgttctaaaccaactccgcttcttgaagaagaaattcgttccattctcttgtctatgggacaaacagttgacattattgatactaacatcaaagaaggagatgtagtgcaaattattgatggtgcctttgtaggtcaagagggtcgtgttgttgaaattgaaaataataaggttaaaattatgattaatatgtttggagcagaaactcaagctgaacttgaactgtatcaaattgcagaacta

SEQ ID NO: 35986 - DNA, 1200 bp, Streptococcus mutans
ttgattactggccattatactgataaattaaaggttgaggataactctgacttgtcagaactagtgaataacgttaatgatttatcagaagttttccgtttaacgcatgaaaatttggcacaggagaaaaaccgtctgactagtattttatcttatatgacagatggtgttttggcaacagatcgcagcggaaagattaccgttattaatgatatggcgcaaaagcaactgaatgtaacgcgtgagcaggcattggagtgcaatattctggatattttggatgatgatagttatacttacaatgatttgattacaaaaacgccagaaattgttctgacgcggcgtgatgaatatgatgaatttatcactttacgcattcgttttgccttaaaccgccgtgaaagtggctttatttcaggactaattgctgtcttgcatgatgcgaccgaacaggaaaaagaagaacgtgaacgccgtctctttgtttctaatgtcagtcatgaactgcggacaccattaacctctgtaaagtcctatttagaagctttggacgatggtgccctgacagaatcagtggctcctagctttatcaaggtatcacttgatgagactaatcgcatgatgcgtatgattactgatttacttagcttatcacgtattgataatcagaccagtcatctagatgttgaattgacgaattttacagcttttatgaattatattctggatcgctttgatcaaattcaaagtcagcaatcaactaataaggtttacgaaattattagagattatcctgacaaatcagtttggattgaaattgataccgataaaatgactcaggtaattgataatattttaaataatgcaatcaaatattcacctgatggcggtaaggtgactataacgatgcagacaacagatacacaactcatcctttctatatccgaccaaggcttgggtattcctaagaaggatctccctcttatttttgaccgtttttatcgtgttgataaggcaagaagccgtgctcaaggtgggactggtttaggattagcaatcgccaaagaaattgtcaaacagcataaaggctttatttgggccaatagtgaggaaggcgaagggtcgacctttaccatcgttttaccttatgaaaacgataatgatgcaattgatgaatgggaagaagatgaagacgaatca

SEQ ID NO: 35987 - DNA, 654 bp, Streptococcus mutans
ttgattgaaggttggcatttatttgcagaagcacaagccaacaatgctgatattattaatatttttgtcctagagtgttatgcttctagagtatctgagtttcccaatgttgttctagtatcagaggatattttaaaagacttatctgcttcaaagactcctcaaggtattgttgctgaaatagcttttcctaagcaagtaattcctcagcagttctttggaaaatatctgcttttggaagacgttcaagatccaggaaatgtaggaacaatcattcggacagcagatgcagcagcttttgatgctgtttttgtgtcagaaaagacagcagatatttataattccaagactcttcgttcaatgcagggtagccattttcatcttcctatttatagagtcaatcttttatctttagtgaatgatttaaaaaatgcagatgttactaccattgcgaccacactatctgatcattcctgtgactataagtctttaaaaaaggttgaaaattttgcgcttattatgggaaatgaagggcaaggcattacttcagaaatgactgaacaagcagatgttttgacccatatcactatgcctggaagagcagaaagcttaaatgtagcagctgctgcagctatatttatttttagcttaatt

SEQ ID NO: 35988 - DNA, 705 bp, Streptococcus mutans
atgaagaaaattctaatcgttgacgatgaaaaaccaatttctgatatcatcaagtttaacttggctaaggaaggttatgacacgattacagcctttgatgggcgtgaagcattaagtaaatatgaagaagaaaatcctgacttgattatattggacttaatgttaccagaactagacggtcttgaagtggctaaggaagttagaaaaaacagccatgttccaattattatgttatcagctaaagacagtgagtttgataaggttattggtcttgaaattggtgctgatgattatgtgactaaacctttttctaatcgtgaattactggcgcgtgtaaaagcgcatcttcgccgtactgaaaatattgaatccgcagtggctgaggaaaatgcttcaggtatacctgaaattattattggggacttgcaaatcttaccagatgcttttgttgctaaaaaacgtggaacagaggtagagttaactcaccgtgagtttgagttgttgcatcacttagcgacacacacaggtcaggtgatgacgcgtgaacatttacttgaaacggtttggggctatgattattttggagatgtccgtactgttgatgttactgttcgtcgtctgcgtgaaaaaattgaagatacacctagtcgtccagagtacattttgacgcgacgcggtgttggttattacatgaaatcatatgac

SEQ ID NO: 35989 - DNA, 1626 bp, Streptococcus mutans
atggcaaaagatattaaattttcagcagatgcaagaagcagtatggtgcgtggtgttgatattttagcagatacagttaaggtaaccttaggccctaaaggacgcaatgttgttcttgaaaagtcgtttggttcaccgctcattactaatgatggtgtgaccatcgctaaagaaattgaattagaagatcactttgaaaatatgggagctaaactagtttcagaagttgcttctaaaactaatgatattgccggtgatgggacaacgacagcgactgtgttaactcaggctattgttcgtgaaggtttgaaaaatgtgactgctggagctaacccaatcggtattcgtcgaggaatcgaaacagcagttgcaacagcagttgatgagttgaaagctattgcacagcctgtttctggcaaagaagctattgcacaggttgcagccgtttcatcacgttctgaaaaagttggggaatacgtttctgaagctatggaaaaagttggtaacgatggtgttatcactattgaagaatctcgtggtatggaaacagagcttgatgttgttgaaggaatgcaatttgatcgcggctacctttcccaatatatggtaactgacaatgaaaaaatggtggcagatcttgaaaatccttatttgttaattacagataagaaaatttcaaatattcaagatgttcttccgcttctagaagaagttcttaagacaaaccgtcctcttttaattattgcggatgatgtagatggtgaagctctcccaacgcttgttttgaataagattcgtggtactttcaatgttgtcgcagtcaaagctcctggttttggtgatcgtcgcaaggctatgcttgaagatattgctgttttaacagggggtactgttattactgaagatcttggtctagaattgaaagatacgactattgatgcgttgggtcaagcagctcgtgtgactgttgataaagattcaactgttattgttgaaggttctggcggtaaggaagctgttgctaatcgtgtcaatctcattaagtctcaaattgaaacagcaacttcagactttgatcgtgaaaaattacaagaacgtttggctaaattatctggaggtgttgccgtcatcaaagttggcgcagcaacagaaacagaattgaaagaaatgaaacttcgcattgaagatgctcttaatgctactcgagcagctgtagaagaaggaattgttgcaggtggtggaacggcacttatcaatgttattgaaaaagtagcagcacttgatttaacagatgatgctgcaacaggtcgcaatcttgttctgcgtgctcttgaagagcctgtccgtcaaattgctaaaaatgctggttatgaaggatctgtcattattgataaattgaagaacagttcagcaggtacaggtttcaatgctgctaacggggaatgggttgacatgattgatgctggtattattgatcctgtcaaggtaactcgttcagcccttcaaaatgcagcatctgtagctagtctcattttaacaacagaagccgttgtggcggatcatccagctccagaagcaccagcagcagctcccgctatggatccaagcatgatgggtggtatgatg

SEQ ID NO: 35990 - DNA, 930 bp, Streptococcus mutans
gtgaaaaaaatttacaagcgtcttttattttcgggcttagctctgtctatgctttttttcctatctggttgcgtgcagatgaaaaatggaaaaccaactggtgaaggttgggtttacaaattttttgctgccccaatgggaagtgttatccaatatttagctaataatcttggtctgggatttggctttgctattatcattgtcacagttattgtccgtcttctcatcttgccattaggtcttagtcaagtacgaaagatgacttaccaatctgagaaaatggcttatctaaaaccagtctttgatcctattcaagaacgcatgaagaatgccaaaactcaggaagaaaaaatggctgctcaaacagaattaatgcaggcgcagcgtcattacggtatgagcatgtttggtggtttaggatgtctaccgctgctgatccagatgcctttcttctctgcactttatatttctacccgttacaccaagggaatcgccagtgctagtttcttaggtattaaacttggcagtccaaatatgatcatcactgttattattggaattctttatcttgttcagtcttgggtttcaacgctaagtgttccagaagcacaaagacagcaaacaagaaatatgatgtttatgatgccaattatgatggttatgatttccataggtgctcctgctggaggtgctctttactggctagtcagtggtatttttggtctcatccaacaattgatcacaaaccatatcattaaaccaaaattgcggaagcaaattgatgaagaatttaagaaaaaccctccaaaacctttcaaatcaaatgctcgtaaagatatcactccacaagccaataatgataaaaagcttataacctctaaaaagcaaaagtccaaccgcaatgcaggtaaacagcgtcaccataagcaa

SEQ ID NO: 35991 - DNA, 1269 bp, Streptococcus mutans
gtggatagaataattattgaaggcggaaatacacaacttaaaggggaagtcgttattgaaggggctaaaaatgccgttcttccgctattggcagcggctattttaccgacagaagggcaaacgcttctgaagaatgtacctattttgtctgatgtttttaccatgaacaatgttgtacgtggtttaaatgttgcagtcgattttgatgaagaaaggaaccaaatactggtagatgcaacaggtgatattttagatgtggctccttatgaatatgtcagtcaaatgcgagcatctatcgttgttttgggacctattttagcacgaaatggtcatgctaaggtttctatgcccggaggctgtacaattggcagtcgccccattgatttgcatttaaaaggcttagaagctatgggagcaaagattcaacagacaggtggtgatattacagccactgccgatcgtttaaagggtgctaacatttacatggattttccaagtgttggcgcgactcagaatcttatgatggctgctactttagctgatggaacaacgattatcgaaaatgcagcacgtgaaccagaaatcgttgacttggctaatcttctaaataagatgggtgccagagtcattggtgcaggaactgaaaccttgaccattataggtgttgataaaatgcacggtactgaccacagtgttgttcaagatcgtattgaagcaggaaccttcatggttgcagcggctatgaccaatggaaatgtcttggttaagaatgctgtgtgggaacacaatcgtcctcttatttctaaattaagagaaatgggcgtccaagtcactgaagaagaaagaggaattcgagtgatatctgatgtgaccaaactcagacctgtaacggttaaaaccatgccccatcccggttttccaacggatatgcaagcgcagtttacagcactgatggcagtcgttaagggtgaatcaacaatgatcgagacagtttttgagaatcgttttcaacatttagaagaaatgcggcggatggggctcacttcagaaattttacgtgatacagccatgattcatggtggcgaacaactgcaaggtgcccaagttatgtcaactgatttgcgagctagtgctgcccttatcttaacaggtatggtggctgatggtaagacaactgttggtaagttaaatcatttagatcgtggttattatcaatttcacgaaaagctgactaagcttggtgcaacaattagccgtgttaatggagaa

SEQ ID NO: 35992 - DNA, 1320 bp, Streptococcus mutans
atgaatagttataagtatttaaaatacagtcaatatgctaagcaggctttaatttttattaattttttggcagttacttattatgtttttgtttatctttttgctagcaaatatattgtggctaaaaatttaagtcatgttcttttggataaactagatattgtccctatagcccctgaaaatatcttttttacaacactcttcttttttgccatttttctcattgtcatgttttatagagaaagtattcttaataaaaaggaagagattaatgattggttgattgttgcagaaattgtcttaatgattcttacctttatttccttgcaattttcttacaatgggctgttcctcctcgtttttgcagatattttttatagttatgctaatttttataatgttaaggagcaaaaatattggcttcttttcatcattctaggctttagtatgcttttgatctcaaatttcgatcttttatctctggtgatgagactaccttctttagatgtttacattagcttttttcctagtggcagtcgtctgattgttatgtttattaaaaactttctttactcgctcaatatcattgtttttctaatttctttagtggcttatatcatgtattcagtagctgaaaatcataagatagaagaagagctgaggatggctgcacgtgctaatattgaactaaatgattatgtttctttggctgagaaaatcgctgaggataaagagcgtaagaggattgccagagaaattcatgataccttggggcatgctttaacgggtatttcagcaggaattgacgcagttactgtgttagttgattttgatcctaatcatgctaagagtcaactaaaaaatgtgtcagatgttgttagagaaggtattcaagatgttagaaggtctttagaaaaaatgaggccaggggcccttgaaaagggaagccttaaagaggctttattaaaaatgattgcagattatgaaaaattatccaagctacaggtcagtctgcattatgattgggataacattgatttagacattactaaggaagatattattttccgtgttattcaagagactattaccaattcccttagacatgggcatgcccgtcatgtcagtatcgatatgctcaatgaggatttctatattattaagattaaggacgatggtattggctgtgaggattttaaattggggtatggtttaacacaaatgcaagaacggttagctattattggaggctatgcggactttgaaagtgatgatggttttcaaacaatggtaagaatacctaagaaaaaaggagaagaa

SEQ ID NO: 35993 - DNA, 942 bp, Streptococcus mutans
gtgaagtctctagcctgcctttttgttgtgctaattatttcaagtctgtttttttattataaagaggaacctgtttttccaaggcaaactaagattggtgctacttatatgacaatgaataatgatttttataagtatctcaatgctgaagtggaaaaaaatgttaatgagcaacacgatttactttatacgcgggatccggctcttagtattaaaaaacaggttgaacaaattcggttttttattaaggagagagttgatgttatcattattaatccagttgatggtaatagcaaactcttgattaatagtcttaaaagagctagaaagcaaggtattaaagttattgcagtagatagtcagtttaaagataattctgctattaacacgaccattgtctcagataattataaggcgggtgtactgtgtgctcaagaaatgatacgaaaacaaaaaggtgctaaaattcttcttttagagcatcgtaatgctttatctgctacaagtaggatacaaggctttcttgataccattaaaacgcataaggactatcaggttgttgcacgaattgatagtttaggacagacagaaattgccatgcctaaagtaaaaaaacttattgaaaatggtttaacatttgatactgtcatggcgctcaatgatagagcagccataggtgctttagcagcagtaaaaggtgaaaaattaccaactaatccttatatttatggtattgatggttcaccagatatgaaaaatctgctttcagccacttcagaagtgcaagcaacggtagctcaatcaccttatactatgggacaggaagttacaaaggcaagtcttaaattatctaagaatcagacttatcctaagagaattgttgtgcccgttgaattaataacaaagaaaacaatcgggaagtatgatttaacagggtggcag

SEQ ID NO: 35994 - DNA, 624 bp, Streptococcus mutans
atgatttttacatataataaagaacacgttggagatgtccttatggttattgttaaagatagtaagggcgcaaagttaaactgtgaacgcaagggtaaggtgactcgtatttttcttgaaaaaaataaggagacagtggcttggaatatttttgcggtatcaaatttgcttgatcttaatggcaatggacaggtatttttgacagatgaagagctggcggttttaaatgctgaacttgccaaagaaggttttgaagaaaaattagaaaataatgccgcagctaagtttgttgttggtgaaattgtagaaatggttgctcatccagatagtgatcatcttaatatttgtcaagttaagattgctgaggacaagactgtccaaattgttgctggtgcaccaaatgccagagtaggattgaaaaccattgttgctctgccaggtgccatgatgccaagcggtggcctcatttttccaggcaacttacgtggcgaaaagagctttggcatgttgtgttctcctcgcgagttagctttgcctaaagctcctcaaaagcgtggaattattgaattaagtacagatgctgttataggccaagcttttgatgctgggaaacattggaaaggg

SEQ ID NO: 35995 - DNA, 1329 bp, Streptococcus mutans
atgtctaaaaccattcactttattggaatcaaaggctcaggaatgagtgccttggcgctgctgcttcatcaaatggggtataaggtacaaggaagtgatgtggataagtattattttacccaacacggattggaaaaagcaggaattcccattctaccttttgcggagtccaatatcactaatgatatggaaattattgctggaaatgcttttagaaaagataataatattgaagtagcctatgctctcgaaaatggttaccattttaaacgttaccatgaatttttaggtgaatttatgaatcaatttaccagtcttggcgttgccggagcccatggtaagacctccacaactggacttttagctcatgtcttgaaaaatatcacggataccagttatcttattggtgatggcacgggacgtggtttagctaatagtcaatattttgtttttgaatcagatgagtatgagcggcattttatgccctatcatcccgaatactccatcattactaatattgattttgatcatcctgattatttcactggtgttgatgatgtttttgctgcttttaatgattatgcgaaacaagtcaaaaaaggtctttttgtttacggtgaagatccttatttacgcaaactgacgtcttcagctccaatttattattatggtttcaaagataatgatgattttgttgcttatgatatcatgcgctcaacgaatggttctgatttcaaagtaaggcatggacaaaatgaactaggaagctttcatgtaccagcctttggtcgtcacaatgttttaaatgcgacggctgttattgctaatttgtatattgctggtgttgagatggatttggttcgtcagcatttaaaaactttttcaggtgttaagcggcgcttttctgaaaaattaattaatgatgttaccatcattgacgactttgctcatcatccaacggaaatcattgcaacacttgatgctgctcgtcagaaatatccctctaaagaaattgtcgccatttttcaaccgcatacttttactaggacaattgcccttttggatgaatttgcacaagctttaaatgaagccgatagtgtttatttagcacaaatttacggctctgcacgtgaagttgatcatggagatgtgaaagtagaagatttagcagataaaattgttaaacctgctaaagttatcactgttgacaatgtctctcctcttttagatcatcataatgctgtctatgtctttatgggggctggtgatattcaactttatgaacgttcatttgaagaattattatccaatttaactaagaatacaaga

SEQ ID NO: 35996 - DNA, 768 bp, Streptococcus mutans
atgagtgatgtatcaagaatactcaaggaagctcgtagtcaatcgcgtttgacaactttggattatgcagagcaaatttttgatgattttatggaactacatggagatcgtcattttgcagatgatggcgctattgttggaggtattggccttttggatggtcaagcagtaaccgtcattggcgttcaaaaaggaaagaatttacaggataatcttaatcgtaatttcggccaacccaatccagagggttatcggaaagctttgcgactgatgaaacaagcggaaaaatttaaaagaccggttgtcacttttatcaacacagcaggagcttatccgggtattggagctgaagagcgcggtcaaggagaagcgattgccagaaatttgctagaaatgagtgatcttaaagttccgattattgctattatcattggtgaaggaggctcaggtggagcactagctttagcggttgctgataaggtttggatgcttgagcatacgatgtatgcagtacttagtccagaaggttttgcttctattctctggaaggacggcagccgctcaattgaagccgctgaactaatgaaaattacagctggtgaattgctcaaaatggaggttgttgacaaggtaattcctgaacatggctatttttcaagtgaaattattcaaatgctcaagaccaatttaattgaagaattaaagaatttggatcaatatcctttgaacgatttacttgaaaaacgttaccaacgttttagaaagtat

SEQ ID NO: 35997 - DNA, 864 bp, Streptococcus mutans
atggctttatttgaaagaaaaaacaagtatattcgcataaatcctcaacgctcgatgaaaaagacaaaggagcgggagactcctgaagttccggatgaattatttgctaaatgtcctgcttgtaaacacatgatctatcaaaaagatttgggtctagaaaaaatttgccctaaatgtttttataattttcgtatttcagctaaagaacgattagctattacagttgatggagactcttttcaagaaatgtttacaggcattaaaagcaaggatccgcttaattttcctgcttatcaggaaaagttagcagcaacccaatctaagacagggcttgatgaggctgttgtaacaggaactgctgagtttacaggacaaaaagcagcgctggctattatggattccaattttatcatggcttcaatggggactgttgttggtgaaaaaattacgcgcctttttgagtatgccagagaagaacgattacctgttgtcattttcacggcttcaggaggagctcgtatgcaagaaggtatcatgagcttgatgcagatggctaaaatttctgctgctgtaaagcgacattctaatgctggacttttttatctcaccgtattgaccgaccctacaacgggtggtgtcacagcgagttttgctatggagggcgatattattttagcagaacctcagaccttaattggcttcgctggacgccgtgtcattgagacaactgttcgtgaaaccttgcccgaaggatttcaaaaggcagaatttcttttggaacatggttttgttgatgccattgttaaaagaacagaattaaagaaaacaattgctaagctgctcgcatttcatggaggtagcaaa

SEQ ID NO: 35998 - DNA, 1353 bp, Streptococcus mutans
ttgattgccaatcgtggtgaaatcgctgtgcgtatcattcgagcagccagagaattaggaattgtgactgttgcagtttattcagaagcagataaagaatcgcttcacaccctcttagcagatgaggctgtatgtgttggaccggctaaatcaacggattcttaccttaatatgaatgctattttatcagcagctattgtaactggagctgaagctattcatccaggttttggttttttaagtgaaaattctaaatttgcaactatgtgtgaagagatgcgtattaagtttattggtccatctgcatctgttatggacaaaatgggtgataaaattaatgcacgttctgaaatgcttaaagccaaggttcctgttattccagggtcagatggggaagtttttactgcccaagaagcattagaaattgcccaagatattggctatcctgttatgctgaaagcttctgctggtggtggtggtaagggcatccgtaaggttgataaaaaggaagatctaacagcagcttttgagtcagcctctcaagaggctctatcagcttttggcaatggcgctatgtatctggaaaaagtcatttatcccgctcgccatatagaagttcaaatactgggggactcttttggcaatattattcatcttggtgaacgtgattgttcattgcaacgtaataatcaaaaggtcttagaagaaagcccttctatagctattgggaaaacacttcgtggtaaaatgggtgatgcagcagttcgtgccgctaaagcggttgcttatgaaaatgccggaacaattgaatttctcttggatgaggcttcagggcaattctattttatggaaatgaacacacgtgttcaggtcgaacatcctgtaacagaatttgtgactggtattgatatcgttaaagaacagattaaaattgctgctggtcaagaattgacttatcaacaaaaagatattgttatttcagggcatgctattgaatgtcggattaatgcagaaaatcctaaatttaatttcgcacctagcccaggtaaagttgaagatctctttttaccaagtggtggcgttggtttacgtgttgatagtgctatgtacaataactatactattccgccttattatgacagtatgattgccaaaatcattgttcatggagaaaaccgctttgatgctttaatgaaaatgcagcgtgctctgtatgaatttgaagtaactggtgtggttacgaatgcagagtttcaactggacttaatttctaatccaaatgttattgctggtgattatgatacttcttttttgatggaaacttttttacccgcttatgctaatgataaagaa

SEQ ID NO: 35999 - DNA, 420 bp, Streptococcus mutans
atgattgacattagcaaaattcgtgaagctcttcctcatcgttatccaatattattggttgatcgtgttcttgaagttagtgatgatgaaattgttgccattaagaatgtaaccattaatgaaccttttttcaatggtcattttccccaatatcctgttatgccgggtgttctgattatggaagcattggcacaaacagcaggtgttctggaattatcaaaaaaagagaatacagggaaacttgtcttttatgcaggtatggataaggtgaaatttaaaaaacaagttgttcctggagatcaacttgttatgacggctaagtttgttaagcgtcgtggaacaattgcagtagttgaagctaaggcagaagtagatgggaaattggctgcaagtggtaccttaacttttgccattggaaat

SEQ ID NO: 36000 - DNA, 486 bp, Streptococcus mutans
ttgaatatttcagaaattaaagatttgatggcacaatttgatacgtcaagtctgagagaattttcttataagaatgggacagatgaattgtctttttcaaaaaataggcagggctctatcagttcagtccaaacagtccccgttcctgctgctaattcagtttcgactgttgcatcggtagacgctgaagcggtaccagctatctctaaaaatgaagaaagcacagtggcagctccagtagctgaaacagctgaaggggaaattgttgaaagtccgcttgttggtgtagcttatttagcctcagctcctgataagccagcttttatttcagttggcgacagtgttaaaaaaggacagactttacttatcattgaagctatgaaggttatgaatgaagttccagcaccaaaagatggcgttgtcactgagatcttagtggctaatgaggaagtcgttgaatttggaaagggattggtacgtatcaaa

SEQ ID NO: 36001 - DNA, 951 bp, Streptococcus mutans
atggattttgaaaaaatagaagctgcctataacttactgttagataattgtcaaaggctggaaactcaacttcatactcacctttatgatgccttaattgagcaaaatgcttgctatctaggtgctgaaggtgctgatgattttattaaagaaaataataaaaaactgcgtcagcttaatctaagtaaagaggagtggcgtcgtagttttcaatttatttttattaaggctactcaaagtcagcaattacagtcaaatcaccaatttacaccagatagtattggttttattattctttatttattggaaggtttaacaaataagagtcagttagacatcattgaaattggttctgggacaggaaatcttgcagagactattgtgaataacagttcaaaaagcattgattatatggggattgaggttgacgatctgttaattgatttatcagcaagtattgccgatgtattggattcttctgtgcattttgttcaagaagatgcagtgcggcctcagattttaaaagaaagtgatatcattatcagtgatctgccagttggcttttatcccaatgataaaattgctcagcgttatcaggttgcagccaagttaggacatacttatgcacatcatcttttgatggagcaatcgcttaagtatttaaaaaaagagggacttgctatttttttagcgccagtggatcttttaactagtgagcagagtcctttgcttaaaaagtggttacagaacaatgtaactattttagccgttatttctttacctgaggcaatttttaaacagaaaagtaatataaagtcaatctttgtcttaaagaaacaatcgcaacaaagtttggaaagttttgtctatcctttgacagatttacaagaccccgaagttttaagacgatttatgaaaaattttaaaaagtggaaggaagataatgtcttt

SEQ ID NO: 36002 - DNA, 1230 bp, Streptococcus mutans
atgacattaaaaagagttgtagtgacaggttacggcgtaacatcgccaatcggacatacaccagaagatttttggaatagtcttcatgatggtaaaatcggtattaaaccaattactaagtttgatgcttcagaaattcctgttttcaatgcaggcgaaattcaagattttccatttgataaatactttgttaaaaaagataaaaatcgtatggatacttactctctttatgccatttatgcagccatggaagctattgaaaatgctgcacttgacatggcacaagaaattcgtgatcgtgttggtgttattgtatcctcaggtattggtggtttacaagaattagaagatcaaatcattcgtatgcatgagcgtggcatgaaacgcattaaaccaatgtttatccctaaagctctgtctaacatgggagctggaaatattgccctcaagattggcgcacaaggagtctgcaaatctattactacagcttgtgcttcagctaatgatgctattggtgaagctttccgtgaaattaaatacggttttcatgatgtgattcttgcaggtggttcagaagcatccattactaagattggtattggtggtttcaacgctttgactgctctttctacaacagaggatccagcgcgttcagctattccatttgataaagatcgcaatggttttgtcatgggtgaaggtgctgccgttcttattctggaaagtcttgaacatgctcaaaaacgtggggctaggattttggcagaggttgttggttatggaagtaactgtgatgcctaccatatgacaacaccgactcctgatggttcgggtgctgctaaggctattaaattagcaattaatgaagcaggtatctcaccagaggaagtcaattatgttaatgctcatggtacatcaacacaggccaatgaaaaaggagaaagcaaggcaatcgttgctgttttaggtaaagatgtacctgtctcttctacaaaatcattcacaggccatcttcttggtgctgctggcggtgttgaggctattgccactattgaagcaattcgtaatcattttgtacctatgacagctggcactaaggaactttcagaagatattgaagcgaatgttgtttatggtcaaggtcaagaagcagttatcaaatatgctatctcaaatacctttggatttggcggacacaatgccgttcttgcctttaagcgttgggaggat

SEQ ID NO: 36003 - DNA, 732 bp, Streptococcus mutans
atggaaatcaaaaataaaaatgtttttatcacaggttcaactcgtggtattggtctagctattgctcataaatttgctcaggcgggagctaatattgtattaaatggtcgctcagaaatttctcaggacctagtagctgaatttaaagattatggtgtcaaagtagcgacaatttcaggtgatgtctctcattttgaagatgctaaacgtatggttgatgaagctactgaagcattgggaagcgttgatatcttggttaataatgctggaattactaatgataagctgatgttgaagatgacagaagaggactttgaaagggttcttaagatcaatttgacaggtagctttaacatgactaaagctgttttgaaaccaatgaccaaagctcgccaaggtgctatcattaatatgtctagtgttgttggacttgctggaaacgttggtcaggctaattacgcagcttctaaagctggtttgattggctttaccaaggcagttgctcgtgaagttgcggctagaaatatacgtgttaacgctattgcaccaggttttattgaatctgatatgactgaacgtattccaaataagatgaaagacgctatgttaaatcaaattccaatgaaaacatttggaaagactgaaaatgttgctgaagttgctatgtttttagctcaacaagattatctgacaggtcaagttattgctattgatggcggcatgaccatgcaa

SEQ ID NO: 36004 - DNA, 918 bp, Streptococcus mutans
atgacaaaaacagcatttttatttgctggccaaggagctcaaaaacttggtatggcaagtgatttgtatgaaatttacccagttgtcaaagagacttttaaaaccgctcattcaattttgggatatgatgttcgtgctttgattgataatgatgaagaaaagctaaatcaaacacgttatgcacagccagcgattttaacaacttcagtagctatttatcgtcttttgaaagaaaaaggttatcaaccagacattgttgctggactgtcactaggagaatactctgctcttgttgcagccggtgccatttcatttgaagatgccttagccttggttgccaaacgtggtgaatttatggaaacagcagcacccgctggagtggggaaaatggttgctgttatgaatactgaccctaggctcattgaagagatttgtcagaaagccagctctaaaggcattgttagtccagctaattataatactcctacacaaattgttattggtggtgaagtagcagctgttgattatgctgtggaacttttaaagggagctggtagtaaacgtttgatttctcttaaagtttctggtccctttcatacggctcttttgaaatctgctagtcaaaaattggctcaagctttggaaaatattaaattttcagatttcatgcttccactagtggggaacactaaagctgaaattatgaaggaacaggagattaaacctttgcttgctcgtcaagtcaaagaacctgttcgcttctatgaatctattgctgtaatgcaaaaatttggtgtgaataactatgtcgaaattggacctggtaaggtcttgagtggttttgtgaaaaagattgataaatctgcaaagatctcagctgttgaagacttagctagtttgcaggctttcttagataac

SEQ ID NO: 36005 - DNA, 963 bp, Streptococcus mutans
atgaaaacgcgtattacagaattattagatattgaatatcctatttttcaaggaggaatggcttgggtagctgatggtgatttagcgggagctgtatcaaaagctggcggtttaggaattatcggtggtggaaatgcgcccaaagaagttgttaaggcgaatattgacaagatcaaagctgtgacaaataaaccatttggagtcaatattatgcttttatctccttttgctgatgatattgttgacttggttattgaagaaggtgtcaaagttgtcacaactggtgcaggtaacccaggtaaatatatagaacgtttccatgaagcaggtattactgtcattcctgttgttcctagtgttgctcttgctagacgtatggaaaaattaggtgctgatgccgttattgctgaaggaatggaagcaggtggacatattggtaaattaacaacaatgactttagtgcgtcaagttgtagatgccgtcaacattcctgttatcggagctggtggtgtagccgatggtcgtggtgcagcggcagtatttatgcttggtgctgaagccattcaggtaggaacacgttttgcagttgccaaagaatcgaatgcccatgcgaattttaaaaagaaaattttaaaagccaaagatattgatactgttatttccgcgtctattgttggtcatcctgtacgtgcaatcaaaaataaattatcttctgcctatgcaactgcagaaaaagaattcttgcgtggtgaaaagagtcaagaagatattgaagttcttggtgctggagctctccgcaatgctgttgttgacggtgatgttgataatggttctgttatggcaggtcaaattgcaggatttgttactaaagaagaaacttgtgaagaaattttgaaagatttatattatggtgcagcaaaagtcattaaggctgaagcagcacgctgggcagacgtggagaaa

SEQ ID NO: 36006 - DNA, 939 bp, Streptococcus mutans
atggttcaaaaattaggtagaaaaatcattgccgaagctgttcaaaataaagcacaagatatctatattattcctaaaaaagaatcttatgagctttatatgagaatagggaatgaaaggaggttcattgatgtttatgaccatcatttcatggctaatcttattagtcactttaaatttgttgcaggaatgaatgttggtgagaaaagacgaagtcagctgggctcttgtgattattcttatgatgaagggaaagttatttcattaaggttatcaagtgtaggagattatcgtggttatgaaagtttggttattcgcttacttttttctggacgtcacgatttaaaattctggtttaacagtatggatttgattttaaatgaaatcaaggggcgagggctttatcttttttcgggtccagttggaagtggcaaaacaagtttgatgtatcaattggtaaaactaagatttgagaccaaacaggtaattaccattgaagatcctgtggaaattaagcaagataatatgttacaactgcagcttaatgaaagcattgatatgacttatgataatttaattaaattatctctgaggcatcgtccggatattttaattattggagaaattcgagataaagaaaccgccagagctgttattagagcaagtcttacaggggcaatggtattctcaactatccatgctaaaagcattccaggtgtttatgctaggatgttagaattgggtactagttcagaagaattacaaaatgctttgcgtggtattgtttatcaacgtttaatagggggaggagggattattgactttgccaaaggggattatcaaaaccactcagcaaaaaagtggaacaaacaaatttatgacctttttacagcaggatatatcactgaaggagaagcacaagcagaagaaattgaagat

SEQ ID NO: 36007 - DNA, 222 bp, Streptococcus mutans
atggcagtatttgaaaaagtacaagaaattattgttgaggaactcggcaaagatacagatgaagttaaattagaaacaacttttgatgaacttgatgcagattcccttgatgtctttcaagttatttccgaaattgaagatgagtttgacattcaaatcgaatctgaagatggacttaacacagttggtgatttagttgcttttgttgaagaaaaaacaaaa

SEQ ID NO: 36008 - DNA, 975 bp, Streptococcus mutans
atgacttttgcaaagattagtcaagcagcatattatgtaccatcacaggttgtcaccaatgatgatttatctaaaataatggataccagtgatgaatggattacaagtcgtacgggaataagagagcgccgtattagtcaatccgaagataccagtgacttagccagtcaggtggccaaagaacttttaaaaaaagcctcattaaaggcgaaagagattgattttattattgttgctacaattactccggatgcaatgatgccatcaacagctgcttgtgtccaagcgaaaattggtgcagtgaatgcttttgctttcgatttaactgccgcctgcagtggatttatttttgcactttcagctgcggaaaaaatgattaaatccggtcagtaccagaaaggtttagttatcggtgcagaagttctatctaaaatcatcgattggtcggatcgaacaacagctgttctttttggagatggagctggcggtgttcttttagaagcagattcttctgaacattttttatttgaatctattcattcagatggcagtcgtggtgaaagtttgacatcaggtgaacacgctgtttcgtcacccttttcacaggttgataaaaaagataactgttttctaaaaatggatggtcgagctatatttgactttgctattcgtgatgtgtcaaaaagtatttcgatgctcattaggaagtcagatatgcctgtagaagcgattgattatttcttattacatcaggctaatattcgtattttggataaaatggctaaaaaaattggcgctgatagagaaaaatttcctgctaatatgatgaagtatggtaataccagtgcagcaagtattcctattttattagccgaatgtgtcgaaaatggaactatagagctaaatggttcacacactgttctcctgagcgggttcggtgggggtttgacatggggcagtttaattgttaaaatt

SEQ ID NO: 36009 - DNA, 3627 bp, Streptococcus mutans
gtggttgacgtaaatcgttttaaaagtatgcaaatcacattagcttcgcctaataaagtccgttcttggtcttatggtgaagttaaaaaacctgaaacaatcaactaccgcacactgaaaccagaacgtgaaggtctttttgacgaagttatttttggacctactaaagactgggagtgtgcctgtggtaaatataaacgtattcgttataaagggattgtttgtgaccgttgtggtgttgaagtaacgcgcgctaaagttcgccgtgaacgtatgggccatattgagttgaaggctccggtatcacacatttggtactttaagggaattccatctcgtatgggcttaacacttgatatgagtcctcgtgccttggaagaagttatttattttgcggcttatgtggttattgatcctaaggaaacaccgcttgaagcaaaatcgcttttgacagaacgtgaatatcgtgaaaaacttcaagaatatggctcaggttcttttattgctaagatgggagctgaagctattcaggatttgcttaaacgggtagatcttgatgctgaaattgctgaattaaaagaagaattaaaaacagcttcaggtcaaaaacgtgtaaaggccattcgtcgtttagatgtgcttgatgccttccaaaaatcaggtaataaacctgaatggatggtattaaacattttaccggttattccaccagatcttcgcccaatgttgcaattggatggtggccgctttgcgacatctgaccttaatgacctttatcgtcgtgtgatcaatcggaacaatcgtttggctcgccttttggaacttaatgcaccgggaattattgtccaaaatgaaaaacggatgctgcaagaggcagttgatgctttgattgataatggccgtcgtggtcgcccaattactggaccaggtagtcgtcctctgaaatctctcagtcaaatgttaaaggggaaacaaggacgtttccgtcaaaacttgctgggtaaacgtgttgacttttcaggacgctctgttatcgctgttggaccaacgcttaaaatgtatcaatgtggtgtaccgcgtgaaatggctattgaacttttcaaaccatttgtgatgcgtgaaattgttgatcgggatattgtccaaaatgtaaaagctgctaaacgtttaattgaacgtggcgatgaccgtatttgggatattcttgaggaagttattaaagagcaccctgttctgcttaaccgcgccccaacgcttcaccgtttgggaattcaggctttcgaaccagttctgattgatggtaaggcacttcgccttcatccgcttgcttgtgaagcctacaatgccgactttgatggtgaccaaatggctatccatgttcctctgtcagaagaagcacaagcagaagctcgtcttctcatgttggcagcagagcacattctgaatcctaaagatggaaaacctgttgttacgccatctcaagatatggttcttgggaattattatttgaccatggaaggtgctgatcgtgaaggtgagggtatggtctttaaggatcgcgatgaagctgttatggcataccgcaatggttatgttcatctccacagtcgtgtaggtatcgctgttgatagtatgcctaataaaccatggacggacgaacaacgacataagatcatgataacaactgttggtaagattctctttaatgatattatgccggcagatcttccttaccttcaagaaccaaacaatgctaatctgacggataaaacacctgataagtatttcttagcaccgggctccaatatccaagaagctattaaaaatcttgatttgaatattccatttaaaaagaaaaatcttggaaatattattgctgaaatcttcaaacgtttccgtacaacagaaacatcagctttccttgataggttgaaggatcttggttattatcattcaactttagctggtttgacagttggtattgctgatattcctgtcattgataataaacaagagatcattgatgctgctcaccatcgtgttgaagaaatttcaaaagccttccgccgaggtcttatgactgatgatgatcgttatgaagctgttacagcgacatggcgtgatgctaaggagcaattggaagcacgtttggttgaaacgcaggatgctaagaatccaattgttatgatgatggattcaggagctcgtggtaatatttccaacttctctcagcttgctggtatgcgtggtctgatggctgctcctaatggacgaattatggaattgcctatcctttctaatttccgtgaaggtctgtctgttttggaaatgttcttctcaactcacggagcacgtaaaggaatgactgatacagcccttaagactgctgattcaggttatctaactcgccgtttggttgatgtcgctcaagatgtcattattcgcgaagatgattgtggtacagatcgcggtcttactattacagctattacagacggtaaagaagtgactgaaacacttgaagaacgtctggttggccgttatactaaaaaatcggtaagacatcctgaaaccggagagattatcgctagtcctgatacattgattacagaagatatggcccattatattgctgaagctggagtcagtgaagtgactattcgttctgtctttacatgtaatacgcgtcatggtgtttgtcgtcactgttatggaataaatcttgctactggggatgctgttgaggttggtgaagcagttggtacaattgcagctcaatccattggtgaaccgggtacacagttgaccatgcgtactttccacacaggaggtgtggcttcaaatgctgatatcacacaaggtttgcctcgtattcaagaaatctttgaagctcgtaatccaaaaggtgaagccgttattacagaagtcaaagggcaagtaacagatattgaggaagatgctgctactcggacgaagaaggtttatgtcaaaggagcaacaggtgaaggagaatacacagtaccatttactgctcgtatgaaagttcaagtaggtgatgaagttcatcgtggtgcgccactgactgaaggttctatccaacctaagcacttacttgaagttcgtgataccttatctgttgaaacttatcttcttgcagaagtgcaaaaggtttatcgcagtcaaggggtggaaatcggtgataaacacgttgaagtaatggtacgtcaaatgcttcgcaaagtacgtgttatggatccgggagatacaggtttgcttccaggcattcttatggatattgccgattttacagatgccaacagagatattgttattgctggtggtattcctgcaacaagccgtccagttcttatgggaattaccaaggcatcacttgaaacaaattcattcttatctgcagcttccttccaagaaacaacacgtgtgcttacagatgcagctattcgtggtaagaaagatcatcttctagggcttaaagaaaatgtcattattggtaagatcattccggctggtactggtatggcgcgttaccgtaatcttgaaccattggctgtcaatgaaattgaagtcattgaagattctgaagaacaagaggacacagtagaagag

SEQ ID NO: 36010 - DNA, 789 bp, Streptococcus mutans
atggattttaaggaaattctgtacaatgtggataatggtgtggcgactttaacgctgaatcgtccggaggtttctaatggatttaatatccctatttgtgaggaaattttgaaggccattgatattgctaaaaaggatgacacagtacaaattttactgattaatgccaatgggaaagtcttttcagttggtggcgatctggttgagatgcaaagagctgttgatgcagatgatgtacaatctcttgttcgcattgcagaacttgtcaataaaatttcttttgctttaaaacgtttacctaagccggttgtcatgagtacagatggtgcagttgcaggtgctgcagctaatatagcggtagctgcagacttttgtattgccagtgacaaaacacgctttattcaagcctttgtgaatgtcggtttggcccctgatgccggaggacttttcttattaacgagagccattggtattactcgtgcaacacaacttgccatgaccggtgaagctttaaatgcagagaaagctttggaatacggtattgtttacaaagtctgtgagccagagaaactagaaaaaataacagatcgtgtcattacacgtttgaaacgtggctcagttaattcttataaagccattaaagaaatggtttggcaaagttcatttgcaggttggcaggaatatgaggatctagaattagaattgcaaaagtcattagcatttacaaatgattttaaagagggagtgcgtgcttatacagagaaacgccgtcctaaatttacaggaaag

SEQ ID NO: 36011 - DNA, 1356 bp, Streptococcus mutans
atgaaagtcgtaaaatttggtggtagttcattggcctctgcaacacaattagaaaaagttctgaatatcataaaatcagacgaagagcgacgctttgttgttgtttctgctccgggtaagcgtgacgcccaagatacaaaagttacagatgctctcattagatactatagatcttatacttcagataaagacgttactgctgaccaatcttggattatcaaccgctaccgtgctattattgatgaacttggccttggtcaaaatatcttagaaaaaattactaaagctattgttgatcttgcaaatttgcctattgaagataatgatttcctatatgatactttcctagccgcaggtgaggacaataatgccaaattaattgccgaatacttcaggaaaaatgggctctctgctcgttatattcaccctaaaaaagcaggtatcattgttacaagtgaacccggtaatgctcggattattccatccagttatgataaattagaagaattgcgagatagtgacgaagttttagttattcctggttttttcggtgtcacaattgataaccaaatctgtactttttcgcgcggtggttctgatattactggttcaattgtcgcagcgggtgttaaagctgacctttatgaaaactttaccgatgtagatggtatctttgcagctcacccaggggttgtgcataagccacattctatttcagaactaacctatcgtgaaatgcgtgaattggcttacgcaggcttttcagtactccacgacgaggccttaatccctgcctatcgcggaaaaattccccttgttattaaaaatacaaataatcccgaacatccaggcacaaaaattgttcttgcgcatactggtgccactataccagttgttggtattgccggagatgatgattttgtcagtattaatctttccaaatatctgatgaatagagaaatcggttttggtcgcaaaattcttcaagttttagaagaattgaacattcgttgggaacatattccgaccggtattgatgatatgtcaattattttaagaggccgtgaattgacccctataaaagagcaagaaatcatctcacaattaactcgtaaattagaagttgacgaagttgaaattgaacgcaatctttctattatcatgattgtcggagaaaatatgaaaaatcacattggggtgactgccaaagctgctgaagcattttccaaaaaacatattaacttggaaatgatttcccaaggttccagtgaagtatccgtcatgtttgttatcaaaactgaacaagaaaaacaagcagttagagccttataccaaacattttttatgaaagatgag

SEQ ID NO: 36012 - DNA, 3561 bp, Streptococcus mutans
ttggcaggacatgaagttcagtacgggaaacatcgtacgcgtcgtagtttttcaagaatcaaagaggttcttgatttaccaaatttgattgaaatccaaacggactcttttaaagatttcttggatacaggtctgaaggaagtttttgaagatgtgcttccaatttccaatttcacagacactatggaattagagtttgtgggttatgagttgaaagagcctaagtatacattggaagaagcacgtgctcatgatgcacattattctgcccccatctttgttactttccgtctcatcaataaagaaactggtgaaattaagacacaagaagtattttttggtgattttcccttgatgactgaaatgggtacttttattattaatggtgctgaacgtattatcgtttctcagttggtacgttcaccaggtgtttattttaatgataaagtggataaaaatgggaaaattggctatggttcaactgttatccctaaccgtggtgcttggcttgagcttgaaacggactctaaggatattgcttatactcgtattgaccgtactcgtaaaattcctttcacgacgctggttcgtgcactcggtttttccggggatgatgagattattgatatttttggtgatagcgaattggttcgtaataccattgaaaaagatatccataaaaatcctaatgactctcgtacagatgaagctctcaaggaaatttatgaacgtcttcgtccgggtgaacctaagacggcagattcttcacgcagtcttctgattgcacgtttctttgatgcgcgccgttatgatttagcagctgttggccgctataagattaataagaagttaaacgtcaaaacgcgtcttttgaatcaagtcattgctgaaaacttagtagatcctgaaacaggcgaaattcttgttgaagctgggactgaaatgacacgcagtgtaattgattcgattgcagattatcttgatggagatctcaataaaattgtttatacgccaaatgaatacgctgttttgacagaacctgttgttcttcaaaaattcaaagttatggctccaaatgatccagaccgcacggttactgttattggtaatgccagtccagatgacaaagtacgtcacttgacaccagccgatattttagctgaaatgtcttatttccttaacttggctgagggtctaggtaaagttgatgatattgaccatttaggcaaccgacgtattcgtgctgttggtgaattgctagctaatcaatttcgtattggtttggcacgtatggaacgcaatgttcgtgaacgcatgtccgttcaagataatgaagtcttaacgccacaacagattattaacattcgccctgtaacagcggcaattaaagagttttttggttcttctcaattgtcacagttcatggaccaacacaatccactgtctgaactgtctcataaacgccgtttgtcagctttaggtcctggtggtttaacacgcgaccgtgctggttatgaagtccgtgatgtgcattatacgcattatggtcgtatgtgtccaattgaaacgcctgaaggaccaaatattggattgattaataacttgtcttcctatggtcatcttaataaatatggatttatccaaacaccataccgtaaagttgaccgtgagacaggtaaagtaaccaatgaaattgaatggcttactgctgatgaagaagatgaattcactgtagctcaggctaactcaaaacttaatgaagatggaagctttgctgaagaaatcgtcatgggacgtcatcaagggaataaccaagagtttccagcaagttctgttgaatatatggatgtttctcctaaacaggtagttgcggtagcgacagcatgtattcctttccttgaaaatgatgactccaaccgtgcccttatgggagctaacatgcagcgccaagctgtgccattgattgatcctaaagcaccttttgttggaactggtatggaatatcaagcagcccatgattctggagccgctattatcgctcaacataatgggaaagtggtttattccgatgcagataagattgaagttcgccgtgaagatggctcactagatgtttatcatgttaccaaattccgtcgttctaactctggaactgcctacaatcaacgtactcttgttagggtaggcgatagtgtcgagaagggggactttattgcagatggtccttctatggaaaagggtgagatggctcttggacaaaatccagtggttgcttacatgacttgggagggttacaactttgaagatgctgttatcatgagcgagcgtcttgtcaaggatgatgtttatacttctgtccatttagaagaatttgaatctgaaactcgtgatacaaagcttggacctgaagaaattacgcgtgaaatcccaaatgttggtgaagatgccctgaaagaccttgatgaaatgggaattattcgcattggtgctgaggttaaagaaggtgatattctagttggtaaagtgactcctaaaggagaaaaagatctttctgcagaagaacgcctcttgcatgccatttttggtgacaaatcacgtgaagttcgtgatacttctcttcgtgtacctcatggtggcgacggtgttgtttgtgatgtgaaaatctttacacgtgctaatggagatgaacttcaatcaggtgttaacatgctggttcgtgtttatatcgctcaaaaacgtaaaatcaaggtcggagataagatggccggacgtcatggtaataagggtgtcgtttcccgtattgtaccagtggaagatatgccatatcttccagatggaacacctgttgatatcatgcttaatccacttggggtgccatcacggatgaacattgggcaagttatggaactccatcttggtatggctgctcgtaatttgggcattcatattgcaacgcctgtctttgacggagcaacttctgatgatctttgggaaacagtaaaagaagccggtatggattctgatgctaaaactgttctttatgatggtcgcacaggggagccgtttgataatcgtgtatcagttggtgttatgtatatgattaaacttcaccacatggttgatgataaattgcatgcacgttcagttggcccttattcaacgattactcaacagccgcttggtggtaaggctcaatttggtggtcaacgtttcggagaaatggaagtttgggctttggaagcttatggtgcctcaaacgttcttcaagaaattttaacttataagtcagatgatgtcaccggtcgtcttaaagcctatgaagctattacaaaaggtaagccaattccaaaaccaggggtaccagaatcattccgtgtacttgtgaaagaactgcaatcacttggacttgatatgcgcgttcttgataaagatgataaagaagtagatcttcgtgatcttgatgaaggcgaagatgatgatgttatgcatgttgatgatcttgaaaaggcgcgtgaaaaacaagcacttgaagctgctgaatttgcaaatagtgatgagaaa

SEQ ID NO: 36013 - DNA, 1254 bp, Streptococcus mutans
atgactatttttgaagaactcaaagcgcgtggcttagtctttcaaaccactgatgaagaagcccttaaaaaatcattagatgacggacaagtttctttttacacaggttatgatccaacagcagatagcctccatttggggcatctcgtacctatccttgttatgaggcatttacaattggctggacataaaccttatgctcttgtgggcggtgcaacaggcctcatcggcgatccctcttttaaagatgatgaacgcagtctacagactaaagaaacagtgaaaaattgggtacaaagcattcgtagtcaattagaacgtttcattgattttaaacacggtgataacaaggctcagatggtcaataactatgactggatgggaaagataacttttattgactttcttcgtgatgtcggtaaatactttactgttaattacatgatgagtaaagaatctgtcaaaaaacggattgaaacaggtatttcatacaccgagttcgcttaccagattatgcaggggtatgatttttacgtccttaatcaagaacatgctgttacacttcaagtcggagggtctgaccaatggggaaatatgactgcaggaactgaattaattcgtcgaaaagctaataaaacagcccatgtcattactgtcccattaatcacagatgcaactggtaaaaaatttggtaagtctgaaggaaatgctgtctggcttgatgctgataaaacatctccttacgaaatgtatcaattttggcttaatgtcatggatgctgatgccattcgcttcctcaagatttttactttcctatctctagatgaaatcgaagacatccgagtcaaatttgaagcagcacctcacgaacgtttagctcaaaaaatattggcaaaagaagttgtaacttttgttcacgggcaaacagcctatcaagaagctgtcaaaattaccgaacaactttttgcaggtcatatcaagagcctctctgcaaaagaacttaaacaaggacttagtaacgttccaaattatgctgttaagtccaatgacaatcacaatatcgttgaattattagtgacggctggcatcgtgaattctaaacgtcaggcgcgtgaagatcttcaaaacggggctatttatattaatggggaacgtatccaagatttaacttataacttatctcaacaagataaaattgacaatgaactcacagttattcgtcgtggtaagaaaaaatattttgtcttaacttat

SEQ ID NO: 36014 - DNA, 366 bp, Streptococcus mutans
atgctttcagcgtttatcccctccctacttagctacccagcgatgctcttggcagaacaactggtacaccagcggtaagtccactctggtcctctcgtactaggagcagatcctctcaaatttccttcgcccgcgacggatagggaccgaactgtctcacgacgttctgaacccagctcgcgtgccgctttaatgggcgaacagcccaacccttgggaccgactacagccccaggatgcgacgagccgacatcgaggtgccaaacctccccgtcgatgtgaactcttgggggagataagcctgttatccccagggtagcttttatccgttgagcgatggcccttccatacggtaccaccggatcac

SEQ ID NO: 36015 - DNA, 466 bp, Streptococcus mutans
atggggtctttccgtcctgtcgcgggtaacctgcatcttcacaggtactaaaatttcaccgagtctctcgttgagacagtgcccaaatcattacgcctttcgtgcgggtcggaacttacccgacaaggaatttcgctaccttaggaccgttatagttacggccgccgtttactggggcttcaattcacaccttcgacaaacgtctaagcgctcctcttaaccttccagcaccgggcaggcgtcaccccctatacttcatcttacgatttcgcagagagctgtgtttttgataaacagttgcttgggccttttcactgcggctgacttatcgccagcgccccttctcccgaagttacggggccattttgccgagttccttaacgagagttcgctcgatcacctgaggctactcgcctcgactacctgtgtcggtttgcggtacgggtagagtattcattaacgctag

SEQ ID NO: 36016 - DNA, 407 bp, Streptococcus mutans
ggaatatcaacctgttgcccatcggatacacctatcggtctctccttaggtcccgactaacccagggcggacgagccttcccctggaatccttagtcttacggtggacaggattctcacctgtcttacgctactcataccggcattctcacttctatgcactccagcgctccttgcggtacaccttctgcgcacatagaacgctctcctaccatcccctaagggatccacagcttcggtaaattgtttcagccccggtacattttcggcgcagggtcactcgactagtgagctattacgcactctttgaatgaatagctgcttctaagctaacatcctagttgtctgtgcaaccccacatccttttccacttaacaattatttggggaccttagctggtggtctggg

SEQ ID NO: 36017 - DNA, 2649 bp, Streptococcus mutans
atgtcaacacaactttcacctaaatacaatccagccgaggttgaggctgatcgttaccaaaaatggcttgatgccgatgttttcaagccttctggagatcaaaaggctaagccttattcaatcgtgattccaccaccaaatgtgacggggaaattgcaccttggtcacgcttgggacacgactttgccggatattattatccgtcaaaagcgtatgcagggttttgacacgctctggctgccggggatggatcacgctggtattgccacacaggccaaggtagaagctcgcttggctgaagatggcatttcccgttatgatcttggtcgtgagaaatttctggataaggtctgggaatggaaggatgagtatgcggcaaccatcaaggagcaatggggcaagatgggaatttctgttgattattcgcgggaacgtttcacccttgatgaaggattgtctaaagcggtccgcaaggttttcgtagaactctataaaaaaggctggatttatcgcggcgaatttatcatcaactgggaccctaaggcacgcacagctttgtccgacatcgaagtcattcataaggatgtggaaggtgccttctaccatatgaattatatgttggaagatggctcgcgcgctttggaagttgcgaccacgcgtccagagaccatgtttggggatacggctgtcgctgtcaatccaaatgatgatcgttacaaagatctgattggacaaaatgttatcttgccaattgttaacaagctgattccaatcgtagcagatgaacatgctgaccctgagtttggaacaggtgttgttaagatcacacctgcccatgaccctaacgacttcctcgttggtcagcgccacaatctgccacaagtcaatgttatgaacgatgacggaaccatgaacgaactggctggcgaatttgctggcatggatcgctttgaagcccgcaaggcaactgttaagaaactggaagaaatcggcgctcttgtggaaatcgaaaagatgacccactcggttggtcactcagaacggacaggtgtaccaattgagccacgtctgtctacccagtggttcgttaagatggaccaactggctaagaatgccattgccaatcaagacactgatgacaaagtggacttttacccaccgcgtttcaatgataccttcctgcaatggatggaaaatgtgcatgactgggtgatttcccgtcagctctggtggggtcaccaaatccctgcttggtacaatgcggatggtgacatgtatgtcggtgaagaggctccagagggtgatggctggaagcaagatgaagatgtgcttgacacttggttcagctctgctctttggccattctcaaccatgggctggcctgacacggactcagaagatttcaaacgttatttcccaacatcaacgctggtaacgggttatgacatcattttcttctgggtgtctcgtatgattttccaatctttggaattcactggttgccgtcctttccagaatgttctcatccacggacttatccgtgacgaacaagggcgcaagatgtctaaatctctcggtaacggcattgaccctatggatgttgttgacaaatacggtgctgatgctttgcgttggttcctgtcaaatggatctgcaccgggtcaagatgtgcgtttctcttacgaaaaaatggacgctgcttggaatttcattaacaagatttggaacatttcccgctatatcctcatgaataatgaaggccttagccttgatcaagctagcaaaaatgttgttttagtaaccaatggcaaagctggtaatgtgacggaccgctggattcttcataatctcaatgaaaccattgccaaagttactgaaaacttcgataagttcgaatttggtgtggctggtcacatcctttacaatttcatctgggatgaatttgccgactggtatgtggagttgaccaaagaagtcctttacagcgaagatgaggctgaaaaagttattacgcgttcggtcctcctttacaccttggacaaaatcctgcgtcttctccatcctatcatgccatttgtaacagaagaaatcttcggtcaatacgcagatggttctatcgtgacagcagcttatccaactgttaatcctgcttttgaaaatcaaacggcgcattctggcgtggaaagtctcaaagacctgattcgagctgtacgtaatgcgcgtgcagaagtcaacgtagctccaagcaaacctatcaccattcttgtcaaaacaagcgatagcaacttggaagactttttcaaggccaatgtcaactacatcaaacgcttcacaaacccagaaacacttgaaatcagctctgccattgccaccccagaactagccatgtcagcagttatcacaggtgcagaaatcttcctgccgctggcagacttgctcaacgttgaggaagaactagcccgcctcaacaaagaactggccaaatggcaaaaagaactagacatagttgctaaaaaactcagcaacgaccgctttgtccaaaatgccaaacctgaaatcgtccaaaaagaacgcgacaaacaaatcgactaccaaaccaaatacgacgccacagtggaacggattaaagagatggagaaactaattaaa

SEQ ID NO: 36018 - DNA, 384 bp, Streptococcus mutans
atggcttaccgtaaactaggacgtactagctcgcagcgtaaagcaatgtttcgtgatttgacgactgatcttcttatcaacgaatctattgtgacaacagaagctcgtgcaaaggaaatccgtaaaacagttgaaaaaatgattactcttggtaaacgtggcaatcttcatgctcgtcgtcaagcagcagcatttgttcgtaacgaaattgcatctgaaagttatgatgaagctaaagatgaatacacatcaacaactgctcttcaaaagcttttttcagaaattgcaccgcgttatgcagaacgtaatggtggttatacacgtattcttaaaactgaaccacgtcgtggtgatgctgccccaatggcaattattgaattagta

SEQ ID NO: 36019 - DNA, 936 bp, Streptococcus mutans
atgattgagtttgaaaaaccaataataacaaaaattgatgaaaataaagattacggcagatttgtcattgaaccacttgaacgtggctatggtacaactctagggaattcccttcgtcgtgtgctgttgtcttcacttccgggtgcagctgttacatcaattaagattgatggagtactacacgaatttgatactatcccaggtgtacgcgaggatgttatgcaaatcatccttaatataaaaggacttgctgtaaaatcttatgtcgaagaagaaaagattgttgaattagatgttgaaggacctgcagaaattactgctggagatattttaacagacagtgatattgaaatagttaatcctgatcattatctctttactattgctgaaggtgctaatttaaaagcaaccatgactgttgcaactaatcgtggttatgttccagcagagaaaaataaaagagatgatgcaccagttgggacgctcgcgatagattctatctatacgccagttaaaaaagttaattatcaagttgagccagctcgtgtgggcagcaatgataactttgataaattaacaattgaaattatgaccaatggcacaattattcctgaggatgctcttgggttatctgctcgtgttttgattgagcatttaaatctttttactgatttaaccgaggtagccaaggcgactgatgtcatgaaagaaacagaacaagtttctgatgagaaagtacttgatcgtacgattgaggaacttgatttatcagtgcgttcttataactgtcttaaacgcgctggtattaatacagtctatgatttaactgaaaagtctgaatctgaaatgatgaaagttagaaatcttggacgtaaaagtcttgaagaagttaaagtaaagcttgcagatcttggtttaggcttgaaaaatgataaa

SEQ ID NO: 36020 - DNA, 459 bp, Streptococcus mutans
atgacaaaaacaatcactttaatatatattagtttaagcggcaatactaaaagttttgtagctcgcttgacaaactatctacagtcaaaaacggacttaacaattcattctgtcaatgtcaaagatttaattaaagatcaggcagattattttgctctatctgattattttgttgctttcttaccaacctatcttgaaggtggaaatggtcttgacagtggggatattgaaattttgacaacccctttacgagagttcatagcttttgcagataattatcgttattgctatggcattgttggttcaggcaataaaaattttaacaatcaatattgtctgacggctaagcagtatgctgaacaattcggttttcctgttcttgataattttgaattgcgcggtctagccgatgatgttgaacgtattggtgataagattttagccttatacgcagctaac

SEQ ID NO: 36021 - DNA, 381 bp, Streptococcus mutans
ttggctaaaccaacacgtaaacgtcgtgtcaagaaaaatattgaatctggtattgcccatattcacgcaacatttaataacactattgttatgattacagatgtgcatggtaacgctcttgcatggtcatcagctggtgctcttggattcaaaggttcacgtaaatctactccatttgctgctcaaatggctgcagaagccgctgctaagtctgcacaagaacacggtcttaaaacagttgaagttactgtaaaaggtccaggttcaggtcgtgagtctgctattcgtgcgcttgccgctgctggtcttgaagtaacgtcaattcgtgatgtgactcctgtaccacataatggtgctcgtcctccaaaacgtcgtcgtgta

SEQ ID NO: 36022 - DNA, 363 bp, Streptococcus mutans
atggctcgtattgctggagttgatattccaaatgacaaacgtgtagtcgtatcacttacttatgtatatggtatcggtttgccaacttctaaaaaaattcttgcagcagcaggtgtttctgaggatatccgtgtcaaagatttaacatctgatcaagaagatgctattcgtcgtgaagttgatgcaatcaaggttgaaggagatcttcgtcgtgaagttaacttgaatattaaacggttgatggaaattggttcatatcgcggaatccgtcatcgtcgtggacttcctgtccgtggacaaaataccaaaaacaatgctcgcactcgcaagggtaaagctgtagcgattgcaggtaagaaaaaa

SEQ ID NO: 36023 - DNA, 114 bp, Streptococcus mutans
atgaaggtaagaccatctgttaaaccaatttgcgaatattgtaaggttattcgtcgtaacggtcgtgttatggtaatttgtcctacaaatccaaaacacaaacaacgccaagga

SEQ ID NO: 36024 - DNA, 216 bp, Streptococcus mutans
gtggcaaaagaagatgtgattgaaattgaaggtaaagttgtcgaaacaatgccaaatgcaatgtttacagttgaattggaaaatggacaccaaattttggcaaccgtatctggaaaaattcggaaaaactatattcgtattttagtaggagataaggttactgtcgaaatgagtccgtatgatttaacacgtggacgtatcacataccgctttaaa

SEQ ID NO: 36025 - DNA, 636 bp, Streptococcus mutans
atgaatcttttaatcatgggattgccaggtgctggcaaagggactcaggcagctaagattgttgaaaaatttggccttgctcatatttcaacgggagatatgtttcgtgcagctatggctaaccaaacagaaatgggaaccttggcaaagagttttattgataagggagagcttgttcctgatgaagtaaccaatggtattgttaaagagcgtctttcagaatcagatattactaaaaaaggtttcttgctagatggctatccacgtaccattgaacaagctcatgctttggatgagattttatcaaaacttaaccttaagctagatggcgttatcaatattgatgttgatccagcttgtttggtggagcgtttgagtggtcgtattatcaatcgtaagacaggtgaaacttatcataaagtctttaacccaccagcagattataatgaagatgattattatcaacgtgaagatgataaaccggaaacagtaaaacgtcgcttagatgtcaacattgctcaagggcatccaataattgaatactatcgtaataaaggtcttgtttatgatattgaaggaaatcaagatatcaatttagtttttgagacaattgctaaagttttagcaaatttgtca

SEQ ID NO: 36026 - DNA, 1302 bp, Streptococcus mutans
atgttttttagacttttaaaagacgccctaaaggtgaaaagtgttagaaaaaagattttctttactatttttatcatctttgtatttcgtgttggtacacacattaccgtaccaggcatcaatgctaaaagtcttgaacaactaagtgatctaccatttttaaatatgcttaaccttgttagtggtaatgctatgagtaacttttccgttttttccatgggggttagtccttatattaccgcttccattgttgttcaacttttacaaatggatattttacctaagtttgttgaatggggaaaacaaggggaagtcgggcgtcgtaagctgaatcaagcaacgcgctatatttcactagtccttgcttttttccaatctattggtattacagcaggatttagtgctctatcaagtgtttctcttgtgaagacaccaaatgtccagacatttcttttaattggtgctattttaaccgcaggaagtgtggttgtaacttggctaggagatcagatttcggataaaggttttggtaatggtgtttcaatgatcatctttgcgggaattatttcatctataccagggactatcaaatccgtttatgaagattattttgtcaatatccgttcaagcgaaatgaagaattcccttatttttgtgggacttttgattttagctagtctcatcattattttctttacaacttttgttcaacaagcagaatataagattccaatccaatatactaagttggcgcaaggtgctccgacgaattcttatcttcctttgaagataaatccagctggagttattcctgttatttttgcaagttctattacaactattccaagtactatcttgccatttttccaacatggtcgcgatattccttggatgacaaccttgcaagaatggctttcttatactaatccaacaggaatggcagtttatgctgttctcattgtacttttctcattcttttatacttttgtgcaagtcaatcctgaaaagacagcagagaatttacaaaaaaacgcttcttatattcctagtgttcgacctggtcgtgaaacagaggaatacctttcatcgcttctgaaaaaattggcaacgattggttccattttcttggcctttgttgctttgagtccaattgtagctcaacaacaatttgatttgtcatcaagtgttgctttaggaggtaccagtctgttaattgttatttctacaggcattgaaggaatgaagcaattggaaggctatctgttgaagagaaaatatgttggttttatgaatgttacagaa

SEQ ID NO: 36027 - DNA, 438 bp, Streptococcus mutans
atgaaacttcatgaacttaaacctgctcaaggttctcgtaaaactcgtaaccgtgtgggtcgtggctcatcttctggtaatggtaagactgcaggtcgtggacaaaaagggcaaaaagctcgtagtggaggtaatatccgttcgggctttgaaggtggacaaacgccactctttcgtcgtcttccaaaacgcggttttactaatatcaatgctaaagagtatgcattggttaatcttgatcagttaaatgtctttgaagatggtgcagaagtaacaccagttgttcttgttgaaactggtatcgtaaaagctgaaaaatcaggaattaaaattcttggtaatggcgaattaactaaaaaattaactgttaaggcagctaaattctcaaaatctgctgaagcagccatcattgctaaaggtggttcaatcgaggtgatc

SEQ ID NO: 36028 - DNA, 492 bp, Streptococcus mutans
atggcatttaaagataatgcagtagaacttgaagaacgcgttgttgcgattaaccgtgttacaaaagttgttaagggtggacgtcgtcttcgctttgctgctcttgtagttgttggtgatcgtaatggccgtgttggttttggtactggtaaagctcaagaagtaccagaagctattcgtaaagcagtagaagctgctaagaaaaacatgattgaggtaccaatggttggcacaacaattcctcacgaagttcgttcagaatttggtggtgctcgtgtcttgttgaagccagcagtagaaggtgctggggttgctgctggcggtgctgttcgtgctgttgttgaattagccggtgtagcagatattacatcaaaatcattaggttcaaatactccaatcaacattgttcgtgcaactgttgaaggattgaaacagcttaaacgtgctgaagaagtcgcttcacttcgcggtgtttcagtctctgatttggca

SEQ ID NO: 36029 - DNA, 354 bp, Streptococcus mutans
gtgatttcgaaaccagataaaaataaaatccgccaaaaacgccatcgtcgtgttcgcggaaaactctctggaactgctgatcgcccacgtttgaacattttccgttctaatacaggcatctacgctcaagtgattgatgacgtagcgggtgtaacgctcgcaagtgcttcaactcttgacaaagaagtttcaaaagggactaaaactgaacaagccgttgttgttggtaaactcgttgctgaacgcgcagtagctaaaggtatttctgaagtggtgtttgaccgcggtggatatctctatcacggacgtgttaaggccttggctgatgcagctcgtgaaaacggattgaaattc

SEQ ID NO: 36030 - DNA, 534 bp, Streptococcus mutans
atgtcacgtattggtaataaagtaatcacgttgcctgctggtgtagaagtcactaataaagataatgttgttactgtaaaaggccctaaaggggagcttacacgtgagttcccaaaagttattgaaattaaaattgaaggaacagaagtaacacttcatcgtccaaatgattccaaagaaatgaaaacaatccatggtacagctcgtgctaacttaaacaatatggttattggcgtttctgaagggttcaaaaaggaacttgaaatgcgtggggttggttaccgtgctcaacttcaagggaagaaacttgttctttcagtcggtaaatctcatccagatgaagttgaggctccagaaggtattacgtttgaagtaccaactgctacagccatcgttgttaatggaattaataaagaggttgttggtcagacagcagcttatattcgtggtcttcgtgttccagaaccttataaaggtaagggaattcgttacgctggtgagtatgtacgccgtaaagaaggtaaaacaggtaaa

SEQ ID NO: 36031 - DNA, 396 bp, Streptococcus mutans
atggttatgactgatccgattgcagacttcttaactcgtattcgtaatgctaatcaagcaaatcacagcgtagttgaagctcctgcatcaaacatcaaaagaggaattgctgaaatccttaagtgtgagggttttgtaaaagatgttgaagttattgaagatgacaagcagggtattatccgtatctttcttaaatatggtcaaaatggtgaaagagttatcactggcttaaaacgtatttcaaaaccgggtcttcgtgtctatacaaaacgcgaagatgttccaaaagttctcaatgggcttgggattgcaattatttcaacttctgaaggtcttttgactgatagagaagcccgtcaaaaaaatattggcggagaagttattacttacgtttgg

SEQ ID NO: 36032 - DNA, 540 bp, Streptococcus mutans
atggcaaatcgcttaaaagaaaaatatcttaatgaagtagttcctgcattgacagaaaaatttaattacacatctgtaatggccgttcctaaggttgataaaatcgtccttaacatgggtgttggtgatgctgtgtcaaatgcaaaaaatcttgaaaaagcagctgctgaattagcgcttatttcaggtcaaaaaccacttattactaaagctaagaaatcaatcgccggcttccgtcttcgtgaaggtgttgctatcggtgcgaaggttactcttcgcggacaacgcatgtatgaattcttagataaattggtgacagtttcacttccacgtgtccgtgacttccatggtgtcccaacaaaatcatttgatggacgcggtaattacacacttggtgtgaaagaacaattgatcttcccagaaatcaactttgataatgttgataaagtccgtggtcttgatattgttatcgttacaactgctaacactgatgaagaatcgcgtgaattgctgacaggccttggaatgcctttcgcaaaa

SEQ ID NO: 36033 - DNA, 303 bp, Streptococcus mutans
atgtttgtaaaaaaaggcgataaagttcgcgttattgctggaaaggacaaaggtgttgaagctgtagttcttaaagcttttccgaaaattaataaagttgttgttgaaggtgtggccattgttaaaaaacaccaaaaacctaacaatgagaaccctcaaggtgctatcgtagaaaaggaagcacctatccatgtatcaaacgtacaagttcttgataaaaatggagttgcgggtcgtgttggctataaagttgttgatggtaaaaaagttcgctacaacaaaaaatcaggcgaagtacttgat

SEQ ID NO: 36034 - DNA, 366 bp, Streptococcus mutans
atgattcaatcagaaagtcgtttaaaagtcgctgacaacagtggtgcccgcgaaatcctgactatcaaagttcttggcggttcaggtcgtaaatttgcgaacatcggtgatgtcatcgttgcttcagtaaaacaagctactcctggtggtgcggttaaaaaaggtgatgtggtgaaagccgttattgttcgtactaaatcaggtgctcgtcgtgctgatggttcatacatcaaatttgatgagaatgcagctgttattatccgtgatgataaaacacctcgcggaactcgtatctttggtcctgttgctcgtgaattgcgtgaaggtaacttcatgaagatcgtgtcactagcgccagaagtactt

SEQ ID NO: 36035 - DNA, 258 bp, Streptococcus mutans
atggaacgtaaacaacgtagaacgctagttggtcgtgttgtgtctgataaaatggacaaaacaatcacagttgtagttgaaactaaacgtaaccacccagtctatggtaaacgtattaactactcaaagaaatataaggctcatgatgaaaacaatattgcaaaagcaggcgatattgttcgtatcatggaaactcgtccgctttcagcaacaaaacgttttcgtcttgttgaagtggttgaagaagctgtcattatt

SEQ ID NO: 36036 - DNA, 411 bp, Streptococcus mutans
atgttagtacctaagcgtgttaaacatcgtcgtgaattccgtggaaaaatgcgtggtgaagctaaaggcggtaaggaagtagcttttggagaatatggtctgcaagctacaactagtcactggattactaatcgtcaaattgaggctgctcgtatcgctatgacgcgttacatgaaacgtggtggtaaagtttggattaaaatctttcctcataagtcctacactgctaaggccatcggtgtacgtatgggatctgggaaaggtgctccagaaggctgggtcgcaccagttaagcgtggaaaaatcatgtttgaaattgctgatgttccagaagaagttgcccgtgaagctcttcgccttgcaagccacaaattaccagttaaaactaaattcgtaaaacgtgaagcagaa

SEQ ID NO: 36037 - DNA, 651 bp, Streptococcus mutans
gtgggtcaaaaagtacatccaattggtatgcgtgtcggtatcattcgtgattgggatgcaaaatggtatgctgaaaaagaatacgcggattaccttcatgaagatctcgcaatccgtaaattcattcaaaaagagttggctgacgccgcagtttcaactattgaaattgaacgtgcagtcaataaggtaaatgtttcccttcatactgcaaaacctggtatggttatcggtaaaggcggagcaaatgtcgatgctcttcgtgctcaacttaacaaattgactggaaaacaagttcacattaatattgttgagatcaaatcaccagatcttgatgctcaccttgttggtgaaaatattgctcgtcagcttgagcaacgtgttgctttccgtcgtgctcaaaagcaagcaatccaacgtactatgcgtgcaggagctaaaggaattaaaactcaagtatcgggtcgtttaaatggtgcggacatcgcacgtagcgaaggatattcagaaggaactgttccacttcacacacttcgtgcggatatcgattatgcttgggaagaagctgatacgacttatggtaagcttggtgttaaagtttggatttaccgtggcgaaattcttccagctcgtaaaaacactaaaggagggaaa

SEQ ID NO: 36038 - DNA, 342 bp, Streptococcus mutans
atggcagaaattacttcagctaaagcaatggctcgtacagtccgtgtttcacctcgtaaaacacgtcttgtgcttgatcttattcgtggtaagaacgttgctgacgcaatcgcaatcttgaaattcactccaaacaaagctgctcgtattgttgagaaaactcttaactctgctgtcgcaaatgcagaaaataactttggtttggaaaaagctaatttggtcgtatctgaaactttcgcaaacgaaggaccaacgatgaaacgtttccgtccgcgtgcgaagggttcggcttcaccaatcaataaacgtacaactcacgttactgtagttgtagaagaaaaa

SEQ ID NO: 36039 - DNA, 624 bp, Streptococcus mutans
atgacaaaaggaatcttagggaaaaaagtgggaatgactcaaatcttcactgaatctggtgaatttatccctgttactgtcatcgaagcaactccaaatgttgtgcttcaagttaagactgttgaaacagacggttacgaagcagttcaagttggctttgatgataaacgtgaagtattgagcaacaaacctgccaaaggccatgtggcaaaagccgacacagctcctaagcgcttcattcgtgaatttaaaaacattgaaggcttagaagttggacaagaaattacagtcgaacaattcgaggctggtgatgttgttgatgttactggtacaactaaaggtaaaggtttccaaggtgctattaaacgccatggtcaatcacgtggccctatggctcatggttctcgttatcaccgccgtccaggttcaatgggacctgtagcacctaaccgtgtattcaaaggtaaaaaccttgctggacgtatgggaggtaaccgcgtaacggttcaaaaccttgaagtcgttcaagttgttccagaaaaaaatgttatccttatcaagggtaatgtgccaggtgctaagaaatctcttatcatcatcaaatcagcagttaaagctgctaaa

SEQ ID NO: 36040 - DNA, 311 bp, Streptococcus mutans
atggcaaacaaaaaaatccgtatccgtttgaaagcttacgaacaccgtaaaactatgacacagcggcagataaaatcgtagaaacagcgactcgtacaggtgcaagcgttgctggtcctgtaccacttccaactgaacgcagtctttacacagttattcgtgcgactcataaatacaaagattctcgcgaacaatttgaaatgcgtactcacaaacgtctgattgatattgtgaacccaacgcaaaagacagttgatgcgcttatgaagcttgatcttccaagtggtgtaaacgtagagattaaactttaa

SEQ ID NO: 36041 - DNA, 1140 bp, Streptococcus mutans
atgacacattcaccgattcaatatcgtcttattaagaaagaaaaacacactggagcacgtctgggagagattatcacaccgcatggagtttttcccacccctatgtttatgccagttggaacacaggctactgtcaaaacacaatccccagaagaattaaaagaaatgaaagcaggaatcattttggctaatacctatcatctctggttacggccgggagatgacttggttgcaagagcgggaggtctacacaaattcatgaattgggatcagccgattttaaccgattctggtggttttcaggtttattcattggctgaaaaacgcaatattactgaagaaggagtcacttttaaaaatcatctgaatggagctagaatgtttttgaccccagaaaaggccatttctattcaaaataatttaggttcagacatcatgatgtcctttgatgaatgcccgcagttttatcagccttatgactatgtcaaagcttcaattgaacgaaccagtcgttgggcagagcgaggcctcaaagctcaccgtcggcctcaggatcagggactttttggcattgttcagggggcaggctttgaagatttgcggcgtcagtcaacagctgatctggtttcaatggattttccgggctattccatcggcggtcttgctgttggggaatcgcatgaagaaatgaatgccgttcttgactttacaacacctttattaccagaaaataaacctcgctatctcatgggagttggtgcaccggacagtctaattgatggggttattcgtggcgttgatatgtttgattgtgtcttgccgactcggattgctcgaaatggaacctgtatgacctcaaggggacgcttggttgtcaaaaatgctcagtatgcagaagactttacgccgctggatcatgattgtgattgttacacttgtcaaaattatacacgcgcttatattcgccatctgattaaagcagatgagacctttggacttcgcttgaccagttatcataacctttatttcttactaaatcttatggagaaaattcgtcaagccattatggatgataatattttagaatttcgtgaggactttattgaaaagtacggctatggacgctcagagaggaatttt

SEQ ID NO: 36042 - DNA, 2385 bp, Streptococcus mutans
atggaaactaaagttagaaaaaagatgtataagaaagggaaattttgggtggtagccaccatcacaactgctatgctgactggaattgggctctcttctgttcaggcagatgaagccaattcaactcaagtttcttcagaattggctgaaagaagtcaggttcaagaaaatacaactgcttcatcatcagcagcagaaaatcaggataagactgaagttaaagaaacaccatcaacaaatcccgcagctgctactgttgagaatactgatcaaacaactaaggtgataacagataatgctgctgttgaatcaaaagccagtaaaactaaggatcaagcagctaccgtaactaaaacatcagctagtacaccggaagtaggtcaaacaaatgaaaaggctaaggcaactaaagaagctgacataactacgccaaagaatacaatagatgaatacggtctaacagaacaggctcgtaagattgcgactgaagctggtattaatttaagcagtttgacacaaaagcaagttgaagcattaaataaagttaaattaacgagtgatgctcaaacgggtcatcaaatgacctatcaagaatttgacaagattgctcaaacgttgatagctcaagatgaacgctatgctatcccttattttaatgcaaaagcaatcaaaaatatgaaggcggctacaacgcgtgatgcccaaacgggtcaaatagctgatttggatgtttgggattcttggccagttcaggatgctaagactggtgaagttattaattggaatggttatcagcttgttgttgctatgatgggcattccaaatactaatgataatcatatttatcttctttataataaatatggagataataattttgatcattggaaaaatgcaggttctatctttggttataatgaaacacccctaactcaagaatggtcaggttcagctaccgtaaatgaagatggaagtttgcagttattctacaccaaggttgatactagtgacaaaaacagtaacaatcaacgtttagcaacagcgactgtaaatcttggctttgatgaccaagatgttagaattctttctgttgaaaatgataaagttttaacgcctgaaggcggtgatggctatcattatcaaagttatcaacaatggcgttcaacctttacaggtgctgataatattgctatgcgtgatccacatgtcattgaagatgagaatggagatcgctatcttgtctttgaggctagtacaggtacagagaattatcaaggtgaagatcagatttacaactttactaactatggcggcagctctgcttataatgttaaaagtctttttagatttttagatgatcaagatatgtataaccgtgcaagctgggccaatgcagctattggtattttaaaacttaagggcgataaaaaaacacctgaggtagatcaattttacacgcctttactaagttcaacaatggtttcggatgaactcgagcgacccaatgtggttaaattaggagataagtactatctttttacagcttcacgtcttaatcacggaagtaacaacgatgcttggaataaagcaaatgaagttgttggtgataatgtcgttatgctaggttatgtttctgatcaattgactaacggctacaaacccttaaataatagtggtgtggttttaacagcttcagttccagcagattggcgaacggcgacttactcttattatgctgttccagtagctggatcatctgataccctgttaatgacggcttatatgaccaatcgtaatgaagtcgcaggtaaaggtaagaattcaacctgggcacctagttttctgattcaggttttaccagatgggactacaaaagtcttagcagaaatgacacaacagggtgattggatttgggatgaatcaagtcgcacgacagacactgttggcacgctggatacagcctatcttccaggtgaaaatgatggttatattgattggaatgttattggtggctacggtttgaagccacatacaccgggacaatatcaaccaactgttccatcaacaccaattcatacagatgacattatttcttttgaagtctcttttgatggtcatctcgttattaaacctgtcaaagtaaataatgactccgctggtcgaattgaccaatcaaggaattcaggtgggtctcttaatgttgcctttaatgtctatgcgggcggaaatatttctgtcaaaccttctcaaaaatcgattaataacacaaaagaaacaaagaaagctcatcatgtttcaacagaaaagaaacagaaaaaaggaaattctttctttgcagctttattagctcttttcagtgctttctgtgtaagcattggttttaaa

SEQ ID NO: 36043 - DNA, 2439 bp, Streptococcus mutans
atgaccgattactcattaaaaatgcaggaagtctttcgattggcgcagtttgaagcagctcgttttgaaagttcctatttagaaagctggcatgtccttcttgcaatggtagagattgattcctcagtggctggtttaagttttgcggagtttgaagcagatgtccgttttgaggattatcaggctgctgctattttggcgattggtaaaaagcctaagtcctcgagtaatgatattatgcttttagagcaatcacatgctttaaaacgaaccctagcagaggccgctgctattagtcaggtgacacacgctaaagaagtcggcacagaacatgttctctttgctatgttactgaatcctaatcttttggcgactcgcattttagaattagttggttttcacgccaaagatgatggagagtccatccgtcttttggatctgcgaaaagtgattgaacgttatgctggcttttccaaagaggacattaaggccatctttgaaatgcgtaaacctaaaaaggtcaaaaatagcagcagcttttctgatttaatgaagccacctagcgttacaggtgaactagctgattttacacgggatttgacggagttggcaagacaaggtcgtttagaacctgttattggccgtgaacaagaaatttcacggatggttcaaattttaagccgtaagacaaaaaataaccctgttttagttggcgatgctggtgttgggaagacggccttggcttacggccttgctcaacgtattgtggatagtgccgttccttttgaattggcagatatgaaagtactagagctcgatatgatgagtgttgttgcagggactcgttttcgtggcgattttgaggaacgaatgaatcaaattattgcagacattgaagcagatggtcacattgtcctcttcattgatgagctgcataccattatgggttcaggaagtggtattgatagtacgctggatgctgctaatattcttaaaccagctttagcgcgcggcagtcttagaacgattggagcgactactcaagaggagtatcaaaagcatattgaaaaagatgctgctctttctcgccgttttgctaaggtaactattgaagaaccaagtgaagaagaagcttatcagatcttgcttggtttaaagaaaagttatgaaacttatcatcatgttattatttctgatgcagccgtaatggcggcagtcaaaggagcacatcgttatttaagtggtaaaaatttacctgattcggctatcgatcttttagatgaagctagtgcaactgttcaaggcttagtgaaaaaaaaggcaccagcttatttgacagatttagatcatgctcttatcactaacgattaccaattagctaagcgtttgctgaaaaaggagaagaagcctctacttaaaaaacgagctgaagtcaaggaagaagatatcctagctactctcagcaaactttcaggcatccctgtcaaaaaattaacacaggctgacagtaaaaagtaccttaatctcgaaagggaattacataagcgtgtaattggtcaagacgatgcggtgtccagtatcagccgtgctattcgccgcaatcaatccggaattcgggttggcaaacgtcccattggctctttcatgtttttggggccgacaggtgttggtaaaacagagcttgctaaggctttggcagaagtgctttttgatgatgagtcagctcttattcgttttgacatgagcgaatatatggaaaaatttgcagcttctcgccttaatggagctcctccgggctatgtggggtatgaagaaggcggtgagttgacggaaaaggttcgtaacaaaccttactctgttcttctttttgatgaggtggaaaaagctcatccagatattttcaatatcttacttcaagtacttgatgatggtgttttgacagatagccgtggtcgcaaagttgatttttcaaatacgattattatcatgacctctaatttgggtgcgactgcgcttcgtgatgataaaaccgttggttttggagctaaaagcttttcccaggattataaggccatggaaagtcgtattttagaggaattaaaaaaggtttaccgacctgaatttattaatcgtattgatgaaaaagttgtctttcataaccttggtcaagaagacatacgccatattgttaaaattatggttgctccattgattgcccatttggctgatcaggggattacacttaagtttcagccttcagctttgaaacatttagctctggcaggttatgatgctgaaatgggggcacgtcctttgcgtcggacacttcagacagaagtggaagataagttagcagagcttattctttcgggaaaactagccagtggacagactctgaaaataggtattcaaaaagaaaaattaaaatttgatattgta

SEQ ID NO: 36044 - DNA, 1347 bp, Streptococcus mutans
atgacacacattaaattcgattattcaaaagtattggggaaattccttgcttcacatgaattggattatattcaaatgcaagtaacagcagcggatgaggctttgcgtaaaggaactggaccgggtgctgaaatgacgggctggctgaatttacctcagaactatgataaagaagaatttgctcgtattaaaaaggctgctgaaaaaatcaaatctgatagtgaagttttggttgttatcggtattggcggttcttatctgggggcacgtgcagcgattgattttttgaacagttcttttgtcaatcttgaaaataaggaagaacgcaaagcaccgcaaattctttatgccggaaattcgatttcttcaaattaccttgcggatcttgttgattatgtggctgataaggatttttcggttaatgttatttctaaatcaggaacaactactgaacctgccatagcttttcgcgttttcaaagatcttctagttaaaaagtatggtcaagaagaagctaatcaacgtatttatgcgacaactgatcgtgttaaaggagccgttaaagtagaagcggatgccaatggttgggaaacttttgtcgttccagatagtgttggtggacgttttacggttttaacagctgttggtttattgccaattgcagcttcaggagcagatttggatcagttgatggctggggcagaagcagctcgtcaagactattcgtctgctgaattatcagaaaatgaagcttatcaatatgcggctattcgtaatattctttaccgtaaaggttatgtgacagaagttttggctaactatgaaccatcccttcaatactttagtgaatggtggaaacaattagccggtgaatcagaaggtaaagaccaaaaaggcatttacccaacatcagctaacttttcaacagatttgcattctcttggacaatttatccaagagggcaatcgcaatttatttgaaacggttatccgtgttgaaaaagcacgtaagaatatccttgttccagaagcagcagaagatcttgacggtcttgcctatcttcaaggcaaagatgttgattttgttaataagaaggctaccgatggcgtactgttagctcatacagatgggggtgtcccaaataccttcttgactattcctgagcaggatgaatttacattaggttatgtgatttacttcttcgaattggctattggactttctggttacctaaatggtgttaacccatttgaccaaccgggtgttgaagcctacaagaaaaatatgtttgctcttcttggcaaaccaggattcgaagaacttggtgctgagttaaacgcacgtctt

SEQ ID NO: 36045 - DNA, 486 bp, Streptococcus mutans
atgaattttatgattatttttggtctctttgctttagcagcctatgcagttcaaatcatattaggcttaaagcaaataaaacattttaatagcatttataggcaattaaggcgtctaggacgtgtagctattggacgtcggtctggtaagatcagagctgggactatcgttatgtttgctattgataaagatggtaaggttttggctgctaaaaagatgcagggtattaccatggctgctcgttttaaagatatgtcagattatattggacaggacatccattattttgacagctataatcccctcattcgtaaggaaaataagttactgcgcattgctattgaagatgcgagagctgtttttctaaaaacagaggcaggtatttataaagagtctcccaaacagacgccattacttgatattaggttacagactaaattcttattatcacgttttaagttaaaaaaacgtcatgaaactaaaatt

SEQ ID NO: 36046 - DNA, 1044 bp, Streptococcus mutans
atggcaaatattactgcagctcttgttaaggaattgcgtgaaaaaactggtgctggtgtcatggacgccaaaaaagccttggttgaagttgaaggcgatatgggaaaagcaattgaacttcttcgcgaaaaaggtatggccaaagcagctaaaaaagctgaccgtgttgccgctgaaggtttaacaggtgtttatgttgatggcaatgttgccgctattgtggaagttaatgccgaaaccgattttgttgctaaaaatgctcaatttgttgacttagtcaatgaaacagctaaagttatcgctgaaggtaaacctgctaacaatgaagaagcccttgctttaaaaacagcagctggagatactttagaggctgcttatgtcaatgcaacagcaaccattggagaaaaaatttctttccgccgttttgctcttgttgagaaagctgataaacaagttttcggtgcctaccagcataatggtggtaagattggcgttatcacggtccttgaaggtgaaaatacggatgaagctcttgccaaacaacttgccatgcatgttgctgcaatgaacccaagtgttctttcatacaaagaattgagcgaagaatttattcatgatgaattggctcaaatgaaccataaaattgaacaagataatgaaagccgtgctatggttgataaaccagctcttccgcttcttaaatacggttcaaaaggtcaattaactgatgaagtcgttgctcaagctgaagaagatatcaaggcagagcttaaagctgaaggcaaacctgaaaaaatttgggataaaatcattcctggtaaaatggctcgcttcttcttggacaatacgaaggttgaccaacaatatactttgttatcacaagtttacattatggatgacagtaagactgttgaagcttatatggaatccgtaaatgggaaagtgattagctttgttcgttttgaggtcggcgaaggtattgaaaaagcagctaacgattttgaaaatgaagttgctgcaaccatggcagctgctcttaataaa

SEQ ID NO: 36047 - DNA, 783 bp, Streptococcus mutans
atggcagttatttcaatgaaacaactcctcgaggctggtgtgcactttggtcaccaaacgcgtcgttggaatcctaagatggctaagtacatcttcacagaacgtaatggaattcacgttattgaccttcaacaaactgtaaaattagctgatcaagcttacgacttcgttcgtgatgctgcagcaaatgatgctgttatcttgtttgttggtacgaaaaaacaagcttctgaagcgattaaagaagaggcagaacgtgctggtcaatactatatcaaccaccgctggttgggtgggactttgacaaactgggatacaattcaaaaacgtatcgcacgtttgaaagaaatcaaacaaatggaagttgatggtatttttgatgttcttcctaaaaaagaagttgctcttcttaataagcaacgtgcgcgtcttgaaaaattcttgggtggtatcgaagatatgcctcgtattccagatattatctacatcgttgatccgcacaaagaacaaattgcagttaaagaagctaagaaacttggtattccagttgtcgctatggttgatactaatgctgatccagacgatattgatgttattatcccagcaaatgacgatgcgatccgcgccgttaaattgattaccagcaaattagctgatgctgtgattgaaggtcgtcaaggtgaagacagtgttgaagctgttgaagcagaacttgcagctggagaaacacaagcagattcaattgaagaaattgttgaagttgttgaaggcgcaaacgaaaat

SEQ ID NO: 36048 - DNA, 711 bp, Streptococcus mutans
atgaaaaaatatgaaattatttttaaaaaactagaagaagatattctcaaaggacactatcaaatgggtgactatcttccccctgaaatggaacttagccagacctatgccagcagccgagatactgttagaaaggctttacagctcttgactaaggcaggttttattaaaacagtacagggaaggggatcccaaattatcaagcgtgagcgcattaactttcctgtttctcaactaaccagctatcaagaattggttaaacaattgcagatgaatgtcaagacaaatgttattgctattgataaactgattgttgatgagaaactcaccaaactaaccggttttgaaaataaaggtcttgtctggcgcatcacaagacagcgcgtcatagacggcgttgcttccattttagatacggattatttggataaagcattgattcctcatatgaccagagaaatcgctgaacattctatctatgattatcttgaaaatcaacttaagctggacattgcctatgctcaaaagattattaccatagatcaagtatcgcaaaaagataaaattttgcttgatttggattctgaaaatcatgtcgtttcggttaaatctaaagtttatctcagtaatcagcagcaatttcaattcactgaaagccggcacaaactggaaaagttccgttttgttgactttgccagacggcatcgtgat

SEQ ID NO: 36049 - DNA, 696 bp, Streptococcus mutans
atgactgcacaaaaaatgtctgcgcaagaaatcattgctttcatcggcaatgccgaaaagaagactaatgtcaaagtgacttttgaaggagccttggccgcggctcttcctgaaaatgttgtcaagcttggcaatgttcttttcggtgattggaaggacattgaaccgcttttggctaatttaacagaaaataaagactatgtggtagagcaggatggccgcaattctgcagtgcctttgctagataaacgcaacatcaatgctcgtattgagccgggtgccatcattcgtgatcaagtgaccattgaagataatgctgtggtcatgatgggggctattatcaatatcggtgctgaaattggtgaaggaaccatgattgatatgggagctattcttggtggtcgcgcaactgttggtaagaacagtcacatcggtgcaggtgcagtacttgctggtgtcattgagcccgcttctgcagatcccgttcgtattggagacaatgttctggttggtgccaatgcggttattattgaaggggtgcaagtggggagtggttcggtcgttgcagcaggtgctattgtaactcaagacgtccctgacaatgtcgtggtagctggtgtgcctgcgcgtgttatcaaagaaattgatgaaaaaacgcagcaaaagactgctttagaagatgctcttcgtaacctc

SEQ ID NO: 36050 - DNA, 534 bp, Streptococcus mutans
atgatgaaaaaggactatcgtactcaagtcattgaagatttgaaaaaacaagataaagccaaaaaagtgctcagagatgagcaacttttggaagaacttattcaattagaggcttatcaaaaagcacatgttattgcaacttatttagcttttccttttgaatttgacacatctttgctgattgagcaagctcaaagagataataaaagcatagttgttcctaaaacctatcctcaagggaaaatgatttttgttgtttatgatgaagcagatttacaaattactaaatttggcctcaaggaaccaagaagtgaggaggctcttgaaaaatcagctattgatctcatccatgttccggggcttgcttttaacaatgaaggctaccgtataggttttggtgcgggatattatgatcaatacttggcagattttcagggtgatacagtcagcacaatttattcttttcaaaagttcacttttgagcctagtttttttgacattccagtaaaggaggtgttggtcagtggagacctt

SEQ ID NO: 36051 - DNA, 918 bp, Streptococcus mutans
atgccaagtaaaaaagtcagaaaagctgtcatccctgcggcaggtttaggaacacgtttccttcctgctaccaaggctcttgccaaagaaatgctaccaattgttgataaaccaaccattcagtttatcgttgaagaagctttaaaatcaggcattgaagacatcctagtggttacaggtaaatcaaaacgttctattgaagatcattttgattcaaattttgaacttgagtacaatcttgaacaaaaaggaaaaacagatttacttaaactcgttaatgatactactgcaatcaatctccattttatccgtcaaagccatccgcgcgggttaggtgatgctgttcttcaggctaaagcctttgtaggtaatgaacctttcgttgttatgctcggtgatgatttgatggatattacagatgacaaggctatccctttgacacgtcaactcatgaacgattatgaagaaacgcatgcctcaacgattgcagtcatggaggttccccatgaagatgtttctgcctatggtgtaattgctcctcaaggagaaggagttagtggcctttacagtgtcgatacttttgttgaaaagcctgctcctaaagaagcgcctagcaatctagctatcattggtcgttacttattaacgccggaaatttttacaattcttgaaacacaagaacccggtgctggcaacgaagttcaattaacagatgccattgatactcttaataaaacacaacgtgtttttgcacgtgaatttaagggaaaacgttatgatgttggtgataaatttggtttcatgaagacttcaattgattatgcacttaaacatccacaagttaaagaagatttaaaagcttatattattgaacttggtaaaaaattagaccaaaaatcgactcaaaagaactcggat

SEQ ID NO: 36052 - DNA, 1017 bp, Streptococcus mutans
atgatcagacaaaaaattgccgtactaggtcctggttcttggggaaccgccttatcccaagttcttaacgacaatggtcatgaagtccgtatctggggaaatattcctgaacagcttgatgaaattaatgaacatcatactaacaagcgttattttaaggatgtggtcctagatgaaaaaatcaaagcttatcacgatttagaggatgctcttaaggatattgatgctgtcctttttgttgttccaacaaaagtaacacgcttggtggccaagcaagtttcacaaattcttgatcacaaagccgttgtcatgcacgcttctaaaggcttggagccgggcactcacgaacgcttatctgtcattcttgaagaagaaattccaaatcatcttcgaagcgacatagttgttgtttctggacccagccatgctgaggaaaccatcgtgcgcgatattaccctgattacagcggcatctaaagatttagaagccgccaaatacgttcaaaagctctttagcaacaactattttcgtctttacaccaatcccgatgttattggtgtggaaactgctggtgctctgaaaaatatcattgctgttggggcaggagcactccatgggatggggtatggtgataatgctaaagcagctgttatcacacgcggtctagccgaaattacacgtttaggcgtcaaactgggagctgatccgctcacttacagcggtctgtctggtgttggagatttgattgttactggaacttctatctattcacgtaattggcgggccggagatgctctaggacgcggagaaaaattggaagacattgaaagaaatatgggaatggttattgaaggaatttccacaacaaaggtcgcctacgaactttctcgagaactcaacgtctatatgccaattacctgtgctatttatcagtcaatttatgaaggcaaaaatattaaagaagctatcacttctatgatgtcaaatgagtttagagcggaaaatgaatggagtaaa

SEQ ID NO: 36053 - DNA, 2220 bp, Streptococcus mutans
atggcgaaagatgcaaatttaacaggtcaagaggttattgatatctgctcaatgtatatgaataaagcagatattgcctttgttcaaaaagctttagattatgccacggaatgccatagcggtcaatttcgtaagtcaggggaaccttatattattcatcctattcaggttgcaggaattttagccgacttacatttggatgctattacagtttcctgtggctttttgcatgatgtcattgaagataccgaagcaactttagatcatttagaagctaaatttggcagtgatgttaagaacattgttgatggtgtcacaaagctagggaaagttgagtataaatcgcatgaagaacagctagcagaaaatcaccgtaagatgttgatggctatgtctaaagatattcgtgtcattctggttaaattagctgaccgtcttcataatatgcggacgctgaggcatttacgcaaggataagcaagaacgtatttcacgcgaaaccatggaaatttatgctcccttggcgcatcggctggggattagtcgcatcaaatgggaattagaagatttagcttttcgttatcttaatgaagttgaattttataaaatttcgcatttaatgaacgaaaagcgtcgtgaacgtgaagcattagttgatgatattgttgataaaattaaagcttatactgcagagcagggcttacatggtgagatttacggacgtcccaaacacatttattccatttatcggaagatgcgtgataagaagaaacgttttgatcaaatttatgatttgatcgctattcgttgtattttggatacacaaagtgatgtttatgccatgctgggttatattcatgagctttggcgtcctatgcccggtcgttttaaggactatattgctaaccctaaagcaaatggttaccaatccattcatacaactgtttatggacccaaagggccaattgaagtacaaattcggacgcatgaaatgcatcaagtggctgaatatggggtagcagctcactgggcttataaaaagggaatcaaaggtaaggttaacagtcaagaatcagctctaggaatgaactggattaaggaacttgttgagttgcaagacgcttccaatggcaatgcggttgactttgttgattctgtcaaagaagatatctttgcagagcgtatttatgttttcacacctaatggtgctgttcaagaattgcctaaggattctggtcctattgactttgcctatgccattcatacacaggttggagaaaaagcaacaggcgctaaagttaatggtcgcatggtccctttaacagctaagctcaaaacaggtgatgtggttgaaatcatcacaaattccaattcttttggtcccagccgtgactggattaatattgttaagaccaataaagctcgtaataaaattcgtcaattttttaaaaaccaagataaggaactctctatcacaaaaggccgtgatttgctggttgattattttcaagagcagggctatgtggccaataaatatttggatagaaaacatatagaggctgttttgaatcgtctcaactaccgtaatgaaggagctctttatgcggctgtcggttttggtgaattgtcgcctgttaccgtctttaataaattgacagaaaaagaacgccgtgaacaagaacgtgccaaagctaaagcggaggctgaggaactcatgaagggcggtgaagtcaagcacgacaataaaaaagaagtccttaaggttaaaagtgaaggcggtgttattgttcaaggctcctctggtcttttgatgcggattgctaagtgctgtaaccctgtcccaggcgatcctattgaaggctatatcacaaaagggcgtggcgtcgctattcatcgtgctgactgtcataatattaagagtcaagaaggctatgaagagcgtttgattgatgtcgaatgggaagatgattattccaccaaggaatatatggcagaaattgatatttatggtctcaaccgtgccggtctcttaaatgatgttctgcaaatcttatcgaatcaaacaaagaacatctcaacggtcaacgcccagccaactaaggatatgaaatttgccaatatccatgtgacttttggcatccctaacttaaccgttttaacagctgttgttgataaaattaaggtcattccagatgtttattctgttaaaaggactaacggg

SEQ ID NO: 36054 - DNA, 2127 bp, Streptococcus mutans
atggttgttattgctgttatgcctgcagcaggtttgatggtttctattgggaattcattagccttgattgaccctaaatcaacccttttagtgactgttgctaatatcattgcccaaattggttggggtgttattaacaaccttcatattttatttgctgtggctatcgggggtagctgggctaaggaacgtgcaggtggagctttcgctgcagcccttgcctttattttgattaaccttattactggtaacttttatggcatatcgcttgagatgattgcggataaaacaagttatgtacacaatatctttggcggtaagatgcacgttgctgattactttatcaatgtacttggccaacctgccttgaacatgggagttttcgttggtattatctctggtttcgttggcgcaacagcttataacaagtattataatttccgtaaacttccagatgttttatcgttctttaacggaaaacgctttgtaccttttgtcgttattgttcgttcaacaattgttgctttaattctttctgtattttggccaattgtacaatctggtattaatggttttggtatgtggattgcttcttcacaacataccgcaccgtttcttgcgccattcctttatggtactttagaacgtttactgttgccatttggtttacaccatatgttaacgattccaatgaattatacccaactcggtggtacttatgttgtcttgacaggtgctcaagcaggaaaacatgtgcttggacaagatccactttggttagcttgggtgcaagaccttatccatcttaaaggtgcaggtcatatgtctcaataccatcacttgttaacatctgtaactcctgctcgtttcaaggtaggacaaatgattggttcatcaggtattcttatgggacttacattggcgatgtaccgcaatgttgacccagataaaaaagaaaaatataaagggatgttcctttcagcagctgttgccgtattcttaacaggggtaacagaaccacttgaatacatgtttatgtttgcagctttaccgctctatcttgtttacgctgttgttcaaggtttggcctttgcatcagccgatttgattcaccttcgtgtgcattcatttggtaatattgagtttctgacgagaacgccaatggctatcaaagccggtttagctatggatattgtcaactttatcgttgtttcagttgtctttggtgttgctatgtacttcattaccaactttatgattaagaagtttaatttggcaacttcaggacgtaatggcaattatgatacaggtgatgatgcttctgacgaaacagcttcaaatagtaatgcaggaacagcaaatgctaattcacaaattgtaaaaattatcaatcttttaggtggtaaagaaaatatctctgatgttgatgcttgtatgacccgcctgcgtattactgtgaccgatgttgctaaagtgggtgatgaagctgcttggaaaaaagcaggagctatgggcttaattgtcaaaggcaatggtgttcaagccgtttatggtcctaaggcagatgtccttaaatctgatattcaggatttattagattcaggagtggacattcctaagacagatgttacagctctagaagaagataagacagcagatgtcagcttcaaaggagttacagaagaaatagcaactgtggcagatggtcaagtacttccaattacacaagtacatgacccagtcttctcacaaaaaatgatgggcgatggtttcgctgttgagccagaaaatggcaatatctactctccagtagctggtttagtaactagtgtcttcccaaccaaacatgctcttggtcttttaacggatgatggacttgaagttttagttcatgtcggtttagatactgttgctcttaatggagctccattctctgctaaggtgaaagatggccaacgtgttgcattaggagacttacttctagttgctgatttggaagctatcaaatctgcagatcgtgaaacaactgttattgttgcctttacaaatacagcagaacttaagtctgtaacgcttgagaaaacaggtcaacaagctgctaaaacagttgtcgccaaagtagaactt

SEQ ID NO: 36055 - DNA, 741 bp, Streptococcus mutans
atgcagcagtattttgtaaatggcaaagctgacaagctggtcacgattactgataaggatactatcaagcatatgtttaatgtcatgcgcttgactgaggatgacgaagtggtgctggtttttgatgatggaatcaaacgtttggcgcgtgtgaccaatgtccaagaacacacttttgaaattgtagatgagctatctgacaatgtggaattacctgtccaagtcgttatcgcttcaggattccccaaaggagataaattggaatttcttgcccaaaagacgactgagctgggtgcgcatgctctctgggcctttccagctgattggtctgtcgttaaatgggatagtaaaaaattgctcaaaaaagccgataagctgactaagattgcccaaggagcggctgaacagtccaaacgcaatatcattccgcaagtcaaattttttgagaaaaagtctgactttctgactcagttggccgtatttaataaaatcttcgttgcctatgaagaatctgctaaaatcggtgaaagcgcagctctggcgcgtgaactagcacaactgagcgcagaccagcaaattcttttcattttcggtccggaaggcggcctttcaccagcggagatagcagcctttgagaaagctggggctgttaaagttggactaggtccccgcatcatgcgaacagaaacagctccgttgtttgctttaagcagtattagttatgttctggaattagcaaaa

SEQ ID NO: 36056 - DNA, 1398 bp, Streptococcus mutans
atggcagattgctggaatagtaacgagaggagaattaccatagctaagaaaaaaacaacttttgtctgtcaagagtgcggctataattcgcccaagtatctgggacgttgtcctaattgctcgtcttggtcttcttttgttgaagaggttgaagttgctgaggttaaaaatgctcgcgtttcactgacaggtgagaagacacggccagtcaagttaaatcaggtcacctccagccaagccactagagtcaagaccaatatggaagaattcaaccgtgttttgggtggtggtgttgtaccaggcagtctggttcttatcggcggtgatcccggcatcgggaaatcgaccctacttttgcaagtttcaacacaattagccaataaaggaactgttttttatgtttctggtgaagaatcagcggagcagatcaagttgcgtagcgagcgtctcggtgatattgacaatgagttttatctctatgctgaaactaatatgcaaagtattcgtgctgagattgaaaaaatccagcctgattttttaattattgattctattcaaacagtgatgagtcctgaaatttccagtgttcaaggttctgtttctcaggtgcgtgaagtgacagcagaattaatgcaattagctaaaaccaataacattgcgacttttattgttggacatgtgactaaagaaggaaccttagctggaccgcgaatgttagaacacatggtggacactgtgctctactttgaaggcgagcggcagcatacttttcgtatcttacgagccgttaaaaatcgctttggttctactaatgagattggtatttttgaaatgaggtcgggtggtttggttgaggttttgaatcccagccaagtttttttagaagagcgtctagatggagcaacaggctcagctattgttgttaccatggaaggaacacgacctattttagcggaagtacaagccctagtaacaccaactgtttttggtaatgctaaacggacaacaacaggactggactttaatcgtgttagtttgattatggcggttttggagaagcgctgcggacttttattgcaaaatcaagatgcctatctcaaatcagctggtggtgtgcgcttagatgagcctgctattgatttagcggttgcggtagccattgcttccagttataaggaaaagccaaccacccctcaagaatgttatattggtgaaattggtttgacaggtgaaattcgtcgtgttaatcgtatcgaacaacgtctcaatgaagctagtaagctcggttttaccaagatttttgtacccaaaaattccctgtcaggtttaacgattccacaaggtattcaggtaattggtgtgacaactgttagtgaagtcttaaaaaaggtatttaat

SEQ ID NO: 36057 - DNA, 1263 bp, Streptococcus mutans
atgccaaataacctcgcacttcgtatgcgccctcgagatatctctgaagttatcggacaaaagcatctagtcggtcaaggcaagattatttcgcgaatggtcactgctaaccgtctgtcttccatgattctttatggccctcccggaattggaaaaacctcaatcgcttctgccatcgctggtacaaccaaatttgcctttcgtaccttcaatgcaacaaccgacactaaaaaacgcctgcaggaaattgctgaagaagctaaattttcaggtggtttggtcttgctcctagatgaaattcatcgtctagataaaactaagcaagattttcttctccccttgttggaaaacggacaaattatcatgattggcgcaaccactgaaaatccctttttctctgtcacccctgccattcgctcgcgtgttcagatttttgagttagagccattatcaaatgaggatatcaaaaaagctatgcaagcagctctgacagatacagagcgcggctttgattttgaagtcaaattagatgatgatgctcttgacttcattgcgcaagccaccaatggcgacttgcgctctgcctataattctcttgatttagccatcatgtccacccagccagatgacaatggtagtcgccacatcaccttagacactgttgaaaacagcctacagcgcagctacattaccatggacaaggatggtgatggccactatgatgtcttgtccgccttacaaaaatctattcgcggttcagatgtcaatgccagccttcactatgctgccagattaatcgaagctggtgatctgccaagtctagctagacgtttaaccattattgcttacgaagatatcggcttagccaatcctgatgcacagattcatacagtgacagcgctggaagcagcccaaaaaattggttttcctgaagcccgcattttaattgccaatgttgttattgatttagcactctcacctaagtctaattccgcttatgttgctatggacaaggccattgcagatcttcataaaagcggcacgatccctattcctcgccacttacgtgatggtcattacgctggcagtaaagaattgggcaatgcccaagattatctctacccgcatgcctatccggaaaaatgggttaagcagcaatatttaccagacaaactcaaaggagctaactattttactgccaatgaaacaggtaaatacgaacgggcactgggggctaacaaagacaagattgataaactttca

SEQ ID NO: 36058 - DNA, 1455 bp, Streptococcus mutans
atgacaaacaaaattcgtgtgcgttacgcaccaagtccaacaggattgttacacattggaaatgcacgtactgcgctctttaattatctctatgcgcgtcatcatggtggcgattttatcattcgtattgaagatacggaccgtaagcgccatgttgaggatggggaacgctcccagcttgaaaatctgcgttggttgggcatggattgggatgaaagtcctgaaacgcatgaaaattatcgtcaatcagaacgtttagcactttataaaaaatacattgaccaactcttggctgaaggaaaagcttataaatcttatgtaacggaagaagaattagctgcagaacgtgaacgtcaagaagcagctggtgaaacacctcgctatatcaatgaatttctcggtatgtcagcagatgaaaaggctgcctacatcgcaaaacggcaagcagctggtattgtgccaacggttcgtttaaaagtcaatgaagctggtatttataaatggcatgatatggttaaaggtgatattgaatttgaaggtggcaatattggtggtgactgggttatccagaagaaagacggttacccaacctataattttgccgttgtagtggacgatcatgacatgcaaatttctcatgttattcgtggtgatgaccatattgccaatacgccaaaacaactcatggtttacgaagcacttggttgggaagcgccagcatttgctcacatgactcttatcatcaactcagaaacgggaaagaaactatccaaacgtgataccaataccctacaatttatcgaagattatcgtcagaaaggctatctgccagaagctgttttcaatttcatcgctcttcttggttggaatcctggtggggaaaacgaaattttttcacgtcaagaattgattgaactctttgatgaaaatcgtcttagcaagtcaccagccgcctttgatcagaagaaattggactggatgaataatgaatacatcaaaaatgccgattttgatacgatttttgctttggcaaaaccttatttagaatcagctggtcgtttgacagataaggctaaaaaattggttgagctctatcagccacagatgaaatctattgatgaaattgtgcctttaacggatcttttctttgaagagtttccagaattgtcagaagaggaaaaagaattcatggctggtgaaacagttccaattgttctccaagccttcaaggcaaaattggaagccatgtcagatgaagatttcaaatcggaaaatatttttccgcaaattaaagccgttcaaaaagaaacgggcatcaaggggaaaaatcttttcatgccaattcgtattgccgtttcaggtgaaatgcatgggccagaattaccagatacaatcttcttactaggtaaggaaaaatccattcagcatcttgaagatatgcttgaaaaattgaaa

SEQ ID NO: 36059 - DNA, 1380 bp, Streptococcus mutans
atgacaacaaaaaatcacaaattatggggcggcagatttgaagctggtttagcacagtgggttgaggaatttggagcttccatttcctttgatcaaaaattggcagaatttgatctcaagggttctattgctcatgttaccatgttaggggaaaaaggaattatttctcaagaagatgccgcaacaatcaaagcaggtttagaagacttgttagaagaatataaagctggacaattgaaatttgatgtttccaatgaagatattcatatgaatatggaaagtcttctgactgctaaaattggtcctgtggcaggcaagcttcacacggctcgttcgagaaatgatcaggtagcgacagatatgcatctttacttgaaagctaagttggatgaggtgattgaaaagttagctaacttgcgtactgtcttagttgacttggcagataagcatgttcatactattatgccaggctatacccatttacagcatgctcagcctatttcttttggccatcaccttatggcttattacaacatgtttacccgagacagtgaacgttttatttttaatgttaagcatacagacttgtctccgctgggagcagctgctttggcaggtacgacctttccaattgatcgtgagatgacagcacagcttatggggtttgccgaaccttacagcaattcactagatgcagtatctgatcgtgattttatcttagaatttttatcgaatgcttctattcttatgatgcatatgagccgtatgtgtgaagaagtcattagttggtgctctcatgagtatcaatttgtaacgctttcagatacgttttcaaccggctcatccatcatgccgcaaaagaaaaatcctgacatggcagagctcattcgtggaaagtcaggacgtgtttatgctaatctttttggacttttgactgttatgaaagctctgcctttggcttataacaaagatcttcaagaagataaggaaggtatgtttgatactgctgaaacgattacagttgctcttgacattttggctggtatgctatctagtatgattgttaatgacaaacatatggctgaatcaactcaaaaagatttttctaatgcaacagaattggctgattatttagccagcaaaggcatgccctttcgtcaggcccatgagattgttgggaaattaatccttgaatgcagtaagaatggtcattatttgcaagatgttcctcttgaacgttatcaaaccatttctgacttaattgaggaagatgtctatgaaacacttaaatcacatacggccgttgagcgacgtcattctcttggcggaactggttttgaacaggttaaatggcagattgcagaggctaaaaaagcactt

SEQ ID NO: 36060 - DNA, 357 bp, Streptococcus mutans
ttgaaaaaagcctatcgcgttaaaagtgataaagattttcaggcaatttttactgaaggacgaagtgttgccaatcggaaatttgttgtctatagtttagaaaaagatcaaagtcactatcgtgttggactttcagttggaaaaagattaggaaatgctgtcgttagaaatgcgattaaacgaaaattgcgccatgtccttatggaacttggtccttatttaggcactcaagattttgttgttattgctagaaaaggtgttgaggaacttgattatagcacgatgaaaaaaaatctggttcatgttttaaaactggctaaactgtatcaggaaggatctattcgtgaaaaagaaata

SEQ ID NO: 36061 - DNA, 813 bp, Streptococcus mutans
gtgaaaaagaaatatagaattattggattagctgttgcagcacttttgtttttatcggcttgtggacgtagtcaagttaccagtcattcaagcgatgcttgggagaagtttgtttatttctttgcggagaccatccgctttttatccatcaatggcaggattggtatcggaattattctctttacctttcttatcagaaccattcttttaccactgtttaacttgcaattgaaatctggacaaaaaatgcaggagcttcagcctgagctgaaagctttacagactaaatatccgggtaaagacagggaaagccgtatgcgtatggctgaggaaagtcaggaactttacaaaaaatatggtgtcaatccctatgccagcctttttcctcttcttattcagatgcccgttctttgggctctctatcaagcccttactcgagttgaatttttaaaaacagggtcttttctttggatggatattggcaataaagatccttactttatcttacctgtcttggcagctatttttactttcttatcttcttggctgactaataaggccgccaaagaacgaaatggtatgatgataacgatgaacattatcttaccgatctttatcttgcttattggctttaatttagccagtggggttgctctctactgggtagtctcaaatgcttatcaggtcttccagattctgttgttaaataatccctttaaaattattgcagaacgccagcgtcttgaagatgaagcacgtgaattggaagctaagaaaagacgtgctaaaaagaaagcacataaaaagagaaaa

SEQ ID NO: 36062 - DNA, 897 bp, Streptococcus mutans
atgcataagaggggacagacagctattatttttcattttcaaaggggggctgtactaaaatcagctccattatctcactcagtgaaccataatattttatttagcatatgttataatgatagtatgctacaaatatttgatactcacacccaccttaacgtggaagattttactggaaaagaacaagaagaaattaactttgcgcatgaactcggcgtgaccaagatgaacattgttggttttgaccaatcaaccattaagcgtgctcttgaattggctgagctctacccagaactctatgcaactatcggctggcacccgactgaagctggttcctacatgcaggaagtggaggacatgattgtcagccatctgcatgaccctaaagttatcgctctcggcgaaattgggctagattaccactggatggaagatcctaaagaagtacagatcgaggttttcaagcgccagattcagttatccaaagaccatgacctgccctttgttgttcacacccgtgatgctttagatgatacttatgagattatcaaagaagcgggagttggtccgcgcggtggcatcatgcattcttactcaggctctttggaaatggcagagcgtttcatagatttgggcatgatgatttcattttctggcgtggtcacctttaagaaggctctggatgtccaagaggctgcgcagcatttaccattggataaaatcttggtcgaaaccgacgcaccctatcttgctcctgtacccaaacgtggccgtaaaaatcatactgcctatactcgctatgttgtagacaaaatcgcagagcttcgcggtctcacgatcgaagaagttgcccaagccacctacgacaatgctatgagactattcagattgaaagac

SEQ ID NO: 36063 - DNA, 570 bp, Streptococcus mutans
atgacagaaaaaatcaaaatacaagaagtcctcgtcgtcgaaggcaaagacgacaccgtcaatctacgtcgcttttatgatgtagatacatacgaaaccagaggatcagctatcaatgatgaagatttagagcgcatcgaaaaactcaataatctgcgcggagttatcgtatttactgatccagactataatggcgaacgcattcgcaagctgattatgacagctgttccgaccgctaaacatgcttttctcaatcgcggtgaagcagtgcctaagtccaaaactaaaggtcgttcgctgggcgttgaacatgcctcttttgaagatttgcaaaaggctttgtctggtgttttgggtaactatgatgatgaaaatcattttgatattagcaagtccgaccttatgcgctttggtcttctcatgggagctgatagccgcaagcgccgtgagtatattggggaaaaactgcgtataggctacagcaatggcaaacagctgcttaaacgcttggaactctttggaattactaaggcggaagttgaagaagtaatggaaaagtatcaaaaaaga

SEQ ID NO: 36064 - DNA, 873 bp, Streptococcus mutans
atgaaaatcgcagacaaaaccgttactcgcgcgattttggagcgccacgggttcacgtttaagaaattatttggtcagaattttttgaccgataccaatatcttgcagaagattgtggatacggctgagattgacaaaactgtcaatgtcattgagattggtcctggcattggtgctctgaccgaatttttggcggagaatgccgctgaggttatggcttttgagattgatgatcgtctcgttccgattttggcggatacgctgcgcgattttgacaatatcaaagtggtcaatgaagatattctcaagtccgacttgcagacacgtatcaaggaatttgccaatcctgacctgcctatcaaggtggtagccaatctaccttactacatcacgacgcctatcctcatgcacctgattgagagtaaaattccttttgcggagtttgtggttatgatgcaaaaagaggtggcagaccgcatttcagctcagccaagtaccaaggcttatgggtctttgtcaatcgctgtgcagtattacatgacggctaagattgctttcattgtgccacgtaccgtctttgtgccagcacccaatgttgattcagccattcttaagatgacccgccgtgaacaaccgctggtgcaagtgcaggatgaagatttcttcttctgcgtcggcaaagctgcctttgtccaccgccgtaaaaccctctggaacaatctcaccagccactttggcaaatcagaagaggtcaaagtcaagctggaacaagccttggaagcagcagacatcaaaccatctattcgtggtgaagaactgacgattacagactttgccagattggcagatgctctacgagaagttgatttgaaa

SEQ ID NO: 36065 - DNA, 834 bp, Streptococcus mutans
ttggtaacggagttttctttagacattcttctaaagattattaagctcgctcgttcaacctattattaccacttaaagcagctagataaaagcaataaagatcatgctattaaagctgaaattcaagctatttttactgagcacaaaggaaattatggttatcgtcgaatgactcttgaattgagaaatcgtggcttcttggtaaatcataaaaaggttcaacgtctaatgaaagttcttggtttggaggctcgtattcgtcgcaaacggaagtattcttcctaccaaggagaggtgggcaagaaagcagacaaccttattcaacgccaatttgaagcatcaaaaccaatggaaaagtgctacacagatgtgacagaatttgccattccagcaagcggtcaaaagctctatttgtcaccagttttagatggtttcaacagtgaaattattgcttataacctttctacgtcaccgaacttgatacaagtgaaagctatgctagaacaggctttcacagagaaacattacacaaatactattcttcatagtgaccaaagctggcaataccagcatgatttttatcatcaatttttagagaacaaggggattcagccgtccatgtcacgtaaaggaaacagcccagataatggcatgatggaatctttctttggcattttgaaatccgaaatgttttacggttatgagaagacatttaagtcacttaagcaattggaacaagctattgtagactatattgattattacaacaacaaacgtattaaggtaaaactaaaaggacttagtcctgtacagtacagaacgaaatcctttact

SEQ ID NO: 36066 - DNA, 978 bp, Streptococcus mutans
atgaggaatcaaatgaaaattaatcaaatgaaaaaagatgaacttttcgagggattttatctcattaaatcagcagagctcagaaaaacaagagcaggaaaagattaccttgcctttacctttcaagatgatagtggagaaatttctggtaatctttgggatgctcagccttataatgttgaagaatttactgctgggaaagttgtctttatgaggggacgccgtgaagtttataatgggacaccacaagtcaatcaaatcagcttacggcatcctaaggatggagagcctaatgatcctagagattttaaagaaaaaccgcctgttgatgttgaagaggtcaaagattatcttgaacagatgctcttcaaaatcgaaaatgctacctggcagcggattgtccgtgccctttatcgtaagtatagtaaagaatttttcagctttccggcagctaaaacaaatcaccatgcttttgaagttggtctggcctatcatacagcaactatggttcgtttggctgatagtatcggggatatttatgaagaacttgacaaaagtcttctgtttgcgggtatcatgctgcatgatttagccaaagttcttgagctatctggtcctgataataccgaatatactattcgtggcaatcttattggtcatattgctttgatcgatgaagaaattactaaagttttatcagaattgtctattgatgatactaaggaagatgttattgtcttgcgccatgttattctcagccatcatggtctcttagaatatggcagtcccgttagacctaaaattatggaagcagaaatcattcatatgattgataatattgatgctgaaatgatgatgatgacgactgctctatctcgtgtatcagaaggagagatgactggtcgtatctttgctatggataatcgttctttctataaacctaaaacaaaccatcaaaacacgaaaaaagatgactat

SEQ ID NO: 36067 - DNA, 411 bp, Streptococcus mutans
atgcctacaattaaccagttggttcgtaagccacgtaagtctaaagtagaaaaatctgactcaccagcattgaatattggctataatagccataaaaaagttcatactaaacttgctgcacctcaaaaacgcggtgttgcaacacgtgttggaacaatgacccctaagaaacctaactctgctcttcgtaaatttgctcgtgttcgtttgagtaaccttattgaagtcactgcttatattccaggtattggtcacaatctgcaagaacacagtgttgtacttattcgtggtggacgtgtaaaggaccttccaggggtacgttaccatattgttcgtggtgcacttgatactgccggtgttactgatcgtaaacaaggccgttctaaatatggtactaagaaaccaaaagca

SEQ ID NO: 36068 - DNA, 468 bp, Streptococcus mutans
atgagtcgtaaaaaccgtgcgcctaagcgcgaagtattgccagatccattatacaattcaaaacttgtaacacgtcttatcaaccgtattatgcttgatggtaaacgtggtacagctgcatctatcgtttatggagcttttgaacaaattaaggaagcaacagggaatgatgcacttgaagtctttgaacaagccatggaaaatatcatgcctgtacttgaagtacgtgcacgtcgtgttggtggttctaactatcaagtcccagttgaagttcgtcctgaacgtcgtacaacattaggtcttcgttggttggtgactgcatcacgtactcgtggtgaacacacaatgaaagatcgtcttgcaaaagaaatcttagatgcgtcaaataatacaggtgcctcagttaaaaaacgtgaagatacacatcgtatggctgaagctaaccgtgcttttgcacacttccgttgg

SEQ ID NO: 36069 - DNA, 2079 bp, Streptococcus mutans
atggctcgtgaattttcacttgaaaaaactcgtaatatcggtatcatggctcacgttgatgctggtaaaacaactacaacagagcgtattctttactatactggtaaaattcataagattggtgaaacacacgaaggtgcttcacaaatggactggatggaacaagagcaagaacgtggtatcacaatcacttcagctgcaacgactgctcaatggaaagaccatcgtgtcaatattattgacacaccggggcacgtagactttactatcgaagtgcaacgttcccttcgtgttctagatggtgctgttactgttcttgatgctcagtcaggtgttgaacctcaaacagaaactgtttggcgtcaagcaactgagtatggtgttcctcgtatcgtatttgctaataagatggataaaattggtgctgatttcctttattcagtgagcactcttcatgatcgtcttcaagcaaatgcacaccctattcaattgccgatcggagcagaagatgattttgaaggtattattgatttggtaacaatgaaagccgaaatctatacaaatgatcttggtacagatattttgattgaagatattcctgctgattaccttgatcaagctaaagaataccgtgaaaaattgattgaggcagttgctgaaactgatgaagatctgatgatgaaatatcttgaaggtgaagaaatcactgaaacagaattaaaagcagctattcgtaaagctactattaatgttgaattctttccagttcttgcgggttcagctttcaagaataaaggcgtccaaatgatgcttgatgcggttgttgattaccttccaagtccgcttgatattcctcctattaaaggtgttaatccagatactgatgaagaagaagagcgcccagcatctgatgatgaaccatttgctgctcttgcctttaagattatgactgacccattcgtgggacgtttgactttcttccgtgtttattctggtatcctaaacagtggttcttatgtgttgaatacctctaaaggaaaacgtgaacgtattggacgtatccttcaaatgcatgccaacagccgtcaagaaattgaaaccgtttatgctggtgatattgcggctgcagttggtttgaaagaaacaacaactggagattcattaactgatgaaaaagcaaaagtgattcttgaatcaattgaagttccagaacctgttattcagttgatggttgagccaaaatcgaaagccgatcaagataaaatggggattgctcttcaaaaacttgctgaggaagatccaactttccgtgtggaaacaaatgttgaaacaggtgaaaccgttatttctggtatgggtgagcttcacttggatgtccttgttgaccgtatgaaacgcgaattcaaggttgaagctaatgttggtgctcctcaggtgtcatatcgtgaaactttccgtcaagctacgcaagcacgtggtttctttaaacgccaatccggtggtaaaggtcaatttggtgatgtttggattgaatttactccaaatgaagaaggtaaagggttcgagtttgaaaatgctattgtgggtggtgttgttccacgtgaatttgttccggccgtagaaaaaggtttgattgaatctatggctaatggtgttcttgctggttacccaattgttgatgttaaggccaaactttatgatggttcttaccatgatgttgactcatctgaaacagccttcaagattgctgcgtcgcttgctcttaaggaagctgctaaaactgcgaaacctgttattcttgaaccaatgatgttagtcactatcactgttcctgaagaaaaccttggtgatgttatggggcatgtcactgcccgtcgtggacgtgttgatggcatggaagcacatggtaatagtcaaattgttcgtgcttttgttccgcttgctgaaatgttcggttatgcaactgttcttcgttcagcatctcaaggacgtgggacctttatgatggtatttgaccactatgaagatgttccaaaatctgttcaagaagagatcattaagaaaaacgctggagaagct

SEQ ID NO: 36070 - DNA, 1011 bp, Streptococcus mutans
atggtagttaaagttggtattaacggttttggtcgtattggacgtcttgctttccgtcgtatccaaaacgtcgaaggtgttgaagttacacgtatcaatgaccttacagatccaaacatgcttgcacacttgttgaaatatgattcaactcaaggtcgttttgatggtaatgtcgaagttaaagaaggcggatttgaagttaatggtaaattcgttaaggtttcagctgaacgtgatccagaacagattgactgggctgctgatggtgtagaaatcgttcttgaagcaactggcttctttgcaagcaaagcagctgctgaaaaacacttacatgctaatggtggagctaaaaaggttgttatcactgcaccaggtggtaatgatattaagacaatcgtctttaacaccaaccacgatgttcttgatggtactgaaacagttatttcaggtgcttcatgtactacaaactgtcttgcaccaatggcgaaagctttacatgataactttagtatcaaagaaggtttgatgacaactatccatgcatacactggtgatcaaatggttcttgatggaccacaccgtaaaggcgaccttcgtcgtgcacgtgctgctgcagcaaacatcgttcctaactcaactggtgctgctaaagctattggtcttgttattcctgaattgaatggtaaacttgacggtgctgcacaacgtgttccagttccaacaggttcagttactgaattagttgctgtacttgataaaaaggtaactgttgatgaagtgaatgctgctatgaaagctgctgcaaatgaatcttacggatatactgaagatccaatcgtatcatcagatattgtaggtatgtcttttggttcattgtttgatgcaactcaaacaaaagttcttgatgttgatggcaagcaattggttaaagttgtttcatggtatgataacgaaatgtcatatacttcacaacttgtacgtactcttgagtactttgcaaaaatcgctaaa

SEQ ID NO: 36071 - DNA, 1194 bp, Streptococcus mutans
atggcaaaattgactgttaaagatgttgatttgaaagggaagaaagttctcgttcgtgttgactttaatgtccctgtaaaagatggcgttattacaaatgataaccgtattactgcagctcttccaacaattaaatacatcattgaacatggtggtcgtgctgttcttttctctcaccttggacgtgtcaaagaggaagcagataaaaaagggaaatctcttgctcctgtagctgctgatttggctaaaaagcttgtgcaagaagttgtttttccaggtgtaacacgtggtgaacaattagaagcagctattaatgctcttaaaaatggtgaagttcttttggttgaaaacactcgttttgaagatgttgatggtaaaaaagaatctaaaaatgatcctgagcttggtaaatattgggcaagtcttggcgatggcatttttgtaaatgatgcatttggtactgctcaccgtgctcacgcctctaatgttggtatttcagctaatgtggacaaagcagttgctggctttcttcttgaaaacgaaattgcttacattcaagaagctgttgacaatcctgttcgcccatttatcgctatccttggtggttcaaaagtttcagataagattggtgttattgaaaatcttcttaaaaaagctgataaagtccttattggtggtggtatgacttatactttcctcaaggcacaaggtatcgaaattggtgattcacttgttgaagaagacaaacttgacattgctaaagatcttttggctaaagcaaatgggaaattaatcttaccagttgactcaaaagaagctaatgcttttgctgactacactgaagttaaagatactgaaggtgcggctgttgatccaggtttccttggtcttgatatcggtccaaaatcaattgctaaatttgatgatgaattaacaggtgctaagacagttgtttggaatggtcctatgggtgtctttgaaaatcctgatttccaagctgggacaatcggtgtgatggatgctatcgtcaaacaaccaggtgttaaatcaatcatcggtggtggtgactcagctgctgcagccatcaaccttggccgcgcagataaattctcatggattagtacgggtggaggtgcaagcatggaattgcttgaaggaaaggtactcccaggcctcgctgcactcacggaaaaa

SEQ ID NO: 36072 - DNA, 1344 bp, Streptococcus mutans
atggcaatcacagcagcagacatccgtcgtgaagttaaagaaaagaatgttactttccttcgtttaatgtttacggatatcttgggaaccatgaaaaatgttgaaatcccagctactgacgaacaattagacaaagtactttcaaacaaagcgatgtttgatggctcttcaattgaaggttttgtacgtattaatgaatcagacatgtatctttatcctgaccttaatacttggactgtttttccttggggagatgaaaacggagccgttgctggattaatttgtgatatttatacagcagaaggagaaccatttgccggtgacccacgtggtaacttgaaaaaagcactgcgtcatatggaaagtctaggttataaatcgtttaacctcggtccagaacctgagtttttccttttcaaaatggatgaatttggtaatccgacaacagaagtaaatgataaaggtggttactttgatttagcaccaactgaccttgctgataatacccgtcgtgagattgtcaatgtcttaacaaaaatgggatttgaagttgaagcaagtcatcatgaagtggctattggtcaacatgaaattgattttaaatatgcagatgttttaactgcctgtgataaaatccaacttttcaaattagttgttaaaacgattgcccgtaaacatggtttgtatgcaacctttatggccaaacctaaatttggtattaatggctcagggatgcactgtaatatgtctctgtttggcagtgatggtaagaacgctttctttgatccacaagatcctaaagggatgcagttatctgaagttgcttatcaattcttaggtggtttggtaaaacatgcttatagctatactgctatcatgaatccaactgttaattcatataaacgtttggttcctggttatgaagctccagtctatattgcttgggcgggacgcaatcgttcaccgttgattcgtgttccagcttcacgtggtgttagtacacgcctggagttgcgttcggttgatcctacagctaatccttatttagctttggctgttcttttagaatctggtcttgatggcattgaaaataaaattgaagcaccagcacctgtagaatcaaatatttatgttatgactgttgaagaacgcaaagaagcaggtattgcagatcttccatcaactcttcataatgctctgaaagcattacaagaagatgaagtggttaaagcagccttaggcaaccatatttatacaagttttcttgaggcaaaacgtattgaatggtcaagctatgctgcttttgtatcgcaatgggaagttgacaactatttggatctttat

SEQ ID NO: 36073 - DNA, 4515 bp, Streptococcus mutans
atgagagaggttattaaaaaagctaagcagacgactttgtgggatccatcttttgagacagatgcctgtgggatgggctttgttgctcaaattgatggtattgccagtcatcagttagtggattatgccttaacgatgttagagagaatgaaccaccgtggaggtacaggtgcagagcctgatacaggagatggtgctggtatgttgttggccatgccagatgagttctttagattgaaggctaaagaagaagagattgatttaccaccattgggagattatgctgttgcccaattgtttcttcctcaagataaagtagcaaaaacaattttagaagatagtttgattagtgaaatcaaaagattaggctttcatgtattgctgtcgcgtgatgttcctttcaattatgacaactgtggtccagctgctcaggaaatcatgccaagttttgtgcagctttttattgaaaaacctactgaaacaaatagtgggtgtgcttttgaagatagtcttttccgtctgcgccgcaagttggaaaaaacgtttgctgcagatgaactttttatttgttccttatcaagcaagacgattgtttataagggaatgctgcatgcttttcaggttcgtctgttttatcctgacttgtcagatgaaatgttcaaatcacacattgctttaacacattctcgcttttcaacaaatactttcccatcttgggatcgtgctcagcctttccgcttcttagcgcataatggagaaatcaacacgcttcgtggtgctgaaaattggatgcatagtcatcaaattgaagtctacaatgaagaaaattcagactctgctaaattagaaaactgtctagaatatctctatcgtcatggtcgtgatattccgcaaagcttattgatgatggtacctgaagcttgggggaaagatgcaggactttctaaagaattaacagccttttatgaatatgcttccagttttgtcgctccttgggatggcccagccgctctcgttttcactgatggtgagatggttggagctcgtttggatcgtaatggtcttcgtcctagccgctattctcgcaccaaagataattttttaatttgctctagcgaatcgggtgtcgttgatatagcacctagtcaggttgttgaaaaaggggtccttggtcccggcaatatgatgttaattgataccaaaaaaaacttggtattaaagaatgatgaggttaaagagcattattctaaacaacacccttatcaacagtgggtgcaagaaaatgttactcttttggatgactttgctgctcaagaggaaattgtcaatgattatgatgtgaaccaaatgtggaaaatttttggttatacagatgaaaccattcgaacagttattctccccatgtcagaaaaaggagaggaacctgttatttcaatgggctttgacagtccattagcagtattatcgaaaaaaccacagtctctctttacttactttaagcaacaatttgctcaggtaaccaatcctcctattgatgctattcgtgagcaattagtggtgtcaacgacagtctttttaggcggtgatggcgatattcgtcaagataatgctgataattgtgtcaaggttcgagttgacagtcctgtcctttctagtcaagattttgcaaaattagccaatttaacagatgaacgttacaaggcaacaactctatccactgtttatgacttaggagattctgacaataatcgcctgcaatatgctttggaagatcttttcaaaaaagctgatgaagcaattaatcaaggcagtaagatcatcattttgtcagaccgtggagtcactaaaggtcgcatagccattcctattttgttggcagtttccggtttgaataattacatggttgtcaaaggaaaagcaagtcaattttcaattgttgttgatacggcggaagcttttgaagttcatcattttgcaaccttggttggttttggtgcaacagctattcatccttatggggcttatgcaactctaaaagcttttgataagaccaatgactcttttgaaaaatatcgtaaggctgccgaaaagggcattgttaaagtcatgagtcgtatgggaatttcaacagtactcggatataaaggtgctcagctttttgaagccattggtctttctgctgatgttgttaaccaatactttagaggaacagctacgcgtattgaaggtttgagtctgaagcaaattgaaaaagaatacctagaacgcgttgatttcgcctttggaccgagagccaatgatttcttgccttctggtggttcctatcagtataagacagatggagagtatcacctctttaatccacgctctatctataatttccaacaatccattcgtcgtggtgactatggtctctttaaacaatattcaactgaactagataatgaggccttaaaacaaccgacgaccctgcgttctctttgggaatttcattctaaacgaccaaaagttgatttagcagaagttgagcctgctaaggaaattgttaagcgttttaaggttggtgccatgagttttggctctctttctaaagaggcgcatgaaaccattgctcaagcgatgaatactatcggagctaaatcaaattctggtgaaggcggtgaaaatcgcaaacgcttcaaaccgcaagttgatggtcgcaatattaattctaaaattaagcaagttgcttccggacggtttggtgttaatgcagaataccttatgtctgcagaagaattgcaaatcaaattagcacaaggagctaagcctggtgaaggcggacaacttcccggtcaaaaggtctttccttggattgctgaaattcgcggagcaaccccaggtgtgcgcttgatttcaccaccacctcatcatgatatttattccattgaagacctagcacaattaatttatgatttgaaagctatcaatccttatgccaaaatcaatgttaaattagtatcaagtacaggtgttggtacgattgctacgggctgtgttaaagcgggtgctgataaggtggttatttcaggttatgatggtggtacaggtgcctctcctcgtaattctgttcgtgatgcggggcttccatgggaaatgggcttggctgaagctcatcagaccttgtctatgaatcgtcttcgtcaacgtatgactttggaaacagatggaaaattaatgacgggtcgcgatattgctattgctactttattgggtgcagaagaatattcatttgctagtctagctttgatttcagttggatgtgtcatgatgcgtgtttgttcacttaatacttgtcctgtcggtgtcgcaacacaaaatccagaattacgtaaaaacttctcaggcaagccagaacatgtgattaacatgatgactttcttggcagaagaattacgtgaatacatggctgagttaggtttccgctctgttgatgaaatggttggtcatgcagaagttttgaaatcgagatttgttgcacaaggtaaggcaaaatctcttaatttttcaagggttattgggaacagtttcccaattgatcggaaaaatgaagatccttttgctgaagaacgtcaatggaaagaactggatggttttgcagcagcagctattgaaaaaggcattagtgttactattgaaaataccatcaataatgtggaccgttcagtagggagtcgcatggctggttggatggcagaacgttatggtaatgacgctgttaaagaaggtttaattaaatatcattatactggcattgcagggcaaagttttgcgagttaccttacacaaggtttagagtataccttgattggtgaggctaatgactatattgctaaatctatgtcaggtggacgcttaattgtcaaaccgccgcacgacgcagcctacgacgttgaaaattcaccaattgttggtaatgtctctctctttggtgctgtcaaaggtgaagcttattttgcaggtcgtgctggtgagcgtttctgtgttcgtaattcaggagcaaaagtcgttgttgaaggtgtcggtgctcacggttgtgagtatatgactggcggtgtagctgtcattcttggaacgacaggtcgcaactttgctgctggtatgagtggtggtgttgcctatgtttacgatgttcatggtgattttgctcaaaaagtcaatatggagatggtagatctttatcagattggtgaaactcgtggtgatgacatcttaaaagacatgattgaaaagcactatgaatatacagaaagtgttaaggccaaacgtcttttggataattgggatgaagaggtgaaaagatttatcaaagtttatccaagtgatttccatgaaattaatgatattgaatatgctctcagccaaaaaggcatgagtggtgatgaactcgaattacgtacatttgaagtagcaactggcggcgatgctacagcgcaagagcgtcaagctttgttggctagtgtaacaggagggaaa

SEQ ID NO: 36074 - DNA, 732 bp, Streptococcus mutans
atgaacattttaattcttgatgatgaaatgttggcaagacaagagttaacttttttaattcagcagagtaaggaacttgatcatcctgatatttttgaagctgaagatattagcagtgctgaaaaaattctctttcgccagcagattgatttaatttttcttgatatttcactcagcgaggaaaatggttttaccttggccaaccaattagagcaattggcacatcctccacttgtcgtctttgcgacagcctatgatcattatgccgttaaagcttttgaaagcaatgctgctgactatattttgaagccttttgagcaggggcgtgtggataaagctttggctaaagttaagaaaatacaacacttatctacaatagatgaaacagctacgacagaaaagaaaggtatggaactgttaacactgactttagcagatagaagcattgtccttaagatgccagacattgtggccgctagcattgaagatggagaactgaccgtcagtaccaaaaacacgagctacaccatcaagaaaacattgaattggtttaaaactcgcgccaagaccaattatttcctgcagattcatcgcaatacagttgttaatctggaaatgattcaggaaattcagccttggtttaaccatacgctcttactggtgatggtcaatggtgaaaaattcccagtcgggcgttcctatatgaaagaattgaatgctcatttgacctta

SEQ ID NO: 36075 - DNA, 1740 bp, Streptococcus mutans
atgttaatgatattattatttcagagacttggtattatcatgattctggcatttttactagtcaataacagctattttcgacagttgattgaagaacgttctaagcgtgaaaagctggttcttattatcatttttggtattttcgtcatcatttccaatatgacaggaattgaaatcactagcgataaaagtttggtggaacgtcctattctaacgactatttctcattcagattctctagctaatacgagaactttggttatcacaacggctagcttagtcggcggtcctttagttggaactgttgtgggtttcattggtggtgtccatcgtttctttcaagggaatttttctggtgctttttacattgtcagttctgctttggtaggatatattagtggtcgactgggtgatcaattaaaaactaataacctttatccatctacttcgcaggtcattgttatcagcattattgctgaaagtattcaaatgctctttgtcggtttctttactggctgggatttggttaaactgattttcattcctatgatgttgcttaacagtctaggttcgaccttatttctagctattctcaagacctacttatccaatgaaagacagctgagagctgttcagactcgggatgttttagatttgacgcagcaaacccttccttatttaagacagggactgagtcagcaatcagctactaaagtgtgtaatatcattaagcagcatactaattttgatgccgttggtctgactgatcgaaccaatgtcctagctcatatcggcgttggtcaagatcatcatattgccggacaagcggtcaaaacagatctctcaaaaagtgttattttaaacggtcagccacaaattgccttagataaaacagccattgcctgtccagaccaaagctgtctcctcaattcagccatcgtcgttccgctcaagatcaataatgagacagttggggccttaaaaatgtacttttctggtgataagaagatgaccgaagtcgaagaaaatcttgccctaggtctcgcacaaattttttctggacaattggccatcggtattgccgaggaacaaaataagttggctaatattgcagaaatcaaggccttgcagtcccagattaatccccatttcttcttcaatgctataaacaccatcagtgctttgattcgtcttgatgccaacaaagctcgatatgctctcatgcaattaagtacttttttccgaaccagtttacaaggcggacaagatagagaaatctctttagaacaggaaaaagcgcacgttgatgcttatatgaatcttgaaaagctgcgctttcctgataaatatcaactggattatcatattactgtttcaactaaaatgaccctgcctccttttggtttgcaggttttggttgaaaatgcagtgcgtcatgcttttaaagaacgcaagaaagacaatcatatttgtatttccataacagatcagggagagttttacaaggtggccgttagcgataatggtcagggtatttctcctaatatgattgacaaattaggacaggaaactgtatctgaaagcaagggaacaggaacagcccttgttaatttaaacaatcgcctaaatttactttatggcagtgctagtcagttacactttgacagtacagatcaaggaacaaccgtctggtatgagattccttatcaaaaaggagataaagatgaacattttaattct

SEQ ID NO: 36076 - DNA, 1680 bp, Streptococcus mutans
atggcaaatattaatttaaaacctgaagaagttggcgtttatgctattggaggtctaggtgagattggtaaaaatacttacggtattgaataccaagatgaaatcatcattgttgatgcagggatcaaattccctgaagacgatctgctcggtattgactatgttattcctgactattcttatattgttgacaatgtggatcgtataaaagctctcgtcattacacatggacacgaagatcacattggtgggattccatttctcttaaagcaagccagtatccctatttatgcaggacctctggctctagctctcatccgcggtaaattggaagaacacggtctcttgcgtgatgctaagatgtatgaaattaatcataatactgagttaacctttaaaaatcttagcgtcacttttttccgaacaactcactcaattccagagcctctaggaattgtcattcatactcctcaaggtaaagttgtctgtacaggtgactttaaatttgattggacacctgttggtgagccagcagatatccaccgcatggccgcactgggtgaagatggcgttctttgtctcttatctgattcaaccaatgccgaaatcccaacttttaccaattctgaaaaagtggttggccagtccattatgaatatcatcgaaggtattcatggacgtattatatttgcatcctttgcttcaaatatttttcgtttacaacaggctgcagaagctgctgtcaaaacaggccgtaaaattgccgtctttggacgttcgatggaaaaagctattgtcaacggtattgaactgggttatataaaagtacccaaggggacttttatagagccaaatgaaatcaaagaatatcatgctagtgaaatcatgataatgtgtacaggcagtcagggagagtctatggcagctctttcacgaattgccaatggaacacacagacaagttcaattgcagcccggtgataccgtcattttctcatctagcccaattcctggtaatacaactagtgttaataagctgatcaataccattcaagaagctggtgtagaagtcatccatggtaaggtcaataatattcacacatcaggacacggcggacaacaagaacaaaaattgatgctgcgccttataaaacctaaattcttcatgcctgttcatggggaataccgcatgcaaaaggttcatgccggcttagctattgataccggtatccctaaagacaatattttcatcatggaaaatggtgatgtcctagctctaaccaaagattctgctagacgtgccggtcatttcaatgcgcaagatatttatgttgacggtaatggtattggtgatattggtacagcggttctgcgcgaccgacatgatctttccgaagatggtgttgtcttagcagtagcaactgttgattttaaaaccaaaatgattttagctggcccagatattctcagccgcggtttcatttatatgcgtgaatctggtgatctcatccgcagcagtcaacgcattcttttcaatgcgattcgtatcgctctaaaaaataaagaagccagcattcaatcggtcaatggcgctattgtcaatgcactacgcccatttttatatgaaaaaacagaacgtgaacctattatcattcctatgatattgacaccagataagtct

SEQ ID NO: 36077 - DNA, 1341 bp, Streptococcus mutans
atgtcagattatttatcagtatcctctttaaccaaatatttaaaattaaaatttgatcgcgatccttatttggaacgagtttatctgacaggtcaggtttctaatttcagaagacgtcccaatcatcagtatttctcccttaaagatgagaaagctgtcattcaggcgaccatgtggagcggtatttataggaaattgggctttgagctcgaagaaggcatgaaaatcaatgttattggtcgtgtgcaactgtatgaacctagtggttcttattccatcatcattgaaaaggcagagccagatggtattggtgcactggctgttcagtttgaacaacttaagaaaaaactggctgaggctggttattttgacgataggcataaacaaagactgtcgcagtttgttaaaaagattggtgttgtcaccagtcctagtggagcggttattagagatattatcacaacagtctcgcgtcgttttcccggtgtagatattttactttttccaactaaagttcaaggtgaaggggcagcacaggaagtggctgacaacattcgtttggctaatgaacgtactgatttagacctgctcattgttggtcgtggtgggggttctattgaagatctctgggcttttaatgaggagattgtagtgcaggccatttttgaatcgcatctgcccattatttccagcgttggacatgagacggatacaaccttggctgattttgcggcagatcgcagagcagcaacgccaacagcagcagctgaattggcaacacctgtgaccaaggctgatttattagcttttcttaaagaaagacagatgagatcttatcaggctgttatgcgtctgattagacaaaaggatgaacaagttaagaaactgcaaagatcagttattttcagacagcctgaaagactctatgatgcttatgttcaaaaattggatcatttaagaacacatttgttgaccaaggtgcggcaggtttatgatgtttatgatagcaaggaacatttgctgagacaaagattgttgtcctttaatttatcagggtgtattcagcgctatcaagcacaattaaaacaagatcagcgtttattgttaagccacatgagcagtcaatatgatagtaaattagcccgttttgaaaaagcacaagatgcgcttttgtcactggatacgactcggattgtggcgcgtggctatgctattgttcaaaaagataatcacattattcaatcaacccaacagatcaaaaaaggagatcgcttgcatcttgaaatgaaagatgggcaggttcaagtggaggtagaaaatgtcaaacaagaagaaaacatt

SEQ ID NO: 36078 - DNA, 867 bp, Streptococcus mutans
gtgaaagataagattaaatccattaatcaggctattaagcattattatgcgcaaactcatgtgtctcaggatttgattgaagcggtcttgtattctgttgatgcaggcggtaaacggattcgtcctctcttactattggaaatcttgcaaggctttggtttggtacttacagaagctcactatcaggtggcagcaagtctagagatgattcataccggcagcctcgttcatgatgacctgcctgctatggataatgatgattataggcggggacagctgaccaatcataagaaatttggtgaagcgacagctatcttggcaggtgacagtctttttctagacccttttggtttgctagccaaggcggacttaagggctgatatcaagataaaattagtagcagaattgtcagatgctgcaggaagctatggtatggtcggtgggcaaatgttggatattaagggtgaacatgttcaactcaatttagaccaactagctcaaattcatgccaataagacaggaaaactcttgacttttccttttgtagccgcaggaataatagcagaattatcagaaaaagcccttgctcggctccgtcaggtgggtgaattagttggtttggcttttcaagtacgtgatgatattttagatgtgacagctagtttttcagaacttggtaagaccccacaaaaggatatcgaagctgataaatcaacctatcccagtcttttgggcttggacaagtcctatgccattttggaagattctctcaatcaagcgcaagctattttccaaaaattagctttagaggaacaatttaatgctactggaattgaaacaataatagaaaggttgcgtctccatgcc

SEQ ID NO: 36079 - DNA, 1248 bp, Streptococcus mutans
gtgaggagaaaaatgaaaaattatgctttgctaaacggtgcttatgataataaaaccatgtatgatttcaagcccgtcagggcagataacacttatttatatgatagtcaaaataggaagtatcttgatttaagaagtggtttatggaatacttcacttggttatattgattctctctaccaacgggtttccaagcgatttgatcaagtattaaataaaaaactcccttatcttgatattcattcttttcaacatgatatttacgatgaagtggcccaaaaagttttagagctaacagggcatgcttttaagcgagttctttatacgaattctggttcagaaaatacagaattagctttaaaaatcgctgattataccaataagaagggggaaaataatcgtattctagcctttaaagattcttatcatggaaccttctttggcggtgtttcagtgagtggtattgatcaagaaatcaatagttctttctatccgaaatatggagaagtaacgtttatagactaccccaaatctgcagaacaagaaaaaaatgtcctagattatattgccaatgtagcttccttctatgatgtcatgatgattgaaccgattttggcttcggcaggtatctactttgccagtacagattttttcaatgcacttttaaaactactgagaaaaaatcaagttttgattgtctttgatgaggtagctactggattttttaaaacagggaagccgttttatttccaacagttatctgaaaaaccggatattttatgcctcagtaaagctattaataacggcattacgtcttttggctgcgtctgtgttaatgaagaagttgatgcaaaattacagaaaaatcccaaaacgatggagcatttctcaactcaaaatgggaatcttttaggattagagtcggctaatattgttctggattactatcttaagtctagagacgttataaaaggcaaagtcaaagatatttctgatagtatttcaaatgtcttagattcacaaaatgtgttctaccgtaatcagggaattatgacagcgattaggacagaaagcaaccaatcgttacagctaatgaagtcgttagaaaaacttgggatacttacttatctttacgttaatgaagaagaagagggactgtctattatgccaccgattaatattaatctaaatgttttagaaaaagctctcaaattgatttctaaaaaaattgaaagtcaaaattctttt

SEQ ID NO: 36080 - DNA, 852 bp, Streptococcus mutans
ttggtttatgatatcattaaagcctctttgcaaggcagaattaactggcttgataccgctgagtattatggacatggaaattcagaaaaatttatcggcagtatcctaaagctgctggcaaaagaaggcagtctgacagaaactatctatattgctgataaatggtttccgcttttgcgatctgccaaaacaattgcacagactttcagcggcagactgagtaacctgcaaagaccttttattgatctttaccaaattcatcaccctacttccatttcctctctcaaaaaacaagcagaagaattagcaaacttgcaagaaaaaggccttataaaagccattggggtcagcaacttttcggcccatcaaatggtaaaaatggatgagctcctcaaatcgtttggtttaagactggattctaaccaagtaaaatataaccttttgcaccgcaaaccagagcgaaacggtgttttagatgttgctaaagagcgagggatctctcttattgcatacagtcccttacagcaaggtgtactgacaggccgctttcatgcagaatcagacagcatcaaaaagatctccatgttacggcgattaaattccgaattaagcagccgcagtcttaaaaaaactcaacccttgattgagcttctgcaaaaactggctgataaatatcataagacacctgcacagatttctcttaactggttaatccatgcacatgttagcaccatttttgccattcctggcgccagcagtctcaaacaagctcaaagcaatcttgaagcacaaaattttaaactgactaaaacagatctgcaaaaattaagcgttgacagtgaaaagctgaat

SEQ ID NO: 36081 - DNA, 1044 bp, Streptococcus mutans
atgaattctccttacacaagaagtccaagaactatcaaacatgcttttgtaactggtgccaccggtcttttaggtaacaatcttgttcgcgctttacttaaacaaggtattaaagtcactgctctcgtacgttccatggaaaaagctaggttacaatttggtgatttgcctatccagtatgttaaaggagacatccttaatcccgaagcttttcggtctgcttttaccgattgcgacactctttttcatacagctgctttttttcgcgatagtcacaaaggcggaaaacattggcaagaactctacgatactaatgttacaggaaccactcatttattgaaagcagcctacgaagaaggtattcgtcaaatgattcatacgtcttctattgctgtacttaaaggggaacgtcatcagctaattgatgagacgatgtcacgagatcctagtaccaaattagactattatcgtagtaaaatcctaagcgaaaatgctgtgagcaattttcttaaggagtatccagatttatttctttgctatgttttaccaggttctatgtatggtccgggagatatgggaccaactgctacgggacaactaatcttggattacatgcagcaaaaactacccgggatcatcaccaaagctagctatagtgtcgttgataccagagatgttgctgatattcatattttagctctaaaatacgggcgcagaaatgaacgctatttggcagcaggccgtcatatgactatggaaagtattgtcaaaaccttggaagaaataacaggcattcctgctccaaaacgtcatattcccatttttctagttcaggcattagcccaatggaatgaactttatcataagattactggcaaacctgttctggtcagcaaagaaattgcagacattacagctgaagaatatcttcggacatattttagccataaaaaaactgagcaggaacttggcggacaattcagaccttttgaggaaaccttgttagatactgtccgctggtatcgcaatcacggctatctgaac

SEQ ID NO: 36082 - DNA, 1008 bp, Streptococcus mutans
atgatagatagatacattttagccatcgaatcatcctgtgatgaaaccagtgtggccattttaaaaaatgaagatcaacttttaagcaatattattgccagtcaggtagaaagtcataagcgttttggtggtgtggtaccagaagttgccagtcgtcaccatgttgaagtcattacgctttgtattcaggatgctttgcaggaagctggaattactgcaggtgatttatctgctgttgcggtaacttatggtccgggtcttgttggagcccttttggtaggaatggcagcagctaaagcttttgcttgggctaatcatttgcccttaattccagttaatcatatggcaggtcatttaatggcagcacaaagcattgccgatttgcagtatccgcttttagcgctcttggtgtcagggggacatacagaacttgtctatgtagcggctcccggtgattatcgtattgttggggagactcgagacgatgctgttggtgaggcttatgacaaagtcgggcgcgtcatgggccttacttatcctgcaggcaaagaaattgatcaactagctcatcaagggcaagatatctatgattttccgcgcgctatgattaaagaagacaatttggaattttccttttcaggtcttaaatcagcttttattaatcttcatcataatgcccgacaaaaaggagagcaactccgcttagaagatttatgcgcttctttccaagcagctgttttggatatcttgatggtgaaaacaaaaaaggctttggcagcttatcctgtaaaaactttggttattgctggaggtgtggcagctaaccaaggtcttcgtgaacgcctaaaagaagacataaaagatattaatgttgtcattccaccactacgtctttgtggtgataatgctggaatgattgcttatgctgcggccgttgaatatgaaaagggccattttgcagaactcgatctaaatgctaaacccagtttggcttttgaaggattagaa

SEQ ID NO: 36083 - DNA, 273 bp, Streptococcus mutans
atggctaacaaacaagatttgattgcaaaagtagcagaagctactgaattgactaagaaagattcagctgcagcagtagacgctgtcttctcagcagtatcatcttaccttgcaaagggtgaaaaagtacaacttattggttttggtaactttgaagttcgcgaacgtgcagcacgcaaaggtcgcaaccctcaaacaggtgaagaaatcaaaatcaaagcttctaaagttccagcattcaaagctggtaaagctcttaaagacgctgtaaaa

SEQ ID NO: 36084 - DNA, 1170 bp, Streptococcus mutans
atgacacattttgatacaatcgttatcggcggcgggcctgcgggtatgatggcctgcatttctgctgggttttatggtaagaaagcccttcttctagaaaagaacaaacggcttggtaaaaagctggctggtactggtggaggacgctgtaatgttaccaataacggcactttagaggatttactagccggtattcccggcaatggacgttttctccatagtgttttttctcaatttgataatcatgatattatgtctttttttgaagataatggcgtcgccttaaaggttgaagatcacggcagagtctttcccaaaacaaacaaatcatgcactattattgattgtctggaaagaaaaatcaaagaacttggtggtttaatcaagacacagtgcgaaattgtttccgtcaaaaaagaggatggacagtttattgttaaatcagctgatgaagctttcacctgccagcagttgattattacaactggcggaaaatcttatccttccaccggttcaactggctttggttatgctattgctaaacatttcaaattgaaagtgacccatcttgaagccgctgagagtcctctactgactgattttcctcacaaagcgctacaggggatttcacttgatgatgtgacattgacatgtggtaaacatcagatcaatcatgatctgctttttacgcattttggtctatctggtcctgcagcactgcgcttatccacttttattcagggaggagaaacagcctatttagatttattaccacagcttactaaagaagcattgctgaaaaaaattgaaacaactcgggaaaaatcgttgaaaaatgccttgaagacattcttgcctgaacgtctagcagcatttctatcagaaggttatgaccacaaggtcaaacagctttccaaaaaagatttggaaaaaattctccataaaatcaaagctttaccgattccaattactggtaaaatgtctctagctaagtcttttgtgaccaagggtggtattgacttaaaggaaatcaatcctaaaaccttggaaagcaaaactatttctggtctacattttgctggtgaagtgcttgatattaacgcccatactggcggcttcaatatcacagcagccctttgtactggctgggttgctggcagtttacactac

SEQ ID NO: 36085 - DNA, 297 bp, Streptococcus mutans
atgatgaatatgcaaaatatgatgaaacaagcgcaaaaattgcaaaagcaaatggaaaaaaagcagtctgaattggctagcatgacttttgttggtaaatctgcacaagatcttgttgtcgcaacctttacaggtaataagaaattagtttctattgactttaaagaagctgttgttgatcccgatgatagggaaactctgcaagatatgactgttcaggctattaatgatgcacttggtcaaattgaagatgctacgcaaaagacaatgggggcatttgcaggtaaattaccattc

SEQ ID NO: 36086 - DNA, 2076 bp, Streptococcus mutans
atggtatcccaaaaaaataaatctaaaaagggtcaatctaaaacgtttaccttaatttcaaatagaattaatctcctattttttttgattgtcgctttgtttactgttttgcttttgaggttagctcagatgcagctttatgatgcaaagttttacaaatctaaattgacagagtcaacaacatatactataaaaacctccagccctcgcggacaaatttatgacgctaaaggggtggctttagttgaaaacgaggttaaagaggttgttgcctttacaagaagcaataccatgactgccaaggatattaaagcaaatgcaaaaaagttagcagatatggtgactttaactgaatctaaggtaaccaaacgtcagaaaaaagattactatctggcagatccaaaaaattatcaaaaaatcgttaaaaaattaccaaataataaaaaatatgataactttggaaataacctaacggaatcgaagatctatgcaaatgctgttaaagcagttccaaacagtgctattgattattctgaagatgagaaaaaaatcattcatattttcagccagatgaatgcaacctctgtttttaatacagcttcgttaacaacaggagatttaacagctgagcaaattgcagtattggctacaagcaaatcagatttaaagggaatttctgttaagactgactgggaacgtaaaacagataaaaattccattacttctattatcggtaaagtttccagtcaaaaaaccggtctgcctgctgaagaagccaataactatgttaaaaaaggttattctctgaatgaccgcgttggaacatcttatcttgaaaagcaatatgaaaacgatttgcaaggtagtcgtactgttcaagcaatcaaggttaacaaagaaggtaaaattatcagtgataagaccactgccaaagggactaaaggaaaaaatctgaagttgacccttgatcttgaatttcaaaaaggtgttgaacaaattcttaaccaatattttaattctgaattagcatctggaaataccaagtattctgaaggcgtttatgctgttgttcttaacccgaacacaggtgcagttctttctatggctggtttggaacacgaccttaaaacgggcgaagtatcttctaatgctcttggagcggttactgaagtctttactccgggttccgttgttaaaggagcgactttgacagctggttgggaaaacggtgtcttatcaggcaatcaagtactcaatgaccagcctattcaatttgcgggttcaagccctattaactcttggtttaccaatggatcaactcctcttacagcaagtcaatccttagagtattcttctaatacttatatggttcaattggctttaaaattaatgggacaagattatcatagtggtatgaccttatcaacagatggctataaggaagctatggagaaattaagagctacttatgctcaatatggtttgggtgtctcaacaggaattgaccttccgggagagtcaaagggctatacgccagaacattatgatccttctaatgttttaacagaatcatttgggcagtttgataactatacggctatgcagctggcacaatatgctgcagctgtcgcaaatggtggtaaacgtattgctccccatttggttgaaggtatctatgataataataaaacaggcggtttaggaaatcttgttcaatctattgacaccaaggttttaaataatgtttctatctctagcgatgacatggggattatcaaggaaggtttctataatgttgttaacggtggtagttatgcaacagggaagactcttgcaaaaggggcaagtgttcccatttcggcaaaaacagggacagccgaagcttacgtgacaggagatgatggtaaatctgtttatacatccaatttaaacgttgttgcttatgcaccaagcagcaatcctcaaattgctgtagctgttgtcttgccacatgagacagaccttcatggaaccactagtcatgctattacgagagatatcatcaatctttatcaaaagatgtatccaatgaatcag

SEQ ID NO: 36087 - DNA, 597 bp, Streptococcus mutans
atgctctacccaacgcctattgccaaacttattgagagcttcacaaaattaccgggtattggtatcaaaacagcgactcgcttagctttttatacgattggtatgagtgatgaagacgttaataactttgctaaaaatcttctagctgctaaacgagaattgacctactgttctgtttgtggcaatctgacagatgatgatccttgcaatatttgtacagatgaaagcagagaccgctcgactgttttagtagttgaagatagtaaggatgtttctgcaatggaaaaaattcaggaatatcatggtctttatcatgttttacacggcctgatttctcctatgaatggtattggtcctgatgatattaatttgaaaagtcttctgacacgcctacgtgataatagtgatattcatgaagtcattatcgcaactaatgccacagcagatggagaagcaacggctatgtatatttccagagttctcaaacctgctggtattacagttacacgtttagcgcgtgggcttgctgttggttctgacattgagtatgctgatgaagtaactctgcttcgagcaattgaaaacaggacagagtta

SEQ ID NO: 36088 - DNA, 867 bp, Streptococcus mutans
atggatgttacgtggactgtgaaatatatcacagaatttattggtactgctctactcgttattttggggaatggtgccgttgcaaatgtagaattgaaaggaacaaaaggttacaaaagtggctgggttattatcaccttaggttatggttttggtgtgatgctgcccgctttgatgtttggtaatgtatctggtaaccatattaatcctgcttttacgcttggccttgcaatatcggatcttttcccttggaaacaagtacttccttacattcttgcacaaatgctgggagctatctttggtcagttaattattgtggcaactcatgctccttattacaggcaaactgaaagttctgatggtattttgggaacattctctactatctcagctgtggatgatggtacggatgcaagtaagaaagcttcacttatcaatggttttttaaatgagtttgctggttcatttgtgcttttctttggtgcacttgctcttacgaaaaactactttggcggtgaaattgttcagcaattaaacaccatgggaactgatgtaacatcttctacttttaaattctctcaagttggtctgacagtgggtgccaatgttaattctggtttggcgatagctcaccttggtttaggtttccttgttatggcactggtagcatctttaggaggtcctactggacctgcccttaatcctgcacgtgacttaggtccgcgtcttcttcaccatttcttgccagaatcagtacttggtaaatctaagggtaactcaaagtggtggtattcttgggttccagtcattgcaccaatccttgctggaatagcaggcgttgccttgttcaaatatttatatatgaag

SEQ ID NO: 36089 - DNA, 1047 bp, Streptococcus mutans
atgtctaaagaaacgcttgttttattatatggtggccgttctgcagaacgcgatgtttctgtgctctcagctgagagtgtcatgcgagccataaattatgacaactttttagtcaaaacttatttcattacgcaagcgggtgactttattaagacgcaagaatttgatagtcaaccatcagaaactgataaactgatgacaaatgacacgattattgcttctcaaaaaattaagccaagtgatatttatgaggaagaagcagttgtttttcctgttcttcatgggcctatgggagaggatggttctattcagggctttcttgaagttttaaaaatgccttatgtgggaaccaatattctgtcatctagtgtagctatggataagattacaacaaaccaagttttagaaagtgcgactactattcctcaagtagcttatgttgctcttattgaaggcgagcctttagaaagcaagttggcagaagttgaagagaaattgatttatcctgtatttgttaagccagctaatatgggttctagtgttggtatttctaaagcagaaaatcgcactgacttaaaacaagctattgcacttgctttgaagtatgacagtcgtgttttaattgaacaaggtgtggatgcgcgtgagattgaggttggtattttaggaaatactgatgttaaaacaactttaccgggagagattgtcaaagatgtggctttttatgattacgaagccaagtatattgataataagatcaccatggctattccggcagaaatagatcctgttatcgttgaaaaaatgcgggattatgctgcaacagctttccgaactttgggctgctgtggactttctcgctgtgatttcttcctaacagaggatgggaaagtttatttgaatgaactcaacactatgcccggctttactcagtggtctatgtatcctcttctttgggaaaatatggggctgtcttattcagttttgattgaagaattagttagtcttgctaaagaaatgtttgataaacgcgaaagccatttggtt

SEQ ID NO: 36090 - DNA, 643 bp, Streptococcus mutans
agcgcggtgaatcattgcatccgctgttctcaagctctaccagcttgattaaacagctccattttacattaaggagccaaaaatgaatactatgtttaaatcacctaagcttagtccgcagcgcttggtcactctggccatgttgattgccttagcttttgctattggaaaactttccatccccattattccccaacaactgattatcagcccaactttcattgttaatgtgatgattggtatgattggtggaccaatctgggccttcatcagtttggctattttggatatagtggacaacctatccagtggtgcaggtaactttattatctggtggacactgctagaagccgttcaaggattattttatggacttttcttttatcaaaaatcgctgagctggacaaataaaaaagactggctacacgttactattgctacagcaatcattatgcttatcggaagctttatcttcactcctttgctcgtccagatttactatggtgtcccattttgggcacaatttgcagcagggcgttggttaaaaatctttgaaatccctattcggatcctagtcactatggcaattatgcctcagttgcagcggattccagaattacgaaaacttgcaaattttaaatag

SEQ ID NO: 36091 - DNA, 1356 bp, Streptococcus mutans
atgaagttaactttacaagagatagcctcggttgtaggtgctcaaaatgatgtcagtctttttgaagatcttaccatcaatgctattgaatttgacagccgccagataaagacaggtgatttatttttacctctacagggtgcgcgtgatggccatgagtttattgatactgcttttgccaatggtgctgttgctactttttccgaaaaaaacataaccagtgattatccctatattttagttgtagattgcttgaaagcttttcaggatttggcgcaatactatttggagaaaatgcgggttgatgttattgctgtaacaggatctaacggaaaaacaaccacaaaggacatgatagcaactattttagcaactacttacaaaacttacaagacacaaggtaattataataatgaaattggtctgccttatacagttttacacatgcctgatgatactgaaaaaattgtacttgaaatgggtcaggaccatctcggtgatattgcccttctgtctaatcttacccatcctcacatagctgttgtcaccttgattggtgaagctcatttagagttctttggcagccgtgagaaaattgctgaaggaaaaatgcaaattactcaaggaatggatggtcatgggattcttattgcaccagcggataaaatcattaattcatttttaccagaaaagcaaaaggttattcgctttggagctgatgaagatatttttgtgaccgaattagaagagcataaaaactatttgaactttaaaacgaatttcctagataatgagattaaattgccagtaactggtaaatataatgctaccaatgctatgattgctagctatgttggaaaactgcttaatgtctctgaagaaaagattatctctgcactggctcagctcaatctaactcgtaatcgaacggaatggaaaaaagcggctaacggtgcagatatcttatctgatgtttataatgctaatccaacagctatgaaactgattttggagactttctccagcattccagcaaataatggtggtaaaaaaattgcggtgctggcagatatgaaagaattaggagacagtgaattagccttacatgcagccatgattgctagtctagatcctgcagtgatagatcgtatttttctttttggaccactaatgcaagctctagcagatgaagtcgcccaagtttattcagtagggaaatggtattattttgcccaagctgatcaggtagatgagctcactgagcaaattcaaaaggtattaggccctaatgaccaaatacttctaaagggatcaaattccatgaaattggcccaagttgtggagtgtttggaaggg

SEQ ID NO: 36092 - DNA, 1536 bp, Streptococcus mutans
atgaacttacaagaagaaattaagaaacgtcgaacctttgccatcatttcccacccggatgctggtaagacgacgattacggagcagttgctctattttggaggtgaaatccgagaggctggtactgttaaaggaaagaaaaccggtaattttgccaaatctgactggatggatattgaaaaacagcgtgggatttccgtaacttcatctgtcatgcagtttgactatgcgggtaagcgggtcaatatccttgatacacctgggcatgaggacttttctgaggatacttaccgaacactaatggcggtagatgctgctgttatggtcgtggactctgccaaggggatcgaagcacagacaaaaaagctttttgaagttgtcaagcatcgtggtatccctatctttacttttatcaataaattggaccgtgatggtcgcgaaccgctggatttattggaagaattagaagaggtattggggattgcttcttatcctatgaattggcctattggtatgggaagatcttttgaggggctctatgatttgtacaatcagcgtcttgaactctacaaaggtgatgagcgttttgcttctattgaagatggtgacaagctctttgctaataatcccttctatgaacaagctaaagaagatattgaacttttgactgaagcgggaaatgaattttcagaagaagccattttaaagggtgagctgacgcctgtcttctttggctcagccctaaccaactttggtgttcaaactttcttggattctttcttagcatttgcaccagaaccacacggtcacaagaccactgacgataaggtgattgatcctttagataaagacttttcaggctttgtttttaaaatccaagctaatatggatcctcgccaccgagatcgtattgcctttgtgcggattgtctcaggtgaatttgaacgcggcatgtctgtcaaccttgcccgcactggtaagagcgttaagctgtcaaacgtcactcagtttatggcagaatctcgtgagaatgtagaaaatgctgtcgctggtgatattatcggagtttacgatacaggaacttatcaggttggtgataccctaactgttggtaaaaataaatttgaatttgagccactgccgacctttacaccagagctctttatgaaagtttctgctaaaaatgttatgaagcagaagtcttttcataaaggcattgagcaattggtgcaagaaggtgctatacagctttataccaactatcaaactggtgaatatatgcttggagcagtcggtcagctccagtttgaagttttcaaacaccgcatggaaaatgaatacaatgcggaggttatcatgacacccatgggtaagaaaacggtgcgttggattaaggaggaagatcttgatgaacgtatgtcttccagccgcaatatattggctaaagaccgctttaacaagcccgttttcctctttgaaaatgacttttctcttcattggtttgcagataaatatccagatatagttttggaagag

SEQ ID NO: 36093 - DNA, 1842 bp, Streptococcus mutans
gtgaaatttatgaaaagaattgatattaatcatcaagcacaacgtttttctattcgcaaatatgcatttggagctgcatctgttttaattggctgtgtcttttttctaggtacccaaaatgtttctgcacaagagcagggaactcaattgccagcaagtgaaaacgcagttgtgaacgtggctgaaaattcagttgctatcagccaagcagtttcagataaggcagcagctcaaacaactctaacagaaacaccccaagttgaagttgaggagaaagaaaataaggtaaatgctcctgctttaaatgtcgatgacaaaggtgcaaaatccaaagaagatgtgaaccctactgtttcaaagacagcaagtgaagtggaagcttctgcagtaactgctactgatactaaaaattcaaatccacaagtcaatgttgaaactgactcaaatgaaaaagacgaaaataaaatggtcacctcggctccagctaaggagactgaggcagaacaaaatgagaaagcggtagcagaaaatcttatgcaaagacaagctaaggctgtctcaattccatcgcaaggcaattatgttttccaagaaacaactcctgtaaaaaatgcagccagtatgtccagcccaacccaatttaactttgataaaggagataaggttttttatgataaggttttagaagcggatgggcatcaatggattagctatgtgtcttacagtggtattcgtcgctatgctcctattgctgtgacaattgaagaattgaagcaaaaagaaattgttcagcaaaatttaccggcacaaggaacctatcactttactaaacaagcagacgttaaaaatgaagctaaactgtctagtccgacccaattctcgttttacaacggagatcacgttttttatgataaggttttagaagcggatgggcatcaatggattagctatgtgtcctacagtggtatccgtcgttatgttgttattggaaagcttacgacacaaccctctccaattgaaactaaagtatcaggtactattgccatccaaaataaaacggctcaacaattcgatgttatcatttctaatgtttccagcactcaaggcataaaagaggtattagtgccggtttggtcagagcaaaacgggcaggatgacattgtctggtatcaagcaactaaacaaggcgaaggcgtttataaggtgaccgttaaggtcagtgaccataaaaataacagtggtaactatgacattcacctttattatcgcctttcaactggtgaattaaaggttgttggaggaaagacaactgaggtggaagcaccgaagcctgtagaaacaacaggtatcattagcattgccaataagagcagccaaggatttgatgttttgattactaatgcttccagcactcaaggcataaaagaggtattagtgccagtttggtcagaacaaaacggacaggacgatattatttggtatcaagcaactaaacaaggcgaaggcgtttataaggtgaccgttaaggtcagtgaccataaaaatgacagtggtaactatgacattcacctttattatcgcctttcaactggtgaattaaaggttgttggaggaaagacaacgacagtagaagcccctaatagagtcaatcttccagcacaaggaacttatgttttcactaataaagttgaggttaaaaatgaggccagaacatctagtccaactcagtttacctttaataaaggagaaagtatttactatgacagtatcttgaatgctgatggacatcaatggattagctatcgttcctacagtggtattcgtcgttatattatcattgat

SEQ ID NO: 36094 - DNA, 798 bp, Streptococcus mutans
atgattgccattgatttagatggtacgcttctcaaaagtgacggaacactttccgattacactgtcgctattattaaaaaaattcaagagcaaggacacttggttatcattacgactggccggccctaccgtatggctttggaattttataaaattctaggattaaaaacaccaatgattaatttcaatggttctttgattcacattcctgagaaaaaatgggctggtgaacacaaggttcggattgaccgaaggtatctttttgacgttttaaagaatgaaaaggcctttgaagcagactttattgccagtgaataccgcaaaaaattttacttgacacttgatcaccgtcacgccattaaaccagagatttttggtgttaaagaattgacaaataagatgcagcttaaacctgaaaagattacacgggatccccatgcccttcttatgcagacccgagttgctgataaatatgctctagctaatgatatgcgtcgccatttcaatcatgaaatggaaatcagcagctggggcggccctatgaatatccttgaattttcacccaaaggagttcacaaagcttatgcactaaaaaatctgctcaaaacgctcaatctttctcgagatgatttaatagcctttggtgatgaacataacgatcggcaaatgttagcctttgcttctgtcggctatgccatgaaaaatgccagtgaagtactgttaccttatgctgataaaatgacacaatttgacaatgatcacgatggcgtggctaaagaactaaaaaaattgtttcta

SEQ ID NO: 36095 - DNA, 4695 bp, Streptococcus mutans
atgaaagtcaaaaaaacttacggttttcgtaaaagtaaaattagtaaaacactgtgtggtgctgttctaggaacagtagcagcagtctctgtagcaggacaaaaggtttttgccgatgaaacgaccactactagtgatgtagatactaaagtagttggaacacaaactggaaatccagcgaccaatttgccagaggctcaagggagtgcgagtaaggaagctgaacaaagtcaaaaccaagctggagagacaaatggttcaataccagttgaagtacctaaaactgatcttgatcaagcagcaaaagatgctaagtctgctggtgtcaatgttgtccaagatgccgatgttaataaaggaactgttaaaacagctgaagaagcagtccaaaaagaaactgaaattaaagaagattacacaaaacaagctgaggatattaagaagacaacagatcaatataaatcggatgtagctgctcatgaggcagaagttgctaaaatcaaagctaaaaatcaggcaactaaagaacagtatgaaaaagatatggcagctcataaagccgaggttgaacgcattaatgctgcaaatgctgccagtaaaacagcttatgaagctaaattggctcaatatcaagcagatttagcagccgttcaaaaaaccaatgctgccaatcaagcagcctatcaaaaagcccttgctgcttatcaggctgaactgaaacgtgttcaggaagctaatgcagccgccaaagccgcttatgatactgctgtagcagcaaataatgctaaaaatacagaaattgccgctgccaatgaagaaattagaaaacgcaatgcaacggccaaagctgaatatgagactaagttagctcaatatcaagctgaactaaagcgtgttcaggaagctaatgccgcaaacgaagcagactatcaagctaaattgaccgcctatcaaacagagcttgctcgcgttcaaaaagccaatgcggatgctaaagcggcctatgaagcagctgtagcagcaaataatgccaaaaatgcggcactcacagctgaaaatactgcaattaagcaacgcaatgagaatgctaaggcgacttatgaagctgcactcaagcaatatgaggccgatttggcagcggtgaaaaaagctaatgccgcaaacgaagcagactatcaagctaaattgaccgcctatcaaacagagctcgctcgcgttcaaaaagccaatgcggatgctaaagcggcctatgaagcagctgtagcagcaaataatgccgcaaatgcagcgctcacagctgaaaatactgcaattaaaaagcgcaatgcggatgctaaagctgattacgaagcaaaacttgctaagtatcaagcagatcttgccaaatatcaaaaagatttagcagactatccagttaagttaaaggcatacgaagatgaacaagcttctattaaagctgcactggcagagcttgaaaaacataaaaatgaagacggaaacttaacagaaccatctgctcaaaatttggtctatgatcttgagccaaatgcgaacttatctttgacaacagatgggaagttccttaaggcttctgctgtggatgatgcttttagcaaaagcacttcaaaagcaaaatatgaccaaaaaattcttcaattagatgatctagatatcactaacttagaacaatctaatgatgttgcttcttctatggagctttatgggaattttggtgataaagctggctggtcaacgacagtaagcaataactcacaggttaaatggggatcggtacttttagagcgcggtcaaagcgcaacagctacatacactaacctgcagaattcttattacaatggtaaaaagatttctaaaattgtctacaagtatacagtggaccctaagtccaagtttcaaggtcaaaaggtttggttaggtatttttaccgatccaactttaggtgtttttgcttccgcttatacaggtcaagttgaaaaaaacacttctatttttattaaaaatgaattcactttctatgacgaagatggaaaaccaattaattttgataatgcccttctatcagtagcttctcttaaccgtgaaaataattctattgagatggccaaagattatacgggtaaatttgtcaaaatctctggatcatctatcggtgaaaagaatggcatgatttatgctacagatactctcaactttaggcagggtcaaggtggtgctcgttggaccatgtataccagagctagcgaaccgggatctggctgggatagttcagatgcgcctaactcttggtatggtgctggtgctatccgcatgtctggtcctaataacagtgtgactttgggtgctatctcatcaacacttgttgtgcctgctgatcctacaatggcaattgaaactggcaaaaaaccaaatatttggtattctttaaatggtaaaatccgtgcggttaatgttcctaaagttaccaaggaaaaacccacaccgccggttaaaccaacagctccaactaaaccaacttatgaaacagaaaagccattaaaaccggcaccagtagctccaaattatgaaaaggagccaacaccgccgacaaggacaccggatcaagcagagccaaacaaacccacaccgccgacctatgaaacagaaaagccgttggagccagcacctgttgagccaagctatgaagcagagccaacaccgccgacaaggacaccggatcaggcagagccaaataaacccacaccgccgacctatgaaacagaaaagccgttggagccagcacctgttgagccaagctatgaagcagagccaacgccaccgacaccaacaccagatcaaccagaaccaaacaaacctgttgagccaacttatgaggttattccaacaccgccgactgatcctgtttatcaagatcttccaacacctccatctgtaccaactgttcatttccattactttaaactagctgttcagccgcaggttaacaaagaaattagaaacaataacgatattaatattgacagaactttggtggctaaacaatctgttgttaagttccagctgaagacagcagatctccctgctggacgtgatgaaacaacttcctttgtcttggtagatcccctgccatctggttatcaatttaatcctgaagctacaaaagctgcaagccctggctttgatgtcacttatgataatgcaactaatacagtcaccttcaaggcaactgcagcaactttggctacgtttaatgctgatttgactaagtcagtggcaacgatttatccaacagtggtcggacaagttcttaatgatggcgcaacttataagaataatttcacgctcacagtcaatgatgcttatggcattaaatccaatgttgttcgggtgacaactcctggtaaaccaaatgatccagataatccaaataataattatattaaaccaactaaggttaataaaaacgaaaatggcgttgttattgatggtaaaacagttcttgccggttcaacgaattattatgagctaacttgggatttggatcaatataaaaacgaccgctcttcagcagataccattcaaaaaggattttactatgtagatgattatccagaagaagcgcttgaattgcgtcaggatttagtgaagattacagatgctaatggtaatgaagttactggtgttagtgtggataattatactaatcttgaagcagcccctcaagaaattagagatgttctttctaaggcaggaattagacctaaaggtgctttccaaattttccgtgccgataatccaagagaattttatgatacttatgtcaaaactggaattgatttgaagattgtatcaccaatggttgttaaaaaacaaatgggacaaacaggcggcagttatgaaaatcaagcttaccaaattgactttggtaatggttatgcatcaaatatcattatcaataatgttcctaagattaaccctaagaaagatgtgaccttaacacttgatccggctgatacaaataatgttgatggtcagactattccacttaatacagtctttaattaccgtttgattggtggcattatccctgcagatcactcagaagaactctttgaatacaatttttatgatgattatgatcaaacaggagatcactatactggtcagtataaagtttttgctaaggttgatatcacttttaaagacggttctattatcaagtcaggtgctgagttaactcagtatacgacagcggaagttgataccgctaaaggtgctatcacaattaagttcaaggaagcctttctgcgttctgtttcaattgattcagccttccaagctgaaagttatatccaaatgaaacgtattgcggttggtacttttgaaaatacttatattaatactgtcaatggggtaacttacagttcaaatacagtgaaaacaactactcctgaggatcctacagaccctactgatccgcaagatccatcatcaccgcggacttcaactgtaattaactacaaacctcaatcaactgcttatcaaccaagctctgttcaagaaacattaccaaatacgggagtaacaaacaatgcttatatgcctttacttggtattattggcttagttactagttttagtttgcttggcttaaaggctaagaaagattgacagcat
